United States Patent Application Publication US 2026/0191920 A1 - sequence listing, part 11

SEQ ID NO: 51546 - protein, 375 aa, Altererythrobacter ishigakiensis
  REGION 1..375: note = tr|A0A562UWF5|A0A562UWF5_9SPHN Queuine tRNA-ribosyltransferase OS=Altererythrobacter ishigakiensis OX=476157 GN=tgt PE=3 SV=1
MTERFKFSINATDGRARTGRIEMQRGDIRTPAFMPVGTAATVKAMKPETVREIGADIILGNTYHLMLRPGAERVARLGGLHQFMNWQRPILTDSGGYQVMSLSELRKLTEQGVEFRSHIDGSKHMLTPERSMEIQRLLGSDIVMAFDECPRADQPRDVIAVSMELSMRWAKRSRDGFDSGEEHAAQSALFGIQQGALDEDLRKISAQKLTDIGFDGYSVGGLAVGEGQDAMFATLDFAPDQLPYDKPRYLMGVGKPDDLVGAVERGIDMFDCVLPTRSGRNGQAFTWNGPLNLRNAKHAEDTGPLDEKCTCNVCQTYSRAYLHHLQKSGEILGAMLVTEHNLSFYQQLMQGMRDAISESRFDAFASDFRREYLSA

SEQ ID NO: 51547 - protein, 273 aa, Altererythrobacter marensis
  REGION 1..273: note = tr|A0A2W4YKN2|A0A2W4YKN2_9SPHN Queuine tRNA-ribosyltransferase (Fragment) OS=Altererythrobacter marensis OX=543877 GN=tgt PE=3 SV=1
MPEPITPDADNARPRFAFTIAARDGRARTGTIVMRRGEIRTPAFMPVGTAATVKAMKPEAVRATGADIILGNTYHLMLRPGAERVARLGGLHAFMNWQRPILTDSGGYQVMSLSELRKLTEDGVEFRSHLDGSRHMLSPERSMEIQRLLGSDIVMAFDECPRADRPLVEIGASMELSMRWAARSRSAFDAGGAHAEGAALFGIQQGALDEGLRARSAEALRAIGFDGYAIGGLAVGEGQEAMFATLDFAPAMLPEDRPRYLMGVGKPDDLVGA

SEQ ID NO: 51548 - protein, 375 aa, Altererythrobacter marensis
  REGION 1..375: note = tr|A0A0G3X5U3|A0A0G3X5U3_9SPHN Queuine tRNA-ribosyltransferase OS=Altererythrobacter marensis; OX = 543877 GN=tgt PE=3 SV=1
MAAPRFAFRVDAVDDKARTGAIAMRRGEIRTPAFMPVGTAATVKAMKPETVRTTGADILLGNTYHLMLRPGAERVARLGGLHAFMNWDRPILTDSGGYQVMSLAALRKLDEDGVQFRSHIDGARHMLSPERSMEIQRLLGSDIVMAFDECPRADRPRDEIAASMELSMRWARRSRDAFDSGGEHAEGAALFGIQQGALDEDLRRVSAEKLIDIGFDGYAVGGLAVGEGQEAMFATLDFAPDMLPQDRPRYLMGVGKPDDLVGAVERGIDMFDCVLPTRSGRNGQAFTWNGPLNLRNARHAEDTAPLDERCKCSVCASYSRAYLHHLHKAGEILGAMLTTEHNLAFYQQLMEAMRQAIATHSFTQFAIDFRRDYLR

SEQ ID NO: 51549 - protein, 378 aa, Altererythrobacter namhicola
  REGION 1..378: note = tr|A0A1C7D8V3|A0A1C7D8V3_9SPHN Queuine tRNA-ribosyltransferase OS=Altererythrobacter namhicola; OX = 645517 GN=tgt PE=3 SV=1
MASAPRFQFDIAATDGKARTGTIRMQRGDIRTPAFMPVGTAATVKAMKPEAVRATGADIILGNTYHLMLRPGAERMAKLGGLHKFMNWHRPILTDSGGYQVMSLSDLRKLTEEGVEFRSHIDGSKHMLTPERSMEIQRLLGSDIVMAFDECPRADQPRDVIASSMEMSMRWAKRSRDAFDAGEAHAAGAALFGIQQGALDEELRGQSAEALREIGFDGYAIGGLAVGEGQEAMFATLDFAPGQLPEDRPRYLMGVGKPDDLVGAVERGVDMFDCVLPSRSGRNGQAFTWNGPLNLRNARFAEDLAPLDERCACPTCGTYSRAYLHHLVKSQEILGAVLMTEHNIGFYQQLMQAMRDAIGEGRFAAFAADFQRDYLGAQ

SEQ ID NO: 51550 - protein, 374 aa, Altererythrobacter sp.
  REGION 1..374: note = tr|A0A420ECG3|A0A420ECG3_9SPHN Queuine tRNA-ribosyltransferase OS=Altererythrobacter sp. HN-Y73; OX = 2320269 GN=tgt PE=3 SV=1
MTRFSFAIHARSGKARTGTISMKRGEIRTPAFMPVGTAATVKAMKPESVRATGADIILGNTYHLMLRPGAERIARLGGLHKFMNWKRPILTDSGGYQVMSLSDLRKLTEKGVEFRSHLDGSKHMLTPERSMEIQRLLDSDIVMAFDECPRADQPRDVIETSMEMSMRWARRSRDGFDSGGEHASRSALFGIQQGALDEELRKRSADALIDIGFDGYAIGGLAVGEGQEAMFATLDFAPGQLPDDRPRYLMGVGKPDDLVGAVERGVDMFDCVLPSRSGRNGQAFTWNGPLNMRNARFGEDSGPIDERCACPTCGTYSRAYLHHLIKSGEILGAMLMTEHNISFYQQLMQAMRQAIAENRFARFAADFRHDYCRK

SEQ ID NO: 51551 - protein, 392 aa, Altererythrobacter sp.
  REGION 1..392: note = tr|A0A369QAB6|A0A369QAB6_9SPHN Queuine tRNA-ribosyltransferase OS=Altererythrobacter sp. HME9302; OX = 2161824 GN=tgt PE=3 SV=1
MTSAAPDPAAPTASTTPRPRFQFSIDAQDGAARRGTIRMRRGDIRTPAFMPVGTAATVKGMKPEAVRGTGADIILGNTYHLMLRPGAERMARLGGLHGFMNWPRPILTDSGGYQVMSLSDLRKLTEEGVEFRSHLDGSKHMLTPERSMEIQRLLGSDIVMAFDECPRADQPREAIAASMELSMRWAKRSRDAFDAGGDHAKNAALFGIQQGALDEELRGRSAAALREIGFDGYAIGGLAVGEGQEAMFATLNFAPGQLPEDAPRYLMGVGKPDDLVGAVERGVDMFDCVLPTRSGRNGQAFTWNGPLNLRNARFAEDTGPLDERCSCPTCATYSRAYLHHLVKSGEMLGAMLVTEHNLSFYQQLMQAMRDAIGAGRFAGFAAEFRRDYLTKR

SEQ ID NO: 51552 - protein, 377 aa, unidentified
  source 1..377: note = Altererythrobacter xiamenensis
  REGION 1..377: note = tr|A0A1Y6FI76|A0A1Y6FI76_9SPHN Queuine tRNA-ribosyltransferase OS=Altererythrobacter xiamenensis; OX = 1316679 GN=tgt PE=3 SV=1
MSTRFDFEIHATDGKARTGRIRMQRGEIRTPAFMPVGTAATVKAMKPETVREIGADIILGNTYHLMLRPGAERVARLGGLHQFMNWERPILTDSGGYQVMSLSELRRLSEEGVEFRSHIDGSKHMLTPERSMEIQRLLGSDIVMAFDECPRADQSRDVIASSMELSMRWAKRSREGFDAGEEHAARSALFGIQQGALDEELRRISAEKLTEIGFDGYAVGGLAVGEGQEAMFATLEFAPGQLPEDKPRYLMGVGKPDDLVGAVERGIDMFDCVLPTRSGRNGQAFTWNGPLNLRNARHAEDTDPLDERCSCSVCGTYSRAYLHHLQKSGEILGAMLVTEHNLAFYQQLMQAMRDAIAAGTFATFASDFRRDYLSKDD

SEQ ID NO: 51553 - protein, 379 aa, unidentified
  source 1..379: note = Alteribacillus bidgolensis
  REGION 1..379: note = tr|A0A1G8N6W5|A0A1G8N6W5_9BACI Queuine tRNA-ribosyltransferase OS=Alteribacillus bidgolensis; OX = 930129 GN=tgt PE=3 SV=1
MAAVTYELIKTCKQSGARLGKIHTPHGTIDTPIFMPVGTLATVKTLSPEELNDMAAQIILSNTYHLWLRPGEDIIAEAGGLHSFMNWDKPILTDSGGYQVFSLSKLRDIKEEGVHFRNHISGEKLFLSPEKAMNIQNALGPDIMMAFDECPPYPAERDYMKASVERTTRWAERCLEAHQRPIDQALFGIVQGGEYEDLRKQSANDLISLDFPGYAVGGLSVGEPKNVMNEVLDFTTPLLPENKPRYLMGVGSADSLIDGAIRGIDMFDCVLPTRIARNGTCMTSRGRLVVRNAKYTRDFRPLDDHCDCYTCKNYSRAYIRHLVKCNETFGFRLTSYHNLYFLLKLMKQVREAIEDDRLLDFKEEFFEQYGFYSQNAKNF

SEQ ID NO: 51554 - protein, 379 aa, unidentified
  source 1..379: note = Alteribacillus iranensis
  REGION 1..379: note = tr|A0A1I1Z669|A0A1I1Z669_9BACI Queuine tRNA-ribosyltransferase OS=Alteribacillus iranensis; OX = 930128 GN=tgt PE=3 SV=1
MAAIEYELIKTCQQSGARLGKIHTPHGSIETPIFMPVGTLATVKTISPDELNDMAAQIILSNTYHLWLRPGEDIIHEAGGLHTFMNWDKPILTDSGGFQVFSLSKLRDIQEEGVHFRNHISGEKLFLSPEKAMAIQNALGSDIMMAFDECPPYPAEESYMKASVERTSRWAERCLEAHGRPDEQGLFGIVQGGEYESLRKQSAQDLVSLDFPGYAVGGLSVGEPKTVMNEVLEFTTPMLPSNKPRYLMGVGSADSLIDGAIRGIDMFDCVLPTRIGRNGTCMTSSGRLVVRNAKYARDFRPIDEECDCYTCKNYSRAYIRHLVKCNETFGFRLTSYHNLYFLLKLMENVREAIQNDRLLDYREEFFEQYGFNKENAKNF

SEQ ID NO: 51555 - protein, 379 aa, unidentified
  source 1..379: note = Alteribacillus persepolensis
  REGION 1..379: note = tr|A0A1G8DHD9|A0A1G8DHD9_9BACI Queuine tRNA-ribosyltransferase OS=Alteribacillus persepolensis; OX = 568899 GN=tgt PE=3 SV=1
MAAISYELIKTCQQSGARLGKIHTPHGSIDTPIFMPVGTLATVKTLSPNELKDMNAQIILSNTYHLWLRPGEDIISEAGGLHTFMNWDRPILTDSGGYQVFSLSKLRDIKEEGVHFRNHISGEKLFLSPEKAMQIQNALGPDIMMAFDECPPYPAGRDYMKASVERTSRWAERCLEAHQRPNEQALFGIVQGGEYEDLRKQSANDLISLDFPGYAVGGLSVGEPKDVMNRVLEFTTPLLPKDKPRYLMGVGSADSLIDGAIRGIDMFDCVLPTRIARNGTCMTTNGRLVVRNAKYARDFKPIDEHCDCYACRNYSRAYIRHLVKCNETFGFRLTSYHNLHFLLTLMQRVRKAILEDRLLDFREEFFEQYGFNKENAKNF

SEQ ID NO: 51556 - protein, 376 aa, unidentified
  source 1..376: note = Alteromonadaceae bacterium
  REGION 1..376: note = tr|A0A495D9Q2|A0A495D9Q2_9ALTE Queuine tRNA-ribosyltransferase OS=Alteromonadaceae bacterium 2052S.S.stab0a.01 OX=1304900 GN=tgt PE=3 SV=1
MNTTFMQFELDTTQGLARRGRLIFPRGTVETPAFMPVGTYGTVKGMLPRDIEAIGAQIILGNTFHLMLRPGTEVIKAHGDLHDFMQWSGPILTDSGGFQVFSLGDIRKITEAGVKFRSPIDGSEVFLDPERAIQVQRDLGSDIVMIFDECTPYPATEKEARDSMQLSLRWAKRSKVAHGASPSALFGIVQGGMYEGLRSESLAGLTEIGFDGYAIGGLSVGEPKADMIRILDHLGPRMPADKPRYLMGVGKPEDIVEGVCRGIDMFDCVMPTRNARNGHLFTRAGVIKIRNATHRHDTGPLDPSCDCYTCSNFSRAYLHHLDKCGEILGAQLNTIHNLRHYQLIMQELRDAIAAGRLNEYVNEFYDRQNKTRFRVE

SEQ ID NO: 51557 - protein, 370 aa, unidentified
  source 1..370: note = Alteromonadaceae bacterium
  REGION 1..370: note = tr|A0A424TWT7|A0A424TWT7_9ALTE Queuine tRNA-ribosyltransferase OS=Alteromonadaceae bacterium TMED7 OX=1986650 GN=tgt PE=3 SV=1
MQFELLHTDGRARRGKLVFERGEVETPAFMPVGTYGTVKGMTPEELADSGAHICLGNTFHLMLRPGTGIIKEHGDLHDFMHWQKPILTDSGGFQVFSLGDLRKITEEGVTFRSPINGEKILLTPEKSMEVQRDLGSDIVMIFDECTPYPATQQEARISMELSLRWARRSKDAHGDNPSALFGIIQGGMYEDLRDISLAGLEDIGFDGYAIGGLSVGEPKEDMIRIIEHTAPKIPEHKPRYLMGVGKPEDIVEAVRRGIDMFDCVMPTRNARNGHLFVTEGVIKIRNAKHKHDTGPLDENCDCYTCKNYSRSYLHHLDKCNEILGARLNTIHNLRYYQRVMQGLRDAIASNTLDQFVSEFYAQKNMPVPAL

SEQ ID NO: 51558 - protein, 374 aa, unidentified
  source 1..374: note = Alteromonadales bacterium
  REGION 1..374: note = tr|A0A2N0WU83|A0A2N0WU83_9GAMM Queuine tRNA-ribosyltransferase OS=Alteromonadales bacterium alter-6D02 OX=2058087 GN=tgt PE=3 SV=1
MKFELKNTDGRARRGQLQFERGTVETPAFMPVGTYGTVKGMTPEEVSDSKAEILLGNTFHLWLRPGMEVMREHGGLHNFMNWQGPILTDSGGFQVFSLGAMRKITEEGVHFRSPINGEKVFMDAEVSMEIQYDLNSDVVMIFDECTPYPATWEEAKDSMEMSLRWAQRSRDKFDQLENPNALFGIVQGGVYEDLRDVSLAGLTDIGFDGYAVGGLAVGEPKEDMHRILRHVLPKLPTDKPRYLMGVGKPEDLVEGVRRGVDMFDCVMPTRNARNGHLFTTTEIVKIRNAKHKHDTSPLDSECDCYTCKNYTRGYLYHLDKCNEILGARLNTIHNLRFYQRVMQELRDAIEQNRLEDYVQEFYARQGKEVPELDF

SEQ ID NO: 51559 - protein, 375 aa, unidentified
  source 1..375: note = Alteromonadales bacterium
  REGION 1..375: note = tr|A0XWQ7|A0XWQ7_9GAMM Queuine tRNA-ribosyltransferase OS=Alteromonadales bacterium TW-7; OX = 156578 GN=tgt PE=3 SV=1
MKFELDRTDGKARRGRLIFDRGVIETPAFMPVGTYGTVKGMTPDEVKATGAQICLGNTFHLMLRPGTEIIKQHGDLHDFMNWDFPILTDSGGFQVFSLGAMRKITEEGVLFQSPVNGDQIMMSPEKSMEVQRDLGSDIVMIFDECTPYPATEKEAKDSMELSLRWAKRSKEGHGDNPSALFGIIQGGMYPELRAQSQAGLEEIGFDGYALGGLSVGEPKNEMMNILDHCAYKMPENKPRYLMGVGKPEDLVESVRRGIDMFDCVMPTRNARNGHLFITTGIIKIRNAVHKTDTGPLDPDCDCHTCKNYSRAYLHHLDKCNEILGARLNTIHNLRYYQRVMEGLRNAISEGKLEEFVKDFYARRGQEVPELADIKN

SEQ ID NO: 51560 - protein, 370 aa, unidentified
  source 1..370: note = Alteromonas aestuariivivens
  REGION 1..370: note = tr|A0A3D8MFM8|A0A3D8MFM8_9ALTE Queuine tRNA-ribosyltransferase OS=Alteromonas aestuariivivens; OX = 1938339 GN=tgt PE=3 SV=1
MQFELLNTDGAARRGRLVFERGVVETPAFMPVGTYGTVKGMTPEELADSGAHICLGNTFHLMLRPGTGIIRQHGDLHDFMHWDKPILTDSGGFQVFSLGDLRKITEEGVTFRSPINGEKILLTPEKSMEVQRDLGSDIVMIFDECTPYPATEQEARLSMEMSLRWAKRSKDAHGENPSALFGIIQGGMYEDLRDISLAGLEEIGFDGYAIGGLSVGEPKEDMIRIIQHTAPQIPADKPRYLMGVGKPEDIVEAVRRGIDMFDCVMPTRNARNGHLFVTEGVIKIRNAKHRNDTSPLDENCDCYTCKNYSRSYLHHLDKCNEILGARLNTIHNLRYYQRVMQGLRDAIAAGELDEFVKTFYAQKDMPVPAL

SEQ ID NO: 51561 - protein, 370 aa, unidentified
  source 1..370: note = Alteromonas australica
  REGION 1..370: note = tr|A0A075NXY5|A0A075NXY5_9ALTE Queuine tRNA-ribosyltransferase OS=Alteromonas australica; OX = 589873 GN=tgt PE=3 SV=1
MQFELLKTDGRARRGRLVFERGVVETPAFMPVGTYGTVKGMTPEELDDSGAHICLGNTFHLMLRPGTGIIRQHGDLHDFMNWDKPILTDSGGFQVFSLGDLRKITEEGVTFRSPINGEKILLTPEKSMEVQRDLGSDIVMIFDECTPYPATEQEARVSMEMSLRWAKRSKEAHGDNPAALFGIIQGGMYEGLRDVSLAGLEAIGFDGYAIGGLSVGEPKEDMIRIIDHTAPQIPEDKPRYLMGVGKPEDLVESVRRGIDMFDCVMPTRNARNGHLFVTEGIVKIRNAKHRNDTSPLDEKCDCYTCKNYSRSYLHHLDKCNEILGARLNTIHNLRYYQRVMQGLRDAIDAGTLEQFVQEFYEQKGLPVPAL

SEQ ID NO: 51562 - protein, 370 aa, unidentified
  source 1..370: note = Alteromonas confluentis
  REGION 1..370: note = tr|A0A1E7ZAY1|A0A1E7ZAY1_9ALTE Queuine tRNA-ribosyltransferase OS=Alteromonas confluentis; OX = 1656094 GN=tgt PE=3 SV=1
MQFELLKTNGKARRGRLVFDRGVVETPAFMPVGTYGTVKGMTPEELKDSGAHICLGNTFHLMLRPGTGIIKQHGDLHDFMHWDKPILTDSGGFQVFSLGDLRKITEEGVTFRSPINGEKILLTPEKSMEVQRDLGSDIVMIFDECTPYPATEQEARISMELSLRWAKRSKEAHGDNPSALFGIVQGGMYEGLRDISLAGLEDIGFDGYAIGGLSVGEPKEDMIRIIEHTAPKIPENKPRYLMGVGKPEDLVESVRRGIDMFDCVMPTRNARNGHLFVTEGVIKIRNAKHRNDTSPLDENCDCYTCKNYSRSYLHHLDKCNEILGARLNTIHNLRYYQRVMQGLRDAIDADDLEGFVKEFYAQKDMPVPAL

SEQ ID NO: 51563 - protein, 370 aa, unidentified
  source 1..370: note = Alteromonas lipolytica
  REGION 1..370: note = tr|A0A1E8FDU3|A0A1E8FDU3_9ALTE Queuine tRNA-ribosyltransferase OS=Alteromonas lipolytica; OX = 1856405 GN=tgt PE=3 SV=1
MQFELLHTDGRARRGKLVFERGVVETPAFMPVGTYGTVKGMTPEELEDSGAHICLGNTFHLMLRPGTGIIKQHGDLHDFMHWEKPILTDSGGFQVFSLGDLRKITEEGVTFRSPINGEKILLTPEKSMEVQRDLGSDIVMIFDECTPYPATEQEARISMELSLRWAKRSKDAHGDNPSALFGIIQGGMYEDLRDVSLAGLEDIGFDGYAIGGLSVGEPKEDMIRIIEHTAPKIPEHKPRYLMGVGKPEDIVEAVRRGIDMFDCVMPTRNARNGHLFVTEGVIKIRNAKHKNDTGPLDEKCDCYTCKNYSRSYLHHLDKCNEILGARLNTIHNLRYYQRVMQGLRDAIESNSLDEFVSEFYAQKNMPVPAL

SEQ ID NO: 51564 - protein, 159 aa, Alteromonas macleodii
  REGION 1..159: note = tr|A0A351U8H5|A0A351U8H5_ALTMA tRNA guanosine(34) transglycosylase Tgt (Fragment) OS=Alteromonas macleodii; OX = 28108 GN=tgt PE=4 SV=1
GLAVGETQEEMFNVLDHIKNFMPEDKPRYLMGVGKPEDLVESVRRGIDMFDCVMPTRNARNGHLFVTEGVVKIRNAKHRNDTSPLDENCDCYTCKNYSRSYLHHLDKCNEILGARLNTIHNLRYYQRVMQGLRDAIDAGTLDEFVQEFYEQKGLPVPAL

SEQ ID NO: 51565 - protein, 370 aa, Alteromonas macleodii
  REGION 1..370: note = tr|A0A126Q3X9|A0A126Q3X9_ALTMA Queuine tRNA-ribosyltransferase OS=Alteromonas macleodii OX=28108; GN = tgt PE=3 SV=1
MQFELLKTEGRARRGRLVFERGVVETPAFMPVGTYGTVKGMTPEELKDSGAHICLGNTFHLMLRPGTGIIRQHGDLHDFMNWDKPILTDSGGFQVFSLGDLRKITEEGVTFRSPINGEKILLTPEKSMEVQRDLGSDIVMIFDECTPYPATEQEARVSMEMSLRWAKRSKEAHGDNPAALFGIIQGGMYEGLRDVSLAGLEAIGFDGYAIGGLSVGEPKEDMIRIIDHTAPKIPEDKPRYLMGVGKPEDLVESVRRGIDMFDCVMPTRNARNGHLFVTEGVVKIRNAKHRNDTSPLDENCDCYTCKNYSRSYLHHLDKCNEILGARLNTIHNLRYYQRVMQGLRDAIDAGTLDEFVQEFYEQKGLPVPAL

SEQ ID NO: 51566 - protein, 370 aa, Alteromonas marina; identical to SEQ ID NO: 51565
  REGION 1..370: note = tr|A0A0B3YHL8|A0A0B3YHL8_9ALTE Queuine tRNA-ribosyltransferase OS=Alteromonas marina OX=203795; GN = tgt PE=3 SV=1

SEQ ID NO: 51567 - protein, 370 aa, unidentified; identical to SEQ ID NO: 51565
  source 1..370: note = Alteromonas mediterranea
  REGION 1..370: note = tr|S5CBF8|S5CBF8_9ALTE Queuine tRNA-ribosyltransferase OS=Alteromonas mediterranea UM7; OX = 1300258 GN=tgt PE=3 SV=1

SEQ ID NO: 51568 - protein, 370 aa, unidentified; identical to SEQ ID NO: 51565
  source 1..370: note = Alteromonas mediterranea
  REGION 1..370: note = tr|T2DM54|T2DM54_ALTMD Queuine tRNA-ribosyltransferase OS=Alteromonas mediterranea (strain DSM 17117 / CIP 110805 / LMG 28347 / Deep ecotype); OX = 1774373 GN=tgt PE=3SV=1

SEQ ID NO: 51569 - protein, 370 aa, unidentified
  source 1..370: note = Alteromonas naphthalenivorans
  REGION 1..370: note = tr|F5ZAV0|F5ZAV0_ALTNA Queuine tRNA-ribosyltransferase OS=Alteromonas naphthalenivorans; OX = 715451 GN=tgt PE=3 SV=1
MQFELLKTDGKARRGRLVFDRGVVETPAFMPVGTYGTVKGMTPEELEDSGAHICLGNTFHLMLRPGTGVIRQHGDLHDFMHWDKPILTDSGGFQVFSLGDLRKITEEGVTFRSPINGEKILLTPEKSMEVQRDLGSDIVMIFDECTPFPATEQEARVSMEMSLRWAKRSKESHGDSPAALFGIIQGGMYEGLRDVSLAGLEAIGFDGYAIGGLSVGEPKEDMIRIIDHTAPQIPEDKPRYLMGVGKPEDIVEAVRRGIDMFDCVMPTRNARNGHLFVTDGVVKIRNAVHRNDTSPLDENCDCYTCKNYSRSYLHHLDKCNEILGARLNTIHNLRYYQRVMQGLRDAIEADSLDEFVHTFYEQKNMPVPAL

SEQ ID NO: 51570 - protein, 370 aa, unidentified
  source 1..370: note = Alteromonas pelagimontana
  REGION 1..370: note = tr|A0A2A6ATN0|A0A2A6ATN0_9ALTE Queuine tRNA-ribosyltransferase OS=Alteromonas pelagimontana; OX = 1858656 GN=tgt PE=3 SV=1
MQFELLNTDGKARRGKLVFERGVVETPAFMPVGTYGTVKGMTPEELSDSGAHICLGNTFHLMLRPGTSIIRQHGDLHDFMHWDKPILTDSGGFQVFSLGDLRKITEEGVTFRSPINGEKILLTPEKSMDVQRDLGSDIVMIFDECTPYPATEQEARLSMELSLRWAKRSKSAHGDNPSALFGIIQGGMYESLRDVSLKGLEDIGFDGYAIGGLSVGEPKEDMIRIIDHTAPKIPQNKPRYLMGVGKPEDIVEAVRRGIDMFDCVMPTRNARNGHLFVTEGVVKIRNAKHRTDTAALDENCDCYTCKNYSRSYLHHLDKCNEILGARLNTIHNLRYYQRVMQGLRDAIAQEELDAFVETFYEQKNMPVPAL

SEQ ID NO: 51571 - protein, 370 aa, Alteromonas sp.; identical to SEQ ID NO: 51561
  REGION 1..370: note = tr|A0A2D5BX14|A0A2D5BX14_ALTSX Queuine tRNA-ribosyltransferase OS=Alteromonas sp. OX=232 GN=tgt; PE = 3 SV=1

SEQ ID NO: 51572 - protein, 371 aa, Alteromonas sp.
  REGION 1..371: note = tr|A0A3N5Y5W5|A0A3N5Y5W5_9ALTE Queuine tRNA-ribosyltransferase OS=Alteromonas sp. U0105; OX = 2259342 GN=tgt PE=3 SV=1
MQFELDKTDGKARRGRLVFDRGVVETPAFMPVGTYGTVKGMTPEELADSGAHICLGNTFHLMLRPGTGIIREHGDLHDFMHWDKPILTDSGGFQVFSLGDLRKITEEGVTFRSPINGEKILLTPEKSMEVQRDLGSDVVMIFDECTPYPATEQEARLSMEMSLRWAKRSKDAHGDNPAALFGIIQGGMYENLRDVSLAGLEDIEFDGYAIGGLSVGEPKEDMIRIIEHTAPKIPENKPRYLMGVGKPEDIVEAVRRGIDMFDCVMPTRNARNGHLFVTEGVVKIRNAKHKTDTRPLDENCDCYTCKNYSRSYLHHLDKCNEILGARLNTIHNLRYYQRVMEGLRDAIDKGELDAFVEEFYANKNMPVPALS

SEQ ID NO: 51573 - protein, 370 aa, Alteromonas stellipolaris
  REGION 1..370: note = tr|A0A0S1YHD9|A0A0S1YHD9_9ALTE Queuine tRNA-ribosyltransferase OS=Alteromonas stellipolaris LMG 21856 OX=1160720 GN=tgt PE=3 SV=1
MQFELLKTDGKARRGRLVFDRGVVETPAFMPVGTYGTVKGMTPEELEDSGAHICLGNTFHLMLRPGTGVIRQHGDLHDFMHWDKPILTDSGGFQVFSLGDLRKITEEGVTFRSPINGEKILLTPEKSMEVQRDLGSDIVMIFDECTPYPATEQEARVSMEMSLRWAKRSKESHGDSPAALFGIIQGGMYEGLRDVSLAGLEAIGFDGYAIGGLSVGEPKEDMIRIIDHTAPQIPEDKPRYLMGVGKPEDIVEAVRRGIDMFDCVMPTRNARNGHLFVTDGVVKIRNAVHRNDTSPLDGNCDCYTCKNYSRSYLHHLDKCNEILGARLNTIHNLRYYQRVMQGLRDAIEADSLDDFVHTFYEQKNMPVPAL

SEQ ID NO: 51574 - protein, 376 aa, unidentified
  source 1..376: note = Altibacter sp.
  REGION 1..376: note = tr|A0A2D9N7L2|A0A2D9N7L2_9FLAO Queuine tRNA-ribosyltransferase OS=Altibacter sp. OX=2024823; GN = tgt PE=3 SV=1
MQFTLKGKDTQSQARAGTITLDHGTVETPIFMPVGTVGTVKGVHQRELTQEIDPDIILGNTYHLYLRPQIDILEKAGGIHKFMNWDRSILTDSGGYQVYSLSANRKIKEEGVKFKSHIDGSYHVFTPENVMEIQRSIGADIIMAFDECTPYPCDYTYAKRSMHMTHRWLERCLKHLKKTPFKYDYEQTFFPIVQGSTYKDLRKQSAEYIASVGAEGNAIGGLSVGEPAEEMYEMTAVVTEILPQDKPRYLMGVGTPINILENIALGIDMFDCVMPTRNGRNGMLFTAHGTINIKNKKWEADFSPIDEMNLTWVDTAYSKAYVRHLFTVNEMLGRQIATIHNLGFYLWLVREARKHILAGDFTSWKNKMVVQMDKRL

SEQ ID NO: 51575 - protein, 371 aa, Alysiella crassa
  REGION 1..371: note = tr|A0A376BUJ5|A0A376BUJ5_9NEIS Queuine tRNA-ribosyltransferase OS=Alysiella crassa OX=153491; GN = tgt PE=3 SV=1
MLKFTLHKTDGYARRGTLELNHGKVETPVFMPVGTYGSVKAMTPTDLHNIKAQIILGNTYHLWLRPGLEVIEQFGGLHDFIGWNKPILTDSGGFQVFSLSQMRKLTEDGCTFKSPINGDKLFLSPEISMKIQTVLNSDIVMQLDECTEGNATHAEARKSLQMSLRWAERSKKAFEDLKNPNALFGIIQGAMYEDLREESLLGLEDIDFKGIAIGGLSVGEPKPEMYRMLRAIAPMLPKHKPHYLMGVGTPEDLVYGVAHGVDMFDCVMPTRNARNGWLFTRFGDIKIRNAKHRFDKRPLDESCTCYACQNFSRAYLHHLDKVGEILGAQLCTIHNLHFYQVIMAEMREAIEQGKFADWQAQFHENRARGTD

SEQ ID NO: 51576 - protein, 371 aa, Alysiella filiformis
  REGION 1..371: note = tr|A0A286EG96|A0A286EG96_9NEIS Queuine tRNA-ribosyltransferase OS=Alysiella filiformis DSM 16848; OX = 1120981 GN=tgt PE=3 SV=1
MLKFTLHKKDGHARRGTLELNHGKIETPVFMPVGTYGSVKAMTPTDLHNIKAQIILGNTYHLWLRPGLEVIEQFGGLHQFIGWNKPILTDSGGFQVFSLSEMRKLTEEGCTFKSPINGDKLFLSPEISMKIQTVLNSDIAMQLDECTEGNASHAEAKKSLQMSLRWAERSKKAFEDLKNPNALFGIVQGAMYEDLREESLRGLEEIGFAGLAIGGLSVGEPKPEMYRMIRAVAPILPEHKPHYLMGVGTPEDLVYGVAYGVDMFDCVMPTRNARNGWLFTRFGDIKIKNAKHRMDKRPLDESCTCYTCQNFSRAYLYHLHKVGEILGAQLNTIHNLHFYQVIMAEMREAIEQGKFADWQAQFHENRARGTD

SEQ ID NO: 51577 - protein, 377 aa, unidentified
  source 1..377: note = Amantichitinum ursilacus
  REGION 1..377: note = tr|A0A0N0XLA0|A0A0N0XLA0_9NEIS Queuine tRNA-ribosyltransferase OS=Amantichitinum ursilacus; OX = 857265 GN=tgt PE=3 SV=1
MATTFNGLDFELKATSGGARRGQVTLNHGVVQTPVFMPVGTYGTVKAMTPRDLNEIEAQIILGNTFHLWLRPGTEVISQYGGLHGFMGWDKPILTDSGGFQVFSLGELRKITEEGVKFQSPVNGDKLFLTPEESMRIQRALNSDVVMIFDECTPYPATRQEAADSMRMSARWARRSRDEFDRLENPNALFGIVQGGMYEDLRNESLAGLDEIGFHGMAIGGLSVGEPREEFYRVLAQTAPRLPVHKPRYLMGVGTPEDLVYGVSQGIDMFDCVMPTRNARNGMLFTRFGDIKIKNARHRTDTRPLDETCDCYACRNFSRGYLHHLFRAGEILGAQLNTIHNLRYYQVLMAEMRTAIEEDAFPAFVAQFHSGRARGTE

SEQ ID NO: 51578 - protein, 375 aa, Amaricoccus sp.
  REGION 1..375: note = tr|A0A501WK19|A0A501WK19_9RHOB Queuine tRNA-ribosyltransferase OS=Amaricoccus sp. HB172011; OX = 2589815 GN=tgt PE=3 SV=1
MDRIEFHIAARDGRARTGALRTPRGEIRTPAFMPVGTAATVKAMLPESVRATGADILLGNTYHLMLRPGAERVARLGGLHAFMNWDRPILTDSGGFQVMSLADLRKLTEEGVTFRSHVDGARHFLSPETSMEIQRLLGSDIVMAFDECPALPATEETVAKSMRLSMRWAARSRDAFGDRPGHALFGIQQGGVTRELREESAEALTAIGFDGYAIGGLAVGEGQEAMFGVLDYAPGFLPEDRPRYLMGVGKPDDIVGAVMRGVDMFDCVLPSRSGRTGQVFTRRGVVNIKNARHADDPRPLDETCGCPACRSYSRAYLHHVFKSGEIIASMLLTWHNLHYYQELMAGLRGAIAEGRLAAFAAGFAAERAAGDLPPL

SEQ ID NO: 51579 - protein, 374 aa, unidentified
  source 1..374: note = Aminicella lysinilytica
  REGION 1..374: note = tr|A0A4R6PXI7|A0A4R6PXI7_9FIRM Queuine tRNA-ribosyltransferase OS=Aminicella lysinilytica; OX = 433323 GN=tgt PE=3 SV=1
MTNAVTYELLHRDKKTGARRGVIHTPHGDIQTPVFMPVGTQGAVKAMRPEQVADMGAEIILANTYHLYLRPGHEIVKEAGGLHKFMNWDRAILTDSGGFQVFSLGQLRKITEEGVSFQSHIDGSRHMLSPEKAVEIQNALGSDIMMAFDECAPYPADRSYIKDSMERTCRWLERCKAAHKDVERQSLFGIMQGGMYKDLRRESAERIVDMDLPGYSIGGLSVGEPKELMLDILDDCVDLLPEDKPRYLMGVGTPDYLFEGVERGLDMFDCVEPTRIARHGLATTSHGRINIKNAKFERDFTPLDPECDCYTCRNYSRAYIRHMMKSGEMMSAMLISNHNLHFLIHMMAGIREAIEEDRFTEFKKEFYEKYGGFK

SEQ ID NO: 51580 - protein, 373 aa, unidentified
  source 1..373: note = Aminipila sp.
  REGION 1..373: note = tr|A0A410PV08|A0A410PV08_9FIRM Queuine tRNA-ribosyltransferase OS=Aminipila sp. JN-39 OX=2507160; GN = tgt PE=3 SV=1
MKHAVTYELLKKDSRTKARRGRVHTPHGTIETPVFMPVGTAATVKAMRPEQVKEMGAQIILSNTYHLYLRPGHEIVREAGGLHKFMNWDRAILTDSGGFQVFSLGALRKITEEGVQFRSHIDGSKHMLSPEKSMEIQNALGSDIMMAFDECAPYPSDRDYVKNSLERTTRWLKRCKEYHKDTERQSLFGIMQGGMYKDLRYESAMQVVDLDLPGYAIGGLSVGEPKELMLDILDDCVDYLPEEKARYLMGVGSPDYLFEGVERGVDMFDCVLPTRIARHGMAMTSYGRVNIKNAKYERDFEALDPECDCYTCRNYSKAYLRHLYKCDEMLSAMLLSNHNLHFLVNMMGNIRKAIEEDRFLEYKNEFYTKYGRF

SEQ ID NO: 51581 - protein, 383 aa, unidentified
  source 1..383: note = Aminivibrio pyruvatiphilus
  REGION 1..383: note = tr|A0A4R8M599|A0A4R8M599_9BACT Queuine tRNA-ribosyltransferase OS=Aminivibrio pyruvatiphilus; OX = 1005740 GN=tgt PE=3 SV=1
MNFPDTAFSFTLDAVCPVTGARAGTLHTPRGDIQTPVFMPVGTQATVKAMAPFELEEMGARIILANTYHLYLRPGADIVAEGGGLHGFMQWKRPILTDSGGFQVFSLSTLNRISDEGVWCRSHHDGTPHVMNPEWSMSVQKQLGSDIAMCFDQCAPWPCSREEAEGAVRRTALWAARSKEAHAREWQGERRQALFGIVQGSVWEDLRLRSAKDIIPMDFPGYAVGGLSVGEPHGDMYRILDSLKGVLPSGKPRYLMGVGRPDNLVEGVARGIDMFDCVLPTRNGRNGTLFTPYGAVNIKKKQYERDFTPVDPECDCYACRTFTRAYIRHLYRSGEILASRLCSWHNLRFLIRLGEEMRKAILEGRFPEFRRAFLGRFSGGEAE

SEQ ID NO: 51582 - protein, 378 aa, Aminobacter aminovorans
  REGION 1..378: note = tr|A0A380WLC6|A0A380WLC6_AMIAI Queuine tRNA-ribosyltransferase OS=Aminobacter aminovorans; OX = 83263 GN=tgt PE=3 SV=1
MSSEFTFKLLATDGKARRGEITMPRGTIRTPAFMPVGTGGTVKAMYMDQVRGVGADIILGNTYHLMLRPGAERVAKLGGLHDFARWPHPILTDSGGFQVMSLSKLRKISEKGVTFRSHIDGAPYEMSPERSIEIQGLLDSDIQMQLDECTALPSTPKEIQRAMEMSLRWAERCKTAFGDQPGKAMFGIVQGGDIPDMRVRSAQALKALELKGYAVGGLAVGEPQEVMLDMLDITCPELPQEKPRYLMGVGTPDDIIKSVARGIDMFDCVMPTRAGRHGLAYTRRGKVNLRNARHADDPRPLDEESDCPAARDYSRAYLHHLVRSGEALGAMLLTWNNLSYYQHLMSEIRASIEVGRFADQTAEISEGWARGDIPLHNG

SEQ ID NO: 51583 - protein, 378 aa, Aminobacter aminovorans
  REGION 1..378: note = tr|A0A142M8H6|A0A142M8H6_AMIAI Queuine tRNA-ribosyltransferase OS=Aminobacter aminovorans; OX = 83263 GN=tgt PE=3 SV=1
MSSEFTFKLLATDGKARRGEITMPRGTIRTPAFMPVGTGGTVKAMYMDQVRGVGADIILGNTYHLMLRPGAERVAKLGGLHDFARWPHPILTDSGGFQVMSLSKLRKISEKGVTFRSHIDGAPYEMSPERSIEIQGLLDSDIQMQLDECTALPSTPKEIQRAMEMSLRWAERCKTAFGDQPGKAMFGIVQGGDIPDMRVRSAQALTGLELKGYAVGGLAVGEPQEVMLDMLDITCPELPQEKPRYLMGVGTPDDIIKSVARGIDMFDCVMPTRAGRHGLAYTRRGKVNLRNARHADDPRPLDEESDCPAARDYSRAYLHHLVRSGEALGAMLLTWNNLSYYQHLMSEIRASIEAGRFADRTTEISEGWARGDISLHKG

SEQ ID NO: 51584 - protein, 379 aa, Aminobacter sp.
  REGION 1..379: note = tr|A0A316GXR1|A0A316GXR1_9RHIZ Queuine tRNA-ribosyltransferase OS=Aminobacter sp. AP02 OX=2135737; GN = tgt PE=3 SV=1
MSEEFKFNVLATDGKARRGEITMPRGTIRTPAFMPVGTGGTVKAMYMDQVRGVGADIILGNTYHLMLRPGAERVARLGGLHEFARWPHPILTDSGGFQVMSLSKLRKLSEKGVTFRSHIDGAAYEMSPERSIEIQGLLDSDIQMQLDECTALPATPKEIERAMELSLRWADRCKTAFGHQPGKAMFGIVQGGDIPDMRVRSAQALKGLDLKGYAVGGLAVGEPQEVMLDMLDITCPELPQEKPRYLMGVGTPDDIIKSVARGIDMFDCVMPTRAGRHGLAYTRRGKVNLRNARHADDPRPLDEESDCPAARDYSRAYLHHLVKSGEALGAMLLTWNNLSYYQQLMGEIRVSIEAGKFVDRAAEITEGWVRGDLPVHSGL

SEQ ID NO: 51585 - protein, 376 aa, Aminobacter sp.
  REGION 1..376: note = tr|A0A562FI01|A0A562FI01_9RHIZ Queuine tRNA-ribosyltransferase OS=Aminobacter sp. J15 OX=935260; GN = tgt PE=3 SV=1
  VARIANT 223: note = Xaa can be any naturally occurring amino acid
MTEQFSFKVLATDGKARRGEITMPRGTIRTPAFMPVGTGGTVKAMYMDQVRDLGADIILGNTYHLMLRPGAERVARLGGLHEFARWPYPILTDSGGFQVMSLAQLRKLNEQGVTFQSHIDGRRYEMSPERSIEIQGLLDSDIQMQLDECVALPASEKEIERAMELSLRWAERCKVAFGDQPGKAMFGIVQGGDVPRLRERSAEALKAMDLKGYAVGGLAVGEXQEVMLDMLDITCPVLPADKPRYLMGVGTPDDILKSVARGIDMFDCVMPTRAGRHGLAFTRRGKVNLRNARHADDPRPLDEESPCPAARDYSRAYLHHLVKSGEALGAMLLTWNNLSYYQQLMADIRAAIESGRFVERAAEITAGWAAGDIAPL

SEQ ID NO: 51586 - protein, 378 aa, Aminobacterium colombiense
  REGION 1..378: note = tr|D5EDX0|D5EDX0_AMICL Queuine tRNA-ribosyltransferase OS=Aminobacterium colombiense (strain DSM 12261 / ALA-1) OX=572547 GN=tgt PE=3 SV=1
MFEFRLQAQCPVTGARAGEFVTPHGVIKTPVFMPVGTQATVKAMAPFELEEIGAQIILSNTYHLYLRPGADIVEEAGGLHSFMDWHHPILTDSGGFQVFSLATLNRVTDEGVECQSHIDGSRHMMDPEWSMEVQQKLGSDIAMCFDQCLHYPTTKEEAETALARTTRWARRSKDAHTREDQALFGIIQGSVYEDLRRRSAEDITSIGFPGYGIGGLSVGEPHHIMYEMLDVLQHVMPFDKPRYLMGVGHPSNLVEGVARGVDMFDCVLPTRNGRTGTVFVSTGRINIKNQVYARDFTPLDPSCDCYVCRHFTKAYIRHLYKAGEILAARLCSWHNLHFLIKLMEGVRESILNGTFPAFRKNFIEVFHGEGDSVENESL

SEQ ID NO: 51587 - protein, 373 aa, Aminomonas paucivorans
  REGION 1..373: note = tr|E3CUU5|E3CUU5_9BACT Queuine tRNA-ribosyltransferase OS=Aminomonas paucivorans DSM 12260 OX=584708 GN=tgt PE=3 SV=1
MSFRLLAECPVTGARAGEYSTPHGTLRTPVFMPVGTQATVKAMAPFELEQMGAQILLGNTYHLFLRPGEDLVERAGGLHRFMDWPHPILTDSGGFQVFSLAELRTLSDEGVVFRSHRDGSRHLMTPERSVKIQEKLGSDIAMCFDECVPYPSTPEASREGMERTLRWAVRCREAHARPGQDLFGIVQGSVYEDQRVLCARELVRLDFPGYAIGGLSVGESHGEMYRILDCLAPEMPRTKPRYLMGVGHPANLVEGIARGVDLFDCVLPTRNGRNGTVFTSTGRLNVKNQALAEDFRPLDETCDCYVCRHYTRAYLRHLYKAGEILAARLCTWHNLHFLLSLVEGARNAILEGTFPAYREAFHARFDDVREAEA

SEQ ID NO: 51588 - protein, 336 aa, Ammonifex degensii
  REGION 1..336: note = tr|C9R7V6|C9R7V6_AMMDK Queuine tRNA-ribosyltransferase OS=Ammonifex degensii (strain DSM 10501 / KC4) OX=429009 GN=tgt PE=3 SV=1
MPVGTQATVKGLTPDELGALGTQILLCNTYHLYLRPGVSIVEEAGGLHRFMRWSGPILTDSGGFQVLSLTPLRKVTDEGVIFRSHLDGSEHFFTPEKVVDLQERLGPDIAMVLDECPPYPASREEIEKAVKRTSAWAERSRKAWRRKEVTFFGIVQGGVYRDLREKSAEELVALDFPGYAIGGLSVGEPKELTYAVLDWVVPLLPPDKPRYLMGVGTPEDILEGVARGIDMFDCVLPTRLGRHATAFTRRGRINIRRAAYARDFGPLEEGCQCYTCRHYTRAYLHHLFRAEEMLGPRLLTLHNLHFLFRLMERIREAIASGTFHHLYETWLQERGG

SEQ ID NO: 51589 - protein, 365 aa, Ammonifex thiophilus
  REGION 1..365: note = tr|A0A3D8P2Z3|A0A3D8P2Z3_9THEO Queuine tRNA-ribosyltransferase OS=Ammonifex thiophilus OX=444093; GN = tgt PE=3 SV=1
MRFEVLAQEGKARWGRLFTPHGVVDTPVFMPVGTQATVKGLTPEELGALGTQILLCNTYHLYLRPGVSIVEEAGGLHRFMRWFGPILTDSGGFQVLSLAPLRKVTDEGVIFRSHLDGSEHLFTPEKVVDLQERLGPDIAMVLDECPPYPASREEIERAVKRTSAWAERSLKVWRRKEVTFFGIVQGGVYRDLRERSVKELVALDFPGYAIGGLSVGEPKELTYAVLDWVVPLLPPDKPRYLMGVGTPEDILEGVARGVDMFDCVLPTRLGRHATVFTRRGRINIRRAAYARDFGPLEEGCQCYTCRHYTRAYLHHLFRAEEMLGPRLLTLHNLHFLFRLMERIREAIASGTFAHLYETWLRGGGE

SEQ ID NO: 51590 - protein, 376 aa, Ammoniphilus oxalaticus
  REGION 1..376: note = tr|A0A419SIZ1|A0A419SIZ1_9BACL Queuine tRNA-ribosyltransferase OS=Ammoniphilus oxalaticus; OX = 66863 GN=tgt PE=3 SV=1
MAVTYELIKTCKQTGARRGRLHTPHGTIETPIFMPVGTLATVKAMSPEELKEMDAQIILSNTYHLFLRPGHDIVKKAGGLHQFMNWDRPILTDSGGFQVFSLSKLRQIEEEGVHFRSHLSGAKLFLSPERATEIQNDLGADIIMAFDECAPYPAEHDYVKRSLERTTRWLERCIAAHDRSEDQALFGIVQGGMYRDLREQSAKEITSFDLPGYAIGGLSVGEPKSIMDEVLDYTVPLLPAGKPRYLMGVGSPDALIDASIRGIDMFDCVLPTRIARNGTCMTSEGRLVIRNAKFKEDFTPLDPQCDCYTCRNYTKAYIRHLFHADEILGLRLTSYHNLHFLIRLMENVRDAIMNDCLLDFRNEFFEQYGLSEERSF

SEQ ID NO: 51591 - protein, 376 aa, Ammoniphilus sp.
  REGION 1..376: note = tr|A0A4Q1TBN1|A0A4Q1TBN1_9BACL Queuine tRNA-ribosyltransferase OS=Ammoniphilus sp. CFH 90114; OX = 2493665 GN=tgt PE=3 SV=1
MAVKYELLKVCKQTGARRGRLHTPHGTIETPIFMPVGTLATVKAMSPEELKDMNAQIILSNTYHLFLRPGHDIVKKAGGLHQFMNWDRPILTDSGGFQVFSLSNLRKIEEEGVHFRSHLSGAKLFIGPEVAMEIQNALGADIIMAFDECAPYPADHAYVKSSLERTTRWLERCIKAHERPQDQALFGIVQGGMYRDLREQSAREIVPFDLPGYAIGGLSVGEPKALMDEVLEYTVPLLPENKPRYLMGVGSPDALIDGAIRGIDMFDCVLPTRIARNGTCMTSQGRLVIRNAKFKEDFTPLDPNCDCYTCRNYTRAYIRHLFNADEIFGLRLTSYHNLHFLLSLMEKVREAIMEDRLMDFRNEFFAQYGLNEERSF

SEQ ID NO: 51592 - protein, 376 aa, unidentified
  source 1..376: note = Amoebophilaceae bacterium
  REGION 1..376: note = tr|A0A3R7UW84|A0A3R7UW84_9BACT Queuine tRNA-ribosyltransferase OS=Amoebophilaceae bacterium TMED152 OX=1986680 GN=tgt PE=3 SV=1
MEFKLNFKDSKTKARACTLITDHGKVETPIFMPVGTAATIKGVHQTDLKKDINPDIILSNTYHLYLRPSEKIIEKAGGIHKFMNWDRNILTDSGGYQVYSLSNNTKISEEGVKFKSHIDGSSHIFSPERAINIQKSIGADIIMAFDECPPYPCDYSYVQSSMHLTHRWLDRCIKEFSNTPSKYEYNQTLFPIVQGGTYKDLRKRSAEYISSANCHGNAIGGLSVGEPAEEMYEMTDLVCDILPNNKPRYLMGVGTPINLLENISLGVDMFDCVMPSRNARNGMLFTIDGTINIKNKKWKDDFSAIDENNYSFVDLNYSKAYLRHLFISKESLGKQIATLHNLAFYMWLVREARKQIINGSFEKWKTITVKRMNNRI

SEQ ID NO: 51593 - protein, 203 aa, unidentified
  source 1..203: note = Amoebophilaceae bacterium
  REGION 1..203: note = tr|A0A3C1MCK7|A0A3C1MCK7_9BACT tRNA guanosine(34) transglycosylase Tgt (Fragment) OS=Amoebophilaceae bacterium OX=2053498 GN=tgt PE=4 SV=1
MNFEVQRVDPYSQARAGLITTSRGQIHTPIFMPVGTAGTVKAVPQKALYEDIQAEIILGNAYHLYLRPGLEILEAAGGLHQFMGWDKPILTDSGGYQVYSLAQRRKLTEEGVTFRSHIDGSQHTFTPERAVDIQRSIGADVIMALDECTPHPCSYAYAKSSMGLTHRWLKRGVDHFDATIAEHNHYQTLFPIVQGSVYKDLRE

SEQ ID NO: 51594 - protein, 374 aa, unidentified
  source 1..374: note = Amoebophilus asiaticus
  REGION 1..374: note = tr|B3EU64|B3EU64_AMOA5 Queuine tRNA-ribosyltransferase OS=Amoebophilus asiaticus (strain 5a2) OX=452471 GN=tgt PE=3 SV=1
MQFELQHVDASSKARAGIITTAHGKIHTPIFMPVGTAGTVKAVEQRNLHQDVEAEIILGNTYHLYLRPGTQVLDAAAGLHQFINWHKPILTDSGGYQVYSLTQRRKITEQGVTFCSHIDGSKHTFTPENAVDIQRSIGSDIMMVLDECTPYPCTYAYARQSMEMTHRWLQRGIAQFNKTTNDINNYQNLFPIVQGSIYKDLRVQSAETIAAANQPGNAIGGVCHPTGQLYEVTEWVCDILPNDKPRYLMGVGTPRDLLECIALGVDMFDCVMPTRSGRNGRLYTTEGIINIKNKKWRHDFSVIDLQLNSYVSNHYTKAYLHHLFKAQEILGAQIASIHNLTFYLSLVKQARQHILSNTFVPWKTSILRKIMEKL

SEQ ID NO: 51595 - protein, 379 aa, unidentified
  source 1..379: note = Amphibacillus marinus
  REGION 1..379: note = tr|A0A1H8P0A7|A0A1H8P0A7_9BACI Queuine tRNA-ribosyltransferase OS=Amphibacillus marinus OX=872970; GN = tgt PE=3 SV=1
MSAVTYELIKTCKQTGARLGRVHTPHGTFETPVFMPVGTLATVKTMSPEELKELGAGIILSNTYHLWLRPGEDIVREAGGLHKFMNWDGSILTDSGGFQVFSLSDLREIEEQGVHFRNHISGEKLFLSPEKAMQIQNALGSDIMMAFDECPPYPAEYKYMKDSVERTSRWAERCLTAHERPDDQGLFGIVQGGEYEDLRKQSARDLTALDFPGYAIGGLSVGEPKDVMNRVLEFTTPYLPTEKPRYLMGVGSPDSLIDGAIRGIDMFDCVLPTRIARNGTCMTSNGRLVVRNAKFARDFSPLDPNCDCHTCRNYSRAYIRHLIKADETFGLRLTTYHNLYFLVKLMEQVREAIRADRLGDFRDQFFEQYGFNKPNAKNF

SEQ ID NO: 51596 - protein, 379 aa, Amphibacillus xylanus
  REGION 1..379: note = tr|K0IXJ0|K0IXJ0_AMPXN Queuine tRNA-ribosyltransferase OS=Amphibacillus xylanus (strain ATCC 51415 / DSM 6626 / JCM 7361 / LMG 17667 / NBRC 15112 / Ep01) OX=698758 G N=tgt PE=3 SV=1
MTAIRYELIKTCKQTGARLGRVHTPHGSFETPIFMPVGTLATVKTMSPEELKEINAQIILSNTYHLWLRPGEDIIKEAGGLHQFMNWDRPILTDSGGFQVFSLSDLRKIEEEGVHFRNHISGEKLFLTPEKATQIQNALGSDIMMAFDECPPYPAEHKYMKNSVERTSRWAERCLEAHERPEDQGLFGIIQGGEYKDLRKQSAQDLTSLDFPGYAIGGLSVGEPKDIMNDILEFTTPLLPSDKPRYLMGVGSADSLIDGAIRGIDMFDCVLPTRVARNGTLMTSQGRLVVRNAKFARDFSPLDPNCDCYTCKNYSRAYIRHLIKTDEIFGLRLTTYHNLYFLLNLMEQVREAIKADRLGDFREEFFESYGFNKPNAKNF

SEQ ID NO: 51597 - protein, 375 aa, unidentified
  source 1..375: note = Amphiplicatus metriothermophilus
  REGION 1..375: note = tr|A0A239PTZ7|A0A239PTZ7_9PROT Queuine tRNA-ribosyltransferase OS=Amphiplicatus metriothermophilus OX=1519374 GN=tgt PE=3 SV=1
MSDGFSFTLEASDGPARLGVIETPRGKIRTPAFMPVGTAGTVKAMPPDNVRATGADIVLGNTYHLMLRPGAERVAALGGLHKFMNWPHAILTDSGGFQVMSLAKLRKLTEEGVAFQSHIDGAPHMLTPERSIEIQCLLGADIQMQLDECPAIPIAHGAARESMLLSVRWAERSRRAFEEKAAPGQALFGIVQGANYDDLRRESLARLLELDFPGYAVGGLAVGEGRAEMFRVLEIVAPEMPAGRPRYLMGVGKPADIVGAVARGMDMFDCVAPTRSGRHGQAWTRRGPINIKNAAFADDPEPLDPSLDCPASRDYSKAYLHHLFRAGEYLGPMLLTWHNLAYYQALMAGMRAAIAAGRFGAFVARFREETGETIL

SEQ ID NO: 51598 - protein, 374 aa, Amphritea atlantica
  REGION 1..374: note = tr|A0A1H9JST1|A0A1H9JST1_9GAMM Queuine tRNA-ribosyltransferase OS=Amphritea atlantica OX=355243; GN = tgt PE=3 SV=1
MTFERLATDGKARRGRLSFPRGDVETPAFMPVGTYGSVKGMLPKDIEAIGAQIILGNTFHLMLRPGTEVVKAHGDLHDFMNWKGPILTDSGGFQVFSLGAMRKITEAGVHFQSPVNGSKVFMGPEESMQVQRDLGSDIVMIFDECTPYPATEVEAADSMRLSLRWAKRSKEAHGDSPSALFGIVQGGMYPHLRDESIEGLNEIGFDGYAIGGLSVGEPKEEMVKVLDHLAYKMPEDKPRYLMGVGKPEDIVEGVRRGVDMFDCVMPTRNARNGHLFTRHGVVKLRNSANKTDTRPLDEQCSCYTCQNFSRAYLHHLDKCKEIVGSQLNTIHNLHYYQELMAGLRQAIEQGKLDDFVDQFYHLKGMETPPLDSEI

SEQ ID NO: 51599 - protein, 376 aa, Amphritea balenae
  REGION 1..376: note = tr|A0A3P1SR70|A0A3P1SR70_9GAMM Queuine tRNA-ribosyltransferase OS=Amphritea balenae OX=452629; GN = tgt PE=3 SV=1
MKFERTASDGKARRARLSFPRGDVETPAFMPVGTYGTVKGMLPKDIEAIGAHIILGNTFHLMLRPGTEVIKQHGGLHEFMNWKGPILTDSGGFQVFSLGAMRKITEAGVTFQSPVNGSKVFMGPEESMQVQKDLGSDIVMIFDECTPYPATEVEAAESMRLSLRWAKRSKEAHGDSPSALFGIVQGGMYPHLRDESMAGLNEIDFDGYAIGGLSVGEPKEEMVKVLDHLAHQMPEDKPRYLMGVGKPEDIVEAVRRGVDMFDCVMPTRNARNGHLFTRDGVVRLRNSANKTDTRPLDEQCSCYTCQNFSRAYLHHLDKCKEIVGSQLNTIHNLHYYQELMAGLRQAIEQGKLDAFVDEFYRLKGMETPPFDAESIV

SEQ ID NO: 51600 - protein, 374 aa, Amphritea sp.
  REGION 1..374: note = tr|A0A430KTM0|A0A430KTM0_9GAMM Queuine tRNA-ribosyltransferase OS=Amphritea sp. MCCC 1K03512; OX = 2490544 GN=tgt PE=3 SV=1
MKFERLATDGKARRARLSFPRGDVETPAFMPVGTYGSVKGMLPKDIEAIGAQIILGNTFHLMLRPGTEVIKAHGDLHDFMHWKGPILTDSGGFQVFSLGAMRKITEAGVHFQSPVNGSKVFMGPEESMQVQRDLGSDIVMIFDECTPYPATETEAAESMRLSLRWAKRSKAAHGDSPSALFGIVQGGMFPHLRDESIEGLNDIGFDGYAIGGLSVGEPKDEMVKVLDHLAYKMPEDKPRYLMGVGKPEDIVEGVRRGVDMFDCVMPTRNARNGHLFTRNGVVKLRNAANKTDTRPLDEECTCYTCQNFSRAYLHHLDKCKEIVGSQLNTIHNLHYYQELMAGLRKAIEQGKLDDFVDQFYHLKGMDVPPLNVEV

SEQ ID NO: 51601 - protein, 376 aa, unidentified
  source 1..376: note = Amylibacter cionae
  REGION 1..376: note = tr|A0A2N5IEA7|A0A2N5IEA7_9RHOB Queuine tRNA-ribosyltransferase OS=Amylibacter cionae OX=2035344; GN = tgt PE=3 SV=1
MSNTFGFNISARQGRARTGVVSTPKGEIRTPAFMPVGTAATVKAMMPENVRETGADILLGNTYHLMLRPGAERIHNLGGLHRFMNWDRPILTDSGGFQVMSLTDLRKLTEEGVKFRSHIDGSEHNLTPERSMEIQKLLGSDIVMCFDECPALPADRKRIEESMQLSMRWAQRSRDAFGDRPGYALFGIQQGGLEEDLRAQSAEALRSIEFDGYAIGGLAVGEGQEAMFGCLDYAPGQLPEDKPRYLMGVGKPDDIVGAVQRGVDMFDCVLPSRSGRTGQAQTRMGAINLRNARHKDDPRPLDADCSCPACANYSRAYLHHVIKSQEIIGSMLLTWHNLHYYQELMAGLRDAIASGSLDDFVAVFHARRAQGDIEPC

SEQ ID NO: 51602 - protein, 376 aa, unidentified
  source 1..376: note = Amylibacter kogurei
  REGION 1..376: note = tr|A0A2G5K4Y0|A0A2G5K4Y0_9RHOB Queuine tRNA-ribosyltransferase OS=Amylibacter kogurei OX=1889778; GN = tgt PE=3 SV=1
MSKSFSFHISANDGRARTGIVSTPKGDIRTPAFMPVGTAATVKAMMPENVRETGADILLGNTYHLMLRPGAERIHNLGGLHKFMNWDRPILTDSGGFQVMSLTDLRKLTEEGVKFRSHIDGSEYNLTPERSMEIQRLLGSDIVMCFDECPALPADRARINESMQLSMRWAQRSRDAFGDRPGYALFGIQQGGLEQDFREESAEALQKIGFDGYAIGGLAVGEGQDAMFGVLDYAPNQLPQDKPRYLMGVGKPDDIVGAVQRGVDMFDCVLPSRSGRTGQALTRFGAVNLRNARHKDDPRPLDENCTCPACSNYSRAYLHHVHKAGEIIGSMLLTWHNLHYYQELMQGLRDAIAAGELDAFVAQFHATRAQGDIDPI

SEQ ID NO: 51603 - protein, 383 aa, Anabaena cylindrica
  REGION 1..383: note = tr|K9ZKD5|K9ZKD5_ANACC Queuine tRNA-ribosyltransferase OS=Anabaena cylindrica (strain ATCC 27899 / PCC 7122) OX=272123 GN=tgt PE=3 SV=1
MTNFSFECLASCSQTKARAGIFFTPHGVVETPRFMPVGTLANVKTITPAQLKDTGAQMVLSNTYHLHLQPGEAIVAGGGGLHKFMGWNGPMLTDSGGFQVFSLSEMRKITEEGVTFRSPRDGQIIKLTPERSIEIQNILGADVIMAFDECPPYPATREEVEAATDRTYRWLERCIVAHQRSDQALFPIVQGGVYLDLRARAANALAELDMPGYAIGGVSVGEPTELMAQIVKTTAPLLPVNKPRYLMGVGTYREMAIAIASGIDLFDCVIPTRWARHGTAIVSGERWNLKNAKFREDFAPLDETCPCYACQNFSRAYISHLVRSQEILAYTLLSIHNITELIRFTQKIRESILSDRFLTDFGHWLTDDKGQGAGEQGSRGEFF

SEQ ID NO: 51604 - protein, 378 aa, Anabaena sp.
  REGION 1..378: note = tr|A0A1B7VKW8|A0A1B7VKW8_9NOST Queuine tRNA-ribosyltransferase OS=Anabaena sp. WA113 OX=1710889; GN = tgt PE=3 SV=1
MSANFSFECLATCSQTKARAGIFSTPHGPVETPRFMPVGTLANVKTITPAQLGATGAQMVLANTYHLHLQPGEAIVAGGGGLHKFMGWPGPMLTDSGGFQVFSLSEMRKITEEGVTFRSPHDGQMIKLTPERSIEIQNILGADVIMAFDECPPYPATRQEVEAATDRTYRWLKRSISAHQRPDQALFPIVQGGVYLDLRARAAAELAELDMPGYAIGGVSVGEPTDLMAQIVQTTAPLLPVNKPRYLMGVGTYREMAIAIASGVDLFDCVIPTRWARHGTAIVSGERWNLKNAKFREDFTPLDTTCPCYTCENFSRAYISHLVRSQEILAYTLLTIHNITELIRFTQKIRASILSDRFITDFGHWLQPSAIDLEKTQD

SEQ ID NO: 51605 - protein, 378 aa, Anabaena sp.
  REGION 1..378: note = tr|A0A1B7V5D2|A0A1B7V5D2_9NOST Queuine tRNA-ribosyltransferase OS=Anabaena sp. AL09 OX=1710891; GN = tgt PE=3 SV=1
MSANFSFESLATCSQTKARAGIFSTPHGIVETPRFMPVGTLANVKTITPAQLGATGAQMVLANTYHLHLQPGEAIVAGGGGLHKFMGWSGPMLTDSGGFQVFSLSEMRKITEEGVTFRSPHDGQIIKLTPERSIEIQNILGADVIMAFDECPPYPATRQEVEAATDRTYRWLKRSISAHQRQDQALFPIVQGGVYLDLRARAAQELAQLDMPGYAIGGVSVGEPTDLMAQIVQTTAPLLPVNKPRYLMGVGTYREMAIAIASGVDLFDCVIPTRWARHGTAIVSGERWNIKNAKFREDFTPLDTTCPCYTCENFSRAYLAHLVRSQEILAYTLLTIHNITELIRFTQKIRASILSDRFVTDFGHWLEPSAIDLEKTED

SEQ ID NO: 51606 - protein, 343 aa, Anabaenopsis circularis
  REGION 1..343: note = tr|A0A1Z4GFS5|A0A1Z4GFS5_9CYAN Queuine tRNA-ribosyltransferase OS=Anabaenopsis circularis NIES-21; OX = 1085406 GN=tgt PE=3 SV=1
MPVGTLANVKTVTPAQLKDTGAQMVLSNTYHLHLQPGEAIVAGGGGLHKFMGWDGPMLTDSGGFQVFSLSEMRKITEEGVTFRSPHDGQIINLTPERSIEIQNTLGADVIMAFDECPPYPATRQEVETATERTYRWLERCIAAHQRQDQALFGIVQGGVYLDLRSQAAVALAKLDLPGYAIGGVSVGEPAELMAQIVQATAPLLPPEKPRYLMGVGTYREMAIAIASGIDLFDCVIPTRWARHGTAMVQGERWNLKNAKFREDFTPLDETCPCYACQNFSRAYISHLVRSQEILAYTLLSIHNITELIRFTQKIRQAILNDSFLAEFGHWLNSPETGELEEYS

SEQ ID NO: 51607 - protein, 379 aa, Anaerobacillus alkalidiazotrophicus
  REGION 1..379: note = tr|A0A1S2MDM8|A0A1S2MDM8_9BACI Queuine tRNA-ribosyltransferase OS=Anaerobacillus alkalidiazotrophicus OX=472963 GN=tgt PE=3 SV=1
MVAIRYEHIKTCRQSGARLGKVHTPHGTFETPIFMPVGTLATVKTMSPEELKEIGSQIILSNTYHLWLRPGHEIVKEAGGLHKFMNWDRPILTDSGGFQVFSLSALRKIEEEGVNFRNHLNGEKLFLSPEGAMEIQNALGSDIMMAFDECPPYPATHEYMLKSVERTSRWAERCLEGHKRPEAQGLFGIVQGGEYEDLRKLSAQDLVSLDFPGYAIGGLSVGEPKDVMNRVLEFTTPHLPFDKPRYLMGVGSPDALIDGAIRGIDMFDCVLPTRIGRNGTCMTSTGRLVVRNAKYARDFTPLDENCDCHVCKNYTRAYIRHLVKCDETFGFRLTSYHNLYFLLNLMEKVREAIREDRLLDFKEEFFEMYGFNKPNAKNF

SEQ ID NO: 51608 - protein, 379 aa, Anaerobacillus alkalilacustris
  REGION 1..379: note = tr|A0A1S2LW86|A0A1S2LW86_9BACI Queuine tRNA-ribosyltransferase OS=Anaerobacillus alkalilacustris; OX = 393763 GN=tgt PE=3 SV=1
MVAIRYEHIKTCRQSGARLGKVHTPHGTFETPIFMPVGTLATVKTMSPEELKEIGSQIILSNTYHLWLRPGHEIVKEAGGLHKFMNWDRPILTDSGGFQVFSLSALRKIEEEGVNFRNHLNGEKLFLSPEGAMEIQNALGSDIMMAFDECPPYPATHEYMLKSVERTSRWAERCLEGHKRPEAQGLFGIVQGGEYEDLRKLSAQDLVSLDFPGYAIGGLSVGEPKDVMNRVLEFTTPHLPFDKPRYLMGVGSPDALIDGAIRGIDMFDCVLPTRIGRNGTCMTSTGRLVVRNAKYARDFTPLDENCDCHVCKNYSRAYIRHLVKCDETFGFRLTSYHNLYFLLNLMEKVREAIREDRLLDFKEDFFEMYGFNKPNAKNF

SEQ ID NO: 51609 - protein, 379 aa, Anaerobacillus arseniciselenatis
  REGION 1..379: note = tr|A0A1S2L7G7|A0A1S2L7G7_9BACI Queuine tRNA-ribosyltransferase OS=Anaerobacillus arseniciselenatis OX=85682 GN=tgt PE=3 SV=1
MVAIRYEHIKTCRQSGARLGKVHTPHGTFETPIFMPVGTLATVKTMSPEELKEIGSQIILSNTYHLWLRPGHDIVKEAGGLHKFMNWDRPILTDSGGFQVFSLSALRKIEEEGVHFRNHLSGEKLFLSPEGAMEIQNALGSDIMMAFDECPPYPATYEYMLKSVERTSRWAERCLEGHKRPEDQGLFGIVQGGEYEDLRKKSAEDLVSLDFPGYAVGGLSVGEPKDVMNRVLEFTTPHLPHDKPRYLMGVGSPDALIDGTIRGIDMFDCVLPTRIARNGTCMTSSGRLVVRNAKYAKDYRPLDEKCDCHVCKNYTRAYIRHLVKCDETFGFRLTSYHNLYFLLKLMEQVREAIRQDRLLDFKEEFFEMYGLNKPNAKNF

SEQ ID NO: 51610 - protein, 379 aa, unidentified
  source 1..379: note = Anaerobacillus isosaccharinicus
  REGION 1..379: note = tr|A0A1S2KVI8|A0A1S2KVI8_9BACI Queuine tRNA-ribosyltransferase OS=Anaerobacillus isosaccharinicus; OX = 1532552 GN=tgt PE=3 SV=1
MVAIRYEHIKTCRQSGARLGKVHTPHGTFETPIFMPVGTLATVKTMSPEELKEIGSQIILSNTYHLWLRPGHEIVKEAGGLHKFMNWDRPILTDSGGFQVFSLSALRRIEEEGVHFRNHLNGDKLFLSPEGAMEIQNALGSDIMMAFDECPPYPETHEYMLKSVQRTSRWAERCLEGHKRPEDQGLFGIVQGGEYEDLRKMSAEDLVSMDFPGYAVGGLSVGEPKDVMNRVLEFTTPHLPTNKPRYLMGVGSPDALIDGTIRGIDMFDCVLPTRIGRNGTCMTSTGRLVVRNAKYARDFKPLDENCDCHVCKNYSRAYIRHLVKCDETFGFRLTSYHNLYFLLKLMEQVRDAIRQDRLLDFREEFFEMYGLNKPNAKNF

SEQ ID NO: 51611 - protein, 380 aa, unidentified
  source 1..380: note = Anaerobacillus macyae
  REGION 1..380: note = tr|A0A0J6CWJ3|A0A0J6CWJ3_9BACI Queuine tRNA-ribosyltransferase OS=Anaerobacillus macyae OX=157733; GN = tgt PE=3 SV=1
MTEPIRYELIKTCKQSGARLGKLHTPHGTFETPMFMPVGTLATVKTMSPEELKEMGAGVILSNTYHLWLRPGHDIVKEAGGLHKFMNWDQPILTDSGGFQVFSLSDLRQIEEKGVHFRNHLSGEKLFLSPEGAMDIQNALGSDIMMAFDECPPYPAEYDYMKSSVERTSRWAERCLTAHARKDVQGLFGIVQGGEYEELRKQSAQDLVSLDFPGYAIGGLSVGEPKDVMNRVLDFTTPHLPSDKPRYLMGVGSPDSLIDGAIRGIDMFDCVLPTRIARNGTLMTSNGRLVVRNAKYARDFGPLDENCDCKVCRNYSRAYIRHLVKANETFGFRLTTYHNLYFLLNLMKQVRQAIMDDRLLDFKEEFFEQYGFNKPNAKNF

SEQ ID NO: 51612 - protein, 370 aa, unidentified
  source 1..370: note = Anaerobacterium chartisolvens
  REGION 1..370: note = tr|A0A369AP49|A0A369AP49_9FIRM Queuine tRNA-ribosyltransferase OS=Anaerobacterium chartisolvens; OX = 1297424 GN=DFR58_12718 PE=3 SV=1
MESLKAAHGTIELPAFFPDGTFGVVRSIDSVDLESTGTPGVVMNCYHLMQKPGTSTIKSLGGLHGFTNWSKPILTDSGGFQVFSLIKENPKYGEIRNNGIIFRPSMEEQKVILTPEKCIQAQLGFGSDIMMCLDYCIHPDSPYETNKLSVDMTVRWAAACKKEYDLILKQKAGNLPKRPLLFGIIQGGNDKALRKECSEALIDIGFDGFGFGGWPMDGNGNLLEDILAYTASLVPDSLPKYAMGVGKPDEIVQCVKMGYNLFDCVIPTREARHHRLMAFRGDELEDIDLNQKGFYKYIYIMDEKYIRDEKPISDICDCYSCKNYSRAFLRHLFKTGDSLAYRLASIHNLRFYSSLMELIRMKNKINWQGK

SEQ ID NO: 51613 - protein, 372 aa, unidentified
  source 1..372: note = Anaerobacterium chartisolvens
  REGION 1..372: note = tr|A0A369AWQ3|A0A369AWQ3_9FIRM Queuine tRNA-ribosyltransferase OS=Anaerobacterium chartisolvens; OX = 1297424 GN=tgt PE=3 SV=1
MAAVKYELIKTCGQTGARLGRVHTPHGSFDTPAFMPVGTQATVKGMSPAELKDVEAQIILSNTYHLYMRPGSDIVREAGGLHGFMGWDRPILTDSGGFQVFSLGGMRSIKEEGVTFKSHIDGSSHFISPERAIEIQNDLGADIIMAFDECIPYPCDYNYAKNSLERTSRWAKRCRDVHSDTERQSLFGIVQGGTFKDLRVQSANELLELDFPGYAIGGLSVGEPAAEMYDMLDVTVPLLPGDKPRYLMGVGSPDYLIEGSIRGIDMFDCVLPTRIGRNGTVMTGAGRIIIRDAKYARDYSPMDPECDCYACKNFTRSYIRHLIKAGEVLGIRLTTWHNLRFLLNLMKNVREAISEDRLGDFRNKFFSAFGYK

SEQ ID NO: 51614 - protein, 374 aa, Anaerobiospirillum thomasii
  REGION 1..374: note = tr|A0A2X0V4H1|A0A2X0V4H1_9GAMM Queuine tRNA-ribosyltransferase OS=Anaerobiospirillum thomasii; OX = 179995 GN=tgt PE=3 SV=1
MEFKIHATDGKARQGELIFRRGVVRTPAFMPVGTLGTVKGLRPDQVSELGADILLGNTFHLWLRPGTEVIKAHGDLHDFMRWDKPILTDSGGFQVFSLSGLRKVTEEGVKFSHPINGSKLFLSPEVSMQVQYDLGSDIVMQFDECIGLPAPYERMEQAMELSLRWGRRCRDEFDRLGNKNSLFGIIQGGSNEQLRERSLKGLTDIGFDGYAIGGLAVGEPKDVMYRSLAHIGPIMPYDKPRYLMGVGRPEDILQGVLNGVDMFDCVMPSRNARNGHLFTSEGVVKIRNAKYAKDTSPLDPNCDCYTCRNFSRAYLHHLDKCNEMLGAHLNTIHNIRYYEKFMADIREAIAKGMLEKFASNFYNNVLKSEFKLDF

SEQ ID NO: 51615 - protein, 374 aa, unidentified
  source 1..374: note = Anaerobium acetethylicum
  REGION 1..374: note = tr|A0A1D3TP67|A0A1D3TP67_9FIRM Queuine tRNA-ribosyltransferase OS=Anaerobium acetethylicum; OX = 1619234 GN=tgt PE=3 SV=1
MYNLLTQDGKAKRGELHTVHGVIQTPVFMNVGTIAAIKGAVATTDLQEIKTQVQLSNTYHLHVRPGDKIVKKLGGLHKFMNWDKPILTDSGGFQVFSLSGLRKIKEEGVYFRSHIDGKKIFMGPEESMQIQSNLASTIAMAFDECPPHPATREYMQASVDRTTRWLERCKKEMDRLNALPDTINKNQMLFGINQGGTYEDIRIEHAKRISEMDLDGYALGGLAVGESHEEMYRILDETVPYLPVDKPTYLMGVGTPANILEAVDRGVDFFDCVYPSRNGRHGHVYTDHGKMNMFNAKYELDSRPIDENCQCPTCRSYSRAYIRHLLKAKEMLGMRLCVLHNLYFYNNMMEEIRNAIEEGRYQEYKKAKLEGFQL

SEQ ID NO: 51616 - protein, 374 aa, Anaerobranca californiensis
  REGION 1..374: note = tr|A0A1M6LPA6|A0A1M6LPA6_9FIRM Queuine tRNA-ribosyltransferase OS=Anaerobranca californiensis DSM 14826 OX=1120989 GN=tgt PE=3 SV=1
MAVKYTLLKECPHTGARAGILHTPHGDIETPIFMPVGTLATVKTMEPKDLKEIGAQIILSNTYHLYLRPGHQLVKKAGGLHKFMNWDRPILTDSGGFQVFSLGDLRKITEEGVEFRSHLDGSKHFFTPEKVMEIQNALGSDIIMAFDECIPYPATYEYAKNSLERTTRWLKRCIAAHENPHSQALFGIIQGGMYLDLRTQSAEEILALDLPGYAVGGLSVGEPKEEMYRVLEHTVPMMPKDKPRYLMGVGSDDALLEGVYRGIDMFDCVLPTRIARNGTAMTSHGRVVVRNAAYSEDFTPLDQNCNCYVCQNFTRAYIRHLVKCNEILGLKLISYHNLYYLLDFMRKIRQSILDGNFPQYYKEKIKLINEGREK

SEQ ID NO: 51617 - protein, 379 aa, Anaerobranca gottschalkii
  REGION 1..379: note = tr|A0A1I0BJN1|A0A1I0BJN1_9FIRM Queuine tRNA-ribosyltransferase OS=Anaerobranca gottschalkii DSM 13577 OX=1120990 GN=tgt PE=3 SV=1
MAVKYTLLKQCPDTGARAGILHTPHGDIETPIFMPVGTLATVKTMEPKDLKEIGAQIILSNTYHLYLRPGHQLVEKAGGLHKFMNWDRPILTDSGGFQVFSLGDLRKISEEGVEFRSHLDGSKHFFTPEKVMEIQNALGSDIIMAFDECIPYPATYEYAKNSLERTTRWLKRCIAAHKNPHSQALFGIIQGGMYLDLRTQSAEEILALDLPGYAVGGLSVGEPKEEMYKVLEHTVPMMPKDKPRYLMGVGSDDALLEGVYRGIDMFDCVLPTRIARNGTAMTSHGRVVVRNAAYSEDFTPLDHNCDCYVCQNFTRAYIRHLVKCNEILGLKLISYHNLYYLLDFMRKIRQSILDGTFPQYYKEKIKLINEGREKQCKDY

SEQ ID NO: 51618 - protein, 380 aa, unidentified
  source 1..380: note = Anaerobutyricum hallii
  REGION 1..380: note = tr|C0EW87|C0EW87_9FIRM Queuine tRNA-ribosyltransferase OS=Anaerobutyricum hallii DSM 3353; OX = 411469 GN=tgt PE=3 SV=1
MYKLLTKDGMAKRGEFETVHGTIQTPVFMNVGTVGAIKGAVSTDDLRTIGTQVELSNTYHLHVRTGDKLIKQFGGLHKFMGWDKPILTDSGGFQVFSLSGLRKIKEEGVYFQSHIDGHHIFMGPEESMQIQSNLGSTIAMAFDECPSSRADRTYIQNSVDRTTRWLERCKKKMQELNSLPDTVNPHQMLFGINQGGVFADIRIEHAKRISELDLDGYAVGGLAVGETHDEMYYILDEVVPYLPENKPTYLMGVGTPANIIEAVDRGIDFFDCVYPSRNGRHGHVYTHHGKLNLFNKKFELDPRPIEEGCQCPACRTYSRAYIRHLLKAKEMLGMRLCVLHNLYFYNHLMEEIRGAIDEHRYKEFKKTTLEGFLTPEEEYR

SEQ ID NO: 51619 - protein, 380 aa, unidentified
  source 1..380: note = Anaerobutyricum hallii
  REGION 1..380: note = tr|A0A173U3Y8|A0A173U3Y8_9FIRM Queuine tRNA-ribosyltransferase OS=Anaerobutyricum hallii OX=39488; GN = tgt PE=3 SV=1
MYKLLTKDGMAKRGEFETVHGTIQTPVFMNVGTVGAIKGAVSTDDLRTIGTQVELSNTYHLHVRTGDKLIKQFGGLHKFMGWDKPILTDSGGFQVFSLSGLRKIKEEGVYFQSHIDGHHIFMGPEESMQIQSNLGSTIAMAFDECPSSRADRTYIQNSVDRTTRWLERCKKKMQELNSLPDTVNPHQMLFGINQGGIFADIRIEHAKRISELDLDGYAVGGLAVGETHDEMYYILDEVVPYLPENKPTYLMGVGTPANIIEAVDRGIDFFDCVYPSRNGRHGHVYTHHGKLNLFNKKFELDPRPIEEGCQCPACRTYSRAYIRHLLKAKEMLGMRLCVLHNLYFYNHLMEEIRGAIDEHRYKEFKKTTLEGFLTPEEEYR

SEQ ID NO: 51620 - protein, 374 aa, Anaerococcus hydrogenalis
  REGION 1..374: note = tr|A0A133M737|A0A133M737_9FIRM Queuine tRNA-ribosyltransferase OS=Anaerococcus hydrogenalis; OX = 33029 GN=tgt PE=3 SV=1
MPIKYELIKKDKYSNARCGIIHTDHGDIPTPIFMPVGTKATVKTMSVEELKEIDAKIILGNTYHLYLRPGMDIMKKAGGLHKFMNWNGPILTDSGGFQVFSLSDTRDISEKGVVFRSHIDGSKHLFTPEKSIEIQNDIHSDIMMSFDECIPYPADYKYVEESVERTIRWAKRGLDYHKKNSHKDQSLFGIIQGGMFEDLRKRSVEETCAMDFDGYSLGGLSVGEPKEEMIRLLNYTTPLLPEDKPRYNMGVGSPDYLFESFEAGIDMADCVLPTRIARNGTAITSEGRLVVRNAKYKEDFTPLDHDCDCYTCRNYSRAYIRHLVNVNEILGARLLTYHNLYFLLKLCEDIRKSIMEDRFLEFKKEFYKKYGYES

SEQ ID NO: 51621 - protein, 374 aa, Anaerococcus hydrogenalis
  REGION 1..374: note = tr|B6W863|B6W863_9FIRM Queuine tRNA-ribosyltransferase OS=Anaerococcus hydrogenalis DSM 7454 OX=561177 GN=tgt PE=3 SV=1
MAIKYELIKKDKYSNARCGVIHTDHGDIPTPIFMPVGTKATVKTMSVEELKEIDAKIILGNTYHLYLRPGMDIMKKAGGLHKFMNWNGPILTDSGGFQVFSLSENRDISEKGVVFRSHIDGSKHLFTPEKSIEIQNDIHSDIMMSFDECIPYPADYKYVEDSVARTVRWAKRGLDYHKANSHKDQSLFGIIQGGMYEDLRKRSVEETCAMDFDGYSLGGLSVGEPKEEMIRLLKYTTPLLPEDKPRYNMGVGSPDYLFESFEAGIDMADCVLPTRIARNGTAITSEGRLVVRNAKYKDDFTPLDHDCDCYTCKNYSRAYIRHLVNVNEILGARLLTYHNLYFLLKLCEDIRKSIMEDRFLDFKKEFYKKYGYES

SEQ ID NO: 51622 - protein, 372 aa, Anaerococcus lactolyticus
  REGION 1..372: note = tr|C2BDC8|C2BDC8_9FIRM Queuine tRNA-ribosyltransferase OS=Anaerococcus lactolyticus ATCC 51172 OX=525254 GN=tgt PE=3 SV=1
MPLKYELIKKDKYTNARVGVIHTASGDIPTPIFMPVGTVGTVKTMTVDDLKEMDAKIILGNTYHLYLKPGMDIMKKAGGLHKFMNWDRPILTDSGGFQVFSLADNRKISEEGVMFRSHIDGSKHFFTPEKSIEIQNDIHSDIMMSFDECVDANASYDYVKNSMERTLRWAQRGLDYHKANSHPDQSLFGIVQGGMFKDLREISARETVAMNFDGYSIGGLSVGETKEEMIDILNFTTPLLPEDKPRYNMGVGTPDYLFESFQAGIDMADCVLPTRIARNGTAITSHGRVVIKNATYKEDFSPLDPECDCYTCKNHSRAYLRHLVNAKEILGARLLSYHNLYFLLKMCENIREAIMNDSFLDYKKEFYEKYGY

SEQ ID NO: 51623 - protein, 372 aa, Anaerococcus lactolyticus; identical to SEQ ID NO: 51622
  REGION 1..372: note = tr|A0A095Z3Q2|A0A095Z3Q2_9FIRM Queuine tRNA-ribosyltransferase OS=Anaerococcus lactolyticus S7-1-13 OX=1284686 GN=tgt PE=3 SV=1

SEQ ID NO: 51624 - protein, 372 aa, unidentified
  source 1..372: note = Anaerococcus nagyae
  REGION 1..372: note = tr|A0A3E2TJZ8|A0A3E2TJZ8_9FIRM Queuine tRNA-ribosyltransferase OS=Anaerococcus nagyae OX=1755241; GN = tgt PE=3 SV=1
MGLKFEVIKKDKNSNARVGVIHTAHGDIPTPIFMPVGTLGTVKTMSVEELDQMGAKIILGNTYHLYLKPGMNIMRQAGGLHKFMNWNKPILTDSGGFQVFSLSERRKINENGVEFRSHIDGSKHFFTPEKSIEIQNDIHSDIMMSFDECVEVPADYDYVKQSMERTIRWAKRGLDYHKEHSYKDQSLFGIVQGGMYKDLREKSAIETTAMDFDGFSIGGLSVGETKEEMIDILNFTTPLLPEDKPRYNMGVGTPDYLFESYQAGIDMADCVLPTRIARNGTAITSHGRLVVRNAAYMDDFTPLDSECDCYTCRNYSRAYIRHLVNVNEILGARLLSYHNLYFLLKMCENIRQAIMEDRFLEYKEEFYSKYGY

SEQ ID NO: 51625 - protein, 372 aa, Anaerococcus octavius
  REGION 1..372: note = tr|A0A2I1M9X7|A0A2I1M9X7_9FIRM Queuine tRNA-ribosyltransferase OS=Anaerococcus octavius OX=54007; GN = tgt PE=3 SV=1
MGLTFEVIKKDKNSNARVGVIHTAHGDIPTPIFMPVGTLGTVKTMSVEELKEMDAKIILGNTYHLYLKPGMDIMKKAGGLHNFMNWDRPILTDSGGFQVFSLAERRKINENGVEFRSHIDGSKHFFTPEKAISIQNDIHSDIMMSFDECVEAPADYDYVKQSMERTIRWAKRGLDYHKEHSHPDQSLFGIVQGGMYKDLREKSACQTTAMDFDGFSIGGLSVGETKEEMIDILNFTTPLLPENKPRYNMGVGTPDYLFESYQAGIDMADCVLPTRIARNGTALTSQGRLVVRNAVYKDDFSPIDHACDCYTCRNYSRAYLRHLINANEILGARLLTYHNLYFLLKLCENIRQSIMEDRFLEYKEEFYSKYGY

SEQ ID NO: 51626 - protein, 372 aa, Anaerococcus octavius
  REGION 1..372: note = tr|A0A380WVE2|A0A380WVE2_9FIRM Queuine tRNA-ribosyltransferase OS=Anaerococcus octavius OX=54007; GN = tgt PE=3 SV=1
MGLTFEVIKKDKNSNARVGVIHTAHGDIPTPIFMPVGTLGTVKTMSVEELKEMDAKIILGNTYHLYLKPGMDIMKKAGGLHNFMNWDRPILTDSGGFQVFSLAERRKINENGVEFRSHIDGSKHFFTPEKAISIQNDIHSDIMMSFDECVEAPADYGYVKQSMERTIRWAKRGLDYHKEHSHPDQSLFGIVQGGMYKDLREKSACQTTAMDFDGFSIGGLSVGETKEEMIDILNFTTPLLPENKPRYNMGVGTPDYLFESYQAGIDMADCVLPTRIARNGTALTSQGRLVVRNAVYKDDFSPIDHACDCYTCRNYSRAYLRHLINANEILGARLLTYHNLYFLLKLCENIRQSIMEDRFLEYKEEFYSKYGY

SEQ ID NO: 51627 - protein, 372 aa, Anaerococcus prevotii
  REGION 1..372: note = tr|C7RHH4|C7RHH4_ANAPD Queuine tRNA-ribosyltransferase OS=Anaerococcus prevotii (strain ATCC 9321 / DSM 20548 / JCM 6508 / PC1) OX=525919 GN=tgt; PE = 3 SV=1
MALKYELIKKDKYSNARVGVIHTAHGDIPTPIFMPVGTLGTVKTMTPEDLLGMGAKIILGNTYHLYLKPGMDIMKKAGGLHKFMNWDKPILTDSGGFQVFSLSDNRKITEEGVTFRSHIDGSKHLFTPEKSISIQNDIHSDIMMSFDECVDARADYDYVENSMKRTLRWAKRGLDYHKEHSHPDQSLFGIVQGGMFKDLRERSARETTAMDFDGFSIGGLSVGETKEEMIDILNFTTPFLPKDKPRYNMGVGTPDYLFESFEAGIDMADCVLPTRIARNGTALTSRGRLVVKNAAYKEDFTSLDHECDCYTCRNYSRAYIRHLMNVNEILGARLLSYHNLYFLLKMCENIREAIMEDRFLDYKKEFYDKYGY

SEQ ID NO: 51628 - protein, 375 aa, Anaerococcus prevotii
  REGION 1..375: note = tr|A0A449IAI0|A0A449IAI0_9FIRM Queuine tRNA-ribosyltransferase OS=Anaerococcus prevotii OX=33034; GN = tgt PE=3 SV=1
MFSFELIKKDSRTKARLGKITTDHGEIQTPIFMPVGTKATVKTMKTDELKNLKAQIILGNTYHLYLRPGTEVIEKAGGLHKFMNWDRPILTDSGGFQVFSLANIRNIVEEGVEFRSHIDGSKQFLTPEKSMEIQHVLGSDIMMCFDECAPYPSSYDYIKNSMERTSRWAERCKEYHNDKEDQALFGIVQGGMYKDLRKISAQDLVSLDFPGYAVGGLSVGEPLDLMNEILDYTSDYLPENKPRYLMGVGTPDYLFEAVERGIDMADCVLPTRIARNGTLMTSKGRLVIKNARYKDDFSKPDDECDCEVCQNYSRAYLRHLFNVDEILGLRLATIHNLHFLIHLMEEIRKSIANDYFLEFKSDFYKKYGYNNSSII

SEQ ID NO: 51629 - protein, 374 aa, Anaerococcus sp.
  REGION 1..374: note = tr|A0A1E9DB04|A0A1E9DB04_9FIRM Queuine tRNA-ribosyltransferase OS=Anaerococcus sp. HMSC068A02; OX = 1739286 GN=tgt PE=3 SV=1
MPIKYELIKKDKYSNARCGIIHTDHGDIPTPIFMPVGTKATVKTMSVEELKEIDAKIILGNTYHLYLRPGMNIMKKAGGLHKFMNWNGPILTDSGGFQVFSLSDTRDISEKGVVFRSHIDGSKHLFTPEKSIEIQNDIHSDIMMSFDECIPYPADYKYVEESVERTIRWAKRGLDYHKKNSHKDQSLFGIIQGGMFEDLRKRSVEETCAMDFDGYSLGGLSVGEPKEEMIRLLKYTTPLLPEDKPRYNMGVGSPDYLFESFEAGIDMADCVLPTRIARNGTAITSEGRLVVRNAKYKEDFTPLDHDCDCYTCRNYSRAYLRHLVNVNEILGARLLTYHNLYFLLKLCENIRKAIMEDRFLEFKKEFYKKYGYES

SEQ ID NO: 51630 - protein, 374 aa, Anaerococcus sp.
  REGION 1..374: note = tr|A0A1E8RB56|A0A1E8RB56_9FIRM Queuine tRNA-ribosyltransferase OS=Anaerococcus sp. HMSC065G05; OX = 1739356 GN=tgt PE=3 SV=1
MPIKYELIKKDKYSNARCGIIHTDHGDIPTPIFMPVGTKATVKTMSVEELKEIDAKIILGNTYHLYLRPGMDIMKKAGGLHKFMNWNGPILTDSGGFQVFSLSDTRDISEKGVVFRSHIDGSKHLFTPEKSIEIQNDIHSDIMMSFDECIPYPADYKYVENSVERTVRWAKRGLDYHKKNSHKDQSLFGIIQGGMFEDLRKRSVEETCAMDFDGYSLGGLSVGEPKEEMIRLLKYTTPLLPEDKPRYNMGVGSPDYLFESFEAGIDMADCVLPTRIARNGTAITSEGRLVVRNAKYKEDFTPLDHDCDCYTCRNYSRAYLRHLVNVNEILGARLLTYHNLYFLLKLCENIRKAIMEDRFLEFKKEFYKKYGYES

SEQ ID NO: 51631 - protein, 372 aa, Anaerococcus tetradius
  REGION 1..372: note = tr|C2CFR0|C2CFR0_9FIRM Queuine tRNA-ribosyltransferase OS=Anaerococcus tetradius ATCC 35098 OX=525255 GN=tgt PE=3 SV=1
MALKYELIKKDKYSNARVGVIHTAHGDIPTPIFMPVGTLGTVKTMTPEDLKEMGAKIILGNTYHLYLKPGMDIMKKAGGLHKFMNWDRPILTDSGGFQVFSLSDNRKITEEGVTFRSHIDGSKHLFTPEKSISIQNDIHSDIMMSFDECVDARASYDYVEDSMKRTLRWAKRGLEYHKTHSHPDQSLFGIVQGGMFKDLREISAKETTAMDFDGYSIGGLSVGETKEEMIDILNFTTPLLPEDKPRYNMGVGTPDYLFESFQAGIDMADCVLPTRIARNGTALTSRGRLVVKNAPYKDDFTALDHDCDCYTCRNYSRAYIRHLMNVNEILGARLLSYHNLYFLLKMCENIREAIMNDQFLDYKKEFYEKYGY

SEQ ID NO: 51632 - protein, 372 aa, Anaerococcus tetradius; identical to SEQ ID NO: 51631
  REGION 1..372: note = tr|A0A133KDC2|A0A133KDC2_9FIRM Queuine tRNA-ribosyltransferase OS=Anaerococcus tetradius OX=33036; GN = tgt PE=3 SV=1

SEQ ID NO: 51633 - protein, 374 aa, Anaerococcus vaginalis
  REGION 1..374: note = tr|C7HTY7|C7HTY7_9FIRM Queuine tRNA-ribosyltransferase OS=Anaerococcus vaginalis ATCC 51170 OX=655811 GN=tgt PE=3 SV=1
MPIKYELIKKDKYSNARCGIIHTDHGDIPTPIFMPVGTKATVKTMSVEELKEIDAKIILGNTYHLYLRPGMDIMKKAGGLHKFMNWNGPILTDSGGFQVFSLSDTRDISEKGVVFRSHIDGSKHLFTPEKSIEIQNDIHSDIMMSFDECIPYPADYKYVENSVERTIRWAKRGLDYHKKNSHKDQSLFGIIQGGMFEDLRKRSVEETCAMDFDGYSLGGLSVGEPKEEMIRLLKYTTPLLPEDKPRYNMGVGSPDYLFESFEAGIDMADCVLPTRIARNGTAITSEGRLVVRNAKYKEDFTPLDHDCDCYTCRNYSRAYLRHLVNVNEILGARLLTYHNLYFLLKLCENIRKAIMEDRFLEFKKEFYKKYGYES

SEQ ID NO: 51634 - protein, 377 aa, unidentified
  source 1..377: note = Anaerocolumna aminovalerica
  REGION 1..377: note = tr|A0A1I5C5Y9|A0A1I5C5Y9_9FIRM Queuine tRNA-ribosyltransferase OS=Anaerocolumna aminovalerica; OX = 1527 GN=tgt PE=3 SV=1
MYKLICRDGNAKRGEFHTVHGTIQTPVFMNVGTVAAIKGAVSTTDLQQLKTQVELSNTYHLHVRTGDKVIKKLGGLHKFMVWDKPILTDSGGFQVFSLAGLRKIKEEGVYFNSHIDGSKIFMGPEESMQIQSNLASTIAMAFDECPPHPATREYMQNSVDRTTRWLERCKKEMKRLNSLEDTINRNQMLFGINQGGTFEDIRIEHAKRITDLDLDGYALGGLAVGESHEEMYRIIEETVPYLPLEKPTYLMGVGTPANILEAVDRGVDFFDCVYPSRNGRHGHAYTNHGKMNLMNARYELDDRPIEEGCQCPACKHYSRAYIRHLLKAKEMLGLRLLVMHNLYFYNNMMEEIRNAIEEKRYKEYKKAKLEGFAEGEA

SEQ ID NO: 51635 - protein, 377 aa, unidentified
  source 1..377: note = Anaerocolumna jejuensis
  REGION 1..377: note = tr|A0A1M6R862|A0A1M6R862_9FIRM Queuine tRNA-ribosyltransferase OS=Anaerocolumna jejuensis DSM 15929 OX=1121322 GN=tgt PE=3 SV=1
MYKLLAKDGRAKRGEFHTVHGTIQTPVFMNVGTTAAIKGAVSTQDLQEMKTQVELSNTYHLHVRPGDEVIKKLGGLHKFMVWDKPILTDSGGFQVFSLAGLRKIKEEGVYFNSHVDGRKIFMGPEESMRIQSNLASTIAMAFDECPPHPAERSYMQDSVDRTTRWLIRCREELNRLNTLEDTINKNQMLFGINQGGTYRDIRIEHAKRISELDLNGYALGGLAVGESHAEMYYIIEETMPYLPLEKPTYLMGVGTPENILESVERGVDFFDCVYPARNGRHGHAYTNHGKMNLLNAKYELDSAPIEEGCGCPVCRHYSRAYIRHLLKAKEMLGLRLMVTHNLYFYNNMMEEIRGAIEEQRYAEYKKNKLNGFAQGEE

SEQ ID NO: 51636 - protein, 377 aa, unidentified
  source 1..377: note = Anaerocolumna xylanovorans
  REGION 1..377: note = tr|A0A1M7YDJ7|A0A1M7YDJ7_9FIRM Queuine tRNA-ribosyltransferase OS=Anaerocolumna xylanovorans DSM 12503 OX=1121345 GN=tgt PE=3 SV=1
MYKLLAKDGRAKRGEFHTVHGVIQTPVFMNVGTAAAIKGAVSTQDLQGIKTQVELSNTYHLHVRPGDEVIKKLGGLHKFMVWDKPILTDSGGFQVFSLAGLRKIKEEGVYFNSHVDGRKIFMGPEESMRIQSNLASTIAMAFDECPPHPAERSYMQDSVDRTTRWLIRCKEELNRLNSLPDTINKNQMLFGINQGGTYKDIRIEHAKKISEFDLNGYALGGLAVGESHAEMYYIIEETVPYLPLEKPTYLMGVGTPENILESVERGIDFFDCVYPARNGRHGHAYTNHGKMNLMNAKYELDDAPIERGCGCPVCKYYSRAYIRHLLKAKEMLGLRLLVTHNLYFYNNMMEEIRAAIEEQRYAEYKKNKLNGFAQGEE

SEQ ID NO: 51637 - protein, 377 aa, Anaerofilum sp.
  REGION 1..377: note = tr|A0A1Y4GZE5|A0A1Y4GZE5_9FIRM Queuine tRNA-ribosyltransferase OS=Anaerofilum sp. An201; OX = 1965588 GN=tgt PE=3 SV=1
MAYTLIKTEHSARRGEFATPHGTVQTPAFMNVATAAAIKGGLSAFDLKEIGCQVMLCNTYHLHLRPGDKLVAELGGLHKFTRWDGPILTDSGGFQVFSLAELRKITEEGVTFRSHLDGHKIFMGPEESMQIQANLGSTIAMAFDECIKNPAEHEYAKDSCARTVRWLKRCKTELDRLKNEGKAVNPQQMLFGINQGCCYDDLRTEHMKQIAELDLDGYALGGLAVGEPTEEMYRVISVVEPHMPKDKIRYLMGVGTPGNIIEAVSRGVDLFDCVMPSRNARHGHLNTWSGIINIKNLKYEKDETPIDPQCDCPVCRNFTRAYIRHLFKADEMLGMRLAVMHNLYFYNHLMQRIRDELDAGTFQAFHDRYVTLLDSRI

SEQ ID NO: 51638 - protein, 372 aa, Anaerofustis stercorihominis
  REGION 1..372: note = tr|A0A3E3DUA7|A0A3E3DUA7_9FIRM Queuine tRNA-ribosyltransferase OS=Anaerofustis stercorihominis; OX = 214853 GN=tgt PE=3 SV=1
MSAIKYELIKEDKRSGARVGKIITPHGEIPTPIFMPVGTRATVKAMLPESLKEINSKIILGNTYHLYLRPGDDIIKKAGGLHKFMNWDRPILTDSGGFQVFSLSKTNDITEEGVTFRSHIDGSRHFISPEKSMEIQNNLGSDIMMAFDECVPYGADKKYTKDSLEMTTRWAKRCKEAHKNTENQGLFGIVQGGMFKDLRKQSAEQLIDLDFPGYALGGLSVGEPMDMMFDLLDYTTPLLPKDKPRYLMGVGSPDALLEGVKSGIDMFDCVLQTRMARNGTALTSTGKVTLKNAKYKEDFTPLDGKCDCYVCRNYTKAYLRHLVVCKEILSSMLVSYHNLYFTLKLMENMRNAIMEDRFLEFKHEFEKEYGII

SEQ ID NO: 51639 - protein, 372 aa, Anaerofustis stercorihominis
  REGION 1..372: note = tr|B1C5L6|B1C5L6_9FIRM Queuine tRNA-ribosyltransferase OS=Anaerofustis stercorihominis DSM 17244 OX=445971 GN=tgt PE=3 SV=1
MSAIKYELIKEDKRSGARVGKIITPHGEIPTPIFMPVGTRATVKAMLPESLKEINAKIILGNTYHLYLRPGDDIIKKAGGLHKFMNWDRPILTDSGGFQVFSLSKTNDITEEGVTFRSHIDGSRHFISPEKSMEIQNNLGSDIMMAFDECVPYGADKKYTKDSLEMTTRWAKRCKEAHKNTEHQGLFGIVQGGMFKDLRKQSAEQLIDLDFPGYALGGLSVGEPMDMMFDLLDYTTPLLPKDKPRYLMGVGSPDALLEGVKSGIDMFDCVLQTRMARNGTALTSAGKVTLKNAKYKEDFTPLDDKCDCYVCRNYTKAYLRHLVICKEILSSMLVSYHNLYFTLKLMENMRNAIMEDRFLEFKHEFEKEYGII

SEQ ID NO: 51640 - protein, 368 aa, Anaeroglobus geminatus
  REGION 1..368: note = tr|G9YFF3|G9YFF3_9FIRM Queuine tRNA-ribosyltransferase OS=Anaeroglobus geminatus F0357; OX = 861450 GN=tgt PE=3 SV=1
MVIEYELQAECGGARAGLLRTPHGTFKTPMFMPVGTQATVKTLTPEELYDMGAQVILSNTYHLFLRPGEDLVREAGGLHRFMNWKRAVLTDSGGFQVFSLGRMRRITEEGVTFRSHIDGSEKFLSPEVSMTVQMALNADIAMTFDECIPYPSDYEYTRLSTERTSRWARRCLDSHRSDTQGLFGIVQGGMYKDLRKKSAADLVAMNFEGYGIGGLSVGESKDIMYDILDGTVPYLPREKARYLMGVGTPDCLIEGVARGIDMFDCVFPTRVARNGMAMTGTGRVNVRNAGYARDFGPLEESCGCYTCRNYTRAYIRHLFKAEELLAYRLVSIHNLYFLLNFMRRMRESVLNGTFAAFRENFWSRYRDS

SEQ ID NO: 51641 - protein, 381 aa, Anaerolinea thermolimosa
  REGION 1..381: note = tr|A0A3D1JG55|A0A3D1JG55_9CHLR Queuine tRNA-ribosyltransferase OS=Anaerolinea thermolimosa; OX = 229919 GN=tgt PE=3 SV=1
MFAFNFDLLTTSGKARAGVFHTPHGDLPTPIFAPVGTQATVKALTPAQLEEVGAVLVLSNTYHLYLRPGAELVEAMGGLHQFMQWPHPILTDSGGFQVFSLAQMRQIDEDGVTFKSHIDGSMHRFTPEVSIQVQEKLGADIIMAFDECAPPYDRAYNEQAVARTHAWAERCLRAKTRSDQALFGIVQGGVFPDLREHSAEYLSSLGFPGYAIGGLSVGETKAEMHAMLEIVNGILPADKPRYLMGVGSPEDLIHAIARGVDIFDCVLPTRLARHAAAITFRGRLNLINAVFARDPAPIDEQCTCYTCRHFSRAYLRHLFVAREMLASTLLSIHNIHSLLELVRQARQAILEQRYADFADQFLASYQPRVTRNPSPQLRKQP

SEQ ID NO: 51642 - protein, 373 aa, Anaerolinea thermophila
  REGION 1..373: note = tr|A0A101FZ25|A0A101FZ25_9CHLR Queuine tRNA-ribosyltransferase OS=Anaerolinea thermophila; OX = 167964 GN=tgt PE=3 SV=1
MDNFTYHIEAQDGNARAGIFKTPHADIPTPIFMPVGTQATVKAVTPEQLQEIGASIILSNTYHLYLRPGEDLIQELGGLHRFMHWDGAILTDSGGFQVFSLGGLRKIDEDGVTFKSHIDGSTHRFTPERSIAIQEALGADIIMAFDECADPTDHDYNVRSMQRTHQWAERCLAAKTRPDQALFGIVQGGIYKDLREQSARFISSLDFPGHAIGGLSVGENKDEMLASIEVVNAILPENKPRYLMGVGTPYDLIEGIRRGVDMFDCVLPTRLARHSAAQTLSGRMNLMNAQYARDEHPIDEHCACYTCRNYSRAYLRHLIRAREMLGATLISIHNIHTLLHLTQTLRQAILAGTFEQTAAALLANIPASERNNA

SEQ ID NO: 51643 - protein, 371 aa, unidentified
  source 1..371: note = Anaerolineaceae bacterium
  REGION 1..371: note = tr|A0A1B3WQ56|A0A1B3WQ56_9CHLR Queuine tRNA-ribosyltransferase OS=Anaerolineaceae bacterium oral taxon 439 OX=1889813 GN=tgt PE=3 SV=1
MTKKNFEFDLIGRDGNARAGVFYTPHGPIETPVFAPVGTQATVKSLTASQLEAENISFILNNTYHLYLRPGDELIASLGGVHGFMNWKGPILTDSGGFQVFSLNELRKIDEQGVTFRSHLDGSTHRFTPEKSIAIQENLGSDIIMAFDECAPPLDYDYNVAAMNRTHRWLERCLKAKKRPDQALFGIIQGGVFADLRERSAAFVSEMNTPGIAIGGLSVGETKAQMIATLDALTPILPEARPRYLMGVGSPEDLVQGIRRGVDIFDCVLPTRLARHGAAMTRRGQMNLVNRQYRDDPRPLVEGCQCYACRNHSRAYIHHLFRCRENLSGTLLSIHNIHTLITIVRDARKAILAGTYDQFADAFLANYPLKP

SEQ ID NO: 51644 - protein, 375 aa, unidentified
  source 1..375: note = Anaerolineaceae bacterium
  REGION 1..375: note = tr|A0A351X3V8|A0A351X3V8_9CHLR Queuine tRNA-ribosyltransferase OS=Anaerolineaceae bacterium; OX = 2024896 GN=tgt PE=3 SV=1
MIKNNLFQFNRIAQDKRARAGVFTTPHGDLLTPVFAPVGTQATVKAVSPDQLRAAGASLVLSNTYHLYLRPGAELVAELGGLHRFMQWDGPMLTDSGGFQVFSLADMRKIDADGVTFKSHIDGSTHRFTPEKAIQIQEDLGADIIMAFDECAPPYDREYNQRAVARTHVWAERCHTTQSRRDQALFGIVQGGIFPDLREQSAEFISALGFPGHAIGGLSVGETKAEMHAMIEVVDAILPEDKPRYLMGVGSPEDLIHGIRRGIDIFDCVLPTRLARHQAAMTLTGRINLMNAANAHDPQPIDENCTCYTCSHFTRAYLRHLIVAKEMLAATLISIHNIHTLVSLVNDAREAIIAGQFDHFADSFLATYNPQDKTS

SEQ ID NO: 51645 - protein, 373 aa, unidentified
  source 1..373: note = Anaerolineae bacterium
  REGION 1..373: note = tr|A0A3D2UQG6|A0A3D2UQG6_9CHLR Queuine tRNA-ribosyltransferase OS=Anaerolineae bacterium; OX = 2052143 GN=tgt PE=3 SV=1
MFEFKITAKNNKSRTGIFSTPHGDLITPVFAPVGTQATVKTLTPEHLKEINASLVLSNTYHLYLRPGDELVRDMGGLHNFMQWHKPMLTDSGGFQVFSLAQTRKIDEDGVTFKSHIDGSTHRFTPEKSIAIQENLGADIIMAFDECADPNDHAYIKKAMERTHRWAERSVKAKTRSDQALFGIVQGGVNPTLRAESAAFISSLGTPGIAIGGLSVGETKQEMHDTLDVVMPLLPENKPCYLMGVGTPEDLINGVARGVDIFDCVLPTRLARHHSAFAPEGRLNLMNASFSRDEHPIDETCDCYACKTFTRAYIRHLIVAKELLAGTLISIHNLRALIRLMEQIRIYIADGSFESRVPELLGQWANNAKRKISE

SEQ ID NO: 51646 - protein, 375 aa, unidentified
  source 1..375: note = Anaerolineae bacterium
  REGION 1..375: note = tr|A0A1J4RYG1|A0A1J4RYG1_9CHLR Queuine tRNA-ribosyltransferase OS=Anaerolineae bacterium CG1_02_58_13 OX=1805002 GN=tgt PE=3 SV=1
MFDFTITARNGRARTGTFSTPHGTLQTPVFAPVGTQATVKTLTPAQVADLGATLVLSNTYHLYLRPGDDLISELGGLHRFMKWPRPMLTDSGGFQVFSLAQTRKIDDEGVTFKSHIDGSTHYFTPERAIRIQESLGADIIMAFDECSDPNDHEYSRVAMERTHYWAERCLKAKRRADQALFGIVQGGVNPDLRAASAKFIASLDTPGIAIGGLSVGETKDEMHAMLDVVTPLLPESKPRYLMGVGTPEDLINGVARGIDIFDCVLPTRLARHNSAFSPEGRLNLMNATFARDASPIDETCDCYTCKTFTRAYIRHLIVAKELLAGTLLSIHNLRALIRLMESIRGYIADGSFETRVPELLRQWQGNAERNTPVEP

SEQ ID NO: 51647 - protein, 389 aa, unidentified
  source 1..389: note = Anaerolineales bacterium
  REGION 1..389: note = tr|A0A524AN27|A0A524AN27_9CHLR Queuine tRNA-ribosyltransferase OS=Anaerolineales bacterium; OX = 2073117 GN=tgt PE=3 SV=1
MPFGFATEKKDERSQARAGLIQTPHGEIPTPAFAPVGTQATVKSVSPQELRELKAPIIMVNAYHLYLRPGPDTIARAGGLHSFMAWDGPIMTDSGGFQVFSLEHLRYIGDDGVTFRSHIDGSEHTFTPEKVIEIQEKLGADIIMCFDECPDPSDYEYNVQAMKRTHHWAERCRRAQKRDDQALFGIVQGGAFSDLRQESARFLASLDFLGYAIGGLSVGEPKETMHEMLEVTISLLPEDKPRHLLGVGSPEDLFECVARGIDTFDCVLPTRIARNGAFLTRQGRLNIRNARFVEDLAPVEEGCQCYTCRTFSRAYLRHLIKAEEILGLHLATIHNLHFLLNLTRQIRQSILDGTFADFKEGFLANYKIIPHEVRQRNKELRLKKLREKA

SEQ ID NO: 51648 - protein, 394 aa, unidentified
  source 1..394: note = Anaerolineales bacterium
  REGION 1..394: note = tr|A0A363U9C5|A0A363U9C5_9CHLR Queuine tRNA-ribosyltransferase OS=Anaerolineales bacterium; OX = 2073117 GN=tgt PE=3 SV=1
MSLRFSLIIDPMFEFQIASNTGGKNAGSSNNRARTGVFSTPHGDLLTPVFAPVGTQATVKTLTPEHLKNINATLVLSNTYHLYLRPGDELVRDMGGLHKFMQWHRPMLTDSGGFQVFSLAQTRKIDDDGVTFKSHIDGSTHRFTPEKSIAIQENLGADIIMAFDECSDPNDHAYSKLAMERTHRWAERSLKAQTRRDQALFGIVQGGVQADLRAASAKFIASLDTPGIAIGGLSVGETKKEMHDTLDVVVPLLPENKPRYLMGVGTPEDLINGVARGIDIFDCVLPTRLARHHSAFAPEGRLNLMNATFARDERPIDETCDCYACKTFTRAYIRHLIVAKELLAGTLISIHNLRALIRLMERIRVYISDGSFGSRVPELLKQWENNAKRKQTAL

SEQ ID NO: 51649 - protein, 376 aa, unidentified
  source 1..376: note = Anaeromassilibacillus sp.
  REGION 1..376: note = tr|A0A1Y4ETG4|A0A1Y4ETG4_9FIRM Queuine tRNA-ribosyltransferase OS=Anaeromassilibacillus sp. An250; OX = 1965604 GN=tgt PE=3 SV=1
MYRLIKQVGKARRGEFVTPHGIIQMPAFMNVATAGAIKGAVSALDLKELKCQVQLCNTYHLHLRPGDETVKKLGGLHTFTRWQGPILTDSGGFQVFSLAKLRNIKEEGVTFASHIDGHRIFMGPEESMRIQSNLGSTIAMAFDECMENPAEYNYARASCQRTVRWLYRCKEEHDRLNALPDTVNPKQMLWGINQGSTYEDLRIENMREIRKLDLDGYAIGGLAVGEPAEEMYRIIEAVEPEMPADKPRYLMGVGTPVNILEAVKRGVDIFDCVMPSRNARHGHAFTWEGCRNLMNAKYELDTLPLDPTCDCPACRNFSRAYIHHLFKSGEMLAMRLCVMHNIYFYNTLLERIRAALDNDQFDAFYEENVAKLGKRI

SEQ ID NO: 51650 - protein, 376 aa, unidentified
  source 1..376: note = Anaeromassilibacillus sp.
  REGION 1..376: note = tr|A0A1Y4NFI4|A0A1Y4NFI4_9FIRM Queuine tRNA-ribosyltransferase OS=Anaeromassilibacillus sp. An172; OX = 1965570 GN=tgt PE=3 SV=1
MYKLIKTEGSARRAEFITPHGTVQTPAFMNVATCGAIKGAVSALDLKDLKCQVQLCNTYHLHLRPGDKVIKQLGGLHKFTRWDGPILTDSGGFQVFSLAKLRNIKEEGVYFSSHIDGRKIFMGPEESMQIQSNLGSTIAMAFDECIENPAPYDYTKKSIERTVRWLERCKKEMTRLNSLEDTINKEQMLFGINQGSTYKDLRIEHMKTIADLDLDGYAIGGLAVGEPAEVMYEIIEAVEPYAPKDKIRYLMGVGTPVNILEAVYRGVDLFDCVMPSRNARHGHLFTKSGIINISNAKYELDDTPIDSQCQCPVCKNFSRAYIRHLLKSGEMLGMRLAVMHNLYFYNNLMEEIRNALDNGEFESYYRHYREILGKRI

SEQ ID NO: 51651 - protein, 372 aa, unidentified
  source 1..372: note = Anaeromicrobium sediminis
  REGION 1..372: note = tr|A0A267MMT0|A0A267MMT0_9CLOT Queuine tRNA-ribosyltransferase OS=Anaeromicrobium sediminis; OX = 1478221 GN=tgt PE=3 SV=1
MAIKYELIKVCKQSGARLGKIHTPHGVIETPIFMPVGTQATVKAMTPEELKKIEAQIILSNTYHLYLRPGHKLVEKAGGLHKFMNWDKPILTDSGGFQVFSLGDLRKISEEGVEFRSHIDGSKHFLSPEKAIEIENSLGADIIMAFDECAPYPADRQYVKNSLERTTRWLKRCIDAHKYPERQALFGIIQGGMYKDLRHQSLNEILSFDLPGYAVGGLSVGEPKDLMYEVLEYTTPLMPKDKPRYLMGVGSPDCLIEGVIRGIDMFDCVHPTRIGRNGTAMTSIGRVVIKNAKYAEDFMPLDPNCDCYTCKSYSRAYIRHLFKAGEILASRLVTYHNLHFLLNLMKEIRQAIMEDRLLDYRREFFQKYGYTL

SEQ ID NO: 51652 - protein, 677 aa, Anaeromyxobacter dehalogenans
  REGION 1..677: note = tr|Q2IHR7|Q2IHR7_ANADE Queuine tRNA-ribosyltransferase OS=Anaeromyxobacter dehalogenans (strain 2CP-C) OX=290397 GN=tgt PE=3 SV=1
MPFRFHPGPRDAETRARRGTLETTHGRVETPAFMPVGTRASVTGLTPADVREAGAEIILGNTYHLLLRPGPEAFRTLGGIHRFMRWDGPVLTDSGGFQIFSLSHDRVITEAGARFRSYVDGRPQLLTPESSIAMQTAIGSDVMMVLDVCLPSTAEAPELRAAMERTHRWALRSLAARTNPEQALFAIVQGGLDPALRAASAGFLTQHPFDGFAIGGLAVGDTREERGDVVARAAELLPPDRPRYLMGVGTPPDLLEAIGHGVDMFDCILPTTLAWQGTAFTSSGRVRLTRTEHRLSELPLDAACACETCRGWSRAYLHHLFKCREPLGPRLVSVHNLRHYLDLMRGARAAIEAGRYRAYQRERLEALDRHEHDRSARPPGRRRLPEPAPAPAPAPDAPPEGARFHLVVTSLGAPAVRDAESGEVMHPVIGPAVEAERLYVAQSRLRERLAEPGPPLVLLDVGLGAGANALAALRAAAAAPPGGRALEVVSFERDLGALALATSDEGAARLGLGPADVAAARALLRDGAWGSARARWRLVVGDLQETLPRQDLRADLIFWDPFSPRANPGLWTLAAFGDAWARSGPRCALYTYSTATATRSALLLAGFHVGVGDPSGPKEQTTAAATDPALLARPLDARWLARLERSSAPFPPDAPPDALARVRAHPQFAARRAEEVA

SEQ ID NO: 51653 - protein, 387 aa, Anaeromyxobacter dehalogenans
  REGION 1..387: note = tr|B8JH50|B8JH50_ANAD2 Queuine tRNA-ribosyltransferase OS=Anaeromyxobacter dehalogenans (strain 2CP-1 / ATCC BAA-258) OX=455488 GN=tgt PE=3 SV=1
MIRFQLLAEDAAARRGRLETAHGTIETPVFMPVGTAATVKTLEPRDLQALGAGIVLANTYHLYLRPGHERIQRLGRLHRFMSWPGAVLTDSGGFQVFSLGEKGAGRERGGPGLVEIAEEGVTFRSHLDGSRHFLSPERAIEVQEALGADVIMAFDECPPALADRAYHELSLARTQRWLVRCREAWREIEAREGPRCALFGIAQGGLFGDLRARAIEEAAALDLPGYALGGYAVGETPAEMWDGVARDAPRLPREKPRYLMGVGTPEDLLAGIAAGVDLFDCVLPTRTARNGLLFTSRGKLVIRNARYADDERPADPECGCYACRTFTRAYLRHLFKAGEILALRANTLHNLHFYLSLMADARRAIEEGRFAAFRAERLAAWRADGDG

SEQ ID NO: 51654 - protein, 726 aa, Anaeromyxobacter sp.
  REGION 1..726: note = tr|A7HD07|A7HD07_ANADF Queuine tRNA-ribosyltransferase OS=Anaeromyxobacter sp. (strain Fw109-5) OX=404589 GN=tgt PE=3 SV=1
MPFAYHPGPKDGATRARRGAITTPRGRIETPAFMPVGTRASVTGMTPDDLHALGAEIILGNTYHLLLRPGPGLVREMGGLHRFMRWPGPILTDSGGFQIFSLSHDRVVSEEGARFRSYVDCSRQLLSPERSIEVQTALGSDVMMVLDVCLPSTAEPAAIREAMDRTHRWALRSLAARTDPEQALFAIVQGGLVPGLRADSARFLTQHAFDGFAIGGLAVGDTRTERFDVVGRTAELLPEDRPRYLMGVGTPPDLLEAIGHGVDMFDCVLPTTMAWQGTAFTSTGRVRLTRGEHRASQAPLDSRCGCATCRTYTRGYLHHLVKCKEPLGPRLLSIHNLHHYLELMREARAAIEAGTYGAFARAKLGELDRHEHDASRRPPGRRASSTSTATPTLAGSLEAGHPEPFDSAASGRYAQDGLRDAASAAARSRRASTATSTATLTPTPIPTSTDTPTDPPARPRFEIVTTSLGAAAVRDGEAGEVMHPVIGPDVESERLYVAQSRLRERLAPPGPRLVLLDVGLGAAANALAALRAAEALPAAGRALEIVSFERELGALALAVSAEGAARLSLDPASLAAARALLAHGRHESPRVLWRLVQGDLLETLPREQVRADVVFWDPFSPRANPALWTWAAFAAARARCGDAATLYTYSTATATRAALLLAGFFVGQGDPSGPKEQTTAAATDPALLARPLDARWLARLSRSSAPFPDDAPPDALDRIRKHPQFR

SEQ ID NO: 51655 - protein, 387 aa, Anaeromyxobacter sp.
  REGION 1..387: note = tr|A0A0D6QKP6|A0A0D6QKP6_9DELT Queuine tRNA-ribosyltransferase OS=Anaeromyxobacter sp. PSR-1; OX = 1300915 GN=tgt PE=3 SV=1
MIRFQLLAEDGAARRGRLETAHGTIETPVFMPVGTAATVKTLEPRDLQALGAGIVLANTYHLYLRPGHERVQRLGRLHRFMSWPGAVLTDSGGFQVFSLGEKGAGRERGGPGLVEIAEEGVTFRSHLDGSRHFLSPEKAIEVQEALGADVIMAFDECPPALADRAYHELSLARTQRWLVRCRDAWRAIEAREGPRCALFGIAQGGLHGDLRARAIEEAAALDLPGYALGGYAVGETPAEMWDGVARDAPRLPREKPRYLMGVGTPEDLLAGIAAGVDMFDCVLPTRTARNGLLFTSRGKVVIRNARYADDERPADPECGCYACRTFTRAYLRHLFKAGEILALRANTLHNLHFYLSLMADARRAVEEGRFAAFRAERLSAWRAAGDG

SEQ ID NO: 51656 - protein, 376 aa, Anaeroplasma bactoclasticum
  REGION 1..376: note = tr|A0A397S035|A0A397S035_9MOLU Queuine tRNA-ribosyltransferase OS=Anaeroplasma bactoclasticum; OX = 2088 GN=tgt PE=3 SV=1
MEPVWYELKHVCKQTGARYGILHTPHGDFETPIFMPVGTKANVKTLIPSEIREISDGLILGNTYHLWLQPGDNLIHEFGGIRGFMNWDGALLTDSGGFQVFSLSSIRKIKEEGVYFRHHKSGAKLFLSPEKSIEIQNNLGADIIMSFDECPPFDSSEKYMRESVERTIRWAKRGKDAHKNPDTQALFGIVQGGGNKEIRKHCLEELEKIGFPGYSIGGLSVGESKEDMYEMLEYLKTIMPTNKPRYLMGVGSPDDLIVGSMNGIDMFDCVLPTRNARHGCAFTSYGKIQIKNSKYVRLHTPLDPECNCYVCKTFSMAYLNHLIREEEILGMRLVSYHNLYFLKNLMHQIRDAIKEDRLLDFKNEFFKKFGYTKEEN

SEQ ID NO: 51657 - protein, 384 aa, Anaerorhabdus furcosa
  REGION 1..384: note = tr|A0A1T4LJM7|A0A1T4LJM7_9BACT Queuine tRNA-ribosyltransferase OS=Anaerorhabdus furcosa OX=118967; GN = tgt PE=3 SV=1
MYNKPGDIMEKFKFELTHICKQTGARLGVIHTPHGSVETPMFMPVGTLATVKFVSPEELKEIGAQVVLSNTYHLWLRPGEDIVERAGGVQKFMNYNGPMLTDSGGFQVFSLSDARKIKEEGVTFKSHLNGDTLFLSPELSIQIQNKIGADMIMSFDECIPYPASYDYVKNSVERTLRWAKRGLDAHQRKEDQALFGIVQGGDYEDLRKHCAEELVKMDFPGYSIGGTSVGEDKETMTRMIQYSVKYLPENKPRYLMGVGAVNDILVAIENGIDMMDCVLPTRIARHGTLMTSEGRINIKRAIYKDDFRPLDPECDCECCRKYTRAYLNHLYRCNEGLGNRLMSIHNLRFLLRLTEQARQAIKEDRFGDFKKEILEKYAFDERGF

SEQ ID NO: 51658 - protein, 371 aa, Anaerosphaera aminiphila
  REGION 1..371: note = tr|A0A1M5RFG9|A0A1M5RFG9_9FIRM Queuine tRNA-ribosyltransferase OS=Anaerosphaera aminiphila DSM 21120 OX=1120995 GN=tgt PE=3 SV=1
MFEFELIKESKECKARLGKIKTNHGEIETPIFMPVGTRATVKTMTPEELKEIEAQIILSNTYHLFLKPGTDIIKEAGGLHKFMNWDKPILTDSGGFQVFSLSDNRKITEEGVEFRSHIDGSKKFLSPEISVDIQNILGSDIMMCFDECAPYPASHEYIEHSMNRTTRWAKRCKEHHKNTDNQALFGIIQGGMYKDLRRQSAEALVEFDFPGYAVGGLSVGEPLELMNEVLDYTTDYMPKDKPRYLMGVGTPDYLFEAVERGIDMADCVLPTRIARNGTVMTSSGKLVIKNGKYKSDFTPLDSECDCYVCKNYSRAYIRHLFNVDEILGLRLATIHNLHFLITLMKNIRESIKNDNFLEFKDDFYGKYGYNS

SEQ ID NO: 51659 - protein, 371 aa, Anaerosphaera sp.
  REGION 1..371: note = tr|A0A437S8W7|A0A437S8W7_9FIRM Queuine tRNA-ribosyltransferase OS=Anaerosphaera sp. GS7-6-2; OX = 2487351 GN=tgt PE=3 SV=1
MFEFELLKESKECKARLGEIKTNHGEIETPIFMPVGTRATVKTMAPEELKVIGAQIILSNTYHLFLKPGTDIIKEAGGLHKFMNWDKPILTDSGGFQVFSLSDNRKITEEGVEFRSHIDGSKKFLSPEVSIDIQNILGSDIIMCFDECAPYPATYEYIEHSMNRTTRWAKRCKEHHKNTDNQALFGIIQGGMFKDLREESAKALVELDFPGYAVGGLSVGEPLDLMNEILDYTTDFMPKDKPRYLMGVGTLDYLFEAVERGIDMADCVLPTRIARNGTVMTSKGRLVIKNGKYKADFKPLDEECDCYVCKNYSRAYIRHLFNVDEILGLRLATIHNLYFLLKLMENIRTSIRNDNFLEFKDDFYSKYGYNS

SEQ ID NO: 51660 - protein, 370 aa, Anaerosphaera sp.
  REGION 1..370: note = tr|A0A1E9AIF9|A0A1E9AIF9_9FIRM Queuine tRNA-ribosyltransferase OS=Anaerosphaera sp. HMSC064C01; OX = 1739304 GN=tgt PE=3 SV=1
MEFELIKKDSKTKARAGLMKLKHGVVETPIFMPVGTRATVKTMTPDELKDLGAQIILSNTYHLHLRPGEDIVQKAGGLHKFMNWDKPILTDSGGFQVFSLGKMRKITEEGVEFRSHIDGSKLFISPEKSIEIQTKLGSDIMMAFDECAPYPASREYIINSMHRTTRWLERCKEAWTDRENQNLFGIIQGGLYKDLRKEHAKEICSIDLPGYAVGGLSVGEPVELMNEVLDYVTDYMPEDKPRYNMGVGTPLYLFESVERGIDMADCVLPTRISRNGTLMTSHGRLVIKNAKYKEDFTKPDPECDCYTCRHYSRAYLRHLFNVDEILAYRLATIHNLTFLLKMMKNIRESILGDYFLEYKHEFYKKYGYLK

SEQ ID NO: 51661 - protein, 370 aa, unidentified
  source 1..370: note = Anaerospora hongkongensis
  REGION 1..370: note = tr|A0A4R1PWA4|A0A4R1PWA4_9FIRM Queuine tRNA-ribosyltransferase OS=Anaerospora hongkongensis; OX = 244830 GN=tgt PE=3 SV=1
MAITYELIKKCSQTGARVGRIYTPHGVFDTPMFMPVGTQATVKAVSPDELKAMGASIVLSNTYHLYLRPGADLVAEAGGLHKFMKWDGGILTDSGGFQVFSLGPLRKITEEGVSFRSHIDGSKHFLSPEKAIEVQMALGADIIMAFDECVPYPAEFEYARASTERTTRWAERCQKAHTRKDQALFGIVQGGMYKDLRTKSAQDLVKMDFPGYAVGGLSVGEPKQLMYEMLEHTVPQLPHNKPRYLMGVGTPDCLVEGVMHGIDMFDCVFPTRVARNGTAMTSKGRLVVKNAQYARDFRPIDADCDCYTCRNFSRAYVRHLLKTEEIFGLRLTTIHNLHFLIHFMKKMRQAILDDRFLAFRQEFWAHYQSH

SEQ ID NO: 51662 - protein, 378 aa, Anaerosporobacter mobilis
  REGION 1..378: note = tr|A0A1M7KQT5|A0A1M7KQT5_9FIRM Queuine tRNA-ribosyltransferase OS=Anaerosporobacter mobilis DSM 15930 OX=1120996 GN=tgt PE=3 SV=1
MYKLIKRDGMAKRGEFHTVHGTIQTPVFMNVGTCAAIKGGVSTEDLQGLKTQVELSNTYHLHVRPGDKVIKQLGGLHKFMVWDKPILTDSGGFQVFSLSGLRKIKEEGVYFNSHIDGRKIFMGPEESMQIQSNLASTIAMAFDECPPHPATREYMQNSVDRTTRWLERCKKEMARLNSLEDTINKNQMLFGINQGGTFEDIRIEHAKRISELNLDGYALGGLAVGESHSEMYRIIEETVPYLPVEKPTYLMGVGTPANILEAVDRGVDFFDCVYPTRNGRHGHAYTNLGKLNLLNARFELDTRPIEEGCNCPACQKYSRAYIRHLLKAKEMLGLRLLVMHNLYFYNTMMEEIREAIEQGRYKEYKKAKLAGFEANGES

SEQ ID NO: 51663 - protein, 374 aa, unidentified
  source 1..374: note = Anaerosporomusa subterranea
  REGION 1..374: note = tr|A0A154BU71|A0A154BU71_ANASB Queuine tRNA-ribosyltransferase OS=Anaerosporomusa subterranea; OX = 1794912 GN=tgt PE=3 SV=1
MTDAIRYELVKQCAHTGARAGILHTPHGSFNTPMFMPVGTQATVKAMSPRELTEMGAGIILSNTYHLFLRPGHELVAEAGGLHKFMGWDRGILTDSGGFQVFSLGDLRKISEEGVAFRSHIDGSRQFLSPEIATQVQNALGSDILMAFDECVPYPAEYDYAKRSTERTTRWAERCLKAHSRADQGLFGIVQGGMYKDLRAQSAAELTSLDFPGYGIGGLSVGEPKHLMYEMLEHTTPRLPTNKPRYLMGVGTADCLVEGVMRGVDMFDCVFPTRVARNGTTMTKNGRLVVKNAEFARDLRPIDPDCGCYACQNFSRAYIRHLFKADEIFGLRLTTIHNLYHLLDFMRRMRQAIIEDRFLAFREEFWEYYPKEEN

SEQ ID NO: 51664 - protein, 375 aa, Anaerostipes caccae
  REGION 1..375: note = tr|B0MBX6|B0MBX6_ANACD Queuine tRNA-ribosyltransferase OS=Anaerostipes caccae (strain DSM 14662 / NCIMB 13811 / L1-92) OX=411490 GN=tgt PE=3 SV=1
MYQLIKKDGKAKRGRFTTVHGTIETPVFMNVGTVAAIKGAVSTDDLKEIRTQVELSNTYHLHVRPGDRLIKEFGGLHKFMNWDRPILTDSGGFQVFSLAKLRKIKEEGVSFSSHIDGRKIFMGPEESMQIQSNLGSTIAMAFDECPPHPAERKYMQDSVDRTTRWLYRCKKEMDRLNRLPDTVNPHQMLFGINQGGTYEDIRISHAKEISRLDLDGYALGGLAVGESHAEMYRILDETVPYLPEAKPTYLMGVGTPANILEAVDRGVDFFDCVYPTRNGRHGHVYTNHGKMNLFNKKYELDHRPIEEGCQCPACRSYSRAYIRHLLKAKEMLGMRLCVLHNLYFYNTMMEEIRDAIEQGQYREYKERKLSGMENK

SEQ ID NO: 51665 - protein, 375 aa, unidentified
  source 1..375: note = Anaerostipes hadrus
  REGION 1..375: note = tr|A0A174FAA3|A0A174FAA3_ANAHA Queuine tRNA-ribosyltransferase OS=Anaerostipes hadrus OX=649756; GN = tgt PE=3 SV=1
MYELIKKDGRAKRGRLTTVHGVIETPVFMNVGTVAAIKGAVSTDDLREIGTQVELSNTYHLHVRTGDKLIKEFGGLHKFMNWDRPILTDSGGFQVFSLAKLRKIKEEGVSFSSHIDGRKIFMGPEESMQIQSNLGSTIAMAFDECPPHPATREYMQNSVDRTTRWLVRCKKEMDRLNSLEDTVNPHQMLFGINQGGTFEDIRIEHAKEISKLNLDGYALGGLAVGETHDEMYHIIEETVPYLPEDKPTYLMGVGTPVNILEAVDRGVDFFDCVYPTRNGRHGHVYTNQGKLNMFNKKYELDHRPIEEGCQCPACRSYSRAYIRHLLKAKEMLGMRLCVLHNLYFYNTMMSEIRQAIEEGNYKEYKKRKIDGMMNQ

SEQ ID NO: 51666 - protein, 375 aa, unidentified
  source 1..375: note = Anaerostipes hadrus
  REGION 1..375: note = tr|D4MVT5|D4MVT5_ANAHA Queuine tRNA-ribosyltransferase OS=Anaerostipes hadrus OX=649756; GN = tgt PE=3 SV=1
MYELIKKDGRAKRGRLTTVHGVIETPVFMNVGTVAAIKGAVSTDDLKDIGTQVELSNTYHLHVRTGDKLIKEFGGLHKFMHWDRPILTDSGGFQVFSLAKLRKIKEEGVSFASHIDGRKIFMGPEESMQIQSNLGSTIAMAFDECPPHPATREYMQNSVDRTTRWLRRCKKEMDRLNSLEDTVNPHQMLFGINQGGTFEDIRIEHAKEISKMDLDGYALGGLAVGETHEEMYNILEKTVPYLPEDKPTYLMGVGTPVNILEAVDRGVDFFDCVYPTRNGRHGHVYTNQGKLNMFNKKYELDHRPIEEGCQCPACRSYSRAYIRHLLKAKEMLGMRLCVLHNLYFYNTMMSEIRQAIEEGNYKEYKKRKIDGMMNQ

SEQ ID NO: 51667 - protein, 375 aa, unidentified
  source 1..375: note = Anaerostipes rhamnosivorans
  REGION 1..375: note = tr|A0A4P8IA30|A0A4P8IA30_9FIRM Queuine tRNA-ribosyltransferase OS=Anaerostipes rhamnosivorans; OX = 1229621 GN=tgt PE=3 SV=1
MYQLIKKDGKAKRGRLTTVHGTIETPVFMNVGTVAAIKGAVSTDDLRQIKTQVELSNTYHLHVRTGDRLIKEFGGLHKFMNWDRPILTDSGGFQVFSLAKLRKIKEEGVSFSSHIDGRKIFMGPEESMQIQSNLGSTIAMAFDECPPHPATREYMQNSVDRTTRWLVRCKKEMERLNSLPDTVNPHQMLFGINQGGTFEDIRINHAKEISRLDLDGYALGGLAVGESHSEMYRILDETVPFLPEAKPTYLMGVGTPANILEGVDRGVDFFDCVYPTRNGRHGHVYTNHGKMNLFNKKYELDHRPIEEGCQCPACRSYSRAYIRHLLKAKEMLGMRLCVLHNLYFYNTMMEEIREAIEQGCYKEYKERKLFGMENK

SEQ ID NO: 51668 - protein, 375 aa, Anaerostipes sp.
  REGION 1..375: note = tr|R6QPY7|R6QPY7_9FIRM Queuine tRNA-ribosyltransferase OS=Anaerostipes sp. CAG:276; OX = 1262699 GN=tgt PE=3 SV=1
MYQLIKKDGKAKRGRFTTVHGTIETPVFMNVGTVAAIKGAVSTDDLKEIRTQVELSNTYHLHVRPGDRLIKEFGGLHKFMNWDRPILTDSGGFQVFSLAKLRKIKEEGVSFSSHIDGRKIFMGPEESMQIQSNLGSTIAMAFDECPPHPAERKYMQDSVDRTTRWLYRCKKEMDRLNRLPDTVNPHQMLFGINQGGTYEDIRISHAKEISRLDLDGYALGGLAVGESHEEMYRILDETVPYLPEAKPTYLMGVGTPANILEAVDRGVDFFDCVYPTRNGRHGHVYTNHGKMNLFNKKYELDHRPIEEGCQCPACRSYSRAYIRHLLKAKEMLGMRLCVLHNLYFYNTMMEEIRDAIEQGQYREYKERKLSGMENK

SEQ ID NO: 51669 - protein, 378 aa, Anaerostipes sp.
  REGION 1..378: note = tr|A0A1Q9K5A1|A0A1Q9K5A1_9FIRM Queuine tRNA-ribosyltransferase OS=Anaerostipes sp. 992a; OX = 1261637 GN=tgt PE=3 SV=1
MYELLKKDGRAKRGRLTTVHGVIETPVFMNVGTVAAIKGAVSTDDLKEIKTQVQLSNTYHLHVRTGDQLIKQFGGLHKFMVWDRPILTDSGGFQVFSLAGLRKIKEEGVYFQSHIDGHKIFMGPEESMQIQSNLGSTIAMAFDECPPHPATREYMQNSVDRTTRWLERCKKEMARLNTLEDTVNPHQLLFGINQGGTFEDIRIQHAKTISEMDLDGYALGGLAVGESHEEMYRILDETVPYLPENKPTYLMGVGTPANILESVERGVDFFDCVYPTRNGRHGHVYTNEGKLNLFNKKYELDARPIQEGCQCPACRSYSRAYIRHLLKAKEMLGLRLCVLHNLYFYNTMMEEIRLAIEEGRFQEYKKAKLEGFQINDKK

SEQ ID NO: 51670 - protein, 377 aa, unidentified
  source 1..377: note = Anaerotignum lactatifermentans
  REGION 1..377: note = tr|A0A1M6TWK9|A0A1M6TWK9_9FIRM Queuine tRNA-ribosyltransferase OS=Anaerotignum lactatifermentans DSM 14214 OX=1121323 GN=tgt PE=3 SV=1
MYKLLKTCGRAKRGEFHTPHGVIQTPVFMNVGTIAAIKGALSTEDLERVKCQVELSNTYHLHVRPGDEIIKKLGGLHKFMVWDKPILTDSGGFQVFSLTTLRKITEEGVYFSSHVDGRKIFMGPEESMRIQSNLGSTIAMAFDECIGIPAERTYVENSVARTTRWLERCKKEMARLNSLDDTINKQQMLFGINQGATYEDIRIEHAKRIAEMDLDGYAIGGLAVGESHAEMYHIIEEVVPYLPQNKPTYLMGVGTPENILEAVERGVDFFDCVLPSRNGRHAHVYTNAGKLNLMNAKYELDERPIDETCTCPACSRYSRAYIRHLFKAKEMLAMRLCVLHNLHFFNTMMEEIRQAMDEDRFPQYKKEKLEGFRRNGM

SEQ ID NO: 51671 - protein, 377 aa, unidentified
  source 1..377: note = Anaerotignum lactatifermentans
  REGION 1..377: note = tr|A0A1Y3U3J1|A0A1Y3U3J1_9FIRM Queuine tRNA-ribosyltransferase OS=Anaerotignum lactatifermentans; OX = 160404 GN=tgt PE=3 SV=1
MYKLLKTCGRAKRGEFHTPHGVIQTPVFMNVGTIAAIKGALSTEDLERVKCQVELSNTYHLHVRPGDENIKKLGGLHKFMVWDKPILTDSGGFQVFSLTTLRKITEEGVYFSSHVDGRKIFMGPEESMRIQSNLGSTIAMAFDECIGIPAERTYVENSVARTTRWLERCKKEMARLNSLDDTINKQQMLFGINQGAIYEDIRIEHAKRIAEMDLDGYAIGGLAVGESHAEMYHIIEEVVPYLPQNKPTYLMGVGTPENILEAVERGVDFFDCVLPSRNGRHAHVYTNAGKLNLMNAKYELDERPIDETCTCPACSRYSRAYIRHLFKAKEMLAMRLCVLHNLHFFNTMMEEIRQAMDEDRFPQYKKEKLEGFRRNGM

SEQ ID NO: 51672 - protein, 381 aa, unidentified
  source 1..381: note = Anaerotignum neopropionicum
  REGION 1..381: note = tr|A0A136WFW7|A0A136WFW7_9FIRM Queuine tRNA-ribosyltransferase OS=Anaerotignum neopropionicum; OX = 36847 GN=tgt PE=3 SV=1
MYKLLKTCGRAKRGEFHTPHGVIQTPVFMNVGTLAAIKGALSTEDLEQIKCQVELSNTYHLHLRPGDKIVKQLGGLHKFMVWDRPILTDSGGFQVFSLTSLRKITEEGVHFSSHIDGRKIFMGPEESMQIQSNLASTIAMAFDECIGIPAERPYVEASVERTTRWLERCKKEMTRLNSLEDTINKKQMLFGINQGAIYADIRIEHAKRISELDLDGYAVGGLAVGETHAEMYHILEEVVPFLPQKKPTYLMGVGTPENILESVERGIDFFDCVLPARNGRHAHVYTNAGKLNLLNAKFELDETPIDATCDCPVCRRYTKAYIRHLFKAKEMLAMRLCVMHNLYFFNTMMEEIRLALDENRFPEYKKAKLEGFSASQRQIIP

SEQ ID NO: 51673 - protein, 378 aa, unidentified
  source 1..378: note = Anaerotignum propionicum
  REGION 1..378: note = tr|A0A0X1U881|A0A0X1U881_ANAPI Queuine tRNA-ribosyltransferase OS=Anaerotignum propionicum DSM 1682 OX=991789 GN=tgt PE=3 SV=1
MYKLLKTCGRAKRGEFHTPHGVIQTPVFMNVGTLAAIKGALSTEDLEQIKCQVELSNTYHLHLRPGDKVVKQLGGLHKFMVWDKPILTDSGGFQVFSLTSLRKITEEGVLFNSHIDGRKIFMGPEESMQIQSNLASTIAMAFDECIGIPAERPYVEASVARTTRWLERCKKEMSRLNNLDDTINKKQMLFGINQGAIYPDIRIEHAKRISELDLDGYAVGGLAVGETHAEMYHVLEEVVPYLPQNKPTYLMGVGTPENILESVERGIDFFDCVLPARNGRHAHVYTNKGKLNLMNAKYELDEAPIDESCDCPVCRRYTRAYIRHLFKAKEMLAMRLCVMHNLYFFNTMMEEIRQALDEDRFPAYKKAKLNGFEKSKGK

SEQ ID NO: 51674 - protein, 377 aa, unidentified
  source 1..377: note = Anaerotignum sp.
  REGION 1..377: note = tr|A0A401LF59|A0A401LF59_9FIRM Queuine tRNA-ribosyltransferase OS=Anaerotignum sp. KCTC 15736; OX = 2358141 GN=tgt PE=3 SV=1
MYKVLKKCGRAKRAEFHTPHGVIQTPVFMNVGTAGAIKGAVSTEDLEQLKCQVELSNTYHLHLRPGDKLIKEMGGLHKFMVWDKPILTDSGGFQVFSLGLLRKIKEEGVYFSSHIDGRKIFMGPEESMQIQSNLGSTIAMAFDECIGLPAERPYVEASVARTTRWLERCKKEMHRLNQLEDTVNPKQMLFGINQGATFEDIRIEHAKRISEMELDGYAIGGLAVGESHAEMYRILDEVVPYLPEEKPTYLMGVGTPENILEAVERGVDFFDCVLPARNGRHAHVYTNKGKLNLLNAKYEKDDSPIDDTCGCPACRRYSRAYIRHLFKAKEMLAMRLCVMHNLYFFNSMMEEIRQAIEEDRFHAYKAAKLDGFRENGK

SEQ ID NO: 51675 - protein, 376 aa, Anaerotruncus colihominis
  REGION 1..376: note = tr|B0PB29|B0PB29_9FIRM Queuine tRNA-ribosyltransferase OS=Anaerotruncus colihominis DSM 17241 OX=445972 GN=tgt PE=3 SV=1
MYKLLKQEGRARRGEFKTVHGTVQTPAFMNVGTSAAIKGGISSIDLVDLKCQVELCNTYHLHVRPGDDVIRAMGGLHQFMNWHRPILTDSGGFQVFSLAKLRKIKEEGVTFACHLDGKRIFMGPEESMRIQSNLGSTIAMAFDECIENPAPYDYTERSIARTTRWLARCKREMARLNELPDTINPNQMLFGINQGSTYADLRIRHMQEIAALDLNGYAIGGLAVGETAQEMYDTIEAVEPYMPMDKPRYLMGVGTPVNILEGVYRGVDLFDCVMPSRNARHGTLFTWEGIRIMHNEKYKTDSRPLDEHCGCPTCQNYSRGYLRHLFRVNEMLAMRLGVQHNLYFYNTLMEKIREALDTGTYEAFYRTWVPILGKRI

SEQ ID NO: 51676 - protein, 376 aa, Anaerotruncus colihominis; identical to SEQ ID NO: 51675
  REGION 1..376: note = tr|A0A174PYW1|A0A174PYW1_9FIRM Queuine tRNA-ribosyltransferase OS=Anaerotruncus colihominis; OX = 169435 GN=tgt PE=3 SV=1

SEQ ID NO: 51677 - protein, 376 aa, Anaerotruncus sp.
  REGION 1..376: note = tr|A0A498CPR8|A0A498CPR8_9FIRM Queuine tRNA-ribosyltransferase OS=Anaerotruncus sp. 22A2-44; OX = 2321404 GN=tgt PE=3 SV=1
MYTLLKQDGHARRGTFETVHGAVQTPAFMNVGTSAAIKGGISSTDLVELKCQVELCNTYHLHVRPGDDVIRAMGGLHKFMNWHRPILTDSGGFQVFSLAKLRKIKEEGVTFACHLDGKRIFMGPEESMRIQSNFGSTIAMAFDECIENPAPYDYTERSIARTTRWLVRCKEEMARLNAQPDTLNPRQMLFGINQGSTYADLRVRHMQEIAALGLDGYAIGGLAVGETAQEMYDTIEAVEPHMPADRPRYLMGVGTPVNIIEGVYRGIDLFDCVMPSRNARHGTLFTWDGIRILHNEKYKTDESPLDEHCGCPTCRNFSRGYLRHLFRVNEMLGMRLGVQHNLYFYNTLMEKIREAIEQGTYDAFRRHWVPILGRRI

SEQ ID NO: 51678 - protein, 376 aa, Anaerotruncus sp.
  REGION 1..376: note = tr|A0A3A9J3C2|A0A3A9J3C2_9FIRM Queuine tRNA-ribosyltransferase OS=Anaerotruncus sp. 1XD22-93; OX = 2320082 GN=tgt PE=3 SV=1
MYKLLKQEGHARRGEFETVHGTVQTPAFMNVGTSAAIKGGISSIDLVDLKCQVELCNTYHLHVRPGDDVIRGLGGLHKFMNWKRPILTDSGGFQVFSLAKLRKIKEEGVTFACHLDGHRIFMGPEESMRIQSNLGSTIAMAFDECIENPAPFEYTERSIERTTRWLARCKTEMARLNSLPDTLNPHQLLFGINQGSTYHSLRIRHMQEIAALELDGYAIGGLAVGETAQEMYDTIEAVEPYMPKEKIRYLMGVGTPVNILEGVYRGVDLFDCVMPSRNARHGTLFTWEGIRILHNEKYKTDSEPLDPQCGCPVCQNHSRGYLRHLFRANEILASRLGVMHNLYFYNTLMEKIRESLDNGTYSAFYQHWVPILGRRI

SEQ ID NO: 51679 - protein, 378 aa, Anaerovibrio lipolyticus
  REGION 1..378: note = tr|A0A1M6EMS7|A0A1M6EMS7_9FIRM Queuine tRNA-ribosyltransferase OS=Anaerovibrio lipolyticus DSM 3074 OX=1120997 GN=tgt PE=3 SV=1
MPAITYELIKQDPATGARAGIIHTPHGSFPTPIFMPVGTQASVKGVSPEELHDMGAGIILSNTYHLFLRPGSDLVREAGGLHKFMNWDGAILTDSGGFQVFSLGDLRKITEEGVTFRSHIDGSKKFLSPEVSMKVQMDLGSDIVMAFDECIPYPADYDYAKASTARTTRWAQRCKEVMTSPHQGLFGIVQGGMYKDLRTRSVNELVEMDFPGYAVGGLSVGEPKELMYEMLDHTVEQLPKDKPRYLMGVGTPDCLVEGVMHGIDMFDCVFPTRVARNGTAMTWNGRLVMKNAEFTSDFRPLEEGCDCYACRNFSRAYIRHLVRANEIFGLRLLSLHNLRFLQRFMHEMRQSIIEERFGEFRRNFLDNYNYGAKSHSCN

SEQ ID NO: 51680 - protein, 378 aa, Anaerovibrio lipolyticus; identical to SEQ ID NO: 51679
  REGION 1..378: note = tr|A0A0B2JW18|A0A0B2JW18_9FIRM Queuine tRNA-ribosyltransferase OS=Anaerovibrio lipolyticus; OX = 82374 GN=tgt PE=3 SV=1

SEQ ID NO: 51681 - protein, 378 aa, Anaerovibrio sp.
  REGION 1..378: note = tr|A0A3D4ALY2|A0A3D4ALY2_9FIRM Queuine tRNA-ribosyltransferase OS=Anaerovibrio sp. OX=1872532; GN = tgt PE=3 SV=1
MPAITYELIKQDPATGARAGIIHTPHGSFPTPIFMPVGTQASVKGVSPEELHDMGAGIILSNTYHLFLRPGSALVREAGGLHKFMNWDGAILTDSGGFQVFSLGDLRKITEEGVTFRSHIDGSKKFLSPEVSMRVQMDLGSDIVMAFDECIPYPADYDYAKASTARTTRWAQRCKEVMTSPQQGLFGIVQGGMYKDLRTRSVNELVEMDFPGYAVGGLSVGEPKELMYEMLDHTVGQLPKNKPRYLMGVGTPDCLVEGVMHGIDMFDCVFPTRVARNGTAMTWNGRLVMKNAEFTSDFRPLEEDCDCYACRNFSRAYIRHLVRANEIFGLRLLSLHNLRFLQRFMHEMRQSIIEERFGEFRRNFLDNYNYGAKSHSCN

SEQ ID NO: 51682 - protein, 376 aa, Anaerovibrio sp.
  REGION 1..376: note = tr|A0A1X1Q5W0|A0A1X1Q5W0_9FIRM Queuine tRNA-ribosyltransferase OS=Anaerovibrio sp. JC8 OX=1240085; GN = tgt PE=3 SV=1
MPAITYELIKQDPATGARAGIIHTPHGSFPTPIFMPVGTQASVKGVSPEELHDMGAGIILSNTYHLFLRPGSDLVREAGGLHKFMNWDGAILTDSGGFQVFSLGDLRKITEEGVTFRSHIDGSKKFLSPEVSMKVQMDLGSDIVMAFDECIPYPADYDYAKASTARTTRWAQRCKEVMTSEHQGLFGIVQGGMYKDLRTRSVNELVEMDFPGYAVGGLSVGEPKELMYEMLDHTVEQLPKDKPRYLMGVGTPDCLVEGVMHGIDMFDCVFPTRVARNGTAMTWHGRLVMKNAEFTSDFRPLEEGCDCYACRNFSRAYIRHLVRANEIFGLRLLSLHNLRFLQRFMHEMRQSIIEDRFGEFRRNFLDSYNYSAKRAD

SEQ ID NO: 51683 - protein, 372 aa, Anaerovirgula multivorans
  REGION 1..372: note = tr|A0A239DQM6|A0A239DQM6_9FIRM Queuine tRNA-ribosyltransferase OS=Anaerovirgula multivorans; OX = 312168 GN=tgt PE=3 SV=1
MALTYELIKECKQSGARLGKIHTSRGIIETPIFMPVGTQATVKTMAPEELKEIKSQIILSNTYHLYLRPGHHLIEKAGGLHKFMNWDKPILTDSGGFQVFSLGDLRKISEEGVEFRSHLDGSKHFISPEKAVEIQNALGSDIMMVFDECAPYPADTSYVKSSLERTTRWAKRCKEAHKNTETQNLFGIIQGGMYADLRKQSAEELIELDFPGYALGGLSVGEPKPLMYEVLETTTPLMPKNKPRYLMGVGSPDALIEGVIRGIDMFDCVLPTRIARNGTAMTSHGKVVIKNAKYTENFEGLDLECSCYTCKNYSKAYLRHLFKANEVLGLRLLSYHNLYFLLKLMEEIREAIKKDRLLDYRKNFFEKYGYEV

SEQ ID NO: 51684 - protein, 420 aa, Anaplasma centrale
  REGION 1..420: note = tr|D1AU65|D1AU65_ANACI Queuine tRNA-ribosyltransferase OS=Anaplasma centrale (strain Israel) OX=574556 GN=tgt PE=3 SV=1
MYARLYQNFNFHVLLQHNRARVGVISTPHGVLYTPAFIFCATKAAIKSLDMKTVKECGTQIVLSNTYHLMLQPGAETVAALGGLHNMLGWKGPMLTDSGGYQIFSLGYGSVSEELKGKRKRANSSLIKIDESGAIFRSYINGQLHHLTPEKSMHIQRMLGADLVVVLDECTPFHTSYEYTAQSMHMSNRWALRSLEEFQKTADGTQALYCVIQGGVHSDLRRVSCEFANSSPFFGNAIGGSLGSHKQQMYDTVSLTTSLLDKSRPVHLLGIGNVCDILHGVMNGVDTFDCVYPTRIARHGAALVRPENRISPDREYVNLYNSEFARSLAPIEQDCGCYTCNHHSRGYLHHLLKAKELLAYTLITIHNVYFMNSLMQRVRRAIAGETLEQEYEYWLGGRGAAPDSASPQPPPSGKTPTAPR

SEQ ID NO: 51685 - protein, 420 aa, Anaplasma marginale
  REGION 1..420: note = tr|B9KJ31|B9KJ31_ANAMF Queuine tRNA-ribosyltransferase OS=Anaplasma marginale (strain Florida) OX=320483 GN=tgt PE=3 SV=1
MYARLYQNFNFHVLLQHNRARVGVISTPHGVLYTPAFIFCATKAAIKSLDMKTVKECGTQIVLSNTYHLMLQPGAETVAALGGLHNMLGWKGPMLTDSGGYQIFSLGYGSVSEELKGKRRRANSSLIKIDESGAIFRSYINGQLHHLTPEKSMHIQRMLGADLVVVLDECTPFHTSYEYTAQSMHMSNRWALRSLEEFQKTADGTQALYCVIQGGVHSDLRRVSCEFANSSPFFGNAIGGSLGSHKQQMYDTVSLTTSLLDKSRPVHLLGIGNVCDILHGVMNGVDTFDCVYPTRIARHGAALVRPENRISPDREYVNLYNSKFARSLAPIEQDCGCYTCNHHSRGYLHHLLKAKELLAYTLITIHNVYFMNSLMQRVRRAIAGETLEQEYEYWLGKRGAAPDSASPQPPPSGKTPTAPR

SEQ ID NO: 51686 - protein, 420 aa, Anaplasma marginale
  REGION 1..420: note = tr|A0A5D8YBI3|A0A5D8YBI3_ANAMA Queuine tRNA-ribosyltransferase OS=Anaplasma marginale OX=770; GN = tgt PE=3 SV=1
MYARLYQNFNFHVLLQHNRARVGVISTPHGVLYTPAFIFCATKAAIKSLDMKTVKECGTQIVLSNTYHLMLQPGAETVAALGGLHNMLGWKGPMLTDSGGYQIFSLGYGSVSEELKGKRRRANSSLIKIDESGAIFRSYINGQLHHLTPEKSMHIQRMLGADLVVVLDECTPFHTSYEYTAQSMHMSNRWALRSLEEFQKTADGTQALYCVIQGGVHSDLRHVSCEFANSSPFFGNAIGGSLGSHKQQMYDTVSLTTSLLDKSRPVHLLGIGNVCDILHGVMNGVDTFDCVYPTRIARHGAALVRPENRISPDREYVNLYNSKFARSLAPIEQDCGCYTCNHHSRGYLHHLLKAKELLAYTLITIHNVYFMNSLMQRVRRAIAGETLEQEYEYWLGGRGAAPDSASPQPPPSGKTPTAPR

SEQ ID NO: 51687 - protein, 420 aa, Anaplasma ovis
  REGION 1..420: note = tr|A0A2N4SUX9|A0A2N4SUX9_9RICK Queuine tRNA-ribosyltransferase OS=Anaplasma ovis OX=142058 GN=tgt; PE = 3 SV=1
MYARLYQNFNFHVLLQHNRARVGVISTPHGVLYTPAFIFCATKAAIKSLDMKTVKECGTQIVLSNTYHLMLQPGAETVAALGGLHNMLGWKGPMLTDSGGYQIFSLGYGSVSEELKGKRRRANSSLIKIDESGAIFRSYINGQLHHLTPEKSMHIQRMLGADLVVVLDECTPFHTSYEYTAQSMHMSNRWALRSLEEFQKTADGTQALYCVIQGGVHSDLRRVSCEFANSSPFFGNAIGGSLGSHKQQMYDTVSLTTSLLDKSRPVHLLGIGNVCDILHGVMNGVDTFDCVYPTRIARHGAALVRPENRISPDREYVNLYNSKFARSLAPIEQDCGCYTCNHHSRGYLHHLLKAKELLAYTLITIHNVYFMNSLMQRVRRAIAGETLEQEYEYWLGGRGAAPDSASPQPPPSGKTPTAPR

SEQ ID NO: 51688 - protein, 417 aa, Anaplasma ovis
  REGION 1..417: note = tr|A0A2Z4VBK7|A0A2Z4VBK7_9RICK Queuine tRNA-ribosyltransferase OS=Anaplasma ovis str. Haibei; OX = 1248439 GN=tgt PE=3 SV=1
MYTRLYQNFNFHVLLQHNRARVGVISTPHGTLYTPAFIFCATKAAVKSLDMKVVKECGTQIVLSNTYHLMLQPGEETVAALGGLHNMLGWTGPMLTDSGGYQIFSLGYGSVSEELKGKRRRANPSLIKIDESGAIFRSYINGQLYHLTPEKSIHIQRMLGADLVVVLDECTPFHTSYEYTAQSMHMSNRWALRSLEEFQKTSDGTQALYCVIQGGVHSDLRHVSCEFANSSPFFGNAIGGSLGSCKQQMYDTVSLTTSLLDRNRPVHLLGIGNVCDILHGVMNGVDTFDCVYPTRIARHGAALVKPENRTSPDREYINLYNSEFTRSLAPIEQDCGCYTCNHHSRGYLHHLLKAKELLAYTLITTHNVYFMNSLMQRIRRAIVQETLEQEYEYWLGGYGVPESASPQSVTQENPNCA

SEQ ID NO: 51689 - protein, 392 aa, Anaplasma phagocytophilum
  REGION 1..392: note = tr|A0A181ZIU7|A0A181ZIU7_ANAPH Queuine tRNA-ribosyltransferase OS=Anaplasma phagocytophilum; OX = 948 GN=tgt PE=3 SV=1
MYRNFNFKVLLESGKARVGTITTPHGSIFTPAFIFCATKASIKSLTIQDVQECGTQIILSNTYHLMLQPGEQVVESLGGLHKMMGWNGPMLTDSGGYQIFSLGYGSVSEELKGKLRKSSGTSLIKIDESGARFRSYINGSTYHLTPERSVEIQRKLGADLVVVLDECTPFHTSYEYTNQSMLMSTRWAQRSLEAFKSTDDGSQALYCVIQGGVYPDLRKTSCEFANNSPFFGHAIGGSLGACKQQMYDIVSLTYDMLDKTRPVHLLGIGNVIDIFHGVLQGIDTFDCVYPTRIARHGAALVKPENRDMHGREYINLNSAKFRTSTDAIEQDCICYTCRTHSKGYLHHLLKAKEILAYSLITIHNIQFMNDLMQLIRKSISNNSLQQELARWS

SEQ ID NO: 51690 - protein, 392 aa, Anaplasma phagocytophilum
  REGION 1..392: note = tr|A0A181ZRD2|A0A181ZRD2_ANAPH Queuine tRNA-ribosyltransferase OS=Anaplasma phagocytophilum; OX = 948 GN=tgt PE=3 SV=1
MYRNFNFKVLLESGKARVGTITTPHGSIFTPAFIFCATKASIKSLTIQDVQECGTQIILSNTYHLMLQPGEQVVESLGGLHKMMGWNGPMLTDSGGYQIFSLGYGSVSEELKGKLRKSSGTSLIKIDESGARFRSYINGSTYHLTPERSVEIQRKLGADLVVVLDECTPFHTSYEYTNQSMLMSTRWAQRSLEAFKSTDDGSQALYCVIQGGVYPDLRKTSCEFANNSPFFGHAIGGSLGACKQQMYDIVSLTYDMLDKTRPVHLLGIGNVIDIFHGVLEGIDTFDCVYPTRIARHGAALVKPENRDMHGREYINLNSAKFRTSTDAIEQDCICYTCRTHSKGYLHHLLKAKELLAYPLITIHNIQFMNDLMQLIRKSISNNSLQQELARWS

SEQ ID NO: 51691 - protein, 416 aa, unidentified
  source 1..416: note = Ancrocorticia populi
  REGION 1..416: note = tr|A0A2V1K668|A0A2V1K668_9ACTO Queuine tRNA-ribosyltransferase OS=Ancrocorticia populi OX=2175228; GN = tgt PE=3 SV=1
MENTGFTLQNRLENGLGRTGIIHTPHGDIETPAFIPVGTKATVKAVLPESVASIGAQAVLANAYHLYLQPGSDIVDGAGGLSKFMNWPGPTYTDSGGFQVLSLGSGFKKVLSEEFSGKGKSDLDVAPSKERLANVDDDGVSFRSHLDGSMHRFTPEVSMKIQHELGADIMFAFDELTTLLNSRGYQEEALERTRLWAERCLVAHRELTEARSNKPYQQLFGVIQGAQYEDLRRKAARDLGAMEVNGQRFDGFGIGGALEKENLGTIVGWVSEELPEDRARHLLGISEPDDFFAAVEAGADTFDCVNPSRVARNAAIYSPDGRFNVTRQQFKRDFGPLVPGCACYTCTHYSRAYLHHAFKAKEMISSTLATIHNEYYTVQLVASIRRAMQDGTYAEFKAETLGRFYAGEWGRVDSAN

SEQ ID NO: 51692 - protein, 384 aa, Ancylobacter aquaticus
  REGION 1..384: note = tr|A0A4R1I2U4|A0A4R1I2U4_ANCAQ Queuine tRNA-ribosyltransferase OS=Ancylobacter aquaticus OX=100; GN = tgt PE=3 SV=1
MNNPDRREQTDFHYRLHATDGAARHGEVVTPRGVIRTPAFMPVGTAGTVKGMYPEQVRDLGADILLGNTYHLMLRPGAERVARLGGLHELMRWPHPILTDSGGFQVMSLAGLRKMSEKGVTFRSHIDGAYHELTPERSIEIQGLLGADIQMQLDECVRLPASKDEISRALQLSLRWAERSKKAFEAQPKERALFGIVQGGDDAELRIESARGLIDIDFPGYSIGGLAVGEPQAVMLAMLEVVTPILPVDKPRYLMGVGTPDDMIESVARGVDMFDCVMPTRAGRHAQAFTRFGKINLKNARHADDPRPLDAESDCPAARDYSRAYLHHLVRCEEMLGSMLLTWVNLAYYQSLMAGIRAAIAQGRFEAFKAEVKEGWARGDIPAR

SEQ ID NO: 51693 - protein, 384 aa, Ancylobacter aquaticus
  REGION 1..384: note = tr|A0A431QTK8|A0A431QTK8_ANCAQ Queuine tRNA-ribosyltransferase OS=Ancylobacter aquaticus OX=100; GN = tgt PE=3 SV=1
MNTPDFREQTDFHYRLHATDGAARLGEVVTPRGVIRTPAFMPVGTAGTVKGMYPEQVRELGADILLGNTYHLMLRPGAERVARLGGLHALMRWPHPILTDSGGFQVMSLASLRKMSEKGVTFRSHIDGAYHELTPERSIEIQGLLGADIQMQLDECVRLPASQDEIARALRLSLRWAERSKRAFEAQPKGRALFGIVQGGDDAELRTESARGLIDIDFPGYSIGGLAVGEPQAVMLAMLEVVTPILPAGKPRYLMGVGTPDDLIESVARGVDMFDCVMPTRAGRHAQAFTRFGKINLKNARHAEDPRPLDEASDCPAARDYSRAYLHHLVRCDEMLGSMLLTWVNLAYYQSLMAGIRAAIAEGRFEAFKAEVKEGWARGDIAAR

SEQ ID NO: 51694 - protein, 384 aa, Ancylobacter rudongensis
  REGION 1..384: note = tr|A0A1G4QP57|A0A1G4QP57_9RHIZ Queuine tRNA-ribosyltransferase OS=Ancylobacter rudongensis; OX = 177413 GN=tgt PE=3 SV=1
MNTPDFREQTDFHYSLHATDGAARLGEVVTPRGVIRTPAFMPVGTAGTVKGMYPEQVRELGADILLGNTYHLMLRPGAERVARLGGLHTLMRWPHPILTDSGGFQVMSLASLRKMSEKGVTFRSHIDGAYHELTPERSIEIQGLLGADIQMQLDECVRLPASQDEIARALRLSLRWAERSKKAFEAQPKGRALFGIVQGGDDAELRTESARGLIDIDFPGYSIGGLAVGEPQEVMLAMLEVVTPILPAGKPRYLMGVGTPDDLIESVARGVDMFDCVMPTRAGRHAQAFTRFGKINLKNARHAEDPRPLDETSDCPAARDYSRAYLHHLVRCDEMLGSMLLTWVNLAYYQSLMAGIRAAIAEGRFEAFKAEVKEGWARGDIAAR

SEQ ID NO: 51695 - protein, 376 aa, unidentified
  source 1..376: note = Ancylomarina sp.
  REGION 1..376: note = tr|A0A4Q1JIL3|A0A4Q1JIL3_9BACT Queuine tRNA-ribosyltransferase OS=Ancylomarina sp. SHSM-M15; OX = 2501299 GN=tgt PE=3 SV=1
MDFKLHNTDDRSGARTGELTTDHGTIQTPIFMPVGTLGSVKGVHQHELKEDVDAEIILGNTYHLYLRPGLDVLEQAGGLHKFNGWDRPILTDSGGFQVFSLAENRKLTEEGAIFRSHIDGSKHMFTPENVMDTQRTIGADIIMAFDECPPGTSSYEYAKTSLGLTQRWLERCVDRFDSTEGKYGYSQTLFPIVQGCVYKDLRIKAAEHAASLNREGYAIGGLAVGEPTQDMYDMIEVVNQVLPVDKPRYLMGVGTPINILEAISRGVDMFDCVMPTRNGRNGMIFTSEGTLNMRNQKWANDFSLLDPNGTSYVDRFYSKAYVRHLIRSNELLGGQICSIHNLAFYLWLVREAREQINNGTFSDWKEVMVEKLGRRL

SEQ ID NO: 51696 - protein, 376 aa, unidentified
  source 1..376: note = Ancylomarina sp.
  REGION 1..376: note = tr|A0A425Y5M3|A0A425Y5M3_9BACT Queuine tRNA-ribosyltransferase OS=Ancylomarina sp. M1P OX=2283627; GN = tgt PE=3 SV=1
MDFKLHNTDDRSGARTGEITTDHGKIKTPIFMPVGTLGSVKGIHQHELKEDINAEIILGNTYHLYLRPGLDVLEQAGGLHKFNGWDRPILTDSGGFQVFSLAENRKLTEEGAMFRSHIDGSKHMFTPENVMDTQRTIGADIIMAFDECPPGTSSYEYAKNSLGLTQRWLERCVDRFDSTKGKYGYSQALFPIVQGCVYKDLRIKAAEHAASLNREGYAIGGLAVGEPTQDMYEMIEVVNQVLPENKPRYLMGVGTPINILEAISRGVDMFDCVMPTRNGRNGMIFTSEGTLNMRNQKWANDFTPLDPNGTSYVDSFYSKAYVRHLIRSNELLGGQICSIHNLAFYLWLVREAREKIDEGTFYEWKNVMVEKLGRRL

SEQ ID NO: 51697 - protein, 376 aa, unidentified
  source 1..376: note = Ancylomarina subtilis
  REGION 1..376: note = tr|A0A4Q7VBW8|A0A4Q7VBW8_9BACT Queuine tRNA-ribosyltransferase OS=Ancylomarina subtilis; OX = 1639035 GN=tgt PE=3 SV=1
MDFKLHNTDDRSGARTGELTTDHGTIQTPIFMPVGTLGSVKGVHQNELKEDINAEIILGNTYHLYLRPGLDILEQAGGLHKFNGWDRPILTDSGGFQVFSLAENRKLTEEGAIFRSHIDGSKHMFTPENVMDTQRTIGADIIMAFDECPPGTSSYEYAKTSLGLTQRWLERCVDRFDRTEGKYGYSQTLFPIVQGCVYKDLRIKAAEHAASLNREGYAIGGLAVGEPTQDMYDMIDVVNQVLPEDKPRYLMGVGTPINILEAISRGVDMFDCVMPTRNGRNGMIFTSEGTLNMRNQKWANDFSPLDPNGTSYVDRFYSRAYVRHLIRSNELLGGQICSIHNLAFYLWLVREAREQINKGTFSDWKKVMVEKLGRRL

SEQ ID NO: 51698 - protein, 376 aa, unidentified
  source 1..376: note = Anditalea andensis
  REGION 1..376: note = tr|A0A074KX14|A0A074KX14_9BACT Queuine tRNA-ribosyltransferase OS=Anditalea andensis OX=1048983; GN = tgt PE=3 SV=1
MKFTIEATDPKSKARAGLVKTDHGDIETPIFMPVGTAGSVKAVHQRELTYDVKAQIILGNTYHLYLRPGLDVLEKAGGLHKFNGWSRPILTDSGGYQVFSLSGTRKIAEEGVMFKSHIDGSKHHFSPENVMDIQRTIGADIIMAFDECTPYPCEYNYAEKSMHMTHRWLKRCIERFDTTEGKYGYSQTLFPIVQGSVYKDLRKQSAEFIASCGRDGNAIGGLSVGEPAEMMYEMTELVTDILPTDKPRYLMGVGTPANILEGIALGVDMFDCVMPTRNARNGMLFTSEGIMNMRNEKWKDDFSPIDPNINSYVSTFYSKAYLRHLTVSKEILAAQIASIHNLSFYLWLVGQAREKIQTGEFATWKDMMVKKVSTRL

SEQ ID NO: 51699 - protein, 384 aa, unidentified
  source 1..384: note = Andreesenia angusta
  REGION 1..384: note = tr|A0A1S1V7M1|A0A1S1V7M1_9FIRM Queuine tRNA-ribosyltransferase OS=Andreesenia angusta OX=39480; GN = tgt PE=3 SV=1
MNSPIKYELIKESSETKARLGKIHTPHGEIETPIFMPVGTRATVKAMTPEELKEINAQIILSNTYHLYLKPGHDIVEEAGGLHKFMNWDRPILTDSGGFQVFSLGNMRKINEDGVEFKSHIDGSKHFITPEKSIEIQNALGSDIMMAFDECVSYPSDWHYVKDSMERTTRWAKRCKDANKNPDKQAIFGIIQGGMYKDLREQSARELLELDFPGYAVGGLSVGEPADILMQVLDYTVPLMPADKPRYFMGAGSPDYLIELAIRGIDMADCVLPTRIARNGTVMTSRGKVVIRNAKHKRDFTPLDPECSCYACKNYSKAYIRHLFNVDEILGSRLATIHNLHFLIKLMEDLRESIREDRVLEFRRDFYLKYGGFDYLGKLDNYRL

SEQ ID NO: 51700 - protein, 370 aa, Andreprevotia lacus
  REGION 1..370: note = tr|A0A1W1XK67|A0A1W1XK67_9NEIS Queuine tRNA-ribosyltransferase OS=Andreprevotia lacus DSM 23236; OX = 1121001 GN=tgt PE=3 SV=1
MQFQLKTTSGGARRGTLTLNHGVVETPVFMPVGTYGTVKAMTPRDLNEINAQICLGNTFHLWLRPGLDVIGKFGGLHDFMGWHKPILTDSGGFQVFSLGAMRKITEHGVTFQSPINGDKLLLTPEESMRIQTVLNSDVVMIFDECTPYPATRQQAADSMRMSYRWARRSKDEFTARENHNALFGIVQGGMYEDLRDESLAGLNDIDFHGMAIGGLSVGEPKEDFARILAHTAPRLPEHKPRYLMGVGTPEDLVYGVSQGIDMFDCVMPTRNARNGMLFTRFGDIKIKNAKYKLDQRPLDESCECYACRNFSRAYLHHLFRAGEILGSQLNTIHNLHYYQVIMREMREAIEADRFTAHVVQFHADRARGVD

SEQ ID NO: 51701 - protein, 343 aa, Aneurinibacillus aneurinilyticus
  REGION 1..343: note = tr|U1X4M0|U1X4M0_ANEAE Queuine tRNA-ribosyltransferase OS=Aneurinibacillus aneurinilyticus ATCC 12856 OX=649747 GN=tgt PE=3 SV=1
MPVGTLATVKTMTPEDLKEMNAQIILSNTYHLFLRPGHELVAEAGGLHSFMNWDRAILTDSGGFQVFSLSNLRQIDEEGVAFRSHLSGEKLFLSPEKAMEIQNALGADIMMAFDECAPYPAEPEYVKPSMERTTRWAERCLKAHKRPHDQALFGIVQGGMYRELREQSARDITSLDFPGYAIGGLSVGEPHQLMYEVLDYTVPLLPSNKPRYLMGVGSPDALIEGAIRGIDMFDCVLPTRIARNGTCMTSEGRLVIRNAKYAHDFTPLDPNCDCYTCRNYTRAYIRHLIRCDEILGVRLTTYHNLHFLLNMMEQVRQAIMEDRLRDFRDEFFARYGITETKGF

SEQ ID NO: 51702 - protein, 376 aa, Aneurinibacillus danicus
  REGION 1..376: note = tr|A0A511V4Q5|A0A511V4Q5_9BACL Queuine tRNA-ribosyltransferase OS=Aneurinibacillus danicus; OX = 267746 GN=tgt PE=3 SV=1
MAVRYELIKTCKQTGARLGKLHTPHGTIDTPIFMPVGTLATVKTMTPEELKEMEAQIILGNTYHLLLRPGHDLVAEAGGLHSFMNWDRAILTDSGGFQVFSLSNLRQIDEEGVSFRSHLSGEKLFISPEKAIEIQNALGADIIMAFDECAPYPADPEYVKPSMERTTRWAERCLKAHKRPHDQALFGIVQGGMYRELREQSARDITSLDFPGYAIGGLSVGEPHHLMYEVLDYTVPLLPANKPRYLMGVGSPDALIEGAIRGIDMFDCVLPTRIARNGTCMTSQGRLVIRNAKYARDFSPLDPNCDCYTCRNYTRAYIRHLIHCDEILGVRLTTYHNLHFLINMMKQVRQAIMDDRLGDFRDEFFARYGITETRGF

SEQ ID NO: 51703 - protein, 343 aa, Aneurinibacillus migulanus
  REGION 1..343: note = tr|A0A0K2WAU9|A0A0K2WAU9_ANEMI Queuine tRNA-ribosyltransferase OS=Aneurinibacillus migulanus; OX = 47500 GN=tgt PE=3 SV=1
MPVGTLATVKTMTPEDLKEMNAQIILSNTYHLFLRPGHELVAEAGGLHSFMNWDRAILTDSGGFQVFSLSNLRQIDEEGVAFRSHLSGEKLFLSPEKAMEVQNALGADIMMAFDECAPYPAEPEYVKPSMERTTRWAERCLKAHKRPHDQALFGIVQGGMYRDLREQSARDITSLDFPGYAIGGLSVGEPHQLMYEVLDYTVPLLPSNKPRYLMGVGSPDALIEGAIRGIDMFDCVLPTRIARNGTCMTSEGRLVIRNAKYAHDFTPLDPNCDCYTCRNYTRAYIRHLIRCDEILGVRLTTYHNLHFLLNMMEQVRQAIMEDRLRDFRDEFFARYGITETRGF

SEQ ID NO: 51704 - protein, 376 aa, Aneurinibacillus migulanus
  REGION 1..376: note = tr|A0A0D1XEL6|A0A0D1XEL6_ANEMI Queuine tRNA-ribosyltransferase OS=Aneurinibacillus migulanus; OX = 47500 GN=tgt PE=3 SV=1
MAVRYELIKTCKQTGARLGKLHTPHGTIDTPIFMPVGTLATVKTMTPEDLKEMNAQIILSNTYHLFLRPGHELVAEAGGLHSFMNWDRAILTDSGGFQVFSLSNLRQIDEEGVAFRSHLSGEKLFLSPEKAMEIQNALGADIMMAFDECAPYPAEPEYVKPSMERTTRWAERCLKAHKRPHDQALFGIVQGGMYRDLREQSARDITSLDFPGYAIGGLSVGEPHQLMYEVLDYTVPLLPSNKPRYLMGVGSPDALIEGAIRGIDMFDCVLPTRIARNGTCMTSEGRLVIRNAKYAHDFTPLDPNCDCYTCRNYTRAYIRHLIRCDEILGVRLTTYHNLHFLLNMMEQVRQAIMEDRLRDFRDEFFARYGITETRGF

SEQ ID NO: 51705 - protein, 376 aa, unidentified
  source 1..376: note = Aneurinibacillus soli
  REGION 1..376: note = tr|A0A0U5AXQ7|A0A0U5AXQ7_9BACL Queuine tRNA-ribosyltransferase OS=Aneurinibacillus soli; OX = 1500254 GN=tgt PE=3 SV=1
MAVRYELIKTCKQTGARLGKLHTPHGTIDTPIFMPVGTLATVKTMTPEELKEMNAQIILSNTYHLFLRPGHELVAEAGGLHKFMNWDRAILTDSGGFQVFSLSNLRQIDEEGVAFRSHLSGEKLFISPEKAMEIQNALGADIMMAFDECAPYPAEKDYVRPSMERTTRWAERCLKAHKRPHDQALFGIVQGGMYRDLREQSARDITSLDFPGYAIGGLSVGEPHHLMYEVLDYTVPLLPDNKPRYLMGVGSPDALIEGAIRGIDMFDCVLPTRIARNGTCMTSQGRLVIRNAKYANDFTPLDPNCDCYTCRNYTRAYIRHLIRCDEILGVRLTTTHNLHFLLKMMEQVREAIMEDRLGDFRDEFFARYGITETRGF

SEQ ID NO: 51706 - protein, 376 aa, Aneurinibacillus sp.
  REGION 1..376: note = tr|A0A0X8D7A2|A0A0X8D7A2_9BACL Queuine tRNA-ribosyltransferase OS=Aneurinibacillus sp. XH2; OX = 1450761 GN=tgt PE=3 SV=1
MAVRYELIKTCKQTGARLGKLHTPHGTIDTPVFMPVGTLATVKTMTPEELKEMNAQIILSNTYHLFLRPGHELVAEAGGLHSFMNWDRAILTDSGGFQVFSLSNLREIDEEGVAFRSHLSGEKLFISPEKATEIQNALGADIIMAFDECAPYPAEREYVRPSMERTTRWAERCLKAHKRPHDQALFGIVQGGMYRDLREQSARDITSLDFPGYAIGGLSVGEPHQLMYEVLDYTVPLLPANKPRYLMGVGSPDALIEGAMRGIDMFDCVLPTRIARNGTCMTSEGRLVIRNAKYARDFTPLDPNCDCYTCRNYTRAYIRHLIRCDEILGVRLTTYHNLYFLLNLMKQVRQAIMEDRLRDFRDEFFAKYGITETRGF

SEQ ID NO: 51707 - protein, 376 aa, Aneurinibacillus thermoaerophilus; identical to SEQ ID NO: 51706
  REGION 1..376: note = tr|A0A1G7YAB5|A0A1G7YAB5_ANETH Queuine tRNA-ribosyltransferase OS=Aneurinibacillus thermoaerophilus OX=143495 GN=tgt PE=3 SV=1

SEQ ID NO: 51708 - protein, 380 aa, Anoxybacillus amylolyticus
  REGION 1..380: note = tr|A0A4R1GH49|A0A4R1GH49_9BACI Queuine tRNA-ribosyltransferase OS=Anoxybacillus amylolyticus; OX = 294699 GN=tgt PE=3 SV=1
MTTPIRFELIKTCRQTGARLGILHTPHGSFETPMFMPVGTLATVKTLSPEELKTMGAGVILSNTYHLWLRPGHDIVAEAGGLHAFMNWDRGILTDSGGFQVFSLSEFRRIEEEGVYFRNHLNGDKLFLSPEKAVEIQNALGADIIMAFDECPPYPATYKYMKQSIERTSRWAERCLKAHRRPNEQGLFGIVQGGEYEDLRRQSARDLVSLDFPGYAVGGLSVGEPKEVMNRVLEFTTPLLPADKPRYLMGVGSPDSLIDGAIRGIDMFDCVLPTRIGRNGTVMTSEGRVVIKNAQYARDFSPLDPNCDCYTCRNYTRAYIRHLIKCDETFGIRLTSYHNVYFLIKLMEQVRQAIREDRLADFREEFFERYGFNKPNAKNF

SEQ ID NO: 51709 - protein, 378 aa, Anoxybacillus amylolyticus
  REGION 1..378: note = tr|A0A160F7B4|A0A160F7B4_9BACI Queuine tRNA-ribosyltransferase OS=Anoxybacillus amylolyticus; OX = 294699 GN=tgt PE=3 SV=1
MAIRYELIKTCKQTGARLGMIHTPHGSFETPMFMPVGTLATVKTLSPEELKEMGAGIILSNTYHLWLRPGHEIVKEAGGLHSFMNWDRGILTDSGGFQVFSLSEFRKIEEEGVYFRNHLNGDKLFLSPEKAMEIQNALGSDIMMAFDECPPYPATYEYMKRSVERTSRWAERCLKAHQRPNEQGLFGIVQGGEFEDLRKQSAQDLVSLDFPGYAVGGLSVGEPKEVMNRVLEFTTPLLPANKPRYLMGVGSPDSLIDGAIRGIDMFDCVLPTRIGRNGTVMTSEGRVVIKNAQYARDFTPLDPNCDCYTCRNYTRAYIRHLIKCDETFGIRLTSYHNVYFLIKLMEQVRQAIREDRLGDFRDEFFERYGFNKPNAKNF

SEQ ID NO: 51710 - protein, 379 aa, Anoxybacillus ayderensis
  REGION 1..379: note = tr|A0A0D0HWF0|A0A0D0HWF0_9BACI Queuine tRNA-ribosyltransferase OS=Anoxybacillus ayderensis; OX = 265546 GN=tgt PE=3 SV=1
MTPIRYELIKTCKQTGARLGILHTPHGSFETPMFMPVGTLATVKTLSPEELKEMGAGVILSNTYHLWLRPGHDIVKEAGGLHSFMNWDRGILTDSGGFQVFSLSEFRRIEEEGVYFRNHLNGDKLFLSPEKAMEIQNALGSDIMMAFDECPPYPATYEYMKQSVERTSRWAERCLKAHQRPNEQGLFGIVQGGEFEDLRKQSAQDLVSLDFPGYAVGGLSVGEPKDVMNRVLEFTTPLLPANKPRYLMGVGSPDSLIDGAIRGIDMFDCVLPTRIGRNGTVMTSEGRVVIKNAKYARDFSPLDPNCDCYTCRNYTRAYIRHLIKCDETFGIRLTSYHNVYFLIKLMEQVRQAIREDRLGDFREQFFEQYGFHGPNAKNF

SEQ ID NO: 51711 - protein, 379 aa, Anoxybacillus ayderensis
  REGION 1..379: note = tr|A0A1X6MG19|A0A1X6MG19_9BACI Queuine tRNA-ribosyltransferase OS=Anoxybacillus ayderensis; OX = 265546 GN=tgt PE=3 SV=1
MTPIRYELIKTCKQTGARLGILHTPHGSFETPMFMPVGTLATVKTLSPEELKEMGAGVILSNTYHLWLRPGHDIVKEAGGLHSFMNWDRGILTDSGGFQVFSLSEFRRIEEEGVYFRNHLNGDKLFLSPEKAMEIQNALGSDIMMAFDECPPYPATYEYMKQSVERTSRWAERCLKAHQRPNEQGLFGIVQGGEFEDLRKQSAQDLVSLDFPGYAVGGLSVGEPKEVMNRVLEFTTPLLPANKPRYLMGVGSPDSLIDGAIRGIDMFDCVLPTRIGRNGTVMTSEGRVVIKNAKYARDFSPLDPNCDCYTCRNYTRAYIRHLIKCDETFGIRLTSYHNVYFLIKLMEQVRQAIREDRLGDFREQFFEQYGFHAPNAKNF

SEQ ID NO: 51712 - protein, 379 aa, Anoxybacillus flavithermus
  REGION 1..379: note = sp|B7GFN1|TGT_ANOFW Queuine tRNA-ribosyltransferase; OS = Anoxybacillus flavithermus (strain DSM 21510 / WK1); OX = 491915 GN=tgt PE=3 SV=1
MTPIRYELIKTCKQTGARLGILHTPHGSFETPMFMPVGTLATVKTLSPEELKEMGAGVILSNTYHLWLRPGHDIVKEAGGLHSFMNWDRGILTDSGGFQVFSLSEFRRIEEEGVYFRNHLNGDQLFLSPEKAMEIQNALGSDIMMAFDECPPYPATYEYMKRSVERTSRWAERCLKAHQRPNEQGLFGIVQGGEFEDLRKQSAQDLVSLDFPGYAVGGLSVGEPKEVMNRVLEFTTPLLPANKPRYLMGVGSPDSLIDGAIRGIDMFDCVLPTRIGRNGTVMTSEGRVVIKNAKYARDFTPLDPNCDCYTCRNYTRAYIRHLIKCDETFGIRLTSYHNVYFLIKLMEQVRQAIREDRLGDFREQFFEQYGFNKPNAKNF

SEQ ID NO: 51713 - protein, 379 aa, Anoxybacillus flavithermus
  REGION 1..379: note = tr|R4G0P1|R4G0P1_9BACI Queuine tRNA-ribosyltransferase OS=Anoxybacillus flavithermus NBRC 109594 OX=1315967 GN=tgt PE=3 SV=1
MTPIRYELIKTCKQTGARLGILHTPHGSFETPMFMPVGTLATVKTLSPEELKEMGAGVILSNTYHLWLRPGHDIVKEAGGLHSFMNWDRGILTDSGGFQVFSLSEFRRIEEEGVYFRNHLNGDKLFLSPEKAMEIQNALGSDIMMAFDECPPYPATYEYMKRSVERTSRWAERCLKAHQRPNEQGLFGIVQGGEFEDLRKQSAQDLVSLDFPGYAVGGLSVGEPKEVMNRVLEFTTPLLPANKPRYLMGVGSPDSLIDGAIRGIDMFDCVLPTRIGRNGTVMTSEGRVVIKNAKYARDFTPLDPNCDCYTCRNYTRAYIRHLIKCDETFGIRLTSYHNVYFLIKLMEQVRQAIREDRLGDFREQFFEQYGFNKPNAKNF

SEQ ID NO: 51714 - protein, 379 aa, Anoxybacillus gonensis
  REGION 1..379: note = tr|M5R9A3|M5R9A3_9BACI Queuine tRNA-ribosyltransferase OS=Anoxybacillus gonensis; OX = 198467 GN=tgt PE=3 SV=1
MTPIRYELIKTCKQTGARLGILHTPHGSFETPMFMPVGTLATVKTLSPEELKEMGAGVILSNTYHLWLRPGHDIVKEAGGLHSFMNWDRGILTDSGGFQVFSLSEFRRIEEEGVYFRNHLNGDKLFLSPEKAMEIQNALGSDIMMAFDECPPYPATYEYMKQSVERTSRWAERCLKAHQRPNEQGLFGIVQGGEFEDLRKQSAQDLVSLDFPGYAVGGLSVGEPKEVMNRVLEFTTPLLPANKPRYLMGVGSPDSLIDGAIRGIDMFDCVLPTRIGRNGTVMTSQGRVVIKNAKYARDFSPLDPNCDCYTCRNYTRAYIRHLIKCDETFGIRLTSYHNVYFLIKLMEQVRQAIREDRLGDFREQFFEQYGFYAPDAKNF

SEQ ID NO: 51715 - protein, 379 aa, Anoxybacillus kamchatkensis; identical to SEQ ID NO: 51714
  REGION 1..379: note = tr|A0A4S3L5W3|A0A4S3L5W3_9BACI Queuine tRNA-ribosyltransferase OS=Anoxybacillus kamchatkensis; OX = 196180 GN=tgt PE=3 SV=1

SEQ ID NO: 51716 - protein, 379 aa, Anoxybacillus kamchatkensis; identical to SEQ ID NO: 51714
  REGION 1..379: note = tr|A0A346DHS7|A0A346DHS7_9BACI Queuine tRNA-ribosyltransferase OS=Anoxybacillus kamchatkensis G10; OX = 1212546 GN=tgt PE=3 SV=1

SEQ ID NO: 51717 - protein, 379 aa, Anoxybacillus pushchinoensis
  REGION 1..379: note = tr|A0A1I0T916|A0A1I0T916_9BACI Queuine tRNA-ribosyltransferase OS=Anoxybacillus pushchinoensis; OX = 150248 GN=tgt PE=3 SV=1
MTPIRYELIKTCKQTGARLGILHTPHGSFETPMFMPVGTLATVKTLSPEELKEMGAGVILSNTYHLWLRPGHDIVKEAGGLHTFMNWDRGILTDSGGFQVFSLSEFRRIEEEGVYFRNHLNGDKLFLSPEKAMEIQNALGSDIMMAFDECPPYPATYEYMKRSVERTSRWAERCLKAHQRPNEQGLFGIVQGGEFEELRKQSAQDLVSLDFPGYAVGGLSVGEPKDVMNRVLEFTTPLLPANKPRYLMGVGSPDSLIDGAIRGIDMFDCVLPTRIGRNGTVMTSEGRVVIKNAKYARDFTPLDPNCDCYTCRNYTRAYIRHLIKCDETFGIRLTSYHNVYFLIKLMEQVRQAIREDRLGDFREQFFEQYGFNQPNAKNF

SEQ ID NO: 51718 - protein, 379 aa, Anoxybacillus sp.
  REGION 1..379: note = tr|A0A094K0V2|A0A094K0V2_9BACI Queuine tRNA-ribosyltransferase OS=Anoxybacillus sp. KU2-6(11); OX = 1535751 GN=tgt PE=3 SV=1
MTPIRYELIKTCKQTGARLGILHTPHGSFETPMFMPVGTLATVKTLSPEELKEMGAGVILSNTYHLWLRPGHDIVKEAGGLHSFMNWDRGILTDSGGFQVFSLSEFRRIEEEGVYFRNHLNGDKLFLSPEKAMEIQNALGSDIMMAFDECPPYPATYEYMKRSVERTSRWAERCLKAHQRPNEQGLFGIVQGGEFEDLRKQSAQDLVSLDFPGYAVGGLSVGEPKDVMNRVLEFTTPLLPANKPRYLMGVGSPDSLIDGAIRGIDMFDCVLPTRIGRNGTVMTSEGRVVIKNAKYARDFSPLDPNCDCYTCRNYTRAYIRHLIKCDETFGIRLTSYHNVYFLIKLMEQVRQAIREDRLGDFREQFFEQYGFNKPNAKNF

SEQ ID NO: 51719 - protein, 379 aa, Anoxybacillus sp.; identical to SEQ ID NO: 51713
  REGION 1..379: note = tr|A0A1V3FL53|A0A1V3FL53_9BACI Queuine tRNA-ribosyltransferase OS=Anoxybacillus sp. 103; OX = 1919277 GN=tgt PE=3 SV=1

SEQ ID NO: 51720 - protein, 379 aa, unidentified
  source 1..379: note = Anoxybacillus suryakundensis
  REGION 1..379: note = tr|A0A0K6GQD7|A0A0K6GQD7_9BACI Queuine tRNA-ribosyltransferase OS=Anoxybacillus suryakundensis; OX = 1325335 GN=tgt PE=3 SV=1
MTPIRYELIKTCKQTGARLGILHTPHGSFETPMFMPVGTLATVKTLSPEELKEMGAGVILSNTYHLWLRPGHDIVKEAGGLHSFMNWDRGILTDSGGFQVFSLSEFRRIEEEGVYFRNHLNGDKLFLSPEKAMEIQNALGSDIMMAFDECPPYPATHEYMKRSVERTSRWAERCLKAHQRPNEQGLFGIVQGGEFEDLRKQSAQDLVSLDFLGYAVGGLSVGEPKEVMNRVLEFTTPLLPANKPRYLMGVGSPDSLIDGAIRGIDMFDCVLPTRIGRNGTVMTSEGRVVIKNAKYARDFSPLDPNCDCYTCRNYTRAYIRHLIKCDETFGIRLTSYHNVYFLIKLMEQVRQAIREDRLGDFREQFFEQYGFNKPNAKNF

SEQ ID NO: 51721 - protein, 379 aa, Anoxybacillus thermarum
  REGION 1..379: note = tr|A0A0D0S046|A0A0D0S046_9BACI Queuine tRNA-ribosyltransferase OS=Anoxybacillus thermarum; OX = 404937 GN=tgt PE=3 SV=1
MTPIRYELIKTCKQTGARLGILHTPHGSFETPMFMPVGTLATVKTLSPEELKEMGAGVILSNTYHLWLRPGHEIVKEAGGLHSFMNWDRGILTDSGGFQVFSLSEFRRIEEEGVYFRNHLNGDKLFLSPEKAMEIQNALGSDIMMAFDECPPYPATYEYMKQSVERTSRWAERCLKAHQRPNEQGLFGIVQGGEFEDLRKQSAQDLVSLDFPGYAVGGLSVGEPKNVMNRVLEFTTPLLPANKPRYLMGVGSPDSLIDGAIRGIDMFDCVLPTRIGRNGTVMTSEGRVVIKNAKYARDFSPLDPNCDCYTCRNYTRAYIRHLIKCDETFGIRLTSYHNVYFLIKLMEQVRQAIREDRLGDFREQFFEQYGFHAPNAKNF

SEQ ID NO: 51722 - protein, 379 aa, unidentified
  source 1..379: note = Anoxybacillus vitaminiphilus
  REGION 1..379: note = tr|A0A327YBW9|A0A327YBW9_9BACI Queuine tRNA-ribosyltransferase OS=Anoxybacillus vitaminiphilus; OX = 581036 GN=tgt PE=3 SV=1
MTPIRYELIKTCKQTGARLGIIHTPHGSFETPMFMPVGTLATVKTLSPEELKEMGAGIILSNTYHLWLRPGHEIVKEAGGLHRFMNWDRGILTDSGGFQVFSLSEFRKIEEEGVYFRNHLNGDKLFLSPEKAMEIQNALGSDIMMAFDECPPYPATYEYMKKSVERTSRWAERCLKAHKRPNEQGLFGIVQGGEFEDLRKQSAQDLVSLDFPGYAVGGLSVGEPKDVMNRILEFTTPLLPANKPRYLMGVGSPDSLIDGVIRGIDMFDCVLPTRIGRNGTAMTSEGRVVIKNAQYARDFTPLDPNCDCYTCRNYTRAYIRHLIKCDETFGIRLTSYHNVYFLIKLMEQVRQAIREDRLGDFREEFFDRYGFNKPNAKNF

SEQ ID NO: 51723 - protein, 371 aa, unidentified
  source 1..371: note = Anoxybacter fermentans
  REGION 1..371: note = tr|A0A3Q9HQG7|A0A3Q9HQG7_9FIRM Queuine tRNA-ribosyltransferase OS=Anoxybacter fermentans; OX = 1323375 GN=tgt PE=3 SV=1
MSFEFRLLKTDSNSKARLGELYTPHGKIETPIFMPVGTQATVKTMTPEELKEVGAQIILSNTYHLYLRPGHELIKKAGGLHSFMNWDRPILTDSGGFQVFSLSDLREITEEGVTFRSHIDGSYHFISPEKAIEIQMALGADIIMAFDECPPYPADYDYVKESLKRTTRWLKRCKEAHTRKDQALFGIIQGGMYKDLREESVKETTEVDLPGYAIGGLSVGEPKDIMYDILEYTTSLLPVDKPRYLMGVGTPEDLIEGVLRGVDMFDCVLPTRIARNGSVFTKFGQMTVRNAKYEADFTPLDPYCDCYTCRNYTRAYIRHLIKRNEILGLRLTTYHNLYFLLKLMERIREAIREDKFLEYREEFYRQYKGKI

SEQ ID NO: 51724 - protein, 345 aa, unidentified
  source 1..345: note = Anseongella ginsenosidimutans
  REGION 1..345: note = tr|A0A4R3KTS8|A0A4R3KTS8_9SPHI Queuine tRNA-ribosyltransferase OS=Anseongella ginsenosidimutans; OX = 496056 GN=tgt PE=3 SV=1
MPVGTAGTVKAVHQRELKEDIRAQIILGNTYHLYLRPGLDTLHKAGGLHQFNGWDAPILTDSGGYQVFSLSGTRKIKEEGVTFRSHIDGSRHLFTPENTMDTQRIIGADIIMALDECTPYPCSYRYAETSLQLTHRWLERCINHFKATEPLYGYDQMLFPIVQGSTYKDLRKASAETIASFGQEGNAIGGLSVGEPAEEMYEMTEIVCEILPADKPRYLMGVGTPANILECISLGIDMFDCVMPTRNARNGMLFTRNGIINIRNEKWKNDFSPIDEESDLWADKHYSKAYLRHLVTSKEILGAQIASLHNLHFYLWLTGESRKRIIDGTFARWKDQMVKAVSARI

SEQ ID NO: 51725 - protein, 376 aa, unidentified
  source 1..376: note = Antarcticibacterium flavum
  REGION 1..376: note = tr|A0A5B7X4V0|A0A5B7X4V0_9FLAO Queuine tRNA-ribosyltransferase OS=Antarcticibacterium flavum; OX = 2058175 GN=tgt PE=3 SV=1
MTFDLLTTDPGSQARAGKLTTDHGTIETPIFMPVGTVGSVKGVHQRELKEEINPDIILGNTYHLYLRPQTEILQKAGGLHKFINWDRNILTDSGGYQVYSLSERRKIKEEGVKFKSHIDGSYHTFTPENVMEIQRTIGADIIMAFDECTPYPCDYRYAKRSMHMTHRWLDRCIAHLEKTPFEYDYSQAFFPIVQGSTYKDLRQQSAEYIASVGAEGNAIGGLSVGEPAEEMYAMTEVVTAILPEDKPRYLMGVGTPINILENIALGIDMFDCVMPTRNARNGMLFTAHGTINIKNKKWEDDFSPIDEMDITWVDKEYSKAYLKHLFSVNEMLGKQIATIHNLGFYLWLVREARKHILAGDFTTWKNMMVKQMDKRL

SEQ ID NO: 51726 - protein, 376 aa, unidentified
  source 1..376: note = Antarcticibacterium sp.
  REGION 1..376: note = tr|A0A5B8YEM1|A0A5B8YEM1_9FLAO Queuine tRNA-ribosyltransferase OS=Antarcticibacterium sp. PAMC 28998 OX=2585771 GN=tgt PE=3 SV=1
MNFELLATDPGSKARAGKITTDHGTIETPIFMPVGTVGSVKGVHQRELKEEINPDVILGNTYHLYLRPQTEILKKAGGLHKFINWDRNILTDSGGYQVYSLSERRKIKEEGVKFKSHIDGSYHTFTPENVMEIQRTIGADIIMAFDECTPYPCDYRYAKRSMHMTHRWLDRCITHLEKTPFAYDYSQAFFPIVQGSTYKDLRQQSAEYIASVGAEGNAIGGLSVGEPAEEMYAMTEVVTAILPEDKPRYLMGVGTPVNILENIALGIDMFDCVMPTRNARNGMLFTAHGTINIKNKKWEDDFSAIDDMAITWVDTEYSKAYLKHLFSVNEMLGKQIATIHNLGFYLWLVREARKHILAGDFYTWKNKMVAQMDKRL

SEQ ID NO: 51727 - protein, 375 aa, Antarctobacter heliothermus
  REGION 1..375: note = tr|A0A239D3G1|A0A239D3G1_9RHOB Queuine tRNA-ribosyltransferase OS=Antarctobacter heliothermus; OX = 74033 GN=tgt PE=3 SV=1
MAQTSFELTARDGRARRGVIRTPRGEIRTPAFMPVGTAATVKGMMPESVAATGADILLGNTYHLMLRPGAERVARLGGLHKFMNWSGPILTDSGGFQVMSLAELRKLTEDGVSFRSHIDGSKHMLSPERSMEIQKLLGSDIVMAFDECPALPADRDRIAQSMRLSMRWAARSREAFGDRPGHMLFGIQQGGLEQDLRGESAEALKGIGFDGYAVGGLAVGEGQEAMFGCLDYAPDMLPEDRPRYLMGVGKPDDIVGAVKRGIDMMDCVLPSRSGRTGQAWTRRGQVNIKNARHADDPRPLDENCTCPACRGYSRAYLHHVFRAGEMISGMLLTWHNLHYYQELMAGMREAISGARFDAFEAEFHAVRAEGDIDPL

SEQ ID NO: 51728 - protein, 375 aa, Antarctobacter heliothermus
  REGION 1..375: note = tr|A0A222E6C3|A0A222E6C3_9RHOB Queuine tRNA-ribosyltransferase OS=Antarctobacter heliothermus; OX = 74033 GN=tgt PE=3 SV=1
MAQTSFELIARDGRARRGVIRTPRGEIRTPAFMPVGTAATVKGMMPESVAATGADILLGNTYHLMLRPGAERVARLGGLHTFMNWSGPILTDSGGFQVMSLAELRKLTEDGVTFRSHIDGSKHMLSPERSMEIQKLLGSDIVMAFDECPALPADRDRIAQSMRLSMRWAARSREAFGDRPGHMLFGIQQGGLEEDLRGESAEALKGIGFDGYAVGGLAVGEGQEAMFGCLDYAPGMLPEDRPRYLMGVGKPDDIVGAVKRGIDMMDCVLPSRSGRTGQAWTRRGQVNIKNARHADDPRPLDENCTCPACRGYSRAYLHHVFRAGEMISGMLLTWHNLHYYQELMAGMREAISDGRFEAFETEFHAMRAEGDIEPL

SEQ ID NO: 51729 - protein, 409 aa, unidentified
  source 1..409: note = Antricoccus suffuscus
  REGION 1..409: note = tr|A0A2T0Z037|A0A2T0Z037_9ACTN Queuine tRNA-ribosyltransferase OS=Antricoccus suffuscus; OX = 1629062 GN=tgt PE=3 SV=1
MNKQAGFEVGTRLGEGTLARTGTITTPHGQIQTPAFIAVGTKATVKTVLPETVKEVGAQAVLANAYHLYLQPGADIVDEAGGLGRFMHWDGPTYTDSGGFQVMSLGVGFKKVLAMDAKGVVSDDVIAEGKERLAHVDDDGVTFKSHLDGSMHRFTPEVSMQIQHQLGADIIFAFDECTTLMNTRAYQEHSLDRTQAWAKRCVVEHARLTTSHPERPYQMLCGVVQGAQYEDLRRKAARDLVSLGFDGFGIGGALEKESLGTIVRWVNEELPEDKPRHLLGIGEPDDIFTAIENGVDTFDCVSPSRVARNAALYTPDGRFNVNTAKHRRAFAPIDEDCDCYTCQHFTKAYLHHLFKAKEMLAFTLATIHNERFILRLVDDVRRSMVDGQFFEFKADTLGRYYANRAPASD

SEQ ID NO: 51730 - protein, 378 aa, Aphanizomenon flosaquae
  REGION 1..378: note = tr|A0A1B7VIW4|A0A1B7VIW4_APHFL Queuine tRNA-ribosyltransferase OS=Aphanizomenon flos-aquae LD13; OX = 1710894 GN=tgt PE=3 SV=1
MSANFSFECLATCSQTKARAGIFSTPHGPVETPRFMPVGTLANVKTITPAQLGATGAQMVLANTYHLHLQPGEAIVAGGGGLHKFMGWPGPMLTDSGGFQVFSLSEMRKITEEGVTFRSPHDGQMIKLTPERSIEIQNILGADVIMAFDECPPYPATRQEVEAATDRTYRWLKRSISAHQRPDQALFPIVQGGVYLDLRARAAAELAALDMPGYAIGGVSVGEPTDLMAQIVQTTAPLLPVNKPRYLMGVGTYREMAIAIASGVDLFDCVIPTRWARHGTAIVSGERWNLKNAKFREDFTPLDTTCPCYTCENFSRAYISHLVRSQEILAYTLLTIHNITELIRFTQKIRASILSDRFITDFGHWLQPSAIDLEKTQD

SEQ ID NO: 51731 - protein, 378 aa, Aphanizomenon flosaquae; identical to SEQ ID NO: 51604
  REGION 1..378: note = tr|A0A1B7X5F0|A0A1B7X5F0_APHFL Queuine tRNA-ribosyltransferase OS=Aphanizomenon flos-aquae WA102; OX = 1710896 GN=tgt PE=3 SV=1

SEQ ID NO: 51732 - protein, 373 aa, unidentified
  source 1..373: note = Aphanocapsa feldmannii
  REGION 1..373: note = tr|A0A524RQI0|A0A524RQI0_9CYAN Queuine tRNA-ribosyltransferase OS=Aphanocapsa feldmannii 277cV; OX = 2507553 GN=tgt PE=3 SV=1
MAFTFDILQRCPRTRARIGRFQTCHGAVETPRFMPVGTLATVKGLTVEQLHACDAQMVLANTYHLHLQPGESIIAEAGGLHRFMGWDRPILTDSGGYQVFSLGAINRIEESGVTFRSPRDGAMIEITPERAITIQNALGADVVMAFDQCPPHAASYGQVKEATERTHRWLERCIKAHRRDDQALFGIVQGGVHDDLRLRSASFVSAMDLPGYAIGGVSVGEPSEEIQRIVRSVTPLLPDHRPRYLMGVGSLPEMAHAVANGMDLFDCVIPTRLGRHGTALVGGESWNIRNARLRHDHTPLDASCPCFACRHHTRAYLHHLIRSQELLGQILLSLHNVTHLIRFTRAMTKAITAGTFSEDFTPWDPASPAADTW

SEQ ID NO: 51733 - protein, 373 aa, unidentified; identical to SEQ ID NO: 51732
  source 1..373: note = Aphanocapsa feldmannii
  REGION 1..373: note = tr|A0A524RVM5|A0A524RVM5_9CYAN Queuine tRNA-ribosyltransferase OS=Aphanocapsa feldmannii 277cI; OX = 2507554 GN=tgt PE=3 SV=1

SEQ ID NO: 51734 - protein, 373 aa, unidentified
  source 1..373: note = Aphanothece cf.
  REGION 1..373: note = tr|A0A2T1EY43|A0A2T1EY43_9CHRO Queuine tRNA-ribosyltransferase OS=Aphanothece cf. minutissima CCALA 015 OX=2107695 GN=tgt PE=3 SV=1
MAFDFTITARCPRTRARCGCFTTPHGTVHTPRFMPVGTAATVKGVSTPQLGETGAEMVLANTFHLHLQPGETVVAEAGGLHRFMGWEGPLLTDSGGFQVFSLDAINRIDDDGVVFRSPRDGSRIDLTPERSMAIQRALGADVAMAFDQCPPYPATEAAVAEACRRTHRWLERCVACHGGGDQALFGIVQGGCFPHLREASARLVASMDLPGIAVGGVSVGEPAEEMHRVVRQVGPLLPQERPHYLMGVGSLREMAIAVANGFDLFDCVLPTRLGRHGTALVGGERWNLRNARFRHDHGPLDPSCGCLACRHHSRSYLHHLFRSDELLGRTLLSLHNLTTLLRFTSAMARAISEGCFAEDFAPWEPGSPAAHTW

SEQ ID NO: 51735 - protein, 375 aa, unidentified
  source 1..375: note = Aphanothece hegewaldii
  REGION 1..375: note = tr|A0A2T1LY96|A0A2T1LY96_9CHRO Queuine tRNA-ribosyltransferase OS=Aphanothece hegewaldii CCALA 016 OX=2107694 GN=tgt PE=3 SV=1
MGFSYKLIAKCSKTQARVGIWHTPHGIVETPRFMPVGTVGTIKGLTPSQVATTGAQMILANTYHLHLQPGESIVEKAGGLHSFMGWNGPILTDSGGFQVFSLSELRDIKETGVTFRSPRDGRIIELTPERSIQIQNKLGADVIMAFDECPPANASRSDVTKATERTYRWLERCIEAHQRPQDQALFPIVQGGIYLDLRSKAAKDLSVLDLPGYAIGGVSVGEAPELIHQIVAHTAPLLPPHKPRYLMGVGTYREMARAIASGIDLFDCVIPTRFGRHGTAMVQGERWNLKNARFKEDFTPLDAKCPCYTCQTFTRAYLNHLIKSREMLGYILLSLHNITELVRFTMKIREAIEGDRFVDEFGHWLNDHSSNHDTI

SEQ ID NO: 51736 - protein, 333 aa, unidentified
  source 1..333: note = Aphanothece sacrum
  REGION 1..333: note = tr|A0A401IEA0|A0A401IEA0_APHSA Queuine tRNA-ribosyltransferase OS=Aphanothece sacrum FPU1; OX = 1920663 GN=tgt PE=3 SV=1
MPVGTLATVKGLTPAQLETTGAQMILANTYHLHLQPGESIIQQAGGLHRFMGWNGPVLTDSGGFQVFSLSALRKIKEFGVTFRSPRDGRIIELTPERSIQIQNALGADVIMAFDECPPGDADYATVAAATERTYRWLERCITAHQRPDTQALFGIVQGGTYPELRQKAVNALKELNLPGYAIGGVSVGEDPALVREIVQFTAPLLPFEKPRYLMGVGTYKEMAMAIASGIDLFDCVIPTRFGRHGTALVKGERWNLKNAPFREDFTPLDDSCACYTCQTFTRAYLNHLIRSREMLGYILLSLHNIAELIRFTQQIREAILSDRFVTEFAHWLS

SEQ ID NO: 51737 - protein, 377 aa, unidentified
  source 1..377: note = Apibacter adventoris
  REGION 1..377: note = tr|A0A2S8ADV0|A0A2S8ADV0_9FLAO Queuine tRNA-ribosyltransferase OS=Apibacter adventoris OX=1679466; GN = tgt PE=3 SV=1
MFFKLGNEDRNSKARAGIITTEHGIIETPIFMPVGTIGSVKSVHQRELKEDIQAQIILGNTYHLYLRPGTNILYKAGGLHKFINWDRPILTDSGGFQVFSLSQTRSKIQEEGVKFKSHIDGSYHFFTPEKSMEIQRFIGGDIFMAFDECTPYPCDYSYAKKSLSITHQWLQRCCKWCNENPELYGYKQHLFPIVQGSTFDDLRKISAEFISSVNADGNAIGGLSVGEPEEEMYRITELVTDILPKDKPRYLMGVGTPWNILESISLGIDMMDCVMPTRNARNGMLFTWNGVINIKNKKWAEDFSELDSKGTSFVDHDYTKAYLRHLFSVNEFLGKQIASIHNLSFYLDLVKTARKHIINGDFYTWKKSIIPTLKTRL

SEQ ID NO: 51738 - protein, 376 aa, unidentified
  source 1..376: note = Apibacter mensalis
  REGION 1..376: note = tr|A0A0X3ARH6|A0A0X3ARH6_9FLAO Queuine tRNA-ribosyltransferase OS=Apibacter mensalis OX=1586267; GN = tgt PE=3 SV=1
MFFSSNIKDKNSKARAGILQTDHGKIETPIFMPVGTVGSVKSVHQRELKEDINAQIILGNTYHLYLRPGTDILYKAGGLHKFINWNRPVLTDSGGYQVFSLSQTRKIQEEGVKFKSHIDGSYHFFTPEKSMEIQRFIGGDIFMAFDECTPYPCDYSYAKNSLTITHQWLKRCVKWCDENPEFYNYKQHLFPIVQGSTFDDLRKFSAEFISSVHADGNAIGGLSVGEPEEEMYRITDLVTDILPLDKPRYLMGVGTPWNILESISLGIDMMDCVMPTRNARNGMLFTWDGVINIKNKKWADDFSELDTKGTAFVDHDYSKAYLRHLFSANEFLGKQIASVHNLAFYLDLVKTARKHIIEGDFTSWKKSVIPQLRNRL

SEQ ID NO: 51739 - protein, 376 aa, unidentified
  source 1..376: note = Apibacter sp.
  REGION 1..376: note = tr|A0A563DGI2|A0A563DGI2_9FLAO Queuine tRNA-ribosyltransferase OS=Apibacter sp. AL1 OX=2509005; GN = tgt PE=3 SV=1
MFFTISETDKSSKARAGILKTDHGDIQTPIFMPVGTVGTVKSVHQRELKDDIKAQIILGNTYHLYLRPGTEILHKAGGLHKFINWDSPILTDSGGYQVFSLSQTRKIQEDGVKFKSHIDGSYHFFSPEKSMEIQRYIGGDIFMAFDECTPYPCDYSYAKNSLEITHKWLKRCVKWCDENPELYGYKQHLFPIVQGSTYGDLRKQSAEFISSINADGNAIGGLSVGEPEEEMYRITDIVTDILPKNKPRYLMGVGTPWNILESISLGIDMMDCVMPTRNARNGMLFTWNGVINIKNKKWQDDFSPLDEDGTAFVDKEYSKAYLRHLFAANEFLGKQIASIHNLAFYLDLVTVARKHILEGDFNSWKNSTIPKLRTRL

SEQ ID NO: 51740 - protein, 376 aa, unidentified
  source 1..376: note = Apibacter sp.
  REGION 1..376: note = tr|A0A2S8AD26|A0A2S8AD26_9FLAO Queuine tRNA-ribosyltransferase OS=Apibacter sp. wkB309 OX=1679467; GN = tgt PE=3 SV=1
MFFSSNVKDKNSKARAGILQTDHGKIETPIFMPVGTVGSVKSVHQRELKEDIKAQIILGNTYHLYLRPGTDILYKAGGLHKFIHWDRPILTDSGGYQVFSLSQTRKIQEEGVKFKSHIDGSYHFFTPEKSMEIQRYIGGDIFMAFDECTPYPCDYSYAKNSLEITHKWLKRCVKWCDENPEFYNYKQHLFPIVQGSTFDDLRKFSAEFISSVNADGNAIGGLSVGEPEEEMYRITDLVTDILPLEKPRYLMGVGTPWNILESISLGIDMMDCVMPTRNARNGMLFTWDGVINIKNKKWADDFSELDPKGTAFVDHDYSKAYLRHLFSANEFLGKQISSVHNLAFYLDLVKTARKHIVEGDFTSWKKSVIPQLRNRL

SEQ ID NO: 51741 - protein, 377 aa, Aquabacter spiritensis
  REGION 1..377: note = tr|A0A4R3LKX3|A0A4R3LKX3_9RHIZ Queuine tRNA-ribosyltransferase OS=Aquabacter spiritensis; OX = 933073 GN=tgt PE=3 SV=1
MTGFSFAVAATDGAARTGEISTPRGTIRTPAFMPVGTAATVKGVYCDQVRATGADILLGNTYHLMLRPGAERVAALGGLHRFMQWDRPILTDSGGFQVMSLSQLRKLDPDGVTFRSHVDGAMHRLTPERAMEIQGLLGADIQMQLDECVGLPCTDEDTARAMRLSLAWAERSKRAFEQQPKGRAVFGIVQGGAVEALRIESARALVAMDFPGYSIGGLAVGEPQDIMLRMIETVAPELPVHKPRYLMGVGTPDDLLEAVGRGIDMFDCVMPTRSGRHALAFTRFGKINLKNARHQDDPRPLDETSDCPALRDYSRAYLHHLIRCDEMLGPMLLSWANLHYYQDLMRGARAAIAEGRYEDFKAAAKAGWARGDLPPLG

SEQ ID NO: 51742 - protein, 383 aa, Aquabacterium commune
  REGION 1..383: note = tr|A0A4R6RHS2|A0A4R6RHS2_9BURK Queuine tRNA-ribosyltransferase OS=Aquabacterium commune OX=70586; GN = tgt PE=3 SV=1
MLQFDLLKTEGHARRGTLTLNHGVVQTPIFMPVGTYGTVKGVMPQSLHDMGAQIILGNTFHLWMRPGLDVMQQFGGLHKFENWHKPILTDSGGFQVWSLGEMRKISEEGVRFASPVNGDKLFLTPEISMQIQTILNSDIVMQFDECTPYWKNGGKGDKGQGNITTEKEARASMELSLRWAKRCQTEFDKLENPNALFGIVQGGMFEHLREESLAALADMDLPGYAVGGVSVGEPKDEMLRVMNHIGPKLPPHKPRYLMGVGTPEDLVAGVAAGIDMFDCVMPTRNARNGHLFTRFGDLRLRNARNKSDERPIDMTCACYTCRNFSRAYLHHLDRCGEMLGPMLTTIHNLHYYLNLMQEVRDALDAGRFAEFQRQFAEDRARGV

SEQ ID NO: 51743 - protein, 379 aa, unidentified
  source 1..379: note = Aquabacterium olei
  REGION 1..379: note = tr|A0A2U8FP62|A0A2U8FP62_9BURK Queuine tRNA-ribosyltransferase OS=Aquabacterium olei OX=1296669; GN = tgt PE=3 SV=1
MLNFELLKTEGHARRGRLTLNHGVVETPIFMPVGTYGTVKGVMPRSLEEMGAQIILGNTFHLWMRPGLDIMQQFGGLHKFENWHKPILTDSGGFQVWSLGDMRKISEEGVRFASPVNGDKLFLTPEISMQIQTILNSDIVMQFDECTPYWKGDKSLGHITTEKEARASMELSLRWARRCITEFQRLQNPNALFGIVQGGMFEHLREESLAGLVDLDLPGYAIGGVSVGEPKDEMMRVMNHISPKLPAHKPRYLMGVGTPEDLVAGVATGVDMFDCVMPTRNARNGHLFTRFGDLRLRNARNKSDERPIDETCTCYTCANFSRAYLHHLDRCGEMLGPMLTTIHNLHYYLNLMKEVRQALDEGRFAAFQQQFAADRARGV

SEQ ID NO: 51744 - protein, 296 aa, Aquabacterium sp.
  REGION 1..296: note = tr|A0A521Z400|A0A521Z400_9BURK Queuine tRNA-ribosyltransferase (Fragment) OS=Aquabacterium sp.; OX = 1872578 GN=EPO09_18560 PE=3 SV=1
MLTFDLIKTEGEARRGRLTLNHGVVQTPIFMPVGTYGTVKGVMPRSLEEMGAQIILGNTFHLWMRPGLDIMKQFGGLHKFESWNKPILTDSGGFQVWSLGEMRKISEEGVRFASPVNGDKLFLTPEISMQIQTILNSDIVMQFDECTPYWKGDKSLGHITTEREARLSMELSLRWAKRCITEFDKLQNPNALFGIVQGGMFPNLREESLAGLVDLNLPGYAIGGVSVGEPKDEMLRVMNHITPKLPANKPRYLMGVGTPEDLIAGVATGVDMFDCVMPTRNARNGHLFTRYGDLRL

SEQ ID NO: 51745 - protein, 379 aa, Aquabacterium sp.
  REGION 1..379: note = tr|A0A0A0DNQ4|A0A0A0DNQ4_9BURK Queuine tRNA-ribosyltransferase OS=Aquabacterium sp. NJ1; OX = 1538295 GN=tgt PE=3 SV=1
MLKFDLLKTEGEARRGQLTLNHGVVQTPIFMPVGTYGTVKGVMPRSLEEMGAQIILGNTFHLWMRPGLDIMKQFGGLHKFESWNKPILTDSGGFQVWSLGEMRKISEEGVRFASPVNGDKLFLTPEISMQIQTILNSDIVMQFDECTPYWKGDKSLGHITTEKEARASMELSLRWAKRCIAEFTKLQNPNALFGIVQGGMFPNLREESLAGLVELDLPGYAIGGVSVGEPKDEMLRVMNHITPKLPANKPRYLMGVGTPEDLVAGVATGVDMFDCVMPTRNARNGHLFTRFGDLRLRNSRYKADERPIDETCTCHTCSNFSRAYLHHLDRCGEMLGPMLTTIHNLHYYLNLMQEVRDALDAGRFGEFQKQFSADRARGV

SEQ ID NO: 51746 - protein, 376 aa, Aquamicrobium aerolatum
  REGION 1..376: note = tr|A0A1I3PET9|A0A1I3PET9_9RHIZ Queuine tRNA-ribosyltransferase OS=Aquamicrobium aerolatum DSM 21857 OX=1121003 GN=tgt PE=3 SV=1
MSENFTFKLLATDGKARRGEISMPRGTIRTPAFMPVGTGGTVKAMYMDQVRDLGADIILGNTYHLMLRPGAERVARLGGLHEFGGWSGPILTDSGGFQVMSLAKLRKLNEQGVTFRSHIDGAKYEMSPERSIEIQGLLDSDIQMQLDECVALPTTEKDMARAMELSLRWAERCKVAFGDQRGKAMFGIVQGGDNAALRERSAEALKAMDLKGYAVGGLAVGEPQEVMLEMLDVTCPVLPHDKPRYLMGVGTPDDMLKSVARGIDMFDCVMPTRAGRHGLAYTRRGKVNLRNARHAEDHRPLDEESDCPAARDYSRAYLHHLVKSGEALGGMLLTWNNLAYYQSLMADIRAAIEAGCFATRAQVITAAWDAGDLPPL

SEQ ID NO: 51747 - protein, 376 aa, Aquamicrobium defluvii
  REGION 1..376: note = tr|A0A011SRP0|A0A011SRP0_9RHIZ Queuine tRNA-ribosyltransferase OS=Aquamicrobium defluvii OX=69279; GN = tgt PE=3 SV=1
MTTSFSFRLIATDGGARRGEVSMPRGTVRTPAFMPVGTGGTVKAMYMDQVRGTGADIILGNTYHLMLRPGAERVARLGGLHELARWPWPILTDSGGFQVMSLSKLRKLTENGVTFRSHIDGAPYEMTPERSIEIQGLLDSDIQMQLDECTALPAKHSEIERAMELSLRWAERCKVAFGDQPGKAMFGIVQGGDDAGLRVRSAQALKVMDLKGYAVGGLAVGEPQPVMLDMLEITCPELPGDKPRYLMGVGTPDDILKSVARGIDMFDCVMPTRAGRHGLAYTRRGKVNLRNARHADDHRPLDEESDCPAARDYSRAYLHHLVRSQEALGAMLLTWNNLAYYQRLMQDIRDAIEAGQFADRAASITEGWARGDIPAL

SEQ ID NO: 51748 - protein, 376 aa, Aquamicrobium sp.
  REGION 1..376: note = tr|A0A4U6C731|A0A4U6C731_9RHIZ Queuine tRNA-ribosyltransferase OS=Aquamicrobium sp. LC103; OX = 1120658 GN=tgt PE=3 SV=1
MTETFSFRILATDGTARRGEITMPRGTVRTPAFMPVGTGGTVKAMYLDQVRALGSDIILGNTYHLMLRPGAERVARLGGLHDFARWPYPILTDSGGFQVMSLAKLRKLNENGVTFRSHIDGAAYEMTPERSIEIQGLLDSDIQMQLDECTALPAKPKEIERAMELSLRWAERCKAAFGEQAGKAMFGIVQGGDIGELREKSAAALTAMDLKGYAVGGLAVGEPQEVMLDMLEATCPVLPEDKPRYLMGVGTPDDILKSVARGIDMFDCVMPTRAGRHGLAYTRRGKINLRNARHADDPRPLDEESECPAARDYSRAYLHHLVKSGEALGAMLLTWNNLAYYQRLMADIREAIAAGRFSDRAAELTEGWARGDIAPL

SEQ ID NO: 51749 - protein, 371 aa, Aquaspirillum sp.
  REGION 1..371: note = tr|A0A1U9JJT8|A0A1U9JJT8_9NEIS Queuine tRNA-ribosyltransferase OS=Aquaspirillum sp. LM1; OX = 1938604 GN=tgt PE=3 SV=1
MLQFTLHSTSAGARRGTLVLNHGTIETPTFMPVGTYGSVKAMSPLELNEIGAQIILGNTFHLWLRPGLDVVAEFGGLHQFIGWDKPILTDSGGFQVFSLGDLRKITEDGVTFQSPINGDKLFLSPEKSMEIQRVLNSDIVMIFDECTPYPADEKTAADSMRMSLRWAERSRKAFDDQGNPNALFGIVQGSMYPAMREESLRELMAIGFDGIAIGGLSVGEPKHEMQRMLQVMQPMLPADKPHYLMGVGTPEDLVYGVAHGIDMFDCVMPTRNARNGWIFTRFGDIKIKNAKYRNDTRPLDETCQCYACRNFSRAYLHHLHRAGEILGARLNTVHNLHYYQQLMADMRQAIEADQFESFVATFHAERQRGVD

SEQ ID NO: 51750 - protein, 378 aa, unidentified
  source 1..378: note = Aquibacillus sp.
  REGION 1..378: note = tr|A0A516KH52|A0A516KH52_9BACI Queuine tRNA-ribosyltransferase OS=Aquibacillus sp. TKL69; OX = 2594883 GN=tgt PE=3 SV=1
MPITYEHIKTCKQTGARLGIVHTPHGSFETPIFMPVGTLATVKTMSPEELEEIGAKIILSNTYHLWLRPGEDIIQEAGGLHSFMNWDGAILTDSGGFQVFSLSDLRQIEEEGVHFRNHISGEKLFLSPEKAMHIQNALGSDIMMAFDECPPFPATHEYMKSSVERTSRWAERCLQAHQNPSKQGLFGIVQGGEYEDLRRLSAQDLTSLDFSGYAVGGLSVGEPKEVMNRVLEFTTPLLPHDKPRYLMGVGSPDSLIDGAIRGIDMFDCVLPTRIARNGTCMTSNGRLVVRNAKYARDFGPLDEKCDCHVCRNYSRAYIRHLVKSNETFGLRLTTYHNLYFLLKLMEQVREAIRNDRLGDFREEFFEQYGFNRPDAKNF

SEQ ID NO: 51751 - protein, 409 aa, Aquicella lusitana
  REGION 1..409: note = tr|A0A370GC92|A0A370GC92_9COXI Queuine tRNA-ribosyltransferase OS=Aquicella lusitana OX=254246; GN = C8D86_12031 PE=3 SV=1
MWVRACFTSYAGGRLPVVSAKLPAMKNSYHSELVKKHASLPARVMRFETPHGEVFTPSFMPVGTRAMLNYLTPADVEQNGSQIILGGNTYHMLCSPGMEVIEKAGGMHPFMGWHKAMLTDSGGFQVLSLSKKGTVCLIEEEGAVFKHPITGKIIHLNSHTSIQAQKIIGADIIMAFDQCTPETGGREAALAALDRTHRWLVASREEHEKNPYSAYGKKQALFGIIQGGSFRDLREQSTAFVLQQALDGIAIGGEVIGFDMPKTGEIIDWVRPMLPEDKIRYTMGVGLNPQDLIDVVAKGIDIFDCVAPTRNARHGTLYFGQIVEQNGWLRFESEGDNCRILIKKSQYARDENPILPGCACYTCQHFSRSYLHYLFKEGLIAYFHLASIHNVHVMQTVCTRMRELILSSG

SEQ ID NO: 51752 - protein, 384 aa, Aquicella siphonis
  REGION 1..384: note = tr|A0A5E4PE93|A0A5E4PE93_9COXI Queuine tRNA-ribosyltransferase OS=Aquicella siphonis OX=254247; GN = tgt PE=3 SV=1
MSNIFHSEVVKKHASLPARVMRMVTPHGEVLTPAFMPVGTRAMLNYLTPADLDLTGSEIILGGNTYHMLCTPGMETIEAVGGMHQFMGWHKAMLTDSGGFQVLSLSKKGTICIIDDHGAHFKHPITGKILHLNSQTSIQAQKIIGADIIMAFDQCTPETGGREAALAALDRTHRWLVLSKEEQLKNPHSAYGFRQALFGIIQGGSFRDLREQSTEFVLSQELDGLAIGGEVIGFDMPKTCEIIDWVRPMLPDDKVRYTMGVGLHPQDLIDVVAKGIDIFDCVAPTRNARHGTLYCGSIVERDGWLSFEGENGQSRILIKKSQYARDTSPVMPGCDCYTCGHFSRAYLHYLFKEGLIAYFHLSSIHNIHVMQKVCRRMRDLILAS

SEQ ID NO: 51753 - protein, 376 aa, unidentified
  source 1..376: note = Aquicoccus porphyridii
  REGION 1..376: note = tr|A0A5A9ZTH1|A0A5A9ZTH1_9RHOB Queuine tRNA-ribosyltransferase OS=Aquicoccus porphyridii; OX = 1852029 GN=tgt PE=3 SV=1
MTGRFEFKLLGRDGAARVGKIATPRGDIATPAFMPVGTAGTVKAMLPESVRATGADIVLGNTYHLMLRPGAERVARLGGLHRFMNWERPILTDSGGFQVMSLAGLRKLTEEGVTFKSHIDGARHHLTPERSMEIQRLLGSDIVMCFDECPALPADRGRIEESMRLSMRWAARSRDAFGDRPGHALFGIQQGGLERDLREESAEALKAIGFEGYAIGGLAVGEGQAAMFDVLDHAPGMLPEDRPRYLMGVGKPDDIVGAVKRGVDMMDCVLPSRSGRTGQVFTRRGVVNIKNARHADDPRPLDEACICPACRGYSRAYLHHVFRSKEIIASMLLTWHNLHYFQEIMAGMRGAIVEARFEAWEAEFHATRALGDIERI

SEQ ID NO: 51754 - protein, 375 aa, unidentified
  source 1..375: note = Aquicoccus sp.
  REGION 1..375: note = tr|A0A4U7J4D5|A0A4U7J4D5_9RHOB Queuine tRNA-ribosyltransferase OS=Aquicoccus sp. SCR17 OX=2541728; GN = tgt PE=3 SV=1
MTRFAFTLQATDGRARTGVIDTPRGQIRTPAFMPVGTAATVKAMMPESVAATGADILLGNTYHLMLRPGAERIDRLGGLHRFMNWDKPILTDSGGFQVMSLADLRKLTETGVTFRSHIDGSKHELTPERSMEIQRLLGSDIVMAFDECPSLPAEESRVAESMRLSMRWAQRSRDAFGDRPGHALFGIQQGGVTPELREESAEKLKEIGFDGYAVGGLAVGEGQEAMFGVLDYAPGQLPADKPRYLMGVGKPDDILGAVKRGIDMMDCVLPSRSGRTGQAWTRRGQVNIKNARHADDPRPLDEHCTCPACRNYSRAYLHHVMRAGEMISGMLLTWHNLHYYQELMADIRGAIAAGEFAAFETEFHAQRAEGDIPPL

SEQ ID NO: 51755 - protein, 378 aa, unidentified
  source 1..378: note = Aquifex aeolicus
  REGION 1..378: note = sp|O67331|TGT_AQUAE Queuine tRNA-ribosyltransferase; OS = Aquifex aeolicus (strain VF5) OX=224324 GN=tgt PE=3 SV=1
MFKFHLITKDGKARRGRIYTPHGVIETPVFMPVGTQGTVKAMLHKLLDEIGTQIILGNTYHLYLRPGTEIIKKAGGLHRFISWNKPILTDSGGYQVFSLAKGKFGNRKAKVKVSDEGVEFQDHLQGDKHFFTPEKVVEIQEIFGSDIMMPLDECVEYPVDKNYAEKALKRTINWLERSIKAKKREDQVLFGIVQGAFWKDLRKKAVEETLKFDEFLFGYSIGGLSVGEPKEIMYGMTEVVCELLPEKKPRYLMGVGKPEDILEAVERGVDMFDCVVPTRNARTGTLYTSQGVVDIRHSKWKEDFSPLDPECDCYTCRNFSKAYLRHLFVAEEISAYVLNTIHNLRFYLKMMEEVRKAIEEKRFKELKEKYLQRVKNKL

SEQ ID NO: 51756 - protein, 378 aa, Aquifex sp.
  REGION 1..378: note = tr|A0A432PWS4|A0A432PWS4_9AQUI Queuine tRNA-ribosyltransferase OS=Aquifex sp. OX=313370 GN=tgt; PE = 3 SV=1
MFKFHLIAKDGKARRGRIYTPHGVIETPVFMPVGTQGTVKAMLHKLLEEIGTQIILGNTYHLFLRPGTEIIKKAGGLHKFISWDKPILTDSGGYQVFSLAKGRFGNRKAKVKITEEGVEFQDHLQGDKHFFTPEKVIEIQEIFGSDIIMPLDECVEYPTTKEYAKQALERTIRWLDKSINAKKREDQVLFGIVQGAFWKDLRKEAVDKTLQFDEFLFGYSIGGLSVGEPKEIMYEMTEVVCDLLPENKPRYLMGVGKPEDILEAIERGVDMFDCVVPTRNARTGTLYTSQGVIDIRHAKWKEDFSTLDPECDCYTCRNFSKAYLRHLFTAEEISAYVLNTIHNLRFYLKMMEEVRRAIEEGNFKILKEKYLEKVKRKL

SEQ ID NO: 51757 - protein, 369 aa, unidentified
  source 1..369: note = Aquificaceae bacterium
  REGION 1..369: note = tr|A0A432F770|A0A432F770_9AQUI Queuine tRNA-ribosyltransferase OS=Aquificaceae bacterium; OX = 2053503 GN=tgt PE=3 SV=1
MKFDLYNTDNKARRGKITFSRGTIQTPAFMPVGTYGTVKSMTPEELKGLGAEIILGNTFHLMLRPGTEIIQKHGDLHDFMHWDKPILTDSGGFQVFSLAKMRKLTEEGALFNSPVNGEKVMLTPEYSMQIQRELGSDIVMIFDECTPYPATHTEARDSMELSLRWAKRSKIAHADNPAALFGIVQGGMYDDLRQKSAEGLREIDFDGYAIGGLSVGEPKDERDQVLDSTTPLLPEDKPRYLMGVGKPEDIVEAVKRGIDMFDCVIPTRNARNGFLFTHNGTVKIRNSKHQNDTNPIDKDCGCYTCQNYSRAYLRHLDKCKEMLGAHLNTIHNLYYYQELMHNIRQAIEENRFEAFEKAFYAKRERAEGI

SEQ ID NO: 51758 - protein, 384 aa, unidentified
  source 1..384: note = Aquificaceae bacterium
  REGION 1..384: note = tr|A0A432F6X7|A0A432F6X7_9AQUI Queuine tRNA-ribosyltransferase OS=Aquificaceae bacterium; OX = 2053503 GN=tgt PE=3 SV=1
MAVSYDPKLFEFKIVASDGNARAGILKTPHGEIETPVYMPVGTLGTVKAVTHREVEEIGYNIILGNTYHLYLRPGLEVIREAGGLHKFISWKGAILTDSGGFQVFSLARKKGQASVEVTEEGVIFRDHLAGDLHLFTPEFVAYAEEVIGADIIMPLDVVVPYPTSYENANEALNRTIRWLKRFIDARTRQDQALFGIVQGAFWKDLRRESALKTLEYDQYLFGYAIGGLSVGETAEIMYEMTEVVTDLLPWNKPRYLMGVGKPENIVESVERGIDMFDCVFPTRVARTGTLYTTYGKLNIGNKRFAKDFSPPDPECDCYTCRNYSRAYLRHLFNVDEITAYILNTIHNLSFYKRLMKQMREAIIRGEFQKWKKSFYEKYFSQKF

SEQ ID NO: 51759 - protein, 371 aa, unidentified
  source 1..371: note = Aquificae bacterium
  REGION 1..371: note = tr|A0A3M0WIZ9|A0A3M0WIZ9_9BACT Queuine tRNA-ribosyltransferase OS=Aquificae bacterium OX=2202151; GN = tgt PE=3 SV=1
MFKFKLIKKDGNARLGKLYTKHGEIETPVFMPVGTQGTVKAITKQQLLETKPQIILGNTYHLYLRPGIEVLKHFKGLHNFMNWEKPILTDSGGFQVFSLANNRDREKGHKPEVVLSEEGVKFKSHLDGSWHFFTPEFVVEIQEIVGSDIMMPLDVCPPYPVSYEYAKDAVEKTIRWLKRSKKAKKNSWQALFGIIQGSTYEDLRKESALMTVELDMDGYSIGGLSVGEPHEYMYAMTEVVIPLIPENKPRYLMGVGTPENIIESVDRGVDMFDCVMPTRNARNGTLFTHFGKVNIKSAKYKLSEEPIDGICDCYTCKNFSKGYIRHLYHAQEITAMILGTIHNLRFYNKLMEDIRNSIKNDKFKEYKNKKS

SEQ ID NO: 51760 - protein, 378 aa, unidentified
  source 1..378: note = Aquificae bacterium
  REGION 1..378: note = tr|A0A3M0WLP6|A0A3M0WLP6_9BACT Queuine tRNA-ribosyltransferase OS=Aquificae bacterium OX=2202151; GN = tgt PE=3 SV=1
MFRFELIDRDSNARLGKIYTKHGEIETPVFMPVGTQGTVKAITKEQLLSTNPQIILGNTYHLYLRPGTEVLSFFGGLHRFMNWEKPILTDSGGFQVFSLAQGKNRSGKHKAEVILTEEGVKFKSHLDGSWHFFTPELVVEIQEIIGSDIMMPLDVCPPYPVSHTTAKDAVDKTIRWLNRSKKAKKNHWQALFGIVQGSVYEDLRKESALKTVELDMDGYSIGGLSVGEPSQEMYAMTEIVTELLPENKPRYLMGVGTPENIIESVDRGVDMFDCVMPTRNARNGTLFTTYGRINIKAAKHKFSDEPVDSECDCYTCKNFSRGYLRHLFNAEEITGMTLATIHNLRFYNRLMENIRKSIKEKHFKEFKKVFYEKYNSDR

SEQ ID NO: 51761 - protein, 376 aa, Aquiflexum balticum
  REGION 1..376: note = tr|A0A1W2H3L4|A0A1W2H3L4_9BACT Queuine tRNA-ribosyltransferase OS=Aquiflexum balticum DSM 16537; OX = 758820 GN=tgt PE=3 SV=1
MKFKLEVTDPKSKARAGMLTTAHGEIETPIFMPVGTAGSVKAVHQRELSDDIHAQIILGNTYHLYLRPGLDVLEKAGGLHKFNGWGKPILTDSGGYQVFSLANNRKLTEEGAIFKSHIDGSKHVFSPEGVMDIQRIIGADIIMAFDECPPYPCDYEYARKSMELTHRWLQRCIDRFDSTKGKYGYEQTLFPIVQGSVFKDLRKQSAEFVASCERDGNAIGGLSVGEPAEMMYEMTEMVTDILPKDKPRYLMGVGTPANILEAIALGVDMFDCVMPTRNARNGMLFTSEGIINIRNEKWKEDFSPIDPYINSYVSTFYSKAYLRHLVISKEILAAQIASIHNLSFYLWLVGQAREQIKIGKYADWKNLMVEKVSRRL

SEQ ID NO: 51762 - protein, 376 aa, unidentified
  source 1..376: note = Aquimarina aggregata
  REGION 1..376: note = tr|A0A162X6J6|A0A162X6J6_9FLAO Queuine tRNA-ribosyltransferase OS=Aquimarina aggregata OX=1642818; GN = tgt PE=3 SV=1
MQFDLLSKDPQSKARAGKITTDHGVIETPIFMPVGTVATVKGVHQRELKNDINPDIILGNTYHLYLRPKTTILEKAGGLHKFMNWDRNILTDSGGYQVYSLSANRKIKEEGVKFKSHIDGSYHVFTPENVMEIQRTIGADIIMAFDECTPYPCDYNYAKRSMHMTHRWLDRCMQHLEKIPVKYGYDQAFFPIVQGSTYKDLRKQSAEYIANAGAVGNAIGGLSVGEPAEEMYAMTEVVTDILPEDKPRYLMGVGTPINILENIALGVDMFDCVMPTRNARNGMLFTAHGTINMKNKKWEDDFSPIDEMGITFVDTEYSKAYLKHLFSVNELLGKQIATIHNLGFYMWLVREARKHILAGDFYSWKNMMVKQMDKRL

SEQ ID NO: 51763 - protein, 376 aa, unidentified
  source 1..376: note = Aquimarina algiphila
  REGION 1..376: note = tr|A0A554VKQ0|A0A554VKQ0_9FLAO Queuine tRNA-ribosyltransferase OS=Aquimarina algiphila OX=2047982; GN = tgt PE=3 SV=1
MQFDLLSKDSQSKARAGKITTDHGIIETPIFMPVGTVATVKGVHQRELKNDINPDIILGNTYHLYLRPQTPILEKAGGLHKFMNWDRNILTDSGGYQVYSLSANRKIKEEGVKFKSHIDGSYHVFTPENVMEIQRTIGADIIMAFDECTPYPCDYRYAKRSMHMTHRWLDRCMQHLEKIPVKYGYDQAFFPIVQGSTYKDLREQSAEYIANAGAVGNAIGGLSVGEPAEEMYAMTEVVTNILPEDKPRYLMGVGTPINILENIALGVDMFDCVMPTRNARNGMLFAAHGTINIKNKKWEDDFSAIDEMGITFVDTEYSKAYLRHLFSVNELLGKQIATIHNLGFYLWLVREARKHILAGDFNSWKNMMVKQMDKRL

SEQ ID NO: 51764 - protein, 376 aa, unidentified
  source 1..376: note = Aquimarina amphilecti
  REGION 1..376: note = tr|A0A1H7TJN6|A0A1H7TJN6_9FLAO Queuine tRNA-ribosyltransferase OS=Aquimarina amphilecti; OX = 1038014 GN=tgt PE=3 SV=1
MQFDLLSTDPESKARAGKITTDHGVIETPIFMPVGTVATVKGVHQRELKNDINPDIILGNTYHLYLRPQTPILEKAGGLHKFMNWDRNILTDSGGYQVYSLSANRKIKEEGVKFKSHIDGSYHVFTPENVMEIQRTIGADIIMAFDECTPYPCDYRYAKRSMHMTHRWLDRCMQHLEKVPVKYGYDQTFFPIVQGSTYKDLRRQSAEYIANAGAEGNAIGGLSVGEPAEEMYAMTEVVTEILPEDKPRYLMGVGTPINILENIALGIDMFDCVMPTRNGRNGMLFTAHGTINIKNKKWEDDFSPIDEMAITYVDTEYSKAYLKHLFSVNEMLGRQIATIHNLGFYLWLTREARKHILAGDFYSWKNMMVKQMDKRL

SEQ ID NO: 51765 - protein, 376 aa, unidentified
  source 1..376: note = Aquimarina atlantica
  REGION 1..376: note = tr|A0A023BTY0|A0A023BTY0_9FLAO Queuine tRNA-ribosyltransferase OS=Aquimarina atlantica OX=1317122; GN = tgt PE=3 SV=1
MQFDLLSKDSLSKARAGKISTDHGVIETPIFMPVGTVATVKGVHQRELKNDINPDIILGNTYHLYLRPQTPILEKAGGLHKFMNWDRNILTDSGGYQVYSLSANRKIKEEGVKFKSHIDGSYHIFTPENVMEIQRTIGADIIMAFDECTPYPCDYRYAKRSMHMTHRWLDRCMQHLEKIPVKYGYDQAFFPIVQGSTYKDLRKQSAEYIANAGAVGNAIGGLSVGEPAEEMYAMTEVVTDILPEDKPRYLMGVGTPINILENIALGVDMFDCVMPTRNARNGMLFTAHGTINIKNKKWEDDFSAIDEMGITFVDTEYSKAYLRHLFSVNELLGKQIATIHNLGFYLWLVREARKHILAGDFNSWKNMMVKQMDKRL

SEQ ID NO: 51766 - protein, 376 aa, Aquimarina brevivitae
  REGION 1..376: note = tr|A0A4Q7P0B1|A0A4Q7P0B1_9FLAO Queuine tRNA-ribosyltransferase OS=Aquimarina brevivitae OX=323412; GN = tgt PE=3 SV=1
MKFEIKSKDPLTKARAGTITTDHGTIETPIFMPVGTVASVKGVHQRELKNDINPDIILGNTYHLYLRPQTTILEKAGGLHKFMNWDRNILTDSGGYQVYSLSANRKIKEEGVKFKSHIDGSYHVFTPENVMEIQRTIGADIIMAFDECTPYPCDFKYAKRSMHMTHRWLERCLQHLKKVPVKYGYEQTFFPIVQGSTYKELRKQSAEYIAGVGAEGNAIGGLSVGEPAEEMYAMTEVVTEILPEDKPRYLMGVGTPINILENIALGVDMFDCVMPTRNARNGMLFTAYGTINIKNKKWEDDFSPIDEMGITFVDTDYSKAYLRHLFTVNELLGKQIATIHNLGFYLWLVREARKHILAGDFESWKNKMVKQMDRRL

SEQ ID NO: 51767 - protein, 376 aa, Aquimarina sp.; identical to SEQ ID NO: 51762
  REGION 1..376: note = tr|A0A3A9VBU5|A0A3A9VBU5_9FLAO Queuine tRNA-ribosyltransferase OS=Aquimarina sp. AD10 OX=1714849; GN = tgt PE=3 SV=1

SEQ ID NO: 51768 - protein, 376 aa, Aquimarina sp.
  REGION 1..376: note = tr|A0A3A9VXF0|A0A3A9VXF0_9FLAO Queuine tRNA-ribosyltransferase OS=Aquimarina sp. BL5 OX=1714860; GN = tgt PE=3 SV=1
MQFDLLSKDPQSKARAGKITTDHGAIETPIFMPVGTVGTVKGVHQRELKNDINPDIILGNTYHLYLRPQTPILEKAGGLHKFMNWDRNILTDSGGYQVYSLSANRKIKEEGVKFKSHIDGSYHVFTPENVMEIQRTIGADIIMAFDECTPYPCDYRYAKRSMHMTHRWLDRCMQHLEKIPVKYGYDQTFFPIVQGSTYKDLRRQSAEYIANAGAEGNAIGGLSVGEPAEEMYAMTEVVTEILPEDKPRYLMGVGTPINILENIALGVDLFDCVMPTRNGRNGMLFTAHGTINIKNKKWEDDFSPIDEMGITYVDTEYSKAYLKHLFTVNELLGKQIATIHNLGFYLWLTREARKHILAGDFNSWKNMMVKQMDKRL

SEQ ID NO: 51769 - protein, 376 aa, Aquimarina spongiae
  REGION 1..376: note = tr|A0A1M6D1E1|A0A1M6D1E1_9FLAO Queuine tRNA-ribosyltransferase OS=Aquimarina spongiae OX=570521; GN = tgt PE=3 SV=1
MQFDLLSKDPQSKARAGKITTDHGVIETPIFMPVGTVASVKGVHQRELKNDINPDIILGNTYHLYLRPQTPILEKAGGLHKFMNWDRNILTDSGGYQVYSLSANRKIKEEGVKFKSHIDGSYHVFTPENVMEIQRTIGADIIMAFDECTPYPCDYQYAKRSMHMTHRWLDRCMQHLEKIPVKYGYEQAFFPIVQGSTYKDLRKQSAEYIANAGAVGNAIGGLSVGEPAEEMYAMTEVVTDILPEDKPRYLMGVGTPINILENIALGVDMFDCVMPTRNGRNGMLFTAHGTINIKNKKWEDDFSPIDEMGITFVDTEYSKAYLRHLFTVNEMLGRQIATIHNLGFYLWLVREARKHILAGDFYSWKNMMVKQMDKRL

SEQ ID NO: 51770 - protein, 380 aa, unidentified
  source 1..380: note = Aquimixticola soesokkakensis
  REGION 1..380: note = tr|A0A1Y5SMQ3|A0A1Y5SMQ3_9RHOB Queuine tRNA-ribosyltransferase OS=Aquimixticola soesokkakensis; OX = 1519096 GN=tgt PE=3 SV=1
MTQSQTQRFSFSLEATDGKARSGRISTPRGEIRTPAFMPVGTAATVKAMMPESVAATGADILLGNTYHLMLRPTAERIAALGGLHKFMNWDKPILTDSGGFQVMSLAGLRKLSEEGVRFASHVDGSKHMLSPERSMEIQKLLGSDIVMAFDECPALPATEAEVAKSMQLSMRWAQRSRDAFGDRPGHALFGIQQGGVTQDLRAQSAEALRAIEFDGYAVGGLAVGEGQEAMFGVLDYAPDMLPVQKPRYLMGVGKPDDIVGAVKRGIDMMDCVLPSRSGRTAQGWTRRGQVNLRNARHQDDPRPLDADCTCPCCAKYSRAYLHHVFRAKEMIGGMLLTWHNLHYFQELMAGMRAAIASGTFDTWEAAFQIEFASGDIERL

SEQ ID NO: 51771 - protein, 373 aa, Aquimonas voraii
  REGION 1..373: note = tr|A0A1G6RPY9|A0A1G6RPY9_9GAMM Queuine tRNA-ribosyltransferase OS=Aquimonas voraii OX=265719; GN = tgt PE=3 SV=1
MSRLHFDLLTTDGAARRGRLTFPRGTVETPAFMPVGTYGTVKAMFPEDLRALGAEIILGNTFHLYLRPGLEVIRAHEGLHGFARWDGPILTDSGGFQVFSLAHRRKITEEGVTFASPVDGSKVFLSPEVSMEIQRVLDSDVVMIFDECTPYPATEKQAATSMQLSLRWAERSKRAHEGNDAALFGIVQGGVYHDLRSVSARGLIDIGFDGYAVGGLAVGEPEAERNAMLEHTCPQLPADRPRYLMGVGRPEDIVEAVARGIDMFDCVMPTRNARNGHYFTKHGAIRIRNAKYEKDTRPIEEGCGCYACVRGFSRAYLRHLERCNEILGAMLATQHNLFHYQALMRDIRAAIDAGRFEDFRAEFYRLRQTPAPE

SEQ ID NO: 51772 - protein, 379 aa, Aquisalibacillus elongatus
  REGION 1..379: note = tr|A0A3N5BDK9|A0A3N5BDK9_9BACI Queuine tRNA-ribosyltransferase OS=Aquisalibacillus elongatus; OX = 485577 GN=tgt PE=3 SV=1
MTAVSYELIKTCKQTGARLGRVTTPHGSFETPVFMPVGTLATVKTMAPEELKDIGANIILSNTYHLWLRPGEDIVEEAGGLHQFMNWDGSILTDSGGFQVFSLSDMREIKEEGVHFRNHINGEKLFLSPEGAMQIQNSLGSDIMMAFDECPPYPASHEYMKSSVERTSRWAERCLEAHQKPDQQGLFGIIQGGEYEDLRKQSARDLVSMDFPGYAIGGLSVGEPKDVMNRVLEFTSPLLPQNKPRYLMGVGSPDSLVDGAIRGVDMFDCVLPTRIARNGTCMTSNGRVVVRNAKFARDFTPLDENCDCYTCRNYTKAYIRHLIKTNETLGIRLTTYHNLYFLVKLMENVREAIKEDRLGDFRDQFFDQYGFNKPNAKNF

SEQ ID NO: 51773 - protein, 371 aa, Aquisalimonas asiatica
  REGION 1..371: note = tr|A0A1H8PLN5|A0A1H8PLN5_9GAMM Queuine tRNA-ribosyltransferase OS=Aquisalimonas asiatica; OX = 406100 GN=tgt PE=3 SV=1
MMEFQRLSSDGAARRGRLTFPRGTVETPTFMPVGTYGTVKAMTPGELKDLGAEIILGNTFHLMLRPGTEIIEAHGDLHDFTQWHGPILTDSGGFQVFSLGALRKIREEGVTFQSPVDGSRVFMGPEESMAVQRALGSDMVMIFDECTPHPATETEARQSMELSLRWAERSRKAHGDNPNALFGIVQGGMYDHLRSRSVQGLRSIGFEGYAVGGLAVGETEEERNRVLEHLEPELPAGCPRYLMGVGRPQDIVEAVRRGIDMFDCVMPTRNARNGYLFTRGGMLRIRNSRFARDTRPIEPGCECHACQYYSRAYLKHLDRCNEILGKRLATIHNLAFYQRLMAELRAAIEAGRLDAYVDDFYARQAAGIDAL

SEQ ID NO: 51774 - protein, 373 aa, Aquisphaera giovannonii
  REGION 1..373: note = tr|A0A5B9W6Q1|A0A5B9W6Q1_9BACT Queuine tRNA-ribosyltransferase OS=Aquisphaera giovannonii; OX = 406548 GN=tgt PE=3 SV=1
MVSTRPVRFTTLSRDPATSARVGRLETPHGALETPAFMPVGTQATVKGLTPDLVRESGTRMLLANTYHLALRPGEETVRALGGLHAFMGWDGPILTDSGGFQVFSMADRSKITDRGVSFRSHLDGRLLELTPERAVAIQEALGPDVAMCLDHCPALPASREDIAAAVDRTIAWAGRCKRAHSRPDQSLFGIVQGGSVADLRGRCAEALVAMDFDGYAVGGVSVGESREEVRKALEVTTHLLPADRPRYLMGVGRPQDILAAVATGIDLFDCVLPTRNGRNATCFTARGPVKLRNAAHARDPGPIEEGCPCLACRRFSRAYLRHLFNAREMLGPILATIHNLTYLHRLTAAIREAIRAGRLVQLHREVLEALGP

SEQ ID NO: 51775 - protein, 371 aa, Aquitalea magnusonii
  REGION 1..371: note = tr|A0A318JB23|A0A318JB23_9NEIS Queuine tRNA-ribosyltransferase OS=Aquitalea magnusonii OX=332411; GN = tgt PE=3 SV=1
MLKFTVHKTSGGARRGTLQLNHGTVETPVFQPVGTYGSVKAMSPVELNDIGAQIILGNTFHLWLRPGLEVIEQFGGLHDFIGWDKPILTDSGGFQVFSLSDMRKLTEEGCTFQSPINGDKLFLSPEISMKIQTVLNSDIVMQLDECTPGQVDHSTAQKSLQMSLRWAERSRRAFDDLKNPNALFGIVQGNLYTDLRQESLEGLLQVGFDGYAIGGLSVGEPKPEMYRMLNELNGMLPADKPHYLMGVGTPEDLVHGVANGIDMFDCVMPTRNARNGWIFTQHGDIKIKNARYKDDKKPLDEECSCYACRNFSRAYLHHLHRVGEILGARLNTIHNLHYYQELMREMRKAIEEDRFEDFRLEFADKRARGVS

SEQ ID NO: 51776 - protein, 371 aa, Aquitalea magnusonii
  REGION 1..371: note = tr|A0A0F3KR74|A0A0F3KR74_9NEIS Queuine tRNA-ribosyltransferase OS=Aquitalea magnusonii OX=332411; GN = tgt PE=3 SV=1
MLKFTVHKTSGGARRGTLELNHGTVETPVFQPVGTYGSVKAMSPVELNDIGAQIILGNTFHLWLRPGLEVIEQFGGLHEFIGWDKPILTDSGGFQVFSLADMRKLTEEGCTFQSPINGNKLFLSPEISMKIQTVLNSDIVMQLDECTPGQVDHATAQKSLQMSLRWAERSRRAFDDLKNPNALFGIVQGNLYTDLRQESLEGLLQVGFDGYAIGGLSVGEPKPEMYRMLNELNGMLPADKPHYLMGVGTPEDLVHGVANGIDMFDCVMPTRNARNGWIFTQYGDVKIKNARYKDDKKPLDEECGCYACRNFSRAYLHHLHRVGEILGARLNTIHNLYYYQELMREMRKAIEEDRFEDFRLEFAAKRARGVA

SEQ ID NO: 51777 - protein, 371 aa, Aquitalea sp.
  REGION 1..371: note = tr|A0A454JHE9|A0A454JHE9_9NEIS Queuine tRNA-ribosyltransferase OS=Aquitalea sp. MWU14-2217; OX = 2480983 GN=tgt PE=3 SV=1
MLKFTVHKTSGGARRGTLELNHGSVETPVFQPVGTYGSVKAMSPVELNDIGAQIILGNTFHLWLRPGLEVIEQFGGLHDFIGWDKPILTDSGGFQVFSLSDMRKLTEEGCTFQSPINGDKLFLSPEISMKIQTVLNSDIVMQLDECTPGQVDHATAQKSLQMSLRWAERSRRAFDDLKNPNALFGIVQGNLYTDLRQESLEGLLQVGFDGYAIGGLSVGEPKPEMYRMLNELNGMLPADKPHYLMGVGTPEDLVHGVANGIDMFDCVMPTRNARNGWIFTQHGDIKIKNARYKDDKKPLDEECACYACRNFSRAYLHHLHRVGEILGARLNTIHNLHYYQELMREMRKAIEEDRFEDFRLEFADKRARGVS

SEQ ID NO: 51778 - protein, 371 aa, Aquitalea sp.
  REGION 1..371: note = tr|A0A3N7EPH1|A0A3N7EPH1_9NEIS Queuine tRNA-ribosyltransferase OS=Aquitalea sp. FJL05 OX=2153366; GN = tgt PE=3 SV=1
MLKFTVHKTSGGARRGTLELNHGTVETPVFQPVGTYGSVKAMSPVELNDIGAQIILGNTFHLWLRPGLEVIEQFGGLHDFIGWDKPILTDSGGFQVFSLSDMRKLTEEGCTFQSPINGDKLFLSPEISMKIQTVLNSDIVMQLDECTPGQVDHATAQKSLQMSLRWAERSRRAFDDLKNPNALFGIVQGNLYTDLRQESLEGLLQVGFDGYAIGGLSVGEPKPEMYRMLNELNGMLPADKPHYLMGVGTPEDLVHGVANGIDMFDCVMPTRNARNGWIFTQHGDIKIKNARYKDDKKPLDEECACYACRNFSRAYLHHLHRVGEILGARLNTIHNLHYYQELMREMRKAIEEDRFEDFRLEFADKRARGVS

SEQ ID NO: 51779 - protein, 379 aa, unidentified
  source 1..379: note = Arachidicoccus rhizosphaerae
  REGION 1..379: note = tr|A0A1H3VKI4|A0A1H3VKI4_9BACT Queuine tRNA-ribosyltransferase OS=Arachidicoccus rhizosphaerae; OX = 551991 GN=tgt PE=3 SV=1
MATLQYKLAKKDSASAARAGVITTDHGQILTPIFMPVGTVGSVKAVNQQQLEHIVKAQIILGNTYHLYLRPGTNILEKAGGLHQFNGWHHPILTDSGGYQVFSLAGTRKIKEEGVLFQSHIDGSRHLFSPEKVMDIQRSIGADIIMAFDECPPAGCEYSYALKSMELTHRWLDRCITRLAETPDKYGYTQNLFPIVQGSTYKDLRTASAEYIASKGAAGNAIGGLSVGEPEEEMYRFTDLCCSILPEDKPRYLMGVGTPWNILEGISLGVDMFDCVMPTRNGRNGMLFTTNGVINIKNKKWEADFSAIDDGFSCETSNYYSKAYLRHLFVAKELLAGQLASLHNLAFYLWLVGQAREHILAGDFTSWKEQMIPRLKTRL

SEQ ID NO: 51780 - protein, 376 aa, unidentified
  source 1..376: note = Arachidicoccus sp.
  REGION 1..376: note = tr|A0A386HU24|A0A386HU24_9BACT Queuine tRNA-ribosyltransferase OS=Arachidicoccus sp. KIS59-12; OX = 2341117 GN=tgt PE=3 SV=1
MQFHLQKNDNQTKARAGKITTDHGEILTPIFMPVGTVGSVKAVNQQQLKSIVKAQIILGNTYHLYLRPGIEILEQAGGLHRFNGWDRPILTDSGGYQVFSLAGTRKIKEEGVIFQSHIDGSRHLFSPENVMDTQRSIGADIIMAFDECPPAGCEYIYAKKSMQLTHRWLDRCIQQLAETEDKYGYTQNLFPIVQGSTFKDLRTESAQYIASKDAAGNAIGGLSVGEPEDKMYEFTELCCDNLPTDKPRYLMGVGTPWNILEGIALGVDMFDCVMPTRNGRNGMLFTTQGVINIRNKKWATDFSSIDEGFDCETSNFYSKAYLRHLFISGELLGGQLASLQNLSFYLWLVENARKHIIAGDFKSWKEAMVVKLKQRL

SEQ ID NO: 51781 - protein, 376 aa, unidentified
  source 1..376: note = Arachidicoccus sp.
  REGION 1..376: note = tr|A0A191TPS3|A0A191TPS3_9BACT Queuine tRNA-ribosyltransferase OS=Arachidicoccus sp. BS20; OX = 1850526 GN=tgt PE=3 SV=1
MQFSLRSKDNHTKARAGKITTDHGEILTPIFMPVGTVGSVKAVNQQQLKSIVAAQIILGNTYHLYLRPGTDVLEQAGGLHKFNGWDKPILTDSGGYQVFSLSGTRKIKEEGVIFQSHIDGSRHLFSPEKVMDIERSIGADIIMAFDECPPAGCEYIYAKKSMELTHRWLDRCVARVNETEGKYGYTQNLFPIVQGNTFKDLRTASAEYIASKNAVGNAIGGLSVGEPEDVMYEFTALCCDILPQAKPRYLMGVGTPWNILEGISLGVDMFDCVMPTRNGRNGMLFTSQGVINIKNKKWATDFSPIDDGFVCETSNYYSKAYLRHLFVSQELLGLQLASIHNLAFYLWLVGEARKHILEGDFASWKNEMVVRLKQRL

SEQ ID NO: 51782 - protein, 382 aa, unidentified
  source 1..382: note = Arboricoccus pini
  REGION 1..382: note = tr|A0A212R6F3|A0A212R6F3_9PROT Queuine tRNA-ribosyltransferase OS=Arboricoccus pini OX=1963835; GN = tgt PE=3 SV=1
MPEFRFELMAVDGAARRGRLHTAWGVIDTPTFMPVGTAATVKAMTFEMVRQTGAQIVLGNTYHLMLRPGAERIARLGGLRRFMGWDGPILTDSGGFQVMSLAARRKLDEKGVVFSSHIDGSRHELTPERSIEIQHLLDATITMQLDECIRLPSERHETERAMELSLRWAERSKQAFQPRQGYGLFGIVQGGTDLELRARSAKGLAAIGFDGYAVGGLAVGEPQALMFETLEGTCPHLPTTHPRYLMGVGKPADMAGAVLRGIDMFDCVMPTRSGRTAQAFTKRGPLNMRNARHADDPRPLDPEADCPATRDYSRAYLHHLVKSEEILGATLLSWNNVWYYQEVMRGLRQAIEDGRSQQFVADMLASEAAGDIPPLPIQKDAR

SEQ ID NO: 51783 - protein, 407 aa, Arcanobacterium haemolyticum
  REGION 1..407: note = tr|D7BLD5|D7BLD5_ARCHD Queuine tRNA-ribosyltransferase OS=Arcanobacterium haemolyticum (strain ATCC 9345 / DSM 20595 / NBRC 15585 / NCTC 8452 / 11018) OX=644284 GN=t gt PE=3 SV=1
MSFSLDTRLDGQLGRTGTIHTPHGDIQTPAFIPVATKATVKSVLPETMREIGAQALLSNAYHLYLQPGSDVVDAAGGVAAFENWHGPTFTDSGGFQVLSLGSGFKKVLSEEFNGKAHVDGQVATNKERLANVDDDGVWFRSHLNGSKHRFTPEVSMRIQHELGADIIFAFDELTTLLNSRGYQEEALERTRLWAERCLRAHKELTEERADKPYQQLFGVIQGAQYEDLRRKAARDLGSMEIDGQRFDGFGVGGALEKENLGTIVRWVNEELPEDRARHLLGISEPDDLFVGVENGVDTFDCVNPSRVARNAAIYSPDGRFNANRAQYKRDFSPLVEGCECYTCTHYTRAYIHHLFKAKEMVVNTLTTIHNEHFTIKLVDDIRAHMKAGTYWEFKEETLGRFYGTKNK

SEQ ID NO: 51784 - protein, 406 aa, Arcanobacterium phocae
  REGION 1..406: note = tr|A0A1H2LCF1|A0A1H2LCF1_9ACTO Queuine tRNA-ribosyltransferase OS=Arcanobacterium phocae; OX = 131112 GN=tgt PE=3 SV=1
MFDIKTRLEGHLGRTGTIHTPHGDIQTPAFIPVATKATVKAVLPETMREIGAQALLSNAYHLYLQPGSDIVDEAGGVAAFENWHGPTFTDSGGFQVLSLGSGFKKVLSEEFNGKAHVDGQVAGKKERLANVDDDGVWFRSHLNGSKHRFTPEVSMRIQHELGADIIFAFDELTTLLNSRGYQEEALERTRLWAQRCLRAHKQLTEEREGKPYQQLFGVIQGAQYEDLRRKAARDLGNMEIDGQRFDGFGVGGALEKENLGTIVGWVNEELPEDRARHLLGISEPDDLFVGVENGIDTFDCVNPSRVARNAAIYSPDGRFNVNRARHRRDFTPLVDGCECYTCTHYTKAYLHHLFKAKEMVVNTLTTIHNEYFTIKLVDDIRHHMEAGTYWEFKEETLGRFYDKRDI

SEQ ID NO: 51785 - protein, 409 aa, Arcanobacterium sp.
  REGION 1..409: note = tr|A0A095X7Q2|A0A095X7Q2_9ACTO Queuine tRNA-ribosyltransferase OS=Arcanobacterium sp. S3PF19; OX = 1219585 GN=tgt PE=3 SV=1
MTFEIQKRLVSRTGHLGRAGVIHTPHGDILTPAFIPVGTKASVKAVLPESIAQTGAQAVLANAYHLYLQPGSDVLDEAGGLGKFMNWQRPTYTDSGGFQVMSLGSGFKKILSQEFAGKPADDNAVARGKERLANVDDDGVWFRSHLNGVRHRFTPEISMRIQHELGADIIFAFDELTTLMNTRAYQEESLERTRRWAQRCLRAHKELTHSRADKPYQQLFGVIQGAQYEDLRRKAARDLGSMEIDGQQFDGFGIGGALEKYRLGTIVGWVCEELPENRARHLLGISEPDDLFRAVENGADTFDCVNPSRVARNGAIYSPDGRFNVTRAEFKRSFTPVVEGCECYTCTHYTKAYLHHGFKAKEMITYTLATIHNEYFTVQLAEGIRKAILEDRYEEFREETLGRFYAKKR

SEQ ID NO: 51786 - protein, 409 aa, Arcanobacterium sp.
  REGION 1..409: note = tr|A0A4Q9UZ28|A0A4Q9UZ28_9ACTO Queuine tRNA-ribosyltransferase OS=Arcanobacterium sp. C605018/01/1 OX=2529275 GN=tgt PE=3 SV=1
MTFEIQQRLETSAGKALGRTGVIHTPHGDIQTPAFIPVGTKATVKAVLPDSVKALGAQAVLANAYHLYLQPGSDVLDEAGGLAAFMNWGGPTYTDSGGFQVMSLGSGFKKVLSQEFSGKTVADDAVAGKRERLANVDDDGVWFRSHLNGTKHRFTPEISMRIQHELGADIIFAFDELTTLLNSRAYQEESLERTRLWAQRCLRAHKQLTEEREGKAYQQLFGVIQGAQYEDLRRKAARDLGAMEIDGQCFDGFGIGGALEKENLGTIVGWVCEELPENRARHLLGISEPDDFFRAIESGADTFDCVNPSRVARNAAIYSPDGRFNITRAQFKRDFSPVVEGCECYTCTHYSKAYLHHTFKAKEMISSTLATIHNEYFTVKLVDDIRKAINEGYYEAFKAETLGRFYSQN

SEQ ID NO: 51787 - protein, 388 aa, Archangium gephyra
  REGION 1..388: note = tr|A0A2W5TFL9|A0A2W5TFL9_9DELT Queuine tRNA-ribosyltransferase OS=Archangium gephyra OX=48 GN=tgt; PE = 3 SV=1
MSLPTPDKRGDQRVEPSTVRFELLHTCAQTGARRGRVHTPHGTIETPVFMPVGTAGSVKAIAPDDLHTLDAKIILGNTYHLMLRPGEQLVGDLGGLHKFISWDRAMLTDSGGFQVYSLSEKRKITEEGATFQSHLDGSKHVLTPERSIEIQEVLGADIIMAFDECPPALSERSYMEPSMARTTRWLSRCIKAWSRQRSSLFGIVQGGLYEDLRKRHAEEICAMDLPGYALGGFAVGEEPAQMHAGVAFSAPLLPKDKPRYLMGVGTPLDLVTCVGHGIDMFDCVLPTRSARNALLFTSEGKLTIKNARYARDERPLDPRCSCYTCRTFSRAYLRHLFVAQELVAMRLNTLHNLHFFLNLMKEARVAIEQDRYGDFLREFHARPQTPPE

SEQ ID NO: 51788 - protein, 392 aa, Archangium gephyra
  REGION 1..392: note = tr|A0A0G2ZT66|A0A0G2ZT66_9DELT Queuine tRNA-ribosyltransferase OS=Archangium gephyra OX=48 GN=tgt; PE = 3 SV=1
MAVRFELVTTDPTGARAGVLHTRRGSIPTPVFMPVGTHASFRHLGMEEVKATGAKIILSNTYHLMLKPGIDVFKRFGGIHPFMQWDGAVLTDSGGFQIFSLPEDRLITEKGAHFRSFHDNSRQLLSPESSIAMQQAINSEIMMVLDVCIDSRTDEAGTREAMERTHRWALRSLAAKNQVDTGQALFAIVQGGVHPNLRDESAAFLTQHPFDGFAIGGLAVGETNEERKAMTARAAASLPQDKPRYLMGVGTPTDLLEAVLRGVDMFDCIIPTKMAQQGYAYTFQGLVRITRQVFRLSDEPLDPTCDCPVCKRFSRGYLQHLMSGKHHIGSRMLSVHNVHHYQQLTWKMRDAIVRGSYAQAYRELKQAVATPKDLKDAKLEVGPGAVTLKEVG

SEQ ID NO: 51789 - protein, 394 aa, Archangium sp.
  REGION 1..394: note = tr|A0A1Q3HFL0|A0A1Q3HFL0_9DELT Queuine tRNA-ribosyltransferase OS=Archangium sp. Cb G35; OX = 1920190 GN=tgt PE=3 SV=1
MGEPRKEKGDTRVPPSLVRYELLHEDASGSRARRGRLHTPHGLIETPIFMPVGTVGSVKGVGPDDLLTLDAQIILGNTYHLMLRPGDDLVGEMGGLHRFISWDRPMLTDSGGFQVFSLAEKRKITEEGAAFQSHLDGRHILLTPERSIEIQETLGADIIMAFDECPPSTEDRAYLEKSLARTTRWLQRCVKAWSRERSSLFGIVQGGLDKNLRKSHAEDVCAVDLPGYALGGYSVGETPEAMHEGVAFSAPLLPRDKPRYLMGVGTPVDLVTCVEHGVDMFDCVLPTRCARNGLLFTSEGKVVIRNATYAKDPRPADPACSCYTCRNFSRAYLRHLFVAGEILAMRLNTLHNLHYFLNLMKDVRQAIAEDRYTAFARDFRDKARAQESERTRSK

SEQ ID NO: 51790 - protein, 392 aa, Archangium sp.
  REGION 1..392: note = tr|A0A1Q3HF88|A0A1Q3HF88_9DELT Queuine tRNA-ribosyltransferase OS=Archangium sp. Cb G35; OX = 1920190 GN=tgt PE=3 SV=1
MAVRFELVTTDPTGARAGVLHTRRGSIPTPVFMPVGTHASFRHLGMEEVKATGAKIILSNTYHLMLKPGIDVFKRFGGIHPFMQWDGAVLTDSGGFQIFSLPEDRLITEKGAHFRSFHDNSRQLLSPESSIAMQQAINSEIMMVLDVCIDSRTDEAGTREAMERTHRWAVRSLAAKNQVDTGQALFAIVQGGVHPNLRDESSAFLTQHPFDGFAIGGLAVGETNEERKTMTARAAASLPQDKPRYLMGVGTPTDLLEAVLRGVDMFDCIIPTKMAQQGYAYTFQGLVRITRQVFKLSDEPLDPTCDCYVCKRFSRGYLQHLMSGKHHIGSRMLSVHNVHHYQQLTWKMRDAILRGSYAQAYRELKQAVATPKDLKEAKLEVGPGAVTLKEVG

SEQ ID NO: 51791 - protein, 392 aa, unidentified
  source 1..392: note = Archangium violaceum
  REGION 1..392: note = tr|A0A084SEY2|A0A084SEY2_9DELT Queuine tRNA-ribosyltransferase OS=Archangium violaceum Cb vi76; OX = 1406225 GN=tgt PE=3 SV=1
MAVRFELVTTDPTGARAGVLHTRRGSIPTPVFMPVGTHASFRHLGMEEVKATGARIILSNTYHLMLKPGIEVFKRFGGIHPFMQWDGAVLTDSGGFQIFSLPEDRLITEKGAHFRSFHDNSRQLLSPESSIAMQQAINSEIMMVLDVCIDSRTDEAGTREAMERTHRWALRSLAAKNQVDTGQALFAIVQGGVHPNLRDESSAFLTQHPFDGFAIGGLAVGETNEERKTMTARAAASLPQDKPRYLMGVGTPTDLLEAVLRGVDMFDCIIPTKMAQQGYAYTFQGLVRITRQVFRLSDEPLDPTCDCPVCKRFSRGYLQHLMSGKHHIGSRMLSVHNVHHYQQLTWKMRDAILRGSYAQAYRELKQAVATPKDLKEAKLEVGPGAVTLKEVG

SEQ ID NO: 51792 - protein, 394 aa, unidentified; identical to SEQ ID NO: 51789
  source 1..394: note = Archangium violaceum
  REGION 1..394: note = tr|A0A084T1T2|A0A084T1T2_9DELT Queuine tRNA-ribosyltransferase OS=Archangium violaceum Cb vi76; OX = 1406225 GN=tgt PE=3 SV=1

SEQ ID NO: 51793 - protein, 377 aa, Arcicella aurantiaca
  REGION 1..377: note = tr|A0A316EDG5|A0A316EDG5_9BACT Queuine tRNA-ribosyltransferase OS=Arcicella aurantiaca OX=591202; GN = tgt PE=3 SV=1
MTFDIQTTDPNSKARAGVITTDHGQIQTPIFMPVGTAGSVKAVHQRELKEDIKAQIILGNTYHLYLRPTLDIIEKAGGLHKFNGWDKPILTDSGGYQVYSLAGTGRKIKEEGVTFKSHIDGSTHFFTPEGVMDIQRTIGADIMMAFDECTPYPCEYGYARESMEMTHRWLKRCCDHFDKTEPKYGYSQTLFPIVQGSVYKDLRVKSAEVIASFEREGNAIGGLSVGEPAEMMYEMTDMVTDILPKDKPRYLMGVGTPANILEGIALGIDMFDCVMPTRNARNGMLFTTEGTINMKNEKWKDDFSPLDSGLNSYASNFYTKAYVRHLLKADEMLGAMICSVHNLTFYLWLVGQAREQIIAGTFKTWKDSMVVKLMQRL

SEQ ID NO: 51794 - protein, 377 aa, unidentified
  source 1..377: note = Arcobacter anaerophilus
  REGION 1..377: note = tr|A0A4Q0XZK3|A0A4Q0XZK3_9PROT Queuine tRNA-ribosyltransferase OS=Arcobacter anaerophilus; OX = 877500 GN=tgt PE=3 SV=1
MEFKIDGKSYNKARACTIKTAHSTIQTPVFMPVGTQATVKALDANDLLDMGAKIILGNTYHLYLRPGSKLIKKFGGLHGFSKFPNSFLTDSGGFQAFSLSDNSKPDENGITFKSHIDGSKHYFTPQSVLDTQYELGSDIMMILDDLVALPNTRERIKKSIERTTKWAEEAIKYHKEQQKKGIGVNQNIFAIIQGGTDKEFRKLSATQLCALEDYDGYAIGGLSVGEPNEEMYETVEWTTDFMPQNKPRYLMGVGTPEDLIENIERGVDMFDCVMPTRNARNGTLFTSFGRVNIKKATFKEDPLPIDSECDCYTCRNFSRAYLNHLFRAGEITYYRLSSIHNIHYYLNLMRQAREAILADNWLEFKKEFYQKRENTGK

SEQ ID NO: 51795 - protein, 373 aa, unidentified
  source 1..373: note = Arcobacter aquimarinus
  REGION 1..373: note = tr|A0A4Q0UWF2|A0A4Q0UWF2_9PROT Queuine tRNA-ribosyltransferase OS=Arcobacter aquimarinus; OX = 1315211 GN=tgt PE=3 SV=1
MEFKIDATSQGARACTIKTAHSTILTPVFMPVGTQGTVKALDANDMLELGAKIILGNTYHLYLRPGSKLIKKFGGLHGFSKFPNSFLTDSGGFQAFSLSDNSKPDENGIMFKSHIDGSKHYFTPQSVLDTQYDLGSDIMMILDDLVALPNTKERIQKSIERTTKWAKEAIEYHMSQKEKGIGVNQNIFAIIQGGTDKEFRKMSAEQLCALSDYDGFAIGGLSVGEPNQDMYDTVEWTTQFMPKNKPRYLMGVGTPEDLIENIERGVDMFDCVMPTRNARNGTLFTSFGRLNIKKAEFKEDENPIDSECECYTCKNFSRAYLNHLYRAGEITYFRLGSIHNIHYYLNLMKQARTAILNDNWVEFKKEFYAKRSK

SEQ ID NO: 51796 - protein, 374 aa, unidentified
  source 1..374: note = Arcobacter bivalviorum
  REGION 1..374: note = tr|A0A345J0I5|A0A345J0I5_9PROT Queuine tRNA-ribosyltransferase OS=Arcobacter bivalviorum; OX = 663364 GN=tgt PE=3 SV=1
MEFKIDATSHHKARACTIKTAHSEIKTPVFMPVGTQATVKALDANDLLSMGAKIILGNTYHLYLRPGSKLVKKFGGLHGFSKFPNSFLTDSGGFQAFSLSDNSKPDENGIMFKSHIDGSKHYFTPQSVLDTQYDLGSDIMMILDDLVALPNTKERIKKSIERTTKWAQEAITYHKEQQAKGIGVEQNIFAIIQGGTDKEFRKMSAQQLCALTDFDGFAIGGLSVGEPNQDMYDTVEWTTDFMPLDKPRYLMGVGTPEDLIENIERGVDMFDCVMPTRNARNGTLFTSIGRVNIKKAMYKEDASPVDEECDCYTCQNFTKAYLNHLFKANEITYFRLASMHNIRYYLNLMTKAREAILADNWVEFKKEFYAKRGK

SEQ ID NO: 51797 - protein, 373 aa, Arcobacter butzleri
  REGION 1..373: note = sp|A8ERD1|TGT_ARCB4 Queuine tRNA-ribosyltransferase; OS = Arcobacter butzleri (strain RM4018) OX=367737 GN=tgt; PE = 3 SV=1
MEFKIDGTSQGARACTIKTAHSTILTPVFMPVGTQGTVKALDANDMLELGAKIILGNTYHLYLRPGSKLIKKFGGLHGFSKFPNSFLTDSGGFQAFSLSNNSKPDENGITFKSHIDGSRHYFTPKSVLDTQYDLNSDIMMILDDLVALPNTDERIKTSIQRTTKWAQEAINYHMEQKQKGIGTHQNIFAIIQGGTSKEFRKLSAQQLCDMSDFDGFAIGGLSVGEPNEQMYETVEWTTQFMPKDKPRYLMGVGTPEDLIENIERGVDMFDCVMPTRNARNGTLFTSFGKLNIKKAEFKDDANPIDNECSCYTCKNFSRAYLNHLFRAAEITYFRLASIHNIHYYLNLMKQAREAILADNWSEFKKEFYVKRSK

SEQ ID NO: 51798 - protein, 373 aa, Arcobacter butzleri
  REGION 1..373: note = tr|A0A0M1UKI4|A0A0M1UKI4_9PROT Queuine tRNA-ribosyltransferase OS=Arcobacter butzleri ED-1; OX = 944546 GN=tgt PE=3 SV=1
MEFKIDGTSQGARACTIKTAHSTILTPVFMPVGTQGTVKALDANDMLELGAKIILGNTYHLYLRPGSNLIKKFGGLHGFSKFPNSFLTDSGGFQAFSLSNNSKPDENGITFKSHIDGSKHYFTPKSVLDTQYDLNSDIMMILDDLVALPNTDERIKTSIERTTKWAQEAIDYHMEQKQKGIGTHQNIFAIIQGGTSKEFRKLSAQQLCAMSDFDGFAIGGLSVGEPNEQMYETVEWTTQFMPKDKPRYLMGVGTPEDLIENIERGVDMFDCVMPTRNARNGTLFTSFGKLNIKKAEFKDDENPIDNECSCYTCKNFSRAYLNHLFRAAEITYFRLASIHNIHYYLNLMKQTREAILADNWSEFKKEFYAKRSK

SEQ ID NO: 51799 - protein, 374 aa, unidentified
  source 1..374: note = Arcobacter canalis
  REGION 1..374: note = tr|A0A2G1CX25|A0A2G1CX25_9PROT Queuine tRNA-ribosyltransferase OS=Arcobacter canalis OX=1912871; GN = tgt PE=3 SV=1
MQFTIDATQNKARACTIKTAHSTIQTPVFMPVGTQATVKALDANDLLSMGAKIILGNTYHLYLRPGSKLIKKFGGLHGFSKFPNSFLTDSGGFQAFSLSDNSKPDENGIMFRSHIDGSKHYFTPQSVLDTQYDLGSDIMMILDDLVALPNTKERIKKSIERTTKWAKEAITYHKQQQEKGIGVNQNIFAIIQGGTDKEFRKMSAQQLCALEDFDGYAIGGLSVGEPNQDMYDTVEWTTTFMPENKPRYLMGVGTPEDLIENIHRGVDMFDCVMPTRNARNGTLFTNFGRVNIKKAMYKEDPLPIDEECDCYTCKNFTKAYLSHLYRAGEITYFRLASIHNINYYLTLMRKAREAILENKWEEFREKFYEKRAKK

SEQ ID NO: 51800 - protein, 373 aa, Arcobacter cibarius
  REGION 1..373: note = tr|A0A5J6RK68|A0A5J6RK68_9PROT Queuine tRNA-ribosyltransferase OS=Arcobacter cibarius OX=255507; GN = tgt PE=4 SV=1
MEFKIDATSKGARACTIKTAHSTILTPVFMPVGTQGTVKALDANDMLEMGAKIILGNTYHLYLRPGSKLIKKFGGLHGFSKFPNSFLTDSGGFQAFSLSDNSKPDENGIMFKSHIDGSRHYFTPKSVLDTQYDLNSDIMMILDDLVALPNTKERIAKSIERTTKWAKEAIEYHMEQKAKGIGTKQNIFAIIQGGTDKEFRKMSAEQLCALTDYDGFAIGGLSVGEPNQDMYDTVEWTTQFMPKYKPRYLMGVGTPEDLIENIERGVDMFDCVMPTRNARNGTLFTSFGRLNIKKAEFKEDASAIDENCECYTCKNFTRAYLNHLLRAGEITYFRLASIHNIHYYLDLMRQARQAILNDNWVEFKKEFYTKRGK

SEQ ID NO: 51801 - protein, 373 aa, unidentified
  source 1..373: note = Arcobacter cloacae
  REGION 1..373: note = tr|A0A4Q0ZJE6|A0A4Q0ZJE6_9PROT Queuine tRNA-ribosyltransferase OS=Arcobacter cloacae OX=1054034; GN = tgt PE=3 SV=1
MEFKIDATSNGARACTIKTAHSTILTPVFMPVGTQGTVKALDANDMLELGAKIILGNTYHLYLRPGSKLIKKFGGLHGFSKFPNSFLTDSGGFQAFSLSDNSKPDENGIMFKSHIDGSKHYFTPKSVLDTQYDLNSDIMMILDDLVALPNTQERIAKSIERTTKWAKEAIEYHMEQKSKGIGTHQNIFAIIQGGTDKNFRKLSAEQLCSLTDFDGFAIGGLSVGEPNADMYETVEWTTQFMPKEKPRYLMGVGTPEDLIENIERGVDMFDCVMPTRNARNGTLFTSFGRLNIKKAEFKEDENPIDSECECYTCKNFSRAYLNHLYRAGEITYFRLGSIHNIHYYLNLMKQARTAILNDNWVEFKKEFYAKRSK

SEQ ID NO: 51802 - protein, 373 aa, unidentified
  source 1..373: note = Arcobacter cloacae
  REGION 1..373: note = tr|A0A4Q0V7C9|A0A4Q0V7C9_9PROT Queuine tRNA-ribosyltransferase OS=Arcobacter cloacae OX=1054034; GN = tgt PE=3 SV=1
MEFKIDATSNGARACTIKTAHSTIQTPVFMPVGTQGTVKALDANDMLELGAKIILGNTYHLYLRPGSKLIKKFGGLHGFSKFPNSFLTDSGGFQAFSLSDNSKPDENGIMFKSHIDGSKHYFTPKSVLDTQYDLNSDIMMILDDLVALPNTQERIAKSIERTTKWAKEAIEYHMEQKSKGIGTHQNIFAIIQGGTDKNFRKLSAEQLCSLTDFDGFAIGGLSVGEPNADMYETVEWTTQFMPKEKPRYLMGVGTPEDLIENIERGVDMFDCVMPTRNARNGTLFTSFGRLNIKKAEFKEDENPIDSECECYTCKNFSRAYLNHLYRAGEITYFRLGSIHNIHYYLNLMKQARTAILNDNWVEFKKEFYAKRSK

SEQ ID NO: 51803 - protein, 373 aa, Arcobacter cryaerophilus
  REGION 1..373: note = tr|A0A494T0G8|A0A494T0G8_9PROT Queuine tRNA-ribosyltransferase OS=Arcobacter cryaerophilus D2610; OX = 1032071 GN=tgt PE=3 SV=1
MEFQINATSQGARACTIKTAHSTILTPVFMPVGTQGTVKALDANDMLEMGAKIILGNTYHLYLRPGSKLIKKFGGLHGFSKFPNSFLTDSGGFQAFSLSDNSKPDENGIMFKSHIDGSKHYFTPKSVLDTQYDLGSDIMMILDDLVALPNTKERIAKSIERTTKWAKEAIEYHMEQKSKGIGVNQNIFAIIQGGTDKEFRKLSAEQLCAMSDYDGFAIGGLSVGEPNALMYETVEWTTQFMPKDKPRYLMGVGTPEDLIENIERGVDMFDCVMPTRNARNGTLFTSFGRLNIKKAEFKEDIKPIDETCSCYTCKNFTRAYLNHLLRAGEITYFRLASIHNIYYYLDLMKQAREAILKDNWIEFKKDFYAKRGK

SEQ ID NO: 51804 - protein, 373 aa, Arcobacter cryaerophilus
  REGION 1..373: note = tr|A0A5B7XBK9|A0A5B7XBK9_9PROT Queuine tRNA-ribosyltransferase OS=Arcobacter cryaerophilus ATCC 43158 OX=1032070 GN=tgt PE=3 SV=1
MEFQIDATSNGARACTIKTAHSTILTPVFMPVGTQGTVKALDATDLLEMGTKIILGNTYHLYLRPGSKLIKKFGGLHGFSKFPNSFLTDSGGFQAFSLSDNSKPDENGIMFKSHIDGSRHYFTPKSVLDTQYELNSDIMMILDDLVALPNTNERIKLSIERTTKWAKEAIDYHMEQKARGIGTKQNIFAIIQGGTDKEFRKQSATSLCAMSDYDGFAIGGLSVGEPNAIMYETVEWTTQFMPKEKPRYLMGVGTPEDLIENIERGVDMFDCVMPTRNARNGTLFTSFGRMNIKKAEFKEDSKPIDETCSCYTCKNFTRAYLNHLLRAGEITYFRLASIHNIYYYLDLMKQAREAILENNWLEFKKDFYAKRGK

SEQ ID NO: 51805 - protein, 373 aa, Arcobacter defluvii
  REGION 1..373: note = tr|A0A4Q0UPA1|A0A4Q0UPA1_9PROT Queuine tRNA-ribosyltransferase OS=Arcobacter defluvii OX=873191; GN = tgt PE=3 SV=1
MEFKIDATSNGARACTIKTAHSTILTPVFMPVGTQGTVKALDANDMLELGAKIILGNTYHLYLRPGSKLIKKFGGLHGFSKFPNSFLTDSGGFQAFSLSDNSKPDENGITFKSHIDGSKHYFTPQSVLNTQYDLGSDIMMILDDLVALPNTKERIQKSIERTTKWAKEAIEYHMSQKEKGIGVNQNIFAIIQGGTDKEFRKMSAEQLCAMTDYDGYAIGGLSVGEPNQDMYETVEWTTQFMPKDKPRYLMGVGTPEDLIENIERGVDMFDCVMPTRNARNGTLFTTFGRLNIKKAEFKEDTNPIDNACECYTCKNFSRAYLNHLFRASEITYFRLASIHNIHYYLQLMKDAREAILANNWTEFKKEFYAKRSK

SEQ ID NO: 51806 - protein, 376 aa, unidentified
  source 1..376: note = Arcobacter ebronensis
  REGION 1..376: note = tr|A0A4Q0YC60|A0A4Q0YC60_9PROT Queuine tRNA-ribosyltransferase OS=Arcobacter ebronensis; OX = 1462615 GN=tgt PE=3 SV=1
MEFKIDGKSHHKARACTIKTAHSTIQTPVFMPVGTQAIVKALDANDMLELGAKIILGNTYHLYLRPGSKTVKKFGGLHGFSKFPNSFLTDSGGFQAFSLSDNSKPDENGITFKSHIDGSKHYFTPQSVLDTQYDLGSDIMMILDDLVALPNTKERIQKSIERTTKWAREAITYHKEQQSKGIGIDQNIFAIIQGGTDKEYRKLSATQLCELDFDGFAIGGLSVGEPNEQMYETVEWTTDFMPLDKPRYLMGVGTPEDLIENIERGVDMFDCVMPTRNARNGTLFTSYGKINIKNAKYKEDEAPIDPECDCYTCRNFSKAYLNHLFRAGEISYFRLGSMHNIRYYLNLMKQAREAILADNWLEFKKEFYAKRGITKE

SEQ ID NO: 51807 - protein, 376 aa, unidentified
  source 1..376: note = Arcobacter ebronensis
  REGION 1..376: note = tr|A0A4Q1AKE8|A0A4Q1AKE8_9PROT Queuine tRNA-ribosyltransferase OS=Arcobacter ebronensis; OX = 1462615 GN=tgt PE=3 SV=1
MEFKIDGKSHHKARACTIKTAHSTIQTPVFMPVGTQAIVKALDANDMLELGAKIILGNTYHLYLRPGSKTVKKFGGLHGFSKFPNSFLTDSGGFQAFSLSDNSKPDENGITFKSHIDGSKHYFTPQSVLDTQYDLGSDIMMILDDLVALPNTKERIKKSIERTTKWAKEAITYHKEQQSKGIGVDQNIFAIIQGGTDKEFRKLSATQLCELDFDGFAIGGLSVGEPNEDMYETVEWTTDFMPLDKPRYLMGVGTPEDLIENIERGVDMFDCVMPTRNARNGTLFTSYGKINIKNAKYKEDEAPIDPECDCYTCKNFSKAYLNHLFRAGEISYFRLGSMHNIRYYLNLMKQAREAILADNWLEFKKEFYAKRGVTKE

SEQ ID NO: 51808 - protein, 373 aa, Arcobacter ellisii
  REGION 1..373: note = tr|A0A347U5E0|A0A347U5E0_9PROT Queuine tRNA-ribosyltransferase OS=Arcobacter ellisii OX=913109; GN = tgt PE=3 SV=1
MEFKIDATSNGARACTIKTAHSTILTPVFMPVGTQGTVKALDANDMLELGAKIILGNTYHLYLRPGSKLVKKFGGLHGFSKFPNSFLTDSGGFQAFSLSDNSKPDENGIMFKSHIDGSRHYFTPQSVLDTQYDLGSDIMMILDDLVALPNTKERIQKSIERTTKWAKEAIEYHMEQKSKGIGVNQNIFAIIQGGTDKEFRKMSAEQLCSLTDFDGFAIGGLSVGEPNADMYETVEWTTQFMPKDKPRYLMGVGTPEDLIENIERGVDMFDCVMPTRNARNGTLFTTFGRLNIKKAEFKEDVNPIDNACECYTCKNFSRAYLNHLFRAAEITYFRLASIHNIHYYLQLMRESREAILANNWTEFKKEFYAKRSK

SEQ ID NO: 51809 - protein, 374 aa, Arcobacter halophilus
  REGION 1..374: note = tr|A0A2N1J5C1|A0A2N1J5C1_9PROT Queuine tRNA-ribosyltransferase OS=Arcobacter halophilus OX=197482; GN = tgt PE=3 SV=1
MQFTIDATQNKARACTIKTAHSTIQTPVFMPVGTQATVKALDANDLLSMGAKIILGNTYHLYLRPGSKLIKKFGGLHGFSKFPNSFLTDSGGFQAFSLSDNSKPDENGIMFRSHIDGSKHYFTPQSVLDTQYELGSDIMMILDDLVALPNTKERIKKSIERTTKWAKEAITYHKQQQEKGIGVHQNIFAIIQGGTDKEFRKMSAQQLCALEDFDGYAIGGLSVGEPNQDMYDTVEWTTTFMPENKPRYLMGVGTPEDLIENIHRGVDMFDCVMPTRNARNGTLFTNFGRVNIKKAMYKEDALPIDEECDCYTCKNFTKAYLSHLYRAGEITYFRLASIHNINYYLTLMRKAREAILENRWEEFRKEFYEKRATK

SEQ ID NO: 51810 - protein, 374 aa, Arcobacter marinus
  REGION 1..374: note = tr|A0A347TNM9|A0A347TNM9_9PROT Queuine tRNA-ribosyltransferase OS=Arcobacter marinus OX=505249; GN = tgt PE=3 SV=1
MQFTIDATQNKARACTIKTAHSTIQTPVFMPVGTQATVKALDANDLLSMGAKIILGNTYHLYLRPGSKLIKKFGGLHGFSKFPNSFLTDSGGFQAFSLSDNSKPDENGIMFRSHIDGSKHYFTPQSVLDTQYDLGSDIMMILDDLVALPNTKERIKKSIERTTKWAKEAITYHKQQQEKGIGVNQNIFAIIQGGTDKEFRKMSAQQLCALEDFDGYAIGGLSVGEPNQDMYDTVEWTTTFMPENKPRYLMGVGTPEDLIENIHRGVDMFDCVMPTRNARNGTLFTSFGRVNIKKAMYKEDALPIDEECDCYTCKNFTKAYLSHLYRAGEITYFRLASIHNINYYLTLMRKAREAILENKWEEFRENFYEKRAKK

SEQ ID NO: 51811 - protein, 374 aa, Arcobacter marinus
  REGION 1..374: note = tr|A0A1T5ALG6|A0A1T5ALG6_9PROT Queuine tRNA-ribosyltransferase OS=Arcobacter marinus OX=505249; GN = tgt PE=3 SV=1
MQFTIDATQNKARACTIKTAHSTIQTPVFMPVGTQATVKALDANDLLSMGAKIILGNTYHLYLRPGSKLIKKFGGLHGFSKFPNSFLTDSGGFQAFSLSDNSKPDENGIMFRSHIDGSKHYFTPQSVLDTQYDLGSDIMMILDDLVALPNTKERIKKSIERTTKWAKEAITYHKQQQEKGIGVNQNIFAIIQGGTDKEFRKMSAQQLCTLEDFDGYAIGGLSVGEPNQDMYDTVEWTTTFMPENKPRYLMGVGTPEDLIENIHRGVDMFDCVMPTRNARNGTLFTNFGRVNIKKAMYKEDPLPIDEECDCYTCKNFTKAYLSHLYRAGEITYFRLASIHNINYYLTLMRKAREAILENKWEEFRESFYEKRAKK

SEQ ID NO: 51812 - protein, 376 aa, Arcobacter molluscorum
  REGION 1..376: note = tr|A0A2G1DHK4|A0A2G1DHK4_9PROT Queuine tRNA-ribosyltransferase OS=Arcobacter molluscorum LMG 25693 OX=870501 GN=tgt PE=3 SV=1
MQFKIDATQNKARACTIQTAHSTITTPVFMPVGTQATVKALDANDLLSMSAKIILGNTYHLYLRPGSKLIKKFGGLHGFSKFPNSFLTDSGGFQAFSLSDNSKPDENGIMFRSHIDGSKHYFTPQSVLDTQYDLGSDIMMILDDLVALPNTKERIKKSIERTTKWAKEAITYHKQQQEKGIGVNQNIFAIVQGGTDKEFRKMSAEQLAQLDGFDGYAIGGLSVGEPNVEMYETVEWTTQFLPENKPRYLMGVGTPEDLIENIHRGVDMFDCVMPTRNARNGTLFTSLGRVNIKKAAYKEDATPIDEECDCYTCKNFNKAYLNHLFRAGEITYFRLASIHNINYYLTLMRSAREAILEGKWDDFRKEFYEKRGVSID

SEQ ID NO: 51813 - protein, 376 aa, Arcobacter mytili
  REGION 1..376: note = tr|A0A345J864|A0A345J864_9PROT Queuine tRNA-ribosyltransferase OS=Arcobacter mytili LMG 24559; OX = 1032238 GN=tgt PE=3 SV=1
MQFTIDATQNKARACTIKTAHSTILTPVFMPVGTQATVKALDANDMLSLGAKIILGNTYHLYLRPGSKLIKKFGGLHGFSKFPNSFLTDSGGFQAFSLSDNSKPDENGIMFRSHIDGSKHYFTPQSVLDTQYDLGSDIMMILDDLVALPNTKERIKKSIERTTKWAKEAITYHKEQQAKGIGVNQNIFAIIQGGTDKEFRQMSAQQLCALTDFDGYAIGGLSVGEPNQDMYDTVEWTTQFMPEDKPRYLMGVGTPEDLIENIHRGVDMFDCVMPTRNARNGTLFTSFGRVNIKKASYKEDATPIDETCECYTCKNFNKAYLNHLFRAGEITYFRLASMHNIHYYLDLMRQARQAILEKRWEEFRKEFYEKRGVTIS

SEQ ID NO: 51814 - protein, 376 aa, Arcobacter nitrofigilis
  REGION 1..376: note = tr|D5V779|D5V779_ARCNC Queuine tRNA-ribosyltransferase OS=Arcobacter nitrofigilis (strain ATCC 33309 / DSM 7299 / LMG 7604 / NCTC 12251 / CI); OX = 572480 GN=tgt PE=3 S V=1
MQFKIDGKSFHKTRACTIKTAHSTIQTPVFMPVGTQATVKALDANDMLSLGAKIILGNTYHLYLRPGSEIIKKFGGLHGFSKFPNSFLTDSGGFQAFSLGDNSKPDENGIMFKSHHDGSKHYFTPESVLDTQYELGSDIMMILDDLVALPNTKERIKKSIERTTDWAEKAITYHKSQQEKGIGINQNIFAIIQGGTDKEFRKLSATQLCALTDFDGFAIGGLSVGEPNAAMYETVEWTTDFMPEDKPRYLMGVGTPEDLIENIERGVDMFDCVMPTRNARNGSLFTTYGKIAIKNAKFKEDAEPIDKACECYTCKNFTKAYLNHLFRAGEITYYRLATLHNIHYYLTLMREAREAILADNWVEFKKEFYKKRGIEI

SEQ ID NO: 51815 - protein, 374 aa, unidentified
  source 1..374: note = Arcobacter pacificus
  REGION 1..374: note = tr|A0A5C2H954|A0A5C2H954_9PROT Queuine tRNA-ribosyltransferase OS=Arcobacter pacificus OX=1080223; GN = tgt PE=3 SV=1
MEFKLDATSNGARACTIKTAHSTITTPVFMPVGTQATVKALDANDMLSMGAKIILGNTYHLYLRPGSKLIKKFGGLHGFSKFPNSFLTDSGGFQAFSLSDNSKPDENGIMFKSHIDGSKHYFTPQSVLDTQYDLGSDIMMILDDLVALPNTSERIQKSIERTTKWAKEAIEYHKSQQEKGIGVNQNIFAIIQGGTDKEFRKMSAEQLCALEDYDGFAIGGLSVGEPNQDMYDTVEWTTQFMPKDKPRYLMGVGTPEDLIENIERGVDMFDCVMPTRNARNGTLFTSFGRMNIKGAKFKEDEKPIDEECDCYTCQNFTRAYLNHLYRAGEMTYYRLGSMHNIHYYLNLMKQAREAILADNWVEFKKEFYEKRSQK

SEQ ID NO: 51816 - protein, 373 aa, unidentified
  source 1..373: note = [Arcobacter] porcinus
  REGION 1..373: note = tr|A0A1C0AWU9|A0A1C0AWU9_9PROT Queuine tRNA-ribosyltransferase OS=[Arcobacter] porcinus; OX = 1935204 GN=tgt PE=3 SV=1
MEFKIDATSKGARACTIKTANSTILTPVFMPVGTQGTVKALDATDLLQMGAKIILGNTYHLYLRPGSKIIKKLGGLHGFSKFPNSFLTDSGGFQAFSLSDNSKPDENGIMFKSHIDGSKHYFTPKSVLDTQYELNSDIMMILDDLVALPNTDERIKKSIERTTKWAKEAISYHMEQKSKGIGTHQNIFAIIQGGTSKEFRKLSATQLCALEDFDGFAIGGLSVGEPNQDMYDTVEWTTQFMPKDKPRYLMGVGTPEDLIENIERGIDMFDCVMPTRNARNGTLFTSFGRLNIKKAQFKEDILPIDEECSCFTCKNFTRAYLNHLLRAGEITYFRLSSIHNIFYYLNLMNQARIAILDDKWQEFKEEFYAKRAK

SEQ ID NO: 51817 - protein, 373 aa, unidentified
  source 1..373: note = [Arcobacter] porcinus
  REGION 1..373: note = tr|A0A5C2HAD3|A0A5C2HAD3_9PROT Queuine tRNA-ribosyltransferase OS=[Arcobacter] porcinus; OX = 1935204 GN=tgt PE=3 SV=1
MEFKIDATSKGARACTIKTANSTILTPVFMPVGTQGTVKALDATDLLQMGAKIILGNTYHLYLRPGSKIIKKLGGLHGFSKFPNSFLTDSGGFQAFSLSDNSKPDENGIMFKSHIDGSKHYFTPKSVLDTQYELNSDIMMILDDLVALPNTDERIKKSIERTTKWAKEAISYHMEQKSKGIGTHQNIFAIIQGGTSKEFRKLSATQLCALEDFDGFAIGGLSVGEPNQDMYDTVEWTTQFMPKDKPRYLMGVGTPEDLIENIERGIDMFDCVMPTRNARNGTLFTSFGRLNIKKAQFKEDILPIDEECSCFTCKNFTRAYLNHLLRAGEITYFRLASIHNIFYYLNLMNQARTAILDDKWQEFKEEFYAKRAK

SEQ ID NO: 51818 - protein, 372 aa, Arcobacter skirrowii
  REGION 1..372: note = tr|A0A2U2C305|A0A2U2C305_9PROT Queuine tRNA-ribosyltransferase OS=Arcobacter skirrowii OX=28200; GN = tgt PE=3 SV=1
MEFKIDATSQGARACTIKTANSTILTPVFMPVGTQGTVKALDANDMLELGAKIILGNTYHLYLRPGSKLIKKFGGLHGFSKFPNSFLTDSGGFQAFSLSDNSKPDENGIMFKSHIDGSRHYFTPKSVLDTQYDLNSDIMMILDDLVALPNTKERIAKSIERTTKWAKEAITYHMEQKSRGIGTHQNIFAIIQGGTDKEFRKQSAQQLCAMSDYDGFAIGGLSVGEPNALMYETVEWTTQFMPKDKPRYLMGVGTPEDLIENIERGVDMFDCVMPTRNARNGTLFTSFGRLNIKKAEFKEDIKPIDESCSCYTCKNFTRAYLNHLLRAGEITYFRLASIHNIFYYLDLMRQAREAILKDNWVEFKKDFYAKRG

SEQ ID NO: 51819 - protein, 373 aa, Arcobacter skirrowii
  REGION 1..373: note = tr|A0A4Q0UFN7|A0A4Q0UFN7_9PROT Queuine tRNA-ribosyltransferase OS=Arcobacter skirrowii CCUG 10374; OX = 1032239 GN=tgt PE=3 SV=1
MEFKIDATSQGARACTIKTANSTILTPVFMPVGTQGTVKALDANDMLELGAKIILGNTYHLYLRPGSKLIKKFGGLHGFSKFPNSFLTDSGGFQAFSLSDNSKPDENGIMFKSHIDGSRHYFTPKSVLDTQYDLNSDIMMILDDLVALPNTKERIAKSIERTTKWAKEAITYHMEQKSRGIGTHQNIFAIIQGGTDKEFRKQSAEQLCSLTDYDGFAIGGLSVGEPNQDMYETVEWTTQFMPKEKPRYLMGVGTPEDLIENIERGVDMFDCVMPTRNARNGTLFTSFGRLNIKKAEFKEDIKPIDESCSCYTCRNFTRAYLNHLLRAGEITYFRLASIHNIHYYLDLMRQAREAILKDNWVEFKKDFYAKRGK

SEQ ID NO: 51820 - protein, 376 aa, Arcobacter sp.
  REGION 1..376: note = tr|A0A2N6FT52|A0A2N6FT52_9PROT Queuine tRNA-ribosyltransferase OS=Arcobacter sp. OX=1872629; GN = tgt PE=3 SV=1
MEFKIDATSTHKARACTIKTAHSTIQTPVFMPVGTQATVKALDANDMLSMGAKIILGNTYHLYLRPGSKIIKKFGGLHGFSKFPNSFLTDSGGFQAFSLSDTSKADEDGIMFKSHIDGSKHYFTPQSVLDTQYDLGSDIMMILDDLVALPNTKERIQKSIERTTAWAKEAITYHMAQKEKGIGLNQNIFAIIQGGTDKEFRKMSAQQLCSLTDFDGYAIGGLSVGEPNADMYETVEWTTDFMPKDKPRYLMGVGTPEDLIENIERGVDMFDCVMPTRNARNGTLFTSFGRLNIRGAKFKEDSKPIDEECDCYTCKNFSRAYLNHLYRAGEMTYFRLGSMHNIHYYLNLMKQARNAILEDKWIEFKTEFYKKREVEI

SEQ ID NO: 51821 - protein, 374 aa, Arcobacter sp.
  REGION 1..374: note = tr|A0A1Y5DVC1|A0A1Y5DVC1_9PROT Queuine tRNA-ribosyltransferase OS=Arcobacter sp. 31_11_sub10_T18; OX = 1856277 GN=tgt PE=3 SV=1
MQFQIDSTHNKARACTIKTAHSTIQTPVFMPVGTQGTVKTLDANDMLSLGAKIILGNTYHLYLRPGSKLVKKLGGLHGFSKFPNSFLTDSGGFQAFSLSNNSKPDSNGIMFKSHIDGSKHYFTPQSVLDTQYELGSDIMMILDDLVALPNTKERIQLSIERTTQWAQEAITYHKEQQTKGIGTEQNIFAIIQGGTDKEFRKMSAEQLCSLTDYDGYAIGGLSVGEANQDMYDTVEWTTQFMPENKPRYLMGVGLPEDLIENIDRGVDMFDCVMPTRNARNGTLFTSFGRINIKNANFKEDAGPIDDECTCYTCTNFSRAYLSHLYRAGEMTYFRLGSYHNLHYYLNLMREARAAIVEGSWDEYKLEFYKKRKKK

SEQ ID NO: 51822 - protein, 373 aa, unidentified
  source 1..373: note = Arcobacter suis
  REGION 1..373: note = tr|A0A443TP55|A0A443TP55_9PROT Queuine tRNA-ribosyltransferase OS=Arcobacter suis OX=1278212; GN = tgt PE=3 SV=1
MEFTINATSNNARACTIVTAHSTIQTPVFMPVGTQGTVKALDANDMLELGAKIILGNTYHLYLRPGSKLVKKFGGLHGFSKFPNSFLTDSGGFQAFSLSSNSKPDENGIMFKSHIDGSKHYFTPKSVLDTQYDLNSDIMMILDDLVALPNTKERIAKSIERTTKWAKEAIEYHMEQKAKGIGTHQNIFAIIQGGTDKEFRKQSAEQLCALSDYDGFAIGGLSVGEPNADMYETVEWTTQFMPKDKPRYLMGVGTPEDLIENIERGVDMFDCVMPTRNARNGTLFTTFGRLNIKKAEYKDDITPIDEACDCYTCKNFSKAYLNHLYRAKEITYFRLGSIHNIHYYLSLMKQAREAILSNNWVEFKKDFYAKRSK

SEQ ID NO: 51823 - protein, 373 aa, Arcobacter thereius
  REGION 1..373: note = tr|A0A1C0B9G6|A0A1C0B9G6_9PROT Queuine tRNA-ribosyltransferase OS=Arcobacter thereius OX=544718; GN = tgt PE=3 SV=1
MEFKIDATSKGARACTIKTANSTILTPVFMPVGTQGTVKALDATDLLKMGAKIILGNTYHLYLRPGSKIIKKLGGLHGFSKFSNSFLTDSGGFQAFSLSDNSKPDENGIMFKSHIDGSKHYFTPKSVLDTQYELNSDIMMILDDLVALPNTDERINKSIERTTKWAKEAISYHMEQKSKGIGTHQNIFAIIQGGTSKEFRKLSATQLCALEDFDGFAIGGLSVGEPNQDMYDTVEWTTKFMPINKPRYLMGVGTPEDLIENIERGIDMFDCVMPTRNARNGTLFTSFGRLNIKKAQFKEDILPIDEECSCFTCKNFTRAYLNHLLRAGEITYFRLASIHNIFYYLNLMNQARVAILENKWQEFKNEFYAKRAK

SEQ ID NO: 51824 - protein, 373 aa, Arcobacter thereius; identical to SEQ ID NO: 51817
  REGION 1..373: note = tr|A0A1C0B452|A0A1C0B452_9PROT Queuine tRNA-ribosyltransferase OS=Arcobacter thereius OX=544718; GN = tgt PE=3 SV=1

SEQ ID NO: 51825 - protein, 373 aa, Arcobacter trophiarum
  REGION 1..373: note = tr|A0A4Q0ZYL3|A0A4Q0ZYL3_9PROT Queuine tRNA-ribosyltransferase OS=Arcobacter trophiarum LMG 25534; OX = 1032241 GN=tgt PE=3 SV=1
MEFQINATSNGARACTIKTAHSTIVTPVFMPVGTQGTVKALDANDLLEMGAKIILGNTYHLYLRPTSKLIKKFGGLHGFSKFPNSFLTDSGGFQAFSLSDNSKPDENGIMFKSHIDGSRHYFTPKSVLDTQYELNSDIMMILDDLVALPNTDERIKLSIERTTKWAKEAIDYHMEQKARGIGTEQNIFAIIQGGTSKEFRKLSATQLCAMSDFDGFAIGGLSVGEPNIDMYDTVEWTTQFMPKEKPRYLMGVGTPEDLIENIERGVDMFDCVMPTRNARNGTLFTSFGRLNIKKAEFKEDIRPIDENCSCYTCKNFTRAYLNHLLRAGEITYFRLASIHNIFYYLDLMKKAREAILKDNWVEFKKDFYAKRGK

SEQ ID NO: 51826 - protein, 373 aa, unidentified
  source 1..373: note = Arcobacter venerupis
  REGION 1..373: note = tr|A0A443TUQ8|A0A443TUQ8_9PROT Queuine tRNA-ribosyltransferase OS=Arcobacter venerupis OX=1054033; GN = tgt PE=3 SV=1
MEFKIDATSNKARACTIVTAHSTIETPVFMPVGTQGTVKALDANDMLELGAKIILGNTYHLYLRPGSKLIKKFGGLHGFSKFPNSFLTDSGGFQAFSLSSNSKPDENGIMFKSHIDGSKHYFTPKSVLDTQYDLNSDIMMILDDLVALPNTKERISKSIERTTKWAKEAIEYHMEQKAKGIGTHQNIFAIIQGGTDKEFRKQSAEQLCALSDYDGFAIGGLSVGEPNADMYETVEWTTQFMPKDKPRYLMGVGTPEDLIENIERGVDMFDCVMPTRNARNGTLFTTFGRLNIKKADYKDDMTPIDEACDCYTCKNFSKAYLNHLYRAKEITYFRLGSIHNIHYYLSLMKEARTAILNDNWVEFKKEFYAKRSK

SEQ ID NO: 51827 - protein, 376 aa, unidentified
  source 1..376: note = Arcticibacter pallidicorallinus
  REGION 1..376: note = tr|A0A2T0UC39|A0A2T0UC39_9SPHI Queuine tRNA-ribosyltransferase OS=Arcticibacter pallidicorallinus; OX = 1259464 GN=tgt PE=3 SV=1
MKFKLEAKDQQSQARAGEITTDHGNIKTPIFMPVGTAGTVKAVHQRELKNDIKAQIILGNTYHLYLRPGLETLERAGGLHKFNGWDGPILTDSGGYQVYSLSDVRKIKEEGVTFRSHIDGSKHLFTPEAAMDIQRVIGGDIIMAFDECTPYPCDYNYAKRSIEMTHRWLKRCCDRFDSTEPKYGYSQTLFPIVQGSVYKDLRVRSAEVIASFGREGNAIGGLSVGEPAEEMYAMTELVCNILPQDKPRYLMGVGTPVNILENIALGVDMFDCVMPTRNARNGMLFTKNGILNMRNEKWKNDFSPIEADSDLFADQVYTKAYLRHLISSKEILGAQIATLHNLHFYIWLVGEAREKIISGEFYDWKKKMVVQLAQRL

SEQ ID NO: 51828 - protein, 389 aa, unidentified
  source 1..389: note = Arcticibacter svalbardensis
  REGION 1..389: note = tr|R9GSV7|R9GSV7_9SPHI Queuine tRNA-ribosyltransferase OS=Arcticibacter svalbardensis MN12-7 OX=1150600 GN=tgt PE=3 SV=1
MEPQSNSYLCVFKMKFKLEASDKFSKARAGEISTDHGTIKTPIFMPVGTAGSVKAVHQRELKDDIKAQIILGNTYHLYLRPGLNTLEKAGGLHKFNGWDGPILTDSGGYQVYSLSDVRKIKEEGVTFRSHIDGSKHLFTPEVAMDIQRVIGGDIIMAFDECTPYPCDYNYAKKSIDMTHRWLKRCCDRFDTTEPKYGYSQTLFPIVQGSVYKDLRIKSAEAIASFEREGNAIGGLSVGEPAEEMYAMTELVCGILPVEKPRYLMGVGTPVNLLENIALGIDMFDCVMPTRNARNGMLFTKNGIMNMRNEKWKNDFSPIEADSELFSDLVYNKAYLRHLITSKEILGAQIATLHNLHFYLWLVNEAREKIISGEFYDWKKKMVIQLAQRL

SEQ ID NO: 51829 - protein, 376 aa, unidentified
  source 1..376: note = Arcticibacterium luteifluviistationis
  REGION 1..376: note = tr|A0A2Z4GGC4|A0A2Z4GGC4_9BACT Queuine tRNA-ribosyltransferase OS=Arcticibacterium luteifluviistationis OX=1784714 GN=tgt PE=3 SV=1
MKFELKTTDPGSKARAGKITTDHGEILTPIFMPVGTAGTVKGVHQRELKDDIHAQIILGNTYHLYLRPGLDIIQKAGGLHGFNGWDKPLLTDSGGYQVFSLKEMRKITEEGAKFSSHIDGSKHMFSPEYVMDIQRIIGADIIMAFDECTPYPCDYGYAENSMHMTHRWLKRCIKRFDETEPIYDHTQSLFPIVQGSVYPDLRKQSAEFIAEQNREGNAIGGLSVGEPAEDMYAMLEVVNDILPKEKPRYLMGVGTPENILEGIALGTDMFDCVMPTRNARNGMLFTTEGIINIRNKKWEDDFSPIDPNLDCYSSKFYTKAYLKHLIKCKEMLGSQIASVHNLAFYIWLVEQAREHILAGDFATWKPKAIKQFMTRL

SEQ ID NO: 51830 - protein, 412 aa, unidentified
  source 1..412: note = Ardenticatena maritima
  REGION 1..412: note = tr|A0A0M9UBZ6|A0A0M9UBZ6_9CHLR Queuine tRNA-ribosyltransferase OS=Ardenticatena maritima; OX = 872965 GN=tgt PE=3 SV=1
MLTEGFAFETQHRMGAARVGRLQTPHGLVETPAFVAVGTQATVKSLTPEDLHNVGTQIIFANTYHLYLRPGADIVAEMGGLHRFMRWDGPIMTDSGGFQVFSLGASIEQGVGKVASIFPDEDPNTPRPKRKPTEGQSLVKITEEGVEFRSHLDGSRHFFTPELSIEIQRKLGADIILAFDECTSPLHDEAYTRRAMERTHRWALRSLEAFRTSHPLHGYPQALYGIVQGGAYHDLRVASARFIAEQPFDGIAIGGSLGRTKEDMRAVLEWTIPLLPDEKPRHLLGIGEIPDIFDAVARGVDTFDCVAPTRMARNAGILARTLDGKRLPKFRMNLRNARFKRDPRPLVEGCTCYTCRTYSRAYVHHLFRANELLAYRLATIHNLHYLNDLMRQIRAALLQGTFDELRRHWLGE

SEQ ID NO: 51831 - protein, 262 aa, unidentified
  source 1..262: note = Ardenticatenia bacterium
  REGION 1..262: note = tr|A0A3M1BUT9|A0A3M1BUT9_9CHLR Queuine tRNA-ribosyltransferase (Fragment) OS=Ardenticatenia bacterium OX=2099665 GN=tgt PE=3 SV=1
HLDGSRHFFTPELSIEIQRKLGADIILAFDECTSPLHDEAYTRRAMERTHRWALRSLEAFRTSHPLHGYPQALYGIVQGGAYHDLRVESARFIAEQPFDGIAIGGSLGRTKEDMRAVLEWTIPLLPDEKPRHLLGIGEIPDIFDAVARGVDTFDCVAPTRMARNAGILARTLDGKRLPKFRMNLRNARFKRDPRPLVEGCTCYTCRTYSRAYVHHLFRANELLAYRLATIHNLHYLNDLMRQIRAALLQGTFDELRRHWLGE

SEQ ID NO: 51832 - protein, 390 aa, unidentified
  source 1..390: note = Ardenticatenia bacterium
  REGION 1..390: note = tr|A0A2U2SFZ7|A0A2U2SFZ7_9CHLR Queuine tRNA-ribosyltransferase OS=Ardenticatenia bacterium; OX = 2099665 GN=tgt PE=3 SV=1
MKEDAQCAARAGIIHTPHGDIPTPVFAPVGTQATVKTMTPRDLRTLGATLILSNTYHLYLRPGAELIARLGGLHRFMGWDGPILTDSGGYQVFSLQALRRVDDEGVVFRSHIDGSTHLFTPEKVIAIQEQLGADIIMPLDECTIPNDYAYNLEALARTHRWAERSLAAKRRSDQALYGIVQGGVFQDLRIQSAQFLRALDLPGYAIGGLSVGETKAEMHQVLEWLHPELPRDRPRYLMGVGSPEDLFECVARGIDQFDCVLPTRMARNGAVLTHRGRLNLRNAQYAADPMPIEEGCLCYTCTTFSRAYLRHLIMADEITGLYLTTLHNLHFMLDLMRRIRQSILDGTFMEFRHAFLASYRTAGNAQEAARTPPEHHPEDAHYPDEVTSCR

SEQ ID NO: 51833 - protein, 376 aa, unidentified
  source 1..376: note = Arenibacter algicola
  REGION 1..376: note = tr|A0A221V3X1|A0A221V3X1_9FLAO Queuine tRNA-ribosyltransferase OS=Arenibacter algicola OX=616991; GN = tgt PE=3 SV=1
MKFTLQHSDSRTKARAAEIITDHGKIETPIFMPVGTVASVKGVHQKELREEINPDIILGNTYHLYLRPKTEILKQAGGLHKFMNWDRNILTDSGGYQVYSLSDNRKIKEEGVKFKSHIDGSYHVFTPENVMEIQRVIGADIIMAFDECTPYPCDYNYAKRSMHMTHRWLERCIKHLEKTPFAYNYEQTFFPIVQGSTYKDLRRQSAEYIAGVGAEGNAIGGLSVGEPAEEMYAMTEVVCEILPEDKPRYLMGVGTPINILENIALGIDMFDCVMPTRNARNGMLFTAHGTINIKNKKWEDDFSPLDEMGTTFVDHEYSKAYLRHLFAANEYLGKQIATIHNLGFYLWLVREARRHILAGDFYEWKSVMVKQMDKRL

SEQ ID NO: 51834 - protein, 376 aa, Arenibacter echinorum
  REGION 1..376: note = tr|A0A327QMK1|A0A327QMK1_9FLAO Queuine tRNA-ribosyltransferase OS=Arenibacter echinorum OX=440515; GN = tgt PE=3 SV=1
MKFTLQHSDSRTKARAAELITDHGKIETPIFMPVGTVASVKGVHQKELREEINPDIILGNTYHLYLRPKTEILKQAGGLHKFMNWDRNILTDSGGYQVYSLSDNRKIKEEGVKFKSHIDGSYHVFTPENVMEIQRVIGADIIMAFDECTPYPCDYNYAKRSMHMTHRWLDRCIKHLEKTPFTYDFEQTFFPIVQGSTYKDLRQQSAEYIAGVGAEGNAIGGLSVGEPAEEMYAMTEVVCEILPEDKPRYLMGVGTPINILENIALGIDMFDCVMPTRNARNGMLFTAHGTINIKNKKWEDDFSPLDEMGTTFVDHEYSKAYLRHLFAANEYLGKQIATIHNLGFYMWLVREARKHILAGDFYEWKSVMVKQMDKRL

SEQ ID NO: 51835 - protein, 376 aa, Arenibacter nanhaiticus
  REGION 1..376: note = tr|A0A1M6IEB4|A0A1M6IEB4_9FLAO Queuine tRNA-ribosyltransferase OS=Arenibacter nanhaiticus; OX = 558155 GN=tgt PE=3 SV=1
MKFTLQHTDPKSKARAAELITDHGKIETPIFMPVGTVASVKGVHQRELKEEINPDIILGNTYHLYLRPKIEILKQAGGLHKFMGWDRNILTDSGGYQVYSLSGNRKIKEEGVKFKSHIDGSYHFFSPESVMEIQRDIGADIIMAFDECTPYPCDYNYAKRSMHMTHRWLDRCIRHLDKTPFTYGYEQTFFPIVQGSTYKDLRRQSAEYIASVGAEGNAIGGLSVGEPAEEMYAMTEVVCEVLPEDKPRYLMGVGTPINILENIALGIDMFDCVMPTRNARNGMLFTAHGTINIKNKKWENDFSPIDEMGTTFVDLEYSKAYLRHLFAANEYLGKQIATIHNLGFYLWLVREARKHILAGDFSEWKSIMVKQMDKRL

SEQ ID NO: 51836 - protein, 387 aa, Arenibacter palladensis
  REGION 1..387: note = tr|A0A1M5HAU5|A0A1M5HAU5_9FLAO Queuine tRNA-ribosyltransferase OS=Arenibacter palladensis; OX = 237373 GN=tgt PE=3 SV=1
MTIFAALNRFFLKFTLQHSDTRTKARAAELITDHGKIETPIFMPVGTVASVKGVHQRELKEEINPDIILGNTYHLYLRPKTEILKQAGGLHKFMNWDRNILTDSGGYQVYSLSDNRKIKEEGVKFKSHIDGSYHVFTPENVMEIQRVIGADIIMAFDECTPYPCDYNYAKRSMHMTHRWLERCIKHLEKTPFAYDYEQTFFPIVQGSTYKDLRRQSAEYIAGVGAEGNAIGGLSVGEPAEEMYSMTEVVCEILPEDKPRYLMGVGTPINILENIALGIDMFDCVMPTRNARNGMLFTAHGTINIKNKKWEDDFSPLDEMGTTFVDHEYSKAYLRHLFAANEYLGKQIATIHNLGFYLWLVREARRHILAGDFYEWKSVMVKQMDKRL

SEQ ID NO: 51837 - protein, 376 aa, Arenibacter palladensis
  REGION 1..376: note = tr|A0A543W2M5|A0A543W2M5_9FLAO Queuine tRNA-ribosyltransferase OS=Arenibacter palladensis; OX = 237373 GN=tgt PE=3 SV=1
MKFTLQHSDTRTKARAAEIITDHGKIETPIFMPVGTVASVKGVHQKELREEINPDIILGNTYHLYLRPKTEILKQAGGLHKFMNWDRNILTDSGGYQVYSLSDNRKIKEEGVKFKSHIDGSYHVFTPENVMEIQRVIGADIIMAFDECTPYPCDYNYAKRSMHMTHRWLERCIKHLEKTPFAYNYEQTFFPIVQGSTYKDLRRQSAEYIAGVGAEGNAIGGLSVGEPAEEMYAMTEVVCEILPEDKPRYLMGVGTPINILENIALGIDMFDCVMPTRNARNGMLFTAHGTINIKNKKWEDDFSPLDEMGTTFVDHEYSKAYLRHLFAANEYLGKQIATIHNLGFYLWLVREARRHILAGDFYEWKSVMVKQMDKRL

SEQ ID NO: 51838 - protein, 376 aa, Arenibacter sp.
  REGION 1..376: note = tr|A0A318HY24|A0A318HY24_9FLAO Queuine tRNA-ribosyltransferase OS=Arenibacter sp. ARW7G5Y1; OX = 2135619 GN=tgt PE=3 SV=1
MKFTLQHSDTRTKARAAELITDHGKIETPIFMPVGTVASVKGVHQRELKEEINPDVILGNTYHLYLRPKTEILKQAGGLHKFMNWDRNILTDSGGYQVYSLSANRKIKEEGVKFKSHIDGSYHVFTPENVMEIQRVIGADIIMAFDECTPYPCDYNYAKRSMHMTHRWLDRCINHLEKTPFTYDYEQTFFPIVQGSTYKDLRKQSAEYIASVGAEGNAIGGLSVGEPAEEMYAMTEVVCEILPEDKPRYLMGVGTPINILENIALGIDMFDCVMPTRNARNGMLFTAHGTINIKNKKWEDDFSPLDEMGTTFVDLEYSKAYLRHLFAANEYLGKQIATIHNLGFYLWLVREARRHILAGDFYEWKSVMVKQMDKRL

SEQ ID NO: 51839 - protein, 376 aa, Arenibacter sp.
  REGION 1..376: note = tr|A0A372GQW7|A0A372GQW7_9FLAO Queuine tRNA-ribosyltransferase OS=Arenibacter sp. P308M17; OX = 2303391 GN=tgt PE=3 SV=1
MKFTLQHSDTRTKARAAELITDHGKIETPIFMPVGTVASVKGVHQRELKEEINPDIILGNTYHLYLRPKTEILKQAGGLHKFMNWDRNILTDSGGYQVYSLSDNRKIKEEGVRFKSHIDGSYHVFTPENVMEIQRVIGADIIMAFDECTPYPCDYNYAKRSMHMTHRWLERCMRHLEKTPLAYDYRQTFFPIVQGSTYKDLRRQSAEYIAGVGAEGNAIGGLSVGEPAEEMYAMTEVVCEILPEDKPRYLMGVGTPINILENIALGIDMFDCVMPTRNARNGMLFTAHGTINIKNKKWEDDFSPLDEMGTTFVDLEYSKAYLRHLFAANEYLGKQIATIHNLGFYLWLVREARRHILAGDFHEWKSVMVKQMDKRL

SEQ ID NO: 51840 - protein, 387 aa, Arenibacter troitsensis
  REGION 1..387: note = tr|A0A1X7LFA5|A0A1X7LFA5_9FLAO Queuine tRNA-ribosyltransferase OS=Arenibacter troitsensis; OX = 188872 GN=tgt PE=3 SV=1
MTIFAALNRFFLKFTLQHSDTRTKARAAELITDHGKIETPIFMPVGTVASVKGVHQRELKEEINPDIILGNTYHLYLRPKTEILKQAGGLHKFMNWDRNILTDSGGYQVYSLSDNRKIKEEGVKFKSHIDGSYHVFTPENVMEIQRVIGADIIMAFDECTPYPCDYNYAKRSMHMTHRWLERCIRHLEKTPFAYDYEQTFFPIVQGSTYKDLRRQSAEYIAGVGAEGNAIGGLSVGEPAEEMYAMTEVVCEILPEDKPRYLMGVGTPINILENIALGIDMFDCVMPTRNARNGMLFTAHGTINIKNKKWEDDFSPLDEMGTTFVDHEYSKAYLRHLFAANEYLGKQIATIHNLGFYLWLVREARRHILAGDFYEWKSVMVKQMDKRL

SEQ ID NO: 51841 - protein, 371 aa, Arenicella xantha
  REGION 1..371: note = tr|A0A395JJ30|A0A395JJ30_9GAMM Queuine tRNA-ribosyltransferase OS=Arenicella xantha OX=644221; GN = tgt PE=3 SV=1
MKFDLLNTDGNARRARLSFARGEIQTPIFMPVGTAGTVKAMTPAELEQVGAQIVLGNTFHLMLRPGTDVIQAHGDLHDFMQWQKPILTDSGGFQVWSLAELRKISEKGVTFRSPIDGSEKFLGPEEAIDIQAKLGSDIVMIFDECTPFPATEQEARTSMELSMRWAKRSKTAHGDSSSALFGIIQGGMFEHLRDESLAGLQDIGFDGYAIGGLSVGEPKEDMYRILRHLAHKMPDQAPRYLMGVGTPENLVTAVHYGVDMFDCVLPTRNARNGWLYTQTGVVKIRNAQYELDTRPIDEACGCDTCKQFSRSYIKHLLKTNEILGARLATVHNLHFFLDLMQQMREAIEQNSFDQFRANFFEMRGQPDPTVA

SEQ ID NO: 51842 - protein, 370 aa, unidentified
  source 1..370: note = Arenimonas caeni
  REGION 1..370: note = tr|A0A2P6MCT6|A0A2P6MCT6_9GAMM Queuine tRNA-ribosyltransferase OS=Arenimonas caeni OX=2058085; GN = tgt PE=3 SV=1
MSRMRFEKITTDGPARRGRLHFPRGTVETPAFMPVGTYGTVKAMLPESLRAIGAEIILGNTFHLWLRPGMEVIGAHGGLHGFCKWDGPILTDSGGFQVWSLAKRRKITEEGVTFAAPTDGSRVFLSPEVSMQVQRSLDSDIVMVFDECTPYPATEPVARKSMELSLRWAERSKRAHEGNDAALFGIVQGGTHFDLRARSAEGLRAIGFDGYAVGGLAVGEPPEERNATLDALCPLLPEDQPRYLMGVGKPEDIVEAVARGIDMFDCVMPTRNARNGHYFVRGGQVRIRNAKYEKDLRPIEPGCTCYTCASGYSRSYLRHLDRCNEILGSMLATIHNLHHYQQLMREIRTAIEAGTFAQWRAAFHAARAPD

SEQ ID NO: 51843 - protein, 372 aa, Arenimonas composti
  REGION 1..372: note = tr|A0A091B988|A0A091B988_9GAMM Queuine tRNA-ribosyltransferase OS=Arenimonas composti TR7-09 = DSM 18010 OX=1121013 GN=tgt PE=3 SV=1
MSRMAFALLGTDGAARRGRLTFPRGTVETPAFMPVGTYGTVKAMLPESVRDTGAEIILGNTFHLWLRPGIEVIAAHGGLHGFCKWNGPILTDSGGFQVWSLAKMRKITEEGVAFAAPTDGSRVFLSPEVSMQVQRALDSDIVMIFDECTPYPATHEVAKKSMELSLRWAGRSKRAHEGNDAALFGIVQGGTHHDLRARSAAGLIDIGFDGYAVGGLAVGEPAEEREATLEALCPQLPADRPRYLMGVGKPEDIVEAVARGIDMFDCVMPTRNARNGHYFVRGGQVRIRNAKYEHDLRPIEEGCTCYTCRSGYSRSYLRHLDRCNEMLGSMLATIHNLHHYQQLMRDIRAAIDAGTFAEFRAAFHATRATGSG

SEQ ID NO: 51844 - protein, 367 aa, Arenimonas donghaensis
  REGION 1..367: note = tr|A0A087MJX0|A0A087MJX0_9GAMM Queuine tRNA-ribosyltransferase OS=Arenimonas donghaensis DSM 18148 = HO3-R19 OX=1121014 GN=tgt PE=3 SV=1
MRFEPLGNDGPARRGRLHFPRGTVETPAFMPVGTYGTVKAMFPEGLRELGAEIILGNTFHLWLRPGTRVIEAHGGLHGFCKWNGPILTDSGGFQVWSLAKRRKISEEGVAFASPTDGAKVFLSPEVSMQVQRSLDSDIVMIFDECTPYPATEPVARTSMELSLRWAERSKRAHEGNDAALFGIVQGGTWPELRSRSAAGLIDIGFDGYAVGGLAVGEPAEEREATLDALCPQLPADKPRYLMGVGRPEDIVEAVARGIDMFDCVMPTRHARTGHYFVRGGQVKIRNAKYENDVRPIEEGCTCYTCANGYSRAYLRHLERCGEILGAMLATIHNLHHYQQLMRDIRAAIDAGRFQDFRAAFHAARAPD

SEQ ID NO: 51845 - protein, 372 aa, Arenimonas malthae
  REGION 1..372: note = tr|A0A091AVM7|A0A091AVM7_9GAMM Queuine tRNA-ribosyltransferase OS=Arenimonas malthae CC-JY-1; OX = 1384054 GN=tgt PE=3 SV=1
MRFEKLGQDGPARRGRLHFPRGTVETPAFMPVGTYGTVKAMLPESLRAIGAEIILGNTFHLWLRPGMEVIEAHGGLHGFCKWNGPILTDSGGFQVWSLAKRRKITEEGVTFASPTDGAKVFLSPEVSMQVQRSLDSDIVMIFDECTPYPATEPVARKSMELSLRWAERSKRAHEGNDAALFGIVQGGTWNELRARSAEGLKAIGFDGYAVGGLAVGEPPEERDATLEALCPLLPEDQPRYLMGVGKPEDIVEAVARGIDMFDCVMPTRNARNGHYFVRGGQVRIRNAQYERDLRPIEPGCTCYTCASGYTRSYLRHLDRCNEILASMLATIHNLHHYQQLMRDIRAAIDAGRFREFRAAFHAARAQAAPTGG

SEQ ID NO: 51846 - protein, 368 aa, unidentified
  source 1..368: note = Arenimonas metalli
  REGION 1..368: note = tr|A0A091AQ68|A0A091AQ68_9GAMM Queuine tRNA-ribosyltransferase OS=Arenimonas metalli CF5-1; OX = 1384056 GN=tgt PE=3 SV=1
MRFEKLGQDGRARRGRLHFPRGTVETPAFMPVGTYGTVKAMLPESLRAIGAEIILGNTFHLWLRPGMEVIDLHGGLHGFCQWNGPILTDSGGFQVWSLAKRRKITEEGVTFASPTDGSKVFLSPEVSMQVQRSLDSDIVMIFDECTPYPATEKVARTSMELSLRWAERSKRAHEGNDAALFGIVQGGTYPELRARSAEGLKAIGFDGYAVGGLAVGEPPEERDATLDALVPLLPEDQPRYLMGVGKPEDIVEAVARGIDMFDCVMPTRNARNGHYFVRGGQVRIRNAQYEKDLRPIEEGCTCYTCASGYTRSYLRHLDRCNEILASMLGTIHNLHHYQQLMRDIRAAIDAGTFEAWRAAFHAARGVTL

SEQ ID NO: 51847 - protein, 378 aa, Arenimonas oryziterrae
  REGION 1..378: note = tr|A0A091B042|A0A091B042_9GAMM Queuine tRNA-ribosyltransferase OS=Arenimonas oryziterrae DSM 21050 = YC6267 OX=1121015 GN=tgt PE=3 SV=1
MILDDPMSRMQFEKFAQDGNARRGRLTFPRGTIETPAFMPVGTYGTVKAMKPSDIEAIGAEIILGNTFHLFLRPGLDVISAHEGLHRFTGWQRPILTDSGGFQVWSLAKRRKITEQGVTFASPVDGSKVFLGPEESMNIQRVLGSDIVMIFDECTPYPATEKQARDSMELSLRWAARSKAAHAGNDAALFGIVQGGTYPELRTRSAEGLQAIGFDGYAVGGLAVGEPAAEREQTLEAICPQLPEDKPRYLMGVGKPEDIVEAVARGIDMFDCVMPTRNARNGHYFTRFGQVRIRNQKNEKDLRPIEPGCTCHACANGFTRAYLRHLDKCNEILASMLATIHNLHYYQQLMREIRAAIEAGRFEAFRTEFYAARARGED

SEQ ID NO: 51848 - protein, 373 aa, Arenimonas sp.
  REGION 1..373: note = tr|A0A2D8BD04|A0A2D8BD04_9GAMM Queuine tRNA-ribosyltransferase OS=Arenimonas sp. OX=1872635; GN = tgt PE=3 SV=1
MSRLRFEHIGSDGPARRGRLHFPRGTVETPAFMPVGTYGTVKAMLPESLREVGAEIILGNTFHLWLRPGTEVIEAHGGLHGFCKWDGPILTDSGGFQVWSLAKRRKISEEGVAFASPTDGAKVFLSPEVSMQVQRSLDSDIVMIFDECTPYPATEPVARASMELSLRWAERSKRAHEGNDAALFGIVQGGTWPDLRSRSAAGLVDIGFDGYAVGGLAVGEPAEEREATLDALCPQLPGDKPRYLMGVGKPEDIVEAVARGIDMFDCVMPTRNARNGHYFVRGGQVRIRNAQYEKDLRPIEEGCACYTCRSGYSRAYLRHLERCNEILASMLATIHNLHHYQQLMRDIRAAIEAGRFQDFRAAFHAARAGSPPP

SEQ ID NO: 51849 - protein, 372 aa, Arenimonas sp.
  REGION 1..372: note = tr|A0A5B2Z9K4|A0A5B2Z9K4_9GAMM Queuine tRNA-ribosyltransferase OS=Arenimonas sp. 3729k OX=2608255; GN = tgt PE=3 SV=1
MSRMAFELLGRDGEARRGRLRFPRGTVETPAFMPVGTYGTVKAMLPETLREIGAEIVLGNTFHLWLRPGTEVIAAHGGLHGFSRWNGPILTDSGGFQVWSLAQRRKISEEGVTFAAPTDGSRVFLSPEVSMQVQRVLDSDVVMVFDECTPYPAAEPVARKSMELSLRWAERSKRAHEGNDAALFGIVQGGTWPALRARSAAGLVDIGFDGYAVGGLAVGEPAEEREATLSALCPQLPADKPRYLMGVGKPQDIVEAVARGVDMFDCVMPTRNARNGHYFVRGGQVRIRNARYERDLRPIEEGCECHTCRSGYSRAYLRHLDRCNEILGPMLATIHNLHFYLRLMREIRAAIEQGRFAAFREAFHAGYAAGTD

SEQ ID NO: 51850 - protein, 376 aa, unidentified
  source 1..376: note = Arenitalea lutea
  REGION 1..376: note = tr|A0A1M6FR85|A0A1M6FR85_9FLAO Queuine tRNA-ribosyltransferase OS=Arenitalea lutea OX=1178825; GN = tgt PE=3 SV=1
MKFELHAKDAQSKARAGKITTDHGVIETPIFMPVGTVGTVKGVHQRELKEDINPDIILGNTYHLYLRPQTNILEQAGGLHKFMNWDRNILTDSGGYQVYSLSANRKIKEEGVKFKSHIDGSYHTFTPENVMEIQRSIGADIIMAFDECTPYPCDYNYAKRSMHMTHRWLDRCVNHLEKTPLKYDYNQAFFPIVQGSTYKDLRKQSAEYIANAGAVGNAIGGLSVGEPAEEMYAMTDVVCSILPEDKPRYLMGVGTPINILENIALGVDMFDCVMPTRNARNGMLFTAHGSINIKNLKWADDFSPIDEMGITFVDTEYTKAYLRHLFTVNELLGKQIATIHNLGFYLWLVREARKHILAGDFNTWKDQMVKQMNNRL

SEQ ID NO: 51851 - protein, 362 aa, unidentified
  source 1..362: note = Armatimonadetes bacterium
  REGION 1..362: note = tr|A0A3M2B121|A0A3M2B121_9BACT Queuine tRNA-ribosyltransferase OS=Armatimonadetes bacterium; OX = 2033014 GN=tgt PE=3 SV=1
MIRFETVARSTRSHARVGKLHTPHGVIETPVFMPVGTQASVKTLSQDELEQLGFKIILGNTYHLYLRPGDERIARLGGLHRFMSWSGAILTDSGGFQVFSLAGLRQIDDEGVTFRSHLDGSEHRFTPERSIQVQRHLGSDIMMAFDECPPYPASYDAVARATERTYQWAIRSKQAWESTSSLSTNGEGALFGIIQGGVHEDLRLMSLQQITSLELPGYAIGGVSVGEPVEEIRRIVEFVAPRMPAEKPRYLMGVGTPEDILHAVQQGVDMFDCVLPTRMARHGAVFTSRGRLNLRNAKHLEAREPIDPECRCWVCQRYTLAYIHHLFRAGELLGLRLATYHNLAYYARWMAHLREAIKTGAL

SEQ ID NO: 51852 - protein, 368 aa, unidentified
  source 1..368: note = Armatimonadetes bacterium
  REGION 1..368: note = tr|A0A1Y0H5R1|A0A1Y0H5R1_9BACT Queuine tRNA-ribosyltransferase OS=Armatimonadetes bacterium Uphvl-Ar1 OX=2004467 GN=tgt PE=3 SV=1
MVAMRLRYELIAVCPHTGARRGRIHTAHGVVETPCFMPVGTQGNVKTLGSEDLESAGFKLVLSNTYHLSLRPGDELVERFGGLHELMSWRGPILTDSGGYQVMSLSDMNRIDDDGVTFKSHLDGREIYLTPERSMEIQARLGVDIAMCLDQCPPYPCSRDEAAVAMERTHKWLPRNLAAKGERVNLFGIVQGGVHEDLRRESAEVVREMDFDGVAIGGVSVGEPTEMQYPVVAFTAPLLPADKPRYLMGVGHPQDILHAVKCGVDMFDCVLPTRMARHHALYTLKGRVNALNAKWAEEKGWFDEDSVFPVTERYSAGYLRHLFKAGEPFGARLASLHNIWFYGRMMQEIRDAIEQGTWPELMDRYAQA

SEQ ID NO: 51853 - protein, 370 aa, unidentified
  source 1..370: note = Aromatoleum aromaticum
  REGION 1..370: note = sp|Q5P720|TGT_AROAE Queuine tRNA-ribosyltransferase; OS = Aromatoleum aromaticum (strain EbN1) OX=76114 GN=tgt; PE = 3 SV=1
MQFELLAQHGAARRGRLTLAHGTVDTPAFMPVGTYGTVKAMTPAALADTGAQICLGNTFHLWLRPGLDVVAAHGGLHRFMNWDRPILTDSGGFQVFSLGALRKISEEGVKFASPIDGAKLFLTPEESMRIQTVLNSDIAMIFDECTPHPATHDEAAKSMQLSLRWARRSRDEFDRLANPNALFGIVQGGMFEDLRDESLAALDAIGFSGYAIGGLSVGEPKEDMARILAHTAPRLPAGRPRYLMGVGTPEDIVAGVAAGIDMFDCVMPTRNARNGWLFTRYGDIKIKNATHKQDTRPLDPSCDCYTCRNFSRAYLHHLHRAGEILGSMLNTIHNLRYYQTLTAELRAAIAAGDLDSHAARFRADRSTGAC

SEQ ID NO: 51854 - protein, 376 aa, unidentified
  source 1..376: note = Arsenicibacter rosenii
  REGION 1..376: note = tr|A0A1S2VCF2|A0A1S2VCF2_9BACT Queuine tRNA-ribosyltransferase OS=Arsenicibacter rosenii; OX = 1750698 GN=tgt PE=3 SV=1
MTFSISAHDPQSKARTGILTTDHGPIQTPIFMPVGTAGTVKAVHQRELEQDIKAEIILGNTYHLYLRPGLDVLSKAGGLHRFNGWNHPILTDSGGYQVYSLSNTRKIQEEGVTFKSHIDGSKHQFTPENVMDIQRTIGADIIMAFDECTPYPCDYSYARRSMEMTHRWLDRCIDRFDSTEGHYGYRQFLFPIVQGSTYPDLRKQSAEVIASKERTGNAIGGLAVGEPAEEMYASIALVNEILPADKPRYLMGVGTPANILEAIALGVDMFDCVMPTRNARHGILFTTEGVINIKNEKWSRDFSPVDPGLEGYASQFYTKAYLRHLIKAEELLAAQIASIHNLTFYLWLVRQAREHIAAGDYVSWKNEMVVKLMQRL

SEQ ID NO: 51855 - protein, 375 aa, unidentified
  source 1..375: note = Arsenicitalea aurantiaca
  REGION 1..375: note = tr|A0A433XFF8|A0A433XFF8_9RHIZ Queuine tRNA-ribosyltransferase OS=Arsenicitalea aurantiaca; OX = 1783274 GN=tgt PE=3 SV=1
MTKTKFTLSATDGLARRGRIDMPRGAIETPAFMPVGTVGTVKAMYPEQVRDTGADILLGNTYHLMLRPGAERVASLGGLHDFMDWQRPILTDSGGFQVMSLAKLRKLDERGVTFRSHIDGSAHELTPERSIEIQLLLDSDIIMQLDECIALPAEHKEMERAMELSLRWADRSKAAFGQQPARMLFGIVQGGDDAALRARSAAGLASIGFDGYSVGGLAVGEPQEVMFRVLEDLTPEMPKEKPRYLMGVGKPDDILGAIGRGIDMFDCVHPTRAGRHGHAYTAMGVVNFKNARHKDDPRPLDANSENPNCRRFSRAYLHHLVRTEEILGAMILSQINLHYYQTLVKGARAAIEAGRFADFAAETREGWAKGDLPPV

SEQ ID NO: 51856 - protein, 372 aa, unidentified
  source 1..372: note = Arsenophonus endosymbiont
  REGION 1..372: note = tr|A0A4Q1B706|A0A4Q1B706_9GAMM Queuine tRNA-ribosyltransferase OS=Arsenophonus endosymbiont of Bemisia tabaci Asia II 3 OX=1868623 GN=tgt PE=3 SV=1
MKYELQSQDGQARRGRLIFERGIVETPAFMPVGTYGTVKGMTPEEVKQTGAQILLGNTFHLWLRPGQEIMKLHGDLPDFMQWQGPILTDSGGFQVFSLGAMRKIKEEGVYFRNPINGERVFLSPEKSMEIQYDLGSDIVMIFDECTPYPAEWDYAKKSMEMSLRWAKRSRQRFDELANKNALFGIIQGSVYPDLRDISVKGLVEIGFDGYAVGGLAVGEPKADMHRILEHVCPQISHNKPRYLMGVGKPEDLVEGVRRGIDMFDCVMPTRNARNGHLFVTEGVIKIRNAKYKSDTSPLDAHCDCYTCSHYSRAYLHHLDRCNEILGARLNTLHNLRYYQRLMADIRQAIEKGEFEAFAVEFYRRINKSISSN

SEQ ID NO: 51857 - protein, 372 aa, unidentified
  source 1..372: note = Arsenophonus endosymbiont
  REGION 1..372: note = tr|A0A3B0MNZ9|A0A3B0MNZ9_9GAMM Queuine tRNA-ribosyltransferase OS=Arsenophonus endosymbiont of Trialeurodes vaporariorum OX=235567 GN=tgt PE=3 SV=1
MKYELQSQDGQARRGRLIFERGIVETPAFMPVGTYGTVKGMTPEEVKQTGTQILLGNTFHLWLRPGQGIMKLHGDLHDFMQWQGPILTDSGGFQVFSLGAMRKIKEEGVYFRNPINGERVFLSPEKSMEIQYDLGSDIVMIFDECTPYPAEWDYAKKSMEMSLRWAKRSRQRFDELANKNALFGIIQGSVYPDLRDISVKGLVEIGFDGYAVGGLAVGEPKADMHRILEYVCPQIPHNKPRYLMGIGKPEDLVEGVRRGIDMFDCVMPTRNARNGHLFVTEGVIKIRNAKYKSDTSPLDAHCDCYTCSHYSRAYLHHLDRCNEILGARLNTLHNLRYYQRLMAEIRQAIEKGEFEAFAVDFYRRINKSISSN

SEQ ID NO: 51858 - protein, 372 aa, Arsenophonus nasoniae
  REGION 1..372: note = tr|D2TW97|D2TW97_9GAMM Queuine tRNA-ribosyltransferase OS=Arsenophonus nasoniae OX=638; GN = tgt PE=3 SV=1
MKYELQTQDGQARRGRLIFERGIVETPAFMPVGTYGTVKGMTPEEVKQTGAQILLGNTFHLWLRPGQEIMKLHGDLHDFMQWQGPILTDSGGFQVFSLGAMRKIKEEGVDFRHPINGERIFLSPEKSMEIQYDLGSDIVMIFDECTPYPADWEYAKKSMEMSLRWAKRSRQRFDELANRNALFGIIQGSVYPDLRDISVKGLIEIGFDGYAVGGLAVGEPKEDMHRILEHVCPQIPQNKPRYLMGVGKPEDLIEGVRRGIDMFDCVMPTRNARNGHLFVTEGVIKIRNAKYKSDTSPLDAHCDCYTCSNYSRAYLHHLDRCNEILGARLNTLHNLSYYQRLMAEIRQAIEKGEFEAFAVEFYRRINKSISSN

SEQ ID NO: 51859 - protein, 372 aa, Arsenophonus sp.
  REGION 1..372: note = tr|A0A2A2GW67|A0A2A2GW67_9GAMM Queuine tRNA-ribosyltransferase OS=Arsenophonus sp. ENCA; OX = 1987579 GN=tgt PE=3 SV=1
MKYELQSQDGQARRGRLIFERGIVETPAFMPVGTYGTVKGMTPEEVKQTGAQILLGNTFHLWLRPGQEIMKLHGDLHDFMQWQGPILTDSGGFQVFSLGAMRKIKEEGVYFRNPINGERVFLSPEKSMEIQYDLGSDIVMIFDECTPYPAEWDYAKKSMEMSLRWAKRSRQRFDELANKNALFGIIQGSVYPDLRDISVKGLVEIGFDGYAVGGLAVGEPKEDMNRILEHVCPQIPQNKPRYLMGVGKPEDLVEGVRRGIDMFDCVMPTRNARNGHLFVTEGVIKIRNAKYKSDTSPLDAHCDCYTCSHYSRAYLHHLDRCNEILGARLNTLHNLRYYQRLMAEIRQAIEKGEFEAFAVDFYRRINKSISSN

SEQ ID NO: 51860 - protein, 387 aa, unidentified
  source 1..387: note = Arsukibacterium ikkense
  REGION 1..387: note = tr|A0A0M2V740|A0A0M2V740_9GAMM Queuine tRNA-ribosyltransferase OS=Arsukibacterium ikkense; OX = 336831 GN=tgt PE=3 SV=1
MKFELDTTDGRARRGRLIFERGIVETPAFMPVGTYGTVKGMTPEELEATGAQICLGNTFHLMLRPGTDIIKKHGDLHDFMHWHKPILTDSGGFQVFSLGELRKITEEGVKFRSPLNGERIMLTPERSMEVQRDLGSDIVMIFDECTPYPATEQQAKKSMEMSLRWAKRSKEAHGDNPAALFGIIQGGMYPELRDVSLQGLEDIGFDGYAIGGLSVGEPKADMINILNHTTGQMPSHKPRYLMGVGKPEDIVEAVRRGIDMFDCVMPTRNARNGHLFISTGVVKIRNAKHKDDTSPLDPECDCYTCKNYSRSYLHHLDRCNEILGARLNTMHNLHHYQKLMQGLRDAIATGTLEQFVSEFYAKRDLPVPVLEQLADSAKSNETAVSTH

SEQ ID NO: 51861 - protein, 387 aa, unidentified
  source 1..387: note = Arsukibacterium sp.
  REGION 1..387: note = tr|A0A0M2VBH4|A0A0M2VBH4_9GAMM Queuine tRNA-ribosyltransferase OS=Arsukibacterium sp. MJ3; OX = 1632859 GN=tgt PE=3 SV=1
MKFELDTTDGRARRGRLIFERGIVETPAFMPVGTYGTVKAMTPEELDASGAQICLGNTFHLMLRPGTDIIKKHGDLHDFMHWHKPILTDSGGFQVFSLGELRKITEEGVKFRSPLNGERIMLTPERSMEVQRDLGSDVVMIFDECTPYPATEQQAKKSMEMSLRWAKRSKDAHADNPAALFGIIQGGMYPNLRDVSLQGLEDIGFDGYAIGGLSVGEPKQDMITILNHTTGQMPSHKPRYLMGVGKPEDIVEAVRRGIDMFDCVMPTRNARNGHLFVHSGVIKIRNAKHKDDIAPLDVDCDCYTCKNYSRSYLHHLDRCNEILGARLNTMHNLHHYQKLMQGLREAIAAGTLEQFVSEFYAKRDLPVPALEHPAVAVDNTETPVTTN

SEQ ID NO: 51862 - protein, 430 aa, Arthrobacter agilis
  REGION 1..430: note = tr|A0A1Y3M761|A0A1Y3M761_9MICC Queuine tRNA-ribosyltransferase OS=Arthrobacter agilis OX=37921; GN = tgt PE=3 SV=1
MPAAGWQNRVVHPQSQQSSFSFSVRNRLEDTTPGAGNGGHRHGRTGTITTPHGEIRTPAFIPVGTKASVKAVLPGAMAELGAQALLANAYHLYLQPGADILDEAGGLGAFMNWPGPTFTDSGGFQVMSLGSGFKKVITMDVPVDADKAGADDRIAVGKERLAHIDDDGVWFKSHLNGDRHRFTPEISMQVQHQLGADIMFAFDELTTLMNSRGYQEESLERTRLWALRCIAEHERLTGERSHRPYQALFGVIQGAQYEDLRRKASADLGAMNFDGFGIGGALEKENLGTILGWCSDELPENKPRHLLGISEPDDLFTGIENGADTFDCVSPTRVARNSAFYTPDGRWNLSNSRFKRDFTPLVEGCDCYTCTHYTRAYIHHLFKAKEMVSATLISIHNERFVVRMVDDARAAIDDGTFYELKDEVLGRYYA

SEQ ID NO: 51863 - protein, 427 aa, Arthrobacter agilis
  REGION 1..427: note = tr|A0A1Y3M908|A0A1Y3M908_9MICC Queuine tRNA-ribosyltransferase OS=Arthrobacter agilis OX=37921; GN = tgt PE=3 SV=1
MGWQNGGVHPQSQQSAFSFAVHHRIEDTTPGADGPGPRHGRTGTITTPHGDIRTPAFIPVGTKASVKAVLPEAMKELGGQALLANAYHLYLQPGADVLDEAGGLGAFMNWPGPTFTDSGGFQVMSLGSGFKKVITMDVPVDAEAAGADDRVATGKERLAHIDDDGVWFKSHLNGDRHRFSPEISMQVQHQLGADIMFAFDELTTLMNSRGYQEESLERTRLWALRCIAEHQRLTAERSHRPYQALFGVIQGAQYEDLRRKASADLGAMDFDGFGIGGALEKENLGTILGWCSDELPEDKPRHLLGISEPDDLFTGIENGADTFDCVSPTRVARNSAFYTPDGRWNLSNARFKRDFTPLVDGCDCYTCTHYTRAYIHHLFKAKEMVSATLISIHNERFVVRMVDDARAALEDGSFYDLKAEVLGRYYA

SEQ ID NO: 51864 - protein, 449 aa, Arthrobacter alpinus
  REGION 1..449: note = tr|A0A0M4QPY3|A0A0M4QPY3_9MICC Queuine tRNA-ribosyltransferase OS=Arthrobacter alpinus OX=656366; GN = tgt PE=3 SV=1
MPSPENSTGLLAPAPATAPPTVPGAPASQSEFSFEVTTRLNETCAPAAEAIQRNGGKFQGRTGVITTPHGTIKTPAFIAVGTKATVKAVLPESMAELGAQALLANAYHLYLQPGADILDAAGGLGKFMNWSGPTFTDSGGFQVMSLGSGFKKVINMDAVAASPHAGADDSVAVGKERLAHIDDDGVWFKSHLNGDMHRFSPEVSMQVQHQIGADIMFAFDELTTLLNSRGYQEMSLERTRLWALRCIEEHFRLTEERLGKPYQALFGVIQGAQYEDLRRKASHDLGEMNFDGFGIGGALEKENLGTIVRWCSEELPEDKPRHLLGISEPDDIFTAIENGADTFDCVSPTRVARTSAFYTPDGRFNLSGAKYKRDFTPLSQECDCYTCENYTRAYIHHLYKAKEMVSATLISIHNERFVVKMVDDARLAIEDGTFFAFKAETLRRYYPNR

SEQ ID NO: 51865 - protein, 449 aa, Arthrobacter alpinus
  REGION 1..449: note = tr|A0A1H5M711|A0A1H5M711_9MICC Queuine tRNA-ribosyltransferase OS=Arthrobacter alpinus OX=656366; GN = tgt PE=3 SV=1
MPTPETVTDLITPAHTTEPHSVPGGPASQAEFGFEVTTRLNETCAPDADAIERNGGKFQGRTGVITTPHGTIKTPAFIAVGTKATVKSVLPESMTELGAQALLSNAYHLYLQPGADILDAAGGLGKFMNWQGPTFTDSGGFQVMSLGSGFKKVINMDAAASSPHAGADDSVAVGKERLAHIDDDGVWFKSHLNGDMHRFSPEISMQVQHQIGADIMFAFDELTTLLNSRGYQEMSLERTRLWALRCIDEHFRLTEDRVGKPYQALFGVIQGAQYEDLRRKASHDLGEMNFDGYGIGGALEKENLGTIVRWCSEELPENKPRHLLGISEPDDIFTAIENGADTFDCVSPTRVARTSAFYTPDGRFNLSGAKYKRDFTPLSDECDCYTCENYTRAYIHHLYKAKEMVSATLISIHNERFVVKMVDDARLAIEDGTFFAFKAEALRRYYPKR

SEQ ID NO: 51866 - protein, 426 aa, Arthrobacter crystallopoietes
  REGION 1..426: note = tr|N1V4K9|N1V4K9_9MICC Queuine tRNA-ribosyltransferase OS=Arthrobacter crystallopoietes BAB-32 OX=1246476 GN=tgt PE=3 SV=1
MRQNGWVPQSDFSFTVGKRLAETAAPTTSQIEANGGGFNGRTGTITTPHGEIQTPAFIAVGTKATVKAVLPEAMKDLGAQALLANAYHLYLQPGADVLDEAGGLGKFMNWDGPTFTDSGGFQVMSLGSGFKKVINMDAAAAAGSGSDDRVAAGKERLAHVDDDGVWFKSHLNGDRHRFTPEISMQVQHQLGADIMFAFDELTTLMNSRGYQESSLERTRLWAERCVIEHERLTKERSHRPYQALFGVIQGAQYEDLRRKACRDLGAMNFDGFGIGGALEKENLGTIVRWCNEELPEDKPRHLLGISEPDDIFTAIENGADTFDCVSPTRVARNSAFYTPDGRKNLSNARFKRDFTPLVDGCDCYACANYTRAYIHHLFKANEMVSHTLISIHNERFTVKLVDDARLAIEDGSFFDFKAEVLGRYYS

SEQ ID NO: 51867 - protein, 422 aa, Arthrobacter crystallopoietes
  REGION 1..422: note = tr|A0A1H1BNX4|A0A1H1BNX4_9MICC Queuine tRNA-ribosyltransferase OS=Arthrobacter crystallopoietes; OX = 37928 GN=tgt PE=3 SV=1
MPQSDFSFTVGKRLSETAPPTAAQVEANGGEFKGRTGTIATPHGDIQTPAFIAVGTKATVKAVLPESMKDLGAQALLANAYHLYIQPGPEILDEAGGLGKFMNWAGPTFTDSGGFQVMSLGSGFKKVINMDAAAEAGAGSGADDRVAAGKERLAHVDDDGVWFKSHLNGDRHRFTPEISMQVQHQLGADIMFAFDELTTLMNSRAYQELSLERTRLWAERCIVEHERLTKERSHRPYQALFGVIQGAQYEDLRRKASSDLGAMNFDGFGIGGALEKENLGTIVRWCNEELPEDKPRHLLGISEPDDIFTAIENGADTFDCVSPTRVARNSAFYTPDGRKNLSNAKFKRDFTPLVEGCDCYACANYTRAYIHHLFKANEMVSHTLISIHNERFTVKLVDDARLAIEDGSFFDFKNETLGRYYA

SEQ ID NO: 51868 - protein, 425 aa, unidentified
  source 1..425: note = Arthrobacter cupressi
  REGION 1..425: note = tr|A0A1G8V9E5|A0A1G8V9E5_9MICC Queuine tRNA-ribosyltransferase OS=Arthrobacter cupressi; OX = 1045773 GN=tgt PE=3 SV=1
MGSVPFAKHQSAFSFTVGTRLSESCAPSPEQRDANGGEFLGRTGTITTPHGTIQTPAFIAVGTKATVKAVLPESIRGFGAQAVLANAYHLYLQPGPEILDAAGGLGAFMNWDGPTFTDSGGFQVMSLGSGFKKVIDMKSVDAAGPDDAVAPGKERLAHVDEEGVWFKSHLNGDKHRFSPEISMQVQHQIGADIMFAFDELTTLQNSRAYQEESLERTRRWAERCVVEHRRLTLSRAGKPYQALFGVIQGAQYEDLRRKACRDLGAMDFDGFGIGGALEKENLGTIVRWCNEELPENKPRHLLGISEPDDIFTAIENGADTFDCVSPTRVARNSAFYTADGRFNLSGAKYKADFGPLQDGCDCYTCQNYSRAYIHHLFKAKEMLSATLISIHNERFVVRMVDDARHSIESGDFFEFKAETLARYYH

SEQ ID NO: 51869 - protein, 420 aa, unidentified
  source 1..420: note = Arthrobacter echini
  REGION 1..420: note = tr|A0A5D0XPR1|A0A5D0XPR1_9MICC Queuine tRNA-ribosyltransferase OS=Arthrobacter echini OX=1529066; GN = tgt PE=3 SV=1
MHPQSQQSSFAFAVHSRLEDTTPGGGSGGPRHGRTGTITTPHGQIRTPAFIPVGTKASVKAVLPGAMAELGAQALLANAYHLYLQPGADILDEAGGLGAFMNWPGPTFTDSGGFQVMSLGSGFKKVITMDAPTDAEKAGADDRVAVGKERLAHIDDDGVWFKSHLNGDRHRFTPEISMQVQHQLGADIMFAFDELTTLMNSRGYQEESLERTRLWAERCVSEHERLTVERNHRPYQALFGVIQGAQYEDLRRKASADLGGMNFDGFGIGGALEKENLGTILGWCSDELPEDKPRHLLGISEPDDLFTGIENGADTFDCVSPTRVARNSAFYTPDGRWNLSNARFKRDFTPLVEGCDCYTCTHYTRAYIHHLFKAKEMVSATLISIHNERFVVRMVDDARAAIDDGTFYDLKAEVLGRYYT

SEQ ID NO: 51870 - protein, 420 aa, unidentified
  source 1..420: note = Arthrobacter echini
  REGION 1..420: note = tr|A0A4S5E2Y4|A0A4S5E2Y4_9MICC Queuine tRNA-ribosyltransferase OS=Arthrobacter echini OX=1529066; GN = tgt PE=3 SV=1
MHPQSQQSSFAFSVQSRLEDTTPGGGNGGLRHGRTGTITTPHGQISTPAFIPVGTKASVKAVLPGAMADLGAQALLANAYHLYLQPGADILDEAGGLGAFMNWPGPTFTDSGGFQVMSLGSGFKKVIAMDAPVDAETAGADDRVAVGKERLAHIDDDGVWFKSHLNGDRHRFTPEISMQVQHQLGADIMFAFDELTTLMNSRGYQEESLERTRLWAQRCVSEHERLTTERSHRPYQALFGVIQGAQYEDLRRKASADLGAMNFDGFGIGGALEKENLGTILGWCSDELPEDRPRHLLGISEPDDLFTGIENGADTFDCVSPTRVARNSAFYTPDGRWNLSNARFRRDFTPLVEGCDCYTCTHYTRAYIHHLFKAKEMVSATLISIHNERFVVRMVDDARAAIDDGTFYDLKAEVLGRYYA

SEQ ID NO: 51871 - protein, 434 aa, unidentified
  source 1..434: note = Arthrobacter enclensis
  REGION 1..434: note = tr|A0A0V8IGM1|A0A0V8IGM1_9MICC Queuine tRNA-ribosyltransferase OS=Arthrobacter enclensis; OX = 993070 GN=tgt PE=3 SV=1
MPANPSPATHADAALPAGQSTFSFSVGTRLAESCPPSDAQEAENGGQFLGRTGTITTPHGQIQTPAFIAVGTKATVKAVLPESMADLGAQALLANAYHLYLQPGADILDEAGGLGAFMNWPGPTFTDSGGFQVMSLGSGFKKVIDMKSVDATGPDDAVAPGKERLAHIDDDGVWFKSHLNGDKHRFSPEISMQVQHQIGADIMFAFDELTTLQNSRGYQEESLERTRLWAERCITEHFRLTEERVGKPYQALFGVIQGAQYEDLRRKACRDLGAMPFDGFGIGGALEKENLGTIVRWCNEELPEDKPRHLLGISEPDDIFTAIENGADTFDCVSPTRVARNSAFYTPTGRYNLSGAKYKRDFGPLQDGCDCYTCQNYSRAYIHHLFKAKEMVSATLISIHNERFVVKMVDDARLAIESGTFFDFKAETLGQYYS

SEQ ID NO: 51872 - protein, 449 aa, unidentified
  source 1..449: note = Arthrobacter glacialis
  REGION 1..449: note = tr|A0A2S4A275|A0A2S4A275_ARTGL Queuine tRNA-ribosyltransferase OS=Arthrobacter glacialis OX=1664; GN = tgt PE=3 SV=1
MSSPETVTNFLAPDPTGAPGTIPARPASQSEFSFDVTTRLNETCSPGADQIALNGGEFQGRTGVITTPHGTIKTPAFIAVGTKATVKSVLPESMAELGAQALLSNAYHLYLQPGADLLDAAGGLGKFMNWQGPTFTDSGGFQVMSLGSGFKKVINMDAVASSPHAGADDSVAVGKERLAHIDDDGVWFKSHLNGDMHRFTPEVSMQVQHQIGADIMFAFDELTTLLNSRGYQEMSLERTRLWALRCIAEHFSLTEERVGKPYQALFGVIQGAQYEDLRRKASHDLGEMNFDGYGIGGALEKENLGTIVRWCSEELPENKPRHLLGISEPDDIFTAIENGADTFDCVSPTRVARTSAFYTPDGRFNLSGAKYKRDFTPLSEECDCYTCENYTRAYIHHLYKAKEMVSATLISIHNERFVVKMVDDARLAIEDGTFFAFKAETLRRYYPKK

SEQ ID NO: 51873 - protein, 443 aa, Arthrobacter globiformis
  REGION 1..443: note = tr|A0A328HKX6|A0A328HKX6_ARTGO Queuine tRNA-ribosyltransferase OS=Arthrobacter globiformis; OX = 1665 GN=tgt PE=3 SV=1
MPANPEPSLPPAPLSPSAPVPAARQSEFSFRVGKRLTETCSPAPEQESANGGGFLGRTGTIATPHGEIQTPAFIAVGTKATVKSVLPESMAELGAQALLANAYHLYLQPGPEVLDEAGGLGAFMNWPGPTFTDSGGFQVMSLGSGFKKVIDMKTVPVADTAVPDDAVAPGKERLAHVDEDGVWFKSHLNGDRHRFSPEISMQVQHQIGADIMFAFDELTTLQNSRGYQEESLERTRRWALRCIEEHFRLTDERPGKPYQALFGVIQGAQYEDLRRKACRDLGAMAFDGYGIGGALEKENLGTIVRWCNEELPENKPRHLLGISEPDDIFTAIENGADTFDCVSPTRVARNSAFYTPDGRFNLSGAKYKRDFGPLQDGCDCYACLNYSRAYIHHLFKAKEMLSATLISIHNERFVVKMVDDARLAIESGDFFEFKAETLGRYYS

SEQ ID NO: 51874 - protein, 409 aa, Arthrobacter globiformis
  REGION 1..409: note = tr|H0QHX4|H0QHX4_ARTGO Queuine tRNA-ribosyltransferase OS=Arthrobacter globiformis NBRC 12137 OX=1077972 GN=tgt PE=3 SV=1
MGKRLTETCNPTPEQETANGGGFLGRTGTITTPHGEIQTPAFIAVGTKATVKSVLPESMAELGAQALLANAYHLYLQPGPEILDEAGGLGAFMNWHGPTFTDSGGFQVMSLGSGFKKVIDMKSVDTSGPDDAVAPGKERLAHIDDDGVWFKSHLNGDRHRFSPEISMQVQHQIGADIMFAFDELTTLQNSRGYQEESLERTRLWAVRCLEEHFRLTAGRPGKPYQALFGVIQGAQYEDLRRKACRDLGAMAFDGYGIGGALEKENLGTIVRWCNEELPENKPRHLLGISEPDDIFTAIENGADTFDCVSPTRVARNSAFYTPDGRFNLSGAKYKRDFGPLQDGCDCYACLNYSRAYIHHLFKAKEMLSATLISIHNERFVVKMVDDARLAIESGDFFEFKAETLGRYYS

SEQ ID NO: 51875 - protein, 432 aa, Arthrobacter humicola
  REGION 1..432: note = tr|A0A315TL12|A0A315TL12_9MICC Queuine tRNA-ribosyltransferase OS=Arthrobacter humicola OX=409291; GN = tgt PE=3 SV=1
MPANPVSDSLPPAPARQSEFSFRVGKRLSEACPPSAGQIAANGGEFLGRTGTIATPHGEIQTPAFIAVGTKATVKSVLPESIAELGAQAVLANAYHLYLQPGADILDEAGGLGAFMNWRGPTFTDSGGFQVMSLGSGFKKVIDMKSVDHSGPDDAVAPGKERLAHVDEEGVWFKSHLNGDRHRFSPEISMNVQHQIGADIMFAFDELTTLQNSRGYQEESLERTRRWAERCITEHFRLTSERVGKPYQALFGVIQGAQYEDLRRKACRDLGAMNFDGFGIGGALEKENLGTIVRWCNEELPENKPRHLLGISEPDDIFTAIENGADTFDCVSPTRVARNSAFYHPTGRFNLSGAKYKRDFGPLQEDCDCYACLNYSRAYIHHLFKAKEMVSATLISIHNERFVVKMVDDARLAIESGNFFDFKAETLGRYYS

SEQ ID NO: 51876 - protein, 448 aa, Arthrobacter livingstonensis
  REGION 1..448: note = tr|A0A2V5LDA3|A0A2V5LDA3_9MICC Queuine tRNA-ribosyltransferase OS=Arthrobacter livingstonensis; OX = 670078 GN=tgt PE=3 SV=1
MPSPEPATDLLSTDPAAPQRIPGPPASQGEFGFKVTTRMGESCAPSDAAVELNGGKFQGRTGVITTPHGTVKTPAFIAVGTKATVKAVLPESMAELGAQALLANAYHLYLQPGAELLDAAGGLGKFMNWHGPTFTDSGGFQVMSLGSGFKKVINMDAAAASPHAGADDSVAVGKERLAHIDDDGVWFKSHLNGDMHRFTPEVSMQVQHQIGADIMFAFDELTTLLNSRGYQEMSLERTRLWAQRCVEEHFRLTLDRTGKPYQALFGVIQGAQYEDLRRKASRDLGSMDFDGYGIGGALEKENLGTIVRWCAEELPEDKPRHLLGISEPDDIFTAIENGADTFDCVSPTRVARTSAFYTPDGRFNLSGARYKRDFGPLVDGCDCYACANYSRAYIHHLFKAKEMVSATLVSIHNERFVVKMVDDARLAIEDGTFFDFKAETLRRYYPNR

SEQ ID NO: 51877 - protein, 441 aa, unidentified
  source 1..441: note = Arthrobacter nitrophenolicus
  REGION 1..441: note = tr|L8TP09|L8TP09_9MICC Queuine tRNA-ribosyltransferase OS=Arthrobacter nitrophenolicus; OX = 683150 GN=tgt PE=3 SV=1
MPAKPASVPSPASAEPVVDLPDQSGFSFTVGSRLADSCPPTAAQMAENGGEFLGRTGTITTPHGEIQTPAFIAVGTKATVKAVLPEAVADLGAQAVLANAYHLYLQPGADILDEAGGLGAFMNWPGPTFTDSGGFQVMSLGSGFKKVIDMKTVAAAGAPGPDDAVAPGKERLAHIDDDGVWFKSHLNGDRHRFSPEISMQVQHQIGADIMFAFDELTTLQNSRGYQEESLERTRLWALRCLDEHFRLTTERVGKPYQALFGVIQGAQYEDLRRKACRDLGAMPFDGYGIGGALEKENLGTIVRWCNEELPEDKPRHLLGISEPDDIFTAIENGADTFDCVSPTRVARNSAFYTPHGRFNLSGAKYKRDFGPLQEGCDCYACTHYSRAYIHHLFKAKEMLSATLISIHNERFVVKMVDDARLAIEAGTFFDFKAETLARYYS

SEQ ID NO: 51878 - protein, 441 aa, unidentified
  source 1..441: note = Arthrobacter nitrophenolicus
  REGION 1..441: note = tr|A0A4R5Y360|A0A4R5Y360_9MICC Queuine tRNA-ribosyltransferase OS=Arthrobacter nitrophenolicus; OX = 683150 GN=tgt PE=3 SV=1
MPANPASVPSPASAEPVVDLPDQSGFSFTVGTRLADSCPPTAAQMAENGGEFLGRTGTITTPHGEIQTPAFIAVGTKATVKAVLPEAVADLGAQAVLANAYHLYLQPGADILDEAGGLGAFMNWPGPTFTDSGGFQVMSLGSGFKKVIDMKTVAAAGAPGPDDAVAPGKERLAHIDDDGVWFKSHLNGDRHRFSPEISMQVQHQIGADIMFAFDELTTLQNSRGYQEESLERTRLWALRCLDEHFRLTTERVGKPYQALFGVIQGAQYEDLRRKACRDLGAMPFDGYGIGGALEKENLGTIVRWCNEELPEDKPRHLLGISEPDDIFTAIENGADTFDCVSPTRVARNSAFYTPHGRFNLSGAKYKRDFGPLQDGCDCYACTHYSRAYIHHLFKAKEMLSATLISIHNERFVVKMVDDARLAIEAGTFFDFKAETLARYYS

SEQ ID NO: 51879 - protein, 432 aa, Arthrobacter oryzae
  REGION 1..432: note = tr|A0A3N0BMK6|A0A3N0BMK6_9MICC Queuine tRNA-ribosyltransferase OS=Arthrobacter oryzae OX=409290; GN = tgt PE=3 SV=1
MPANSETPAPALQPARQSEFSFRVGKRLTETCSPSAGQVAENGGEFLGRTGTIATPHGEIQTPAFIAVGTKATVKAVLPESVAELGAQAVLANAYHLYLQPGAEILDEAGGLGSFMNWAGPTFTDSGGFQVMSLGAGFKKVIDMKSVDQSGPDDAVAPGKERLAHVDEEGVWFKSHLNGDRHRFSPEISMNVQHQIGADIMFAFDELTTLQNSRGYQEESLERTRRWAERCITEHFRLTTERAGKPYQALFGVIQGAQYEDLRRKACRDLGAMNFDGFGIGGALEKENLGTIVRWCTEELPENKPRHLLGISEPDDIFTAIENGADTFDCVSPTRVARNSAFYHPTGRYNLSGAKYKRDFGPLQDGCDCYACLHYSRAYIHHLFKAKEMLSATLISIHNERFVVKMVDDARLAIEAGNFFDFKAETLGQYYS

SEQ ID NO: 51880 - protein, 409 aa, Arthrobacter oryzae
  REGION 1..409: note = tr|A0A495EPV7|A0A495EPV7_9MICC Queuine tRNA-ribosyltransferase OS=Arthrobacter oryzae OX=409290; GN = tgt PE=3 SV=1
MGKRLSEACPPSSAQVAENGGEFLGRTGTIATPHGEIQTPAFIAVGTKATVKSVLPESIAELGAQAVLANAYHLYLQPGADILDEAGGLGAFMNWRGPTFTDSGGFQVMSLGSGFKKVIDMKSVDHSGPDDAVAPGKERLAHVDEEGVWFKSHLNGDRHRFSPEISMNVQHQIGADIMFAFDELTTLQNSRGYQEESLERTRRWAERCITEHFRLTDQRAGKPYQALFGVIQGAQYEDLRRKACRDLGAMNFDGFGIGGALEKENLGTIVRWCNEELPENKPRHLLGISEPDDIFTAIENGADTFDCVSPTRVARNSAFYHPTGRYNLSGAKYKRDFGPLQEDCDCYACLNYSRAYIHHLFKAKEMVSATLISIHNERFVVKMVDDARLAIEAGNFFEFKAETLGKYYS

SEQ ID NO: 51881 - protein, 420 aa, unidentified
  source 1..420: note = Arthrobacter pityocampae
  REGION 1..420: note = tr|A0A2S5IUG6|A0A2S5IUG6_9MICC Queuine tRNA-ribosyltransferase OS=Arthrobacter pityocampae; OX = 547334 GN=tgt PE=3 SV=1
MHPQSQQSSFAFSVHTRIEDTTPGAGSGGPRHGRTGTITTPHGEIRTPAFIPVGTKATVKSVLPGAMAELGAQALLANAYHLYLQPGADILDEAGGLGAFMNWPGPTFTDSGGFQVMSLGSGFKKVISMDVPVGAEAAGADDRIAVGKERLAHIDDDGVWFKSHLNGDRHRFTPEISMQVQHQLGADIMFAFDELTTLMNSRGYQEESLERTRLWAERCIAEHRRLTVERSHRPYQALFGVIQGAQYEDLRRKASADLGVMDFDGFGIGGALEKENLGTILGWCSDELPENKPRHLLGISEPDDLFTAIENGADTFDCVSPTRVARNSAFYTPDGRWNLSNARFRRDFTPLVEGCDCYTCTHYTRAYIHHLFKAKEMVSATLISIHNERFVVRMVDDARAALDDGTFYDLKAEVLGRYYA

SEQ ID NO: 51882 - protein, 455 aa, Arthrobacter psychrochitiniphilus
  REGION 1..455: note = tr|A0A2V3DTQ7|A0A2V3DTQ7_9MICC Queuine tRNA-ribosyltransferase OS=Arthrobacter psychrochitiniphilus OX=291045 GN=tgt PE=3 SV=1
MPSPETLTDLLAPAHAPSEAPCEPPAPGAPASQSEFGFTVTTRLNETCAPNAAAIEKNGGAFQGRTGVITTPHGAIKTPAFIAVGTKATVKAVLPETMAELGAQALLSNAYHLYLQPGADILDAAGGLGKFMNWSGPTFTDSGGFQVMSLGSGFKKVINMDAVAASPHAGADDSVAVGKERLAHIDDDGVWFKSHLNGDMHRFTPEVSMQVQHQIGADIMFAFDELTTLLNSRGYQEMSLERTRLWALRCIEEHFRLTEERTGKPYQALFGVIQGAQYEDLRRKASHDLGEMNFDGFGIGGALEKENLGTIVRWCSEELPEDKPRHLLGISEPDDIFTAIENGADTFDCVSPTRVARTSAFYTPDGRFNLSGAKYKRDFTPLSDECDCYTCENYTRAYIHHLFKAKEMVSSTLVSIHNERFVVKMVDDARLAIEDGTFFAFKAETLRRYYPKRQA

SEQ ID NO: 51883 - protein, 449 aa, Arthrobacter psychrolactophilus
  REGION 1..449: note = tr|A0A2V5IR05|A0A2V5IR05_9MICC Queuine tRNA-ribosyltransferase OS=Arthrobacter psychrolactophilus; OX = 92442 GN=tgt PE=3 SV=1
MPTPETVTDLLAPAPISEPQSTPGAPASQSEFSFEVTTRLNETCAPTADAIERNGGAFQGRTGVITTPHGTIKTPAFIAVGTKATVKSVLPESMTELGAQALLSNAYHLYLQPGADILDAAGGLGKFMNWQGPTFTDSGGFQVMSLGSGFKKVINMDAVASSPNAGSDDSVAVGKERLAHIDDDGVWFKSHLNGDMHRFSPEISMQVQHQIGADIMFAFDELTTLLNSRGYQEMSLERTRLWALRCIAEHFKLTEDRVGKPYQALFGVIQGAQYEDLRRKASHDLGEMNFDGYGIGGALEKENLGTIVRWCTEELPENKPRHLLGISEPDDIFTAIENGADTFDCVSPTRVARTSAFYTPDGRFNLSGAKYKRDFTPLSDECDCYTCENYTRAYIHHLYKAKEMVSATLISIHNERFVVKMVDDARLAIEDGTFFEFKAETLRRYYPNR

SEQ ID NO: 51884 - protein, 447 aa, Arthrobacter rhombi
  REGION 1..447: note = tr|A0A1R4ERM7|A0A1R4ERM7_9MICC Queuine tRNA-ribosyltransferase OS=Arthrobacter rhombi OX=71253; GN = tgt PE=3 SV=1
MPETDSPLDVTTTASATGAPPSAPSTVAEPHPRQSAFGFDVGTRLKNADGSPSLGRTGTIRTPHGDIRTPAFIAVGTKATVKAVLPEAVSDLGAQAVLANAYHLYLQPGAEILDAAGGLGAFMNWPGPTFTDSGGFQVMSLGSGFKKVIDMQGSTAAGGDDQVAPGKERLANVDEDGVWFKSHLNGDRHRFSPEISMGVQHQIGADIMFAFDELTTLHNSRGYQVESLERTRRWAERCIIEHFRLTDEREPKPYQALFGVIQGAQYEDLRRKACRDLGDMPFDGFGIGGALEKENLGTIVGWCSEELPEDKPRHLLGISEPDDIFTAIENGADTFDCVSPTRVARNSAFYTANGRFNLSGRRYRADFTPLQDGCSCYTCTHYTRAYIHHLFKAKELVSHTLISIHNEYFVVSLVDRAREAIENGTFADLKASTLAAYYAGAPDPQGL

SEQ ID NO: 51885 - protein, 427 aa, unidentified
  source 1..427: note = Arthrobacter saudimassiliensis
  REGION 1..427: note = tr|A0A078MN67|A0A078MN67_9MICC Queuine tRNA-ribosyltransferase OS=Arthrobacter saudimassiliensis; OX = 1461584 GN=tgt PE=3 SV=1
MSSSSSFSFTLGKRLRETAQPTEEQTAANGGEFQGRTGVISTPHGEIRTPAFIGVGTQATVKAVLPEAMAELGAQALLANAYHLYLQPGADVLDAAGGLGKFMNWPGPTFTDSGGFQVMSLGAGFKKVINMNADGSTHATGADDDVAPGKERLAHVDDDGVWFKSHINGDRHRFTPEISMQVQHQLGADIMFAFDELTTLMNSRGYQERSLERTRLWAIRCLEEHRRLTEERADKPYQALFGVLQGAQYEDLRRKAARDLGAMDFDGFGLGGALEKENLGTIIRWCTEELPEDKPRHLLGISEPDDLFTAIENGADTFDCVSPTRVARTSAFYTPYGRINLLKARYKKDFSPLVEGCPCYTCTHYTKAYLHHLFKAKEMLSATLVSIHNEHFTVNLVDDARRAIEDGTFFELKAEVLGRYYGGAKDA

SEQ ID NO: 51886 - protein, 451 aa, Arthrobacter sp.
  REGION 1..451: note = tr|A0A0Q9MZK8|A0A0Q9MZK8_9MICC Queuine tRNA-ribosyltransferase OS=Arthrobacter sp. Soil762; OX = 1736401 GN=tgt PE=3 SV=1
MPANPVSAPSVSVSAASADPVAPAAGSAAAADQSQFSFTVGTRLADSCAPSSAQVSANGGEFLGRTGTMTTPHGEIRTPAFIAVGTKATVKSVLPESMADLGAQALLANAYHLYLQPGADILDEAGGLGAFMNWSGPTFTDSGGFQVMSLGSGFKKVIDMKTVSSADAAVPDGAVAPGKERLAHIDDDGVWFKSHLNGDRHRFSPEISMQVQHKIGADITFAFDELTTLHNSRGYQEESLERTRLWALRCLEEHFRLTTSRVGKPYQALFGVIQGAQYEDLRRKACRDLGAMDFDGYGIGGALEKENLGTIVRWCNEELPEDKPRHLLGISEPDDIFTAIENGADTFDCVSPTRVARNSAFYTPTGRFNLSGAKYKRDFGPLQDGCDCYACANYSRAYIHHLFKAKEMLSATLISIHNERFVVKMVDDARLAIEAGTFFEFKAETLAQYYR

SEQ ID NO: 51887 - protein, 409 aa, Arthrobacter sp.
  REGION 1..409: note = tr|A0A1G5QKS1|A0A1G5QKS1_9MICC Queuine tRNA-ribosyltransferase OS=Arthrobacter sp. UNCCL28; OX = 1502752 GN=tgt PE=3 SV=1
MGKRLTETCSPSGAQVDANGGAFLGRTGTITTPHGTIRTPAFIAVGTKATVKAVLPESIAELGAQAVLANAYHLYLQPGPEILDAAGGLGAFMNWSGPTFTDSGGFQVMSLGSGFKKVIDMKNVDSSGPDDAVAPGKERLAYIDDDGVWFKSHLNGDRHRFSPEISMQVQHQIGADIMFAFDELTTLQNSRAYQEESLERTRLWALRCLEEHAALTSSRAGKPYQALFGVIQGAQYEDLRRKACQDLGAMPFDGYGIGGALEKENLGTIVRWCNEELPENKPRHLLGISEPDDIFTAIENGADTFDCVSPTRVARNSAFYTPFGRFNLSGAKYKTDFGPLQDGCDCYTCLNYSRAYIHHLFKAKEMLSATLISIHNERFVVKMVDDARLAIESGDFFEFKAETLGRYYS

SEQ ID NO: 51888 - protein, 416 aa, Arthrobacter subterraneus
  REGION 1..416: note = tr|A0A1G8HVD2|A0A1G8HVD2_9MICC Queuine tRNA-ribosyltransferase OS=Arthrobacter subterraneus; OX = 335973 GN=tgt PE=3 SV=1
MPQSDFLFSIGKRLSETTAAGEGLHGRTGTITTPHGEIQTPAFIAVGTKATVKAVLPESMKEAGAQALLANAYHLYLQPGADVLDEAGGLGKFMNWDGPTFTDSGGFQVMSLGSGFKKVITMDAAAASEHAGADDRVAVGKERLAHIDDDGVWFVSHLNGDRHRFTPEISMQVQHQLGADVMFAFDELTTLMNSRGYQEESLERTRLWAERCIAEHERLTTERADKPYQALFGVIQGAQYEDLRRKASRDLGAMNFDGFGVGGALEKENLGTILGWCADELPEAKPRHLLGISEPDDLFTGIENGADTFDCVSPTRVARNSAFYVPDGRWNLSNARFKRDFTPLMEGCDCYTCTHYTRAYIHHLFKAKEMVSATLISIHNERFVIRMVDDARAAIEDGTYFDLKAEVLGRYYAGAR

SEQ ID NO: 51889 - protein, 437 aa, Arthrobacter woluwensis
  REGION 1..437: note = tr|A0A2T3BXF4|A0A2T3BXF4_9MICC Queuine tRNA-ribosyltransferase OS=Arthrobacter woluwensis; OX = 156980 GN=tgt PE=3 SV=1
MSWGNLWQNGRVSSTAESLIDPAVPEREPARQEEFGFTVGTRLADAEPGKQGRTGTIRTPHGEIQTPAFIAVGTKATVKAVLPESMKDLGAQALLSNAYHLYLQPGPEILDAAGGLGRFMNWQGPTFTDSGGFQVMSLGSGFKKVINMDVVDNSGPDDAVAPGKERLAHVDEDGVWFKSHLNGDKHRFTPEISMQVQHQIGADIMFAFDELTTLQNSRAYQEESLERTRRWAERCVTEHFRLTEERVGKPYQALFGVIQGAHYEDLRRKACRDLGAMNFDGFGLGGALEKENLGTIVGWCAEELPEDKPRHLLGISEPDDIFTAIENGADTFDCVSPTRVARNSAFYTPDGRFNLSGRKYKADFGPLYDGCDCYACANYTRAYIHHLFKAKEMVAATLVSIHNERFVVKLVDDARLAMESGDFAAYKAETLGRYYSA

SEQ ID NO: 51890 - protein, 426 aa, Arthrobacter woluwensis
  REGION 1..426: note = tr|A0A1H4VVA8|A0A1H4VVA8_9MICC Queuine tRNA-ribosyltransferase OS=Arthrobacter woluwensis; OX = 156980 GN=tgt PE=3 SV=1
MSSTAESLIDPAVPEREPARQEEFGFTVGTRLADAEPGKQGRTGTIRTPHGEIQTPAFIAVGTKATVKAVLPESMKDLGAQALLSNAYHLYLQPGPEILDAAGGLGRFMNWQGPTFTDSGGFQVMSLGSGFKKVINMDVVDNSGPDDAVAPGKERLAHVDEDGVWFKSHLNGDKHRFTPEISMQVQHQIGADIMFAFDELTTLQNSRAYQEESLERTRRWAERCVTEHFRLTEERVGKPYQALFGVIQGAHYEDLRRKACRDLGAMNFDGFGLGGALEKENLGTIVGWCAEELPEDKPRHLLGISEPDDIFTAIENGADTFDCVSPTRVARNSAFYTPDGRFNLSGRKYKADFGPLYDGCDCYACANYTRAYIHHLFKAKEMVAATLVSIHNERFVVKLVDDARLAMESGDFAVYKAETLGRYYSA

SEQ ID NO: 51891 - protein, 375 aa, unidentified
  source 1..375: note = Arthromitus sp.
  REGION 1..375: note = tr|F9VKH8|F9VKH8_ARTSS Queuine tRNA-ribosyltransferase OS=Arthromitus sp. (strain SFB-mouse-Japan) OX=1029718 GN=tgt PE=3 SV=1
MYRLLNVDGRARRGEFKTVHGIIQTPVFMNVGTLGVIKGAISTVDLNKINCQVELSNTYHLHIRPGDENVKKLGGLHKFMNWDKPILTDSGGFQIFSLSNLRKITEDGVEFNSHLDGKKIFIGPEESMRIQSNLASTIAMAFDECIPNPSERSYVINSVSRTTRWLKRCITRLNMLNNMADTINSKQLLFGINQGGIYNDIRIEHAKEISDLDLSGYAIGGLAVGETKEEMYNVIEEVVPYLPVDRPIYLMGVGTPENILEAVYRGVDFFDCVLPARNGRHGQVFTSTGKVNLTNKKFELDDNPIDEKCFCEACKNYSRAYIRHLFKAKEMLAMRLCVLHNLNFYNKLLEEIRKSIELNQFSAFKNQKFREWGIR

SEQ ID NO: 51892 - protein, 370 aa, unidentified
  source 1..370: note = Arthrospira maxima
  REGION 1..370: note = tr|B5W944|B5W944_LIMMA Queuine tRNA-ribosyltransferase OS=Arthrospira maxima CS-328; OX = 513049 GN=tgt PE=3 SV=1
MPQSFSFQIQTRCTHTHARAGVFVTPHGIVETPRFMPVGTLANVKTLTPAQLLDTGAQMVLSNTYHLHLQPGEKIVAAAGGIHKFMGWNGPILTDSGGFQVFSLSEMRTVTEAGVRFRSPHDGAIIELSPERSIEIQNQLGADVIMAFDECPPYPASREDVVAATARTVRWLERCIAAHDRPEAALFGIVQGGVYPDLRVAAAKKLVEFDLPGYAIGGVSVGEPTDLMEMVVRVTTPILPDHKPRYLMGIGTYREMAQAIASGIDLFDCVIPTRLARHGAALVAGERWNLKNAQFREDFRPLDPSCPCYTCQNFSRAYISHLVRAKELLAYTLLSIHNVTELIRFTTRIRDAILGDRFTDEFAQYLQVQS

SEQ ID NO: 51893 - protein, 341 aa, unidentified
  source 1..341: note = Arthrospira platensis
  REGION 1..341: note = tr|K1W0A2|K1W0A2_ARTPT Queuine tRNA-ribosyltransferase OS=Arthrospira platensis C1; OX = 459495 GN=tgt PE=3 SV=1
METPRFMPVGTLANVKTLTPAQLLDTGAQMVLSNTYHLHLQPGEKIVAAAGGIHKFMGWNGPILTDSGGFQVFSLSEMRTVTEAGVRFRSPHDGAIIELSPERSIEIQNQLGADVIMAFDECPPYPASREDVVAATARTVRWLERCIAAHDRPEAALFGIVQGGVYPDLRVAAAKKLVEFDLPGYAIGGVSVGEPTDLMEMVVRVTTPILPDHKPRYLMGIGTYREMAQAIASGIDLFDCVIPTRLARHGAALVAGERWNLKNAQFREDFRPLDPSCPCYTCQNFSRAYISHLVRAKELLAYTLLSIHNVTELIRFTTRIRDAILGDRFTDEFAQYLQVQS

SEQ ID NO: 51894 - protein, 370 aa, unidentified
  source 1..370: note = Arthrospira platensis
  REGION 1..370: note = tr|D4ZQH2|D4ZQH2_ARTPN Queuine tRNA-ribosyltransferase OS=Arthrospira platensis (strain NIES-39 / IAM M-135) OX=696747 GN=tgt PE=3 SV=1
MPESFSFQIQARCTQTQARAGVFVTPHGIVETPRFMPVGTLANVKTLTPAQLLDTGAQMVLSNTYHLHLQPGEKIVAAAGGLHKFMGWNGPILTDSGGFQVFSLSEMRTVTEAGVRFRSPHDGAIIELSPERSIEIQNQLGADVIMAFDECPPYPASREDVIAATDRTVRWLERCIAAHNRPEAALFGIVQGGVYPDLRVAAAKKLVEFDLPGYAIGGVSVGEPTDLMEMVVRVTTPILPDHKPRYLMGIGTYREMAQAIASGIDLFDCVIPTRLARHGAALVAGERWNLKNAQFREDFRPLDPSCPCYTCQNFSRAYISHLVRAKELLAYTLLSIHNVTELIRFTTRIRDAILSDRMTDEFGQYLQVDC

SEQ ID NO: 51895 - protein, 370 aa, Arthrospira sp.; identical to SEQ ID NO: 51892
  REGION 1..370: note = tr|A0A328V5Y5|A0A328V5Y5_9CYAN Queuine tRNA-ribosyltransferase OS=Arthrospira sp. O9.13F; OX = 1982223 GN=tgt PE=3 SV=1

SEQ ID NO: 51896 - protein, 381 aa, Asaccharobacter celatus
  REGION 1..381: note = tr|A0A3N0AVV9|A0A3N0AVV9_9ACTN Queuine tRNA-ribosyltransferase OS=Asaccharobacter celatus DSM 18785 OX=1121021 GN=tgt PE=3 SV=1
MALFDCTCDATSGHARALTYTTAHGDFHTPMFMPVGTSATVKGITTSQLRELGSQVVLANTYHLAMRPGADLVAEAGGIHRFMNYDGPMLTDSGGFQVFSLADTVRLSDDGVTFQSIYDGSRIHWTPEENMRIQELIGADIAMQLDQCAPYPATREFVARAVDYSSAWARRCLAAHKRPDQTLFGIVQGGMHLDLRLESVRRLREIEDESLAASGRRFGGYGIGGYSVGEDHEVMFETLGEVARACPDDRPRYLMGVGNPTTLVRAVREGVDMFDCVLPTRTARMGTAFSSAGRMNMRNAKYARDFTPLDPTCDCPTCRNHTRAYIRHLVKQNEMLGAILLSVHNLHFLLDLMRHAREAVLADAYEEFFEQWMESDAAADY

SEQ ID NO: 51897 - protein, 381 aa, Asaccharobacter celatus
  REGION 1..381: note = tr|A0A369P5E9|A0A369P5E9_9ACTN Queuine tRNA-ribosyltransferase OS=Asaccharobacter celatus; OX = 394340 GN=tgt PE=3 SV=1
MALFDCTCDAVSGHARALTYTTAHGDFHTPMFMPVGTSATVKGITTDQLRELGSQVVLANTYHLAMRPGAELVAEAGGIHRFMNYDGPMLTDSGGFQVFSLADTVKLSDDGVTFQSIYDGSKIHWTPEENMRIQELIGADIAMQLDQCAPYPATREFVARAVDYSSAWARRCLAAHTRPDQTLFGIVQGGMHLDLRLESVRRLREIEEESLTAGGRRFGGYGIGGYSVGEDHEVMFETLGEVARACPDDRPRYLMGVGNPTTLVRAVREGVDMFDCVLPTRTARMGTAFSSAGRMNLRNAKYARDFTPLDPVCDCPTCRNHTRAYIRHLVKQNEMLGAILLSVHNLHFLLDLMRRAREAVLADAYEEFFEQWMESDAAADY

SEQ ID NO: 51898 - protein, 373 aa, unidentified
  source 1..373: note = Asaccharospora irregularis
  REGION 1..373: note = tr|A0A1M5J886|A0A1M5J886_9FIRM Queuine tRNA-ribosyltransferase OS=Asaccharospora irregularis DSM 2635 OX=1121321 GN=tgt PE=3 SV=1
MYAVRYELIKTCKQSGARLGRLHTPHGVIETPIFMPVGTQATVKAMTPEELKEIGSQIILSNTYHLYMRPGHELVKEAGGLHKFMNWDKPILTDSGGFQVFSLGPLRKITEEGVHFRSHIDGSKHFISPEKAMEIQNALGSDIMMAFDECAPYPADRDYVKNSLERTTRWLERCKEAHKNTENQALFGIIQGGMYKDLREQSAKEVLSIDLPGYAIGGLSVGEPKQLMYEVLEYTTPLMPVDKPRYLMGVGSPDDLVEGVIRGVDMFDCVLPTRIARNGTAMTSQGKVVVRNAKYAKDFTPLDPECDCYCCKNYTRAYIRHLVKANEILGARLITIHNLNFLLKLMEQIREAIMEDRLLDFRAEFFAKYGYEI

SEQ ID NO: 51899 - protein, 390 aa, Asaia bogorensis
  REGION 1..390: note = tr|A0A0P0YF04|A0A0P0YF04_9PROT Queuine tRNA-ribosyltransferase OS=Asaia bogorensis NBRC 16594; OX = 1231624 GN=tgt PE=3 SV=1
MTESATKMQWKAEACCGQARAGHLHTAHGTIPTPTFMPVGTVGTVKAMTMDAVRSTGAGIILGNTYHLMLRPGAERVRKMGGLHRMMDWSGPILTDSGGFQVMSLGALRKLDQDGVTFNSHIDGSKHRLTPESSTDIQHALDATITMCFDECPALPATPERLESSMELSMRWAARSREAFVQRPGYGQFGIVQGGTERDLRARSAKALTDIGFEGYAIGGLAVGEGQELMFSTLDFTTPLLPQDHARYLMGVGTPDDLLGGVERGVDMFDCVMPTRAGRTARAYTERGTLNLRNARHAEDNRPISPDCDCLACSRHSRAYLHHLFRANEILGPMLLTWHNLAYYQRLMREIRAAIVDGTLPQKALALRAGWAAGDWTQDEFPQPDWPPVP

SEQ ID NO: 51900 - protein, 390 aa, Asaia platycodi
  REGION 1..390: note = tr|A0A060QKU2|A0A060QKU2_9PROT Queuine tRNA-ribosyltransferase OS=Asaia platycodi SF2.1; OX = 1382230 GN=tgt PE=3 SV=1
MTESPTKMQWKAEACCGQARAGHLHTAHGTIPTPTFMPVGTVGTVKAMTMDAVRSTGAGIILGNTYHLMLRPGAERVRKMGGLHRMMDWSGPILTDSGGFQVMSLGALRKLDQDGVTFNSHIDGSKHRLTPESSTDIQHALDATITMCFDECPALPATPERLESSMELSMRWAARSREAFVQRPGYGQFGIVQGGTERDLRARAAKALTDIGFEGYAIGGLAVGEGQELMFSTLDFTTPLLPQDHARYLMGVGTPDDLLGGVERGVDMFDCVMPTRAGRTARAYTERGTLNLRNARHAEDNRPISPNCDCLACSRHSRAYLHHLFRANEILGPMLLTWHNLAYYQRLMRQIRVAIVDGTLPQKALALRAGWAAGDWTQDEFPQPDWPPVP

SEQ ID NO: 51901 - protein, 390 aa, Asaia sp.
  REGION 1..390: note = tr|A0A433WZD2|A0A433WZD2_9PROT Queuine tRNA-ribosyltransferase OS=Asaia sp. W19 OX=2067395 GN=tgt; PE = 3 SV=1
MTESATKMQWKAEACCGQARAGHLHTAHGTIPTPTFMPVGTVGTVKAMTMDAVRSTGAGIILGNTYHLMLRPGAERVRKMGGLHRMMDWSGPILTDSGGFQVMSLGALRKLDQDGVTFNSHIDGSKHRLTPESSTDIQHALDATITMCFDECPALPATPERLESSMELSMRWAARSREAFVQRPGYGQFGIMQGGTERDLRARSAKALTDIGFEGYAIGGLAVGEGQELMFSTLDFTTPLLPQDHARYLMGVGTPDDLLGGVERGVDMFDCVMPTRAGRTARAYTERGTLNMRNARHAEDNRPISPDCDCLACSRHSRAYLHHLFRANEILGPMLLTWHNLAYYQRLMRQIRVAIVDGTLPQKALALRADWAAGDWTQDEFPQPDWPPVP

SEQ ID NO: 51902 - protein, 382 aa, unidentified
  source 1..382: note = Ascidiaceihabitans donghaensis
  REGION 1..382: note = tr|A0A2R8BDE8|A0A2R8BDE8_9RHOB Queuine tRNA-ribosyltransferase OS=Ascidiaceihabitans donghaensis; OX = 1510460 GN=tgt PE=3 SV=1
MGDMTDTQTPFSFSLNATDGKARTGVIQTPRGDIRTPAFMPVGTAATVKAMMPESVRATGADILLGNTYHLMLRPTAERIAKLGGLHKFMNWDRPILTDSGGFQVMSLAGLRKLTEKGVTFKSHIDGSKHEITPERSMEIQELLGSDIVMCFDECPALPADRTRIAESMELSMRWAARSKAAFGDRPGHALFGIQQGGLEQDLRGQSAEALREIGFDGYAVGGLAVGEGQEAMFGCLDYAPDQLPVDKPRYLMGVGKPDDIVGAVARGIDMMDCVLPSRSGRTGQAFTRKGVVNIKNARHADDPRPLDEGCACPACSNYSRAYLHHVFRSHEMISGMLLTWHNLRYFQDIMDGMRGAIAAGTFEAWQKDFHDGRAQGDIDPL

SEQ ID NO: 51903 - protein, 373 aa, Asticcacaulis benevestitus
  REGION 1..373: note = tr|V4PYQ5|V4PYQ5_9CAUL Queuine tRNA-ribosyltransferase OS=Asticcacaulis benevestitus DSM 16100 = ATCC BAA-896 OX=1121022 GN=tgt PE=3 SV=1
MSTFPFKIEASQGQARTGVLKTPRGDIPTPIFMPVGTAATVKALTLDMVKRANAKIILGNTYHLMLRPTAERISRLGGLHNFMGWDGPILTDSGGFQVMSLSKISKVKEDAVTFQSHIDGSKHVLSPERSIEIQADLLGSDIVMQLDECVSYPADEKRAQQALQLSARWGVRSKSAFGARDGQALFGIQQGSTFEHLRRESTERLLDIGFDGYAIGGLAVGEGHKAMCDTLDFCAPILPWERPRYLMGVGKPIDLLEGVARGVDMFDCVLPTRSGRHGQVWTWDGPLNMKNARFAEDDAPLDATSDCPASRDYSKAYLHHLVKSEEILGQMLLSWHNIAFFQALMIRIRAAITTGTFDILRADLLSRWLTKDG

SEQ ID NO: 51904 - protein, 371 aa, unidentified
  source 1..371: note = Asticcacaulis biprosthecum
  REGION 1..371: note = tr|F4QR81|F4QR81_9CAUL Queuine tRNA-ribosyltransferase OS=Asticcacaulis biprosthecum C19; OX = 715226 GN=tgt PE=3 SV=1
MSAFPFTIHASQGQARTGVLKTPRGDIPTPIFMPVGTAATVKALTLDMVRQSHAKIILGNTYHLMLRPGPERVKRLGGLHKFMGWDGPILTDSGGFQVMSLSKISKVKEDAVTFASHIDGSKHVLSPERSIEIQADLLGSDIVMQLDECVSWPAEEKRAQEALQLSARWGLRSKQAFGTRDSQVLFGIQQGSTFEHLRRESTDRLLGIGFDGYAIGGLAVGEGHRAMCDTLDFCAPLLPWDKPRYLMGVGKPIDLLEGVARGVDMFDCVLPTRSGRHGQVWTWDGPINMKNARFAEDDTPLDATSDCPASRDYSKAYLHHLVRAEEILGQMLLSWHNIAFFQALMIRMRGAIAAGTFDSLRADLLSRWTRD

SEQ ID NO: 51905 - protein, 379 aa, Asticcacaulis excentricus
  REGION 1..379: note = tr|A0A3G9G3Y2|A0A3G9G3Y2_9CAUL Queuine tRNA-ribosyltransferase OS=Asticcacaulis excentricus; OX = 78587 GN=tgt PE=3 SV=1
MTPPMSAFPFEISASDGQARTGVLKTPRGDIPTPIFMPVGTAATVKALTLDMVRQSHAKIILGNTYHLMLRPSAERVKRLGGLHTFMGWDGPILTDSGGFQVMSLSQISKVTEEAVTFQSHIDGSKHVLSPERSMEIQADLLGSDIVMQLDECVSWPADEARAQKALQLSARWGLRSKQAFGQRDTQALFGIQQGSTFESLRRESTDRLLEIGFDGYAIGGLAVGEGHEAMCDTLEYCAPLLPWDRPRYLMGVGKPIDLVEGVARGVDMFDCVLPTRSGRHGQVWTWEGPINIKNARFAEDDTPLDATSDCPASRDYSKAYLHHLFKAEEILGQVLLSWHNIAFFQALMIRMRSAIAAGEFQAFRKGFHETHLKAPTQN

SEQ ID NO: 51906 - protein, 373 aa, Asticcacaulis excentricus
  REGION 1..373: note = tr|E8RS13|E8RS13_ASTEC Queuine tRNA-ribosyltransferase OS=Asticcacaulis excentricus (strain ATCC 15261 / DSM 4724 / VKM B-1370 / CB 48); OX = 573065 GN=tgt PE=3 SV=1
MSAFPFEISASDGQARTGVLKTPRGDIPTPIFMPVGTAATVKALTLDMVRQSHAKIILGNTYHLMLRPSAERVKRLGGLHKFMGWDGPILTDSGGFQVMSLSQISKVTEEAVTFQSHIDGSKHVLSPERSMEIQADLLGSDIVMQLDECVSWPADEARAQNALQLSARWGLRSKQAFGQRDTQALFGIQQGSTFESLRRESTDRLLEIGFDGYAIGGLAVGEGHEAMCDTLEYCAPLLPWNRPRYLMGVGKPIDLVEGVARGVDMFDCVLPTRSGRHGQVWTWEGPINIKNARFAEDDTPLDAASDCPASRDYSKAYLHHLFKAEEILGQVLLSWHNIAFFQALMIRMRDAIAAGEFQAFRTWFHETHLKTSA

SEQ ID NO: 51907 - protein, 373 aa, Asticcacaulis sp.
  REGION 1..373: note = tr|V4P0C9|V4P0C9_9CAUL Queuine tRNA-ribosyltransferase OS=Asticcacaulis sp. YBE204; OX = 1282363 GN=tgt PE=3 SV=1
MSAFPFEITAHEGQARTGVLKTPRGDIPTPIFMPVGTAATVKALTLDMVRQSHAKIILGNTYHLMLRPTAERVKRLGGLHKFMGWDGPILTDSGGFQVMSLSQISKVTEEAVTFQSHIDGSRHILSPERSMEIQADLLGSDIVMQLDECVSWPAEEARAQKALQLSARWGQRSKAAFGQRDRQALFGIQQGSTFEALRRESTDRLLDIGFDGYAIGGLAVGEGHEAMCDTLDYCAPLLPWERPRYLMGVGKPIDLVEGVARGVDMFDCVLPTRSGRHGQVWTWEGPLNIKNARFAEDDTPLDATSDCPASRDYSKAYLHHLFKAEEILGQMLLSWHNIAFFQALMIRMRAAIAAGEFAAFRKGFHETHVKKGA

SEQ ID NO: 51908 - protein, 375 aa, Asticcacaulis sp.
  REGION 1..375: note = tr|A0A2T5XMV4|A0A2T5XMV4_9CAUL Queuine tRNA-ribosyltransferase OS=Asticcacaulis sp. CF398; OX = 2135738 GN=tgt PE=3 SV=1
MSAFPFEISASDGQARTGVLKTPRGDIPTPIFMPVGTAATVKALTLDMVRQSHAKIILGNTYHLMLRPSAERVKRLGGLHKFMGWDGPILTDSGGFQVMSLSQISKVTEEAVTFQSHIDGSKHVLSPERSMEIQADLLGSDIVMQLDECVSWPAEEARAQKALQLSARWGQRSKTAFGQRDTQALFGIQQGSTFETLRRESTDRLLEIGFDGYAIGGLAVGEGHEAMCETLEYCAPLLPWDRPRYLMGVGKPIDLVEGVARGVDMFDCVLPTRSGRHGQVWTWEGPINIKNARFAEDDTPLDTSSDCPASRDYSKAYLHHLFKAEEILGQVLLSWHNIAFFQALMIRMRTAIAAGEFQAFRKWFHETHVKARSEK

SEQ ID NO: 51909 - protein, 372 aa, Asticcacaulis taihuensis
  REGION 1..372: note = tr|A0A1G4PR58|A0A1G4PR58_9CAUL Queuine tRNA-ribosyltransferase OS=Asticcacaulis taihuensis; OX = 260084 GN=tgt PE=3 SV=1
MTYPFQITAHQGQARTGVLKTPRGDIPTPIFMPVGTAATVKALTLDMVKQAHAKIILGNTYHLMLRPTAERVARLGGLHKFMGWNGPILTDSGGFQVMSLSKISKVKEDAVTFQSHIDGSRHILSPERSIEIQADLLGSDIVMQLDECVSWPAEEKRAREALQLSARWGLRSKQAFGTRDTQALFGIQQGSTFEHLRRESTERLLDIGFDGYAIGGLAVGEGHEAMCETLDYSAPLLPWDRPRYLMGVGKPIDLLEGVARGVDMFDCVLPTRSGRHGQVWTWDGPLNMKNARFAEDNTPLDAESDCPASRDYSKAYLHHLVKSEEILGQMLLSWHNIAFFQALMIRIRAAITAGTFDALRADLLSRWKTKDA

SEQ ID NO: 51910 - protein, 366 aa, unidentified
  source 1..366: note = Atelocyanobacterium thalassa
  REGION 1..366: note = tr|D3EPA2|D3EPA2_ATETH Queuine tRNA-ribosyltransferase OS=Atelocyanobacterium thalassa (isolate ALOHA) OX=1453429 GN=tgt PE=3 SV=1
MKFSFQLQKKCCNTQARAAIYSTPHGIVETPRFMPVGTIAAVKGITPNQLKNTEVQMILANTYHLHLQPGESIIKKAGGLHKFMHWDGPILTDSGGFQVFSLSKLREISESGVTFRSPKDGRIIKLTPEKSIDIQNALGADVIMAFDECPPGNADYQIVESATNRTYRWLKRCIQAHNRVEDQALFGIVQGGTFPQLRLQAISSLIELNLPGYAIGGVSVGEDSSLIQDIVQFSAPLLPENKPRYLMGVGTYKEIAMAIASGIDLFDCVIPTRFGRHGTALVAGERWNLKNSKFREDFRPLDEKCTCYTCLNFTRAYLNHLVRSQEMLGYTLLSLHNITELVKFTQDIRKSILNNSFTEDFKSWLT

SEQ ID NO: 51911 - protein, 375 aa, unidentified
  source 1..375: note = Atlantibacter hermannii
  REGION 1..375: note = tr|H5V4K6|H5V4K6_ATLHE Queuine tRNA-ribosyltransferase OS=Atlantibacter hermannii NBRC 105704 OX=1115512 GN=tgt PE=3 SV=1
MNFELQTTDGRARRGRLVFERGVVETPAFMPVGTYGTVKGMTPEEVEATGAQIILGNTFHLWLRPGQEIMKLHGDLHDFMQWKGPILTDSGGFQVFSLGDIRKITEQGVHFRNPINGDPIFLDPEKSMEIQYDLGSDIVMIFDECTPYPADWDYAKRSMEMSLRWAKRSRDRFDSLGNKNALFGIIQGSVYEDLRDISVKGLVEIGFDGYAVGGLAVGEPKEDMHRILEHVCPQIPADKPRYLMGVGKPEDLVEGVRRGIDMFDCVMPTRNARNGHLFVTNGVVKIRNAKYKSDTAPLDEECDCYTCRNYSRAYLHHLDRCNEILGARLNTIHNLRYYQRLMAGLRKAIEEGKLERFVADFYQRQDRPVPPLNVD

SEQ ID NO: 51912 - protein, 375 aa, unidentified; identical to SEQ ID NO: 51911
  source 1..375: note = Atlantibacter hermannii
  REGION 1..375: note = tr|A0A447LK34|A0A447LK34_ATLHE Queuine tRNA-ribosyltransferase OS=Atlantibacter hermannii OX=565; GN = tgt PE=3 SV=1

SEQ ID NO: 51913 - protein, 375 aa, unidentified
  source 1..375: note = Atlantibacter subterranea
  REGION 1..375: note = tr|A0A427UVH0|A0A427UVH0_9ENTR Queuine tRNA-ribosyltransferase OS=Atlantibacter subterranea; OX = 255519 GN=tgt PE=3 SV=1
MNFELQTTDGRARRGRLVFERGVVETPAFMPVGTYGTVKGMTPEEVEATGAQIILGNTFHLWLRPGQEIMKLHGDLHDFMQWKGPILTDSGGFQVFSLGDIRKITEQGVHFRNPINGDPIFLDPEKSMEIQYDLGSDIVMIFDECTPYPADWDYAKRSMEMSLRWAKRSRDRFDSLGNKNALFGIIQGSVYEDLRDISVKGLVEIGFDGYAVGGLAVGEPKEDMHRILEHVCPQIPADKPRYLMGVGKPEDLVEGVRRGIDMFDCVMPTRNARNGHLFVTNGVVKIRNAKHKSDTSPLDEECDCYTCRNYSRAYLHHLDRCNEILGARLNTIHNLRYYQRLMAGLRKAIEEGKLEHFVADFYQRQDRPVPPLNID

SEQ ID NO: 51914 - protein, 380 aa, Atopobacter sp.
  REGION 1..380: note = tr|A0A421BFZ7|A0A421BFZ7_9LACT Queuine tRNA-ribosyltransferase OS=Atopobacter sp. AH10 OX=2315861; GN = tgt PE=3 SV=1
MEHAIKYRLIKKEKHTGARLGELITPHGTFETPMFMPVGTLATVKAVSPEELKAMGAGVILSNTYHLWLRPGPDIVEEAGHLHQFMNWDQAILTDSGGFQVFSLSDNRQLTEEGVHFRNHLNGAKMFLSPEKAIQIQHKLGSDIMMCLDECPPFDSTTDYMRHSINRTTRWAERCLRAHDRPEKQGLFGILQGGGDKELRLQHAKDMISLDFPGYSIGGLSVGEPKADMYRVLDFLTPVMPENKARYLMGVGSPDALVEGAIRGIDMFDCVLATRIARNGTCMTSRGRLVVKNAKFERDFTPIDDQCSCYTCQHYTRAYVRHLFKADETFGLRLTSIHNLHFLLNLMKQVRQAIREDNLLEFKEYFFEQYGLNVENPKNF

SEQ ID NO: 51915 - protein, 378 aa, unidentified
  source 1..378: note = Atopobium deltae
  REGION 1..378: note = tr|A0A133XXP8|A0A133XXP8_9ACTN Queuine tRNA-ribosyltransferase OS=Atopobium deltae OX=1393034; GN = tgt PE=3 SV=1
MSELFSYDVVAQDPNTHARAGVFHTAHGDVQTPLFMPVGTKGTVKGILPQTLEQIGAQVVLANTYHLEMRPSSERICELGGLHEFMQWHKPILTDSGGFQVFSHGEFFKLSDEGVRFRAVDYDGRWVSWTPEDNMAIAQRLGSDICMQLDQCPGYPATRAFVERAVELSSMWAERCWKAHTRPDQALFGIVQGGMHLDLRLRSLHHLEEVGNFPGYGIGGYSVGEDHETMFETLEPLVSEHMPSHKPRYLMGVGNPTTLVRAVGCGVDMFDCVLPTRTARMGTAFSSEGRMNLKNARFSADGTPLDHACDCPVCTSGYTRAYLNHLVRQKEILGGILLSTHNLYYLLELMRRARQAILDGRYAQFMADWMASPAAQDF

SEQ ID NO: 51916 - protein, 378 aa, Atopobium minutum
  REGION 1..378: note = tr|A0A1H4NNW8|A0A1H4NNW8_9ACTN Queuine tRNA-ribosyltransferase OS=Atopobium minutum OX=1381; GN = tgt PE=3 SV=1
MADLFGYEIIAEDPKTHARAGVFHTAHGDVETPLFMPVGTKGTVKGILPQTLEQIGAQVVLANTYHCEMRPGSERIDALGGLHDFMQWHHPILTDSGGFQVFSHGEFFKLSDEGVRFRAVDYDGRWVSWTPEDNMAIAQRLGSDICMQLDQCPGYPSPRPFVERAVELSSMWAERCWKAHTRPDQALFGIVQGGMDLDLRLRSLNHLENVSNFPGYGIGGYSVGEDHETMFQTLEPLVSEHMPKYKPRYLMGVGNPTTLVRGVACGVDMFDCVLPTRTARMGTAFSSEGRLNLKNARFSADDTPLDHACDCPVCTGGYTRAYLNHLVRQKEMLGSILLSTHNLYFLLNLMRKARTAIIAGSYGDFVESWMNSPAADDF

SEQ ID NO: 51917 - protein, 378 aa, Atopobium minutum; identical to SEQ ID NO: 51916
  REGION 1..378: note = tr|N2BZ75|N2BZ75_9ACTN Queuine tRNA-ribosyltransferase OS=Atopobium minutum 10063974; OX = 997872 GN=tgt PE=3 SV=1

SEQ ID NO: 51918 - protein, 405 aa, Atopobium parvulum
  REGION 1..405: note = tr|C8WA11|C8WA11_ATOPD Queuine tRNA-ribosyltransferase OS=Atopobium parvulum (strain ATCC 33793 / DSM 20469 / JCM 10300 / VPI 0546) OX=521095 GN=tgt; PE = 3 SV=1
MPDGSKKAQGFTTKISCVYTENWAEKKEDSWFTYELLAEDPKTHARAGVFHTPHGDIPTPIFMPVGTKATVKGLMTDTVRDLGAKIILANTYHLSQRPGDELVAQMGGLHDFMQWHGPILTDSGGFQVFSHEEFMKLSDEGVKFRAVDYDGAWSYWTPETNMQIAQNLGADIVMQLDQCVGYPAERKKVERGVELSSAWAERCFKAHTRPDQALFGIVQGGMHLDLRKRSIEHLESIGDFPGYGIGGYSVGEPHELMFETLAPLCADYMPRNKPRYLMGVGNPSTLIRGVACGIDMFDCVLPTRTARMGTAFSHEGRMNLKNAKYFADAGPIDVKCTCPVCTGGYSRAYINHLVKQHEMLGGQLLSMHNIYFLLELMRQAREAILAGTYSDFVEEWENSEGVVDF

SEQ ID NO: 51919 - protein, 406 aa, Atopobium rimae
  REGION 1..406: note = tr|B9CKR5|B9CKR5_9ACTN Queuine tRNA-ribosyltransferase OS=Atopobium rimae ATCC 49626; OX = 553184 GN=tgt PE=3 SV=1
MPHTEKTTTSKFTTEVHCVHQELWASKKDPAWFTYDIVAEDPTTHARAGVFHTPHGDIPTPIFMPVGTKATVKGLLPDTVKSLGTKILLANTYHLSQRPGDELIAELGGLHSFMCWDGPILTDSGGFQVFSHEQFMKLSDEGVKFRAVDYDGAWSWWTPETNMQIAQNLGADIVMQLDQCVGYPSSRTKVERSVELSSAWADRCYQAHTRPDQALFGIVQGGMHLDLRRRSIEHLEQAGDFPGYGIGGYSVGEPHEVMFETLEPLCADYMPRTKPRYLMGVGNPTTLIRSVAAGIDMFDCVLPTRTARMGTAFSYQGRMNMKNTKYVHDSGPIDSACTCPVCTGGYTRAYLNHLVRQHEMLAGELLSMHNIYFLLNLMHQAREAILAGNYGEFVTKWLESGGVKDF

SEQ ID NO: 51920 - protein, 405 aa, Atopobium sp.
  REGION 1..405: note = tr|Z4WZA9|Z4WZA9_9ACTN Queuine tRNA-ribosyltransferase OS=Atopobium sp. ICM42b OX=1190620; GN = tgt PE=3 SV=1
MPDGSKKAQGFTTNISCVHTENWAEKKEDSWFTYELLAEDPKTHARAGIFHTPHGDIPTPIFMPVGTKATVKGLMTDTVRDLGAKIILANTYHLSQRPGDELVAQMGGLHDFMQWHGPILTDSGGFQVFSHEEFMKLSDEGVKFRAVDYDGAWSYWTPETNMQIAQNLGADIVMQLDQCVGYPAGRRKVERGVELSSAWAERCFKAHTRPDQALFGIVQGGMHLDLRKRSIEHLESIGDFPGYGIGGYSVGEPHEVMFETLAPLCADYMPRNKPRYLMGVGNPSTLIRGVACGIDMFDCVLPTRTARMGTAFSHEGRMNLKNAKYFADAGPIDAKCTCPVCTGGYSRAYINHLVKQHEMLGGQLLSMHNIYFLLELMRQAREAILAGTYSDFVEEWENSDGVVDF

SEQ ID NO: 51921 - protein, 405 aa, Atopobium sp.
  REGION 1..405: note = tr|Z4WX49|Z4WX49_9ACTN Queuine tRNA-ribosyltransferase OS=Atopobium sp. BS2 OX=936550; GN = tgt PE=3 SV=1
MPDGSKKAQGFTTNISCVHTENWAEKKEDSWFTYELLAEDPKTHARAGIFHTPHGDIPTPIFMPVGTKATVKGLMTDTVRDLGAKIILANTYHLSQRPGDELVAQMGGLHDFMQWHGPILTDSGGFQVFSHEEFMKLSDEGVKFRAVDYDGAWSYWTPETNMQIAQNLGADIVMQLDQCVGYPAERKKVERGVELSSAWAERCFKAHTRPDQALFGIVQGGMHLDLRRRSIEHLESIGDFPGYGIGGYSVGEPHEVMFETLAPLCADYMPRNKPRYLMGVGNPSTLIRGVACGIDMFDCVLPTRTARMGTAFSHEGRMNLKNAKYFADAGPLDAKCTCPVCTGGYSRAYINHLVKQHEMLGGQLLSTHNIYFLLELMRQAREAILAGTYSDFVEEWENSDGVVDF

SEQ ID NO: 51922 - protein, 354 aa, Atopobium vaginae
  REGION 1..354: note = tr|A0A135PAD4|A0A135PAD4_9ACTN Queuine tRNA-ribosyltransferase OS=Atopobium vaginae OX=82135; GN = HMPREF3232_01121 PE=3 SV=1
MPVGTKAAIKGLLPQTVSDLGAKIILANTYHLAMRPGEDLIAEAGGLHSFMHWNKPILTDSGGFQVFSHSEFVKLSDEGVRFKVVDYDGSYVFWTPERNMEIAQKLGADIVMQLDQCPGYPASDAYVRRAVDLSSAWAQRCFEAHTKKDQALFGIVQGGMNLDLRKLSIERLESIADFPGYGIGGYSVGEDHETMFESLAPLVSEYMPRHKPRYLMGVGNPTTLVRAVACGVDMFDCVLPTRTARMGTAFSHEGRLNLKNAAHIHAHVPLDELCTCPVCSEGYTRSYLNHLVRQHEMNAAILLSMHNIYFLLDCMRQARQAIIEGRYKAFLDTWMQYPTAQDGRMQNYRMNHGE

SEQ ID NO: 51923 - protein, 414 aa, Atopobium vaginae
  REGION 1..414: note = tr|E1L272|E1L272_9ACTN Queuine tRNA-ribosyltransferase OS=Atopobium vaginae PB189-T1-4; OX = 866774 GN=tgt PE=3 SV=1
MTTTSTTAFSPSGAAAGAAPSSYFSYEVIATDPNTQARAGILHTPHGDIPTPIFMPVGTKATVKGLLPSIVDELGAKIILANTYHLSMRPGADLIAKMGGLHTFMHWHKPILTDSGGFQVFSHGEFVKLSRDGVRFKAVDYDGSYVYWTPESNMDIAQKLGADIVMQLDQCPGYPAEKSYVERAVNLSSAWAERCWKAHTKPDQALFGIVQGGMHLDLRIRSIQQLEQIADFIGYGIGGYSVGEDHATMFESLAPLCSDYMPKNKPRYLMGVGNPTTLVRAVGVGVDMFDCVLPTRTARMGTAFSHEGRLNLKNAEHITADIPLDERCSCPVCTECYTRSYIGHLVRQHEMLGSILLSMHNIYFLLETMQHARQAIIDGTYKAFLDDWNATHTADDLRLKHYHMNASAGADNRV

SEQ ID NO: 51924 - protein, 390 aa, Atopostipes suicloacalis
  REGION 1..390: note = tr|A0A1M4XAM7|A0A1M4XAM7_9LACT Queuine tRNA-ribosyltransferase OS=Atopostipes suicloacalis DSM 15692 OX=1121025 GN=tgt PE=3 SV=1
MNEKSKGRKHLEHPINYHLIKKEKHTGARLGKLETPNGTFETPMFMPVGTQATVKAMSPEELKKIGAGVILSNTYHLWLRPGSDLIEEAGGLHKFMNWDQGILTDSGGFQVFSLADSREITEEGVHFRSHLDGSKLFLTPEKSIQIQNELGSDIMMSFDECPPFDESYDYMKKSIERTTRWAERGLNAHNNWEKQGLFGIVQGGGYKDLRLQHVRDLTSMDFSGYSIGGLSVGETHEEMYEVLDYLTPELPEDKTRYLMGVGTPAALIESVIRGVDIFDCVLPTRIARNGTAMTSQGRVVIKNAVHARDWGPLDPKCDCDTCQNYSRGYLRHLIKTDEILGMRLISIHNLRFLIHLMEQVREAIREDNLLEFKEAFFEEYGYNEPNARTF

SEQ ID NO: 51925 - protein, 332 aa, Aulosira laxa
  REGION 1..332: note = tr|A0A1Z4UF73|A0A1Z4UF73_9CYAN Queuine tRNA-ribosyltransferase OS=Aulosira laxa NIES-50; OX = 1541988 GN=tgt PE=3 SV=1
MPVGTLANVKTVTPAQLRDTGAQMVLSNTYHLHLQPGEAIVAGGGGLHKFMGWNGPMLTDSGGFQVFSLSEMRKITEEGVTFRSPHDGQIIKLTPERSIEIQNTLGADVIMAFDECPPYPATRQEVEAATERTYRWLERCIVAHQRSDQALFGIVQGGVYLDLRSQAAVALAKLNLPGYAIGGVSVGEPPELMAQIVQTTAPLLPPEKPRYLMGVGTYKEMAIAIASGVDLFDCVIPTRWARHGTAIVQGERWNLKNAKFREDFTPLDETCPCYACQNFSRAYISHLVRSQEILAYTLLSIHNITELIRFTQRIREAILSDRFYSEFGHWLE

SEQ ID NO: 51926 - protein, 377 aa, Aurantimonas coralicida
  REGION 1..377: note = tr|A0A0P0YZU2|A0A0P0YZU2_9RHIZ Queuine tRNA-ribosyltransferase OS=Aurantimonas coralicida; OX = 182270 GN=tgt PE=3 SV=1
MSDTFQFKLIATDGKARRGVITMPRGEVRTPAFMPVGTAGTVKAMYLDQVRELGSDIILGNVYHLMLRPGAERVARLGGLHDFALWPHPILTDSGGFQVMSLASLRELDETGVRFRSHIDGSKHELTPERSIEIQGLLDSDIQMQLDECIRLPAERAEIERAMEMSLRWAERSAKAFGNQPGKAMFGIVQGGDLIDMRVRSAERLAAMDLKGYAVGGLAVGEPQDVMLATLDETLPVMPVEKPRYLMGVGTPDDILQSVARGIDMFDCVMPTRAGRHGLAYTRFGKVNLKNARHADDPRPLDEASDCPASRDYSRAYLHHLVRSNEALASMLLTWNNLAYYQSLMAGMRAAIEAGGFDDFAAATKAGWTRGDLPPYG

SEQ ID NO: 51927 - protein, 377 aa, Aurantimonas manganoxydans
  REGION 1..377: note = tr|A0A0P0Z5G3|A0A0P0Z5G3_9RHIZ Queuine tRNA-ribosyltransferase OS=Aurantimonas manganoxydans; OX = 651183 GN=tgt PE=3 SV=1
MSETFQFKLIATDGKARRGVITMPRGEVRTPAFMPVGTAGTVKAMYLDQVRELGSDIILGNVYHLMLRPGAERVARLGGLHDFALWPHPILTDSGGFQVMSLASLRELDETGVRFRSHIDGSKHELTPERSIEIQGLLDSDIQMQLDECIRLPAERAEIERAMEMSLRWAERSAKAFGNQPGKAMFGIVQGGDLIDLRVRSAERLAAMDLKGYAVGGLAVGEPQDVMLATLDETLPVMPVDKPRYLMGVGTPDDILQSVARGIDMFDCVMPTRAGRHGLAYTRFGKVNLKNARHADDPRPLDEASGCPASRDYSRAYLHHLVRSNEALASMLLTWNNLAYYQSLMSGMRAAIEAGGFDDFAAATKSGWARGDLPPYG

SEQ ID NO: 51928 - protein, 377 aa, Aurantimonas manganoxydans; identical to SEQ ID NO: 51927
  REGION 1..377: note = tr|Q1YHY3|Q1YHY3_AURMS Queuine tRNA-ribosyltransferase OS=Aurantimonas manganoxydans (strain ATCC BAA-1229 / DSM 21871 / SI85-9A1) OX=287752; GN = tgt PE=3 SV=1

SEQ ID NO: 51929 - protein, 376 aa, Aurantimonas sp.
  REGION 1..376: note = tr|A0A1X0SW89|A0A1X0SW89_9RHIZ Queuine tRNA-ribosyltransferase OS=Aurantimonas sp. 22II-16-19i; OX = 1317114 GN=tgt PE=3 SV=1
MTERFSFQLLATDGRARRGEITMPRGTVRTPAFMPVGTAGTVKAMYLDQVRALGADIILGNVYHLMLRPGAERVARLGGLHDFARWPHPILTDSGGFQVMSLAELRKLDEKGVTFRSHVDGSVHSLSPERSIEIQGLLDSDIQMQLDECIRLPAERAEIERAMELSLRWAERCKVAFGEQPGKAMFGIVQGGDQIDLRQRSAASLAAMDLKGYAVGGLAVGEPQAVMLATLDETVPVLPEEKPRYLMGVGTPDDLIRSVARGIDMFDCVMPTRAGRHGLAYTRRGKINLKNARHAEDHRPLDEESDCPAARDYSRAYLHHLVRSDESLGGMLLTWNNLAYYQDLMAGIRAAIEAKRYADFCDAVSEAWAKGDLPAL

SEQ ID NO: 51930 - protein, 377 aa, Aurantimonas sp.
  REGION 1..377: note = tr|A0A0Q6EZ58|A0A0Q6EZ58_9RHIZ Queuine tRNA-ribosyltransferase OS=Aurantimonas sp. Leaf443; OX = 1736378 GN=tgt PE=3 SV=1
MSVPFSFTLLATDGTARRGEIAMPRGTIRTPAFMPVGTAGTVKAMYLDQVRALGSDIILGNVYHLMLRPGAERVARLGGLHEFARWPHPILTDSGGFQVMSLANLRKLDETGVRFRSHIDGSEHFVSPERSIEIQDLLDSDIQMQLDECIRLPAERAEVERAMELSLRWAERSARAFGEQPGKAMFAIVQGGDVIDLRLRSAERLAAMDLKGYAVGGLAVGEPQAVMLKVLDETLPAMPREKPRYLMGVGTPDDILKSVARGIDMFDCVMPTRSGRHGLAFTRRGRVNLKNARHAEDHRPLDEESDCPAARDYSRAYLHHLVRANEALASMLLTWVNLAYYQSLMAGIRASIDEGRFADFAAETQERWARGDIPALS

SEQ ID NO: 51931 - protein, 379 aa, unidentified
  source 1..379: note = Aureibacillus halotolerans
  REGION 1..379: note = tr|A0A4R6TYP3|A0A4R6TYP3_9BACI Queuine tRNA-ribosyltransferase OS=Aureibacillus halotolerans; OX = 1508390 GN=tgt PE=3 SV=1
MSAVTYEHIKTCAQSGARLGIVHTPHGSFETPAFMPVGTLGTVKTMSPEDLESMGAGIILGNTYHLWLRPGTDIISEAGGLHKFMNWKHPILTDSGGFQVFSLSNLRDIQEEGVHFRNHLSGEKLFLSPEKAMEIQNILGSDIMMAFDECPPYPATYEYMKASVERTSRWAERCLTAHSRPAEQGLFGIVQGGEFEDLRIQSAKDLTSLDFPGYAIGGLSVGEPKDVMNRVLEWTTPLLPADKPRYLMGVGSPDSLIDGAVRGIDMFDCVLPTRIARNGTCMTSAGRLVVRNAAYKSDFRPIDENCDCYTCRNYSRAYIRHLVKCDETFGFRLTTYHNLYFLLKLMRQVREAIREDRLLDFRESFFEAYGFNQPDAKNF

SEQ ID NO: 51932 - protein, 374 aa, unidentified
  source 1..374: note = Aureicoccus marinus
  REGION 1..374: note = tr|A0A2S7T747|A0A2S7T747_9FLAO Queuine tRNA-ribosyltransferase OS=Aureicoccus marinus OX=754435; GN = tgt PE=3 SV=1
MKFTIEGKEGKARAGEIQTAHGSIPTPIFMPVGTVASVKGVHQSELEEDTKAPIILGNTYHLYLRPGMEILEQAGGLHQFMSWSSNILTDSGGYQVYSLADNRKITEEGVKFKSHIDGSTHFFTPESVMDIQRRIGADIIMAFDECTPYPCDWDYAEKSMEMTHRWAHRCIEGLEKSPVRYGFEQAFFPIVQGSVYPDLRERSARFIADLDAPGNAIGGLSVGEPAEEMYAMTEVVCAILPEEKPRYLMGVGTPANLLENIARGIDMFDCVMPTRNARNGMLFTAEGTINIKNKKWENDFSPLDENGYSYVDTLYTKAYLRHLFAANEFLGKQIATLHNLGFYLWLVRTARARILAGDFYDWKDELVQKLNRRR

SEQ ID NO: 51933 - protein, 378 aa, Aureimonas altamirensis
  REGION 1..378: note = tr|A0A1M6J9Y8|A0A1M6J9Y8_9RHIZ Queuine tRNA-ribosyltransferase OS=Aureimonas altamirensis DSM 21988 OX=1121026 GN=tgt PE=3 SV=1
MSQEFAFTLTHTDGKARRGEITMPRGTVRTPAFMPVGTAGTVKAMYLSQVRDLGSDIILGNVYHLMLRPGAERVGRLGGLHEFARWPWPILTDSGGFQVMSLASLRKLTEKGVTFRSHVDGSVHELTPERSIEIQGLLDSDIQMQLDECVRLPADRREIERAMEMSLRWAERCAVAFGNQPGKAMFGIVQGGDQPDLRIRSATELAAMNLKGYAVGGLAVGEPQDVMLETLDETLPSLPVDKPRYLMGVGTPDDIVKSVARGIDMFDCVMPTRAGRHGLAFTRHGRINLRNAVHAEDASPLDETSDCPATRDYSRAYLHHLVRTSEALGGMLLTWNNLAYYQSLMAGIRAAIEEGRFAAYAAEVTEGWARGEARRKAA

SEQ ID NO: 51934 - protein, 378 aa, Aureimonas altamirensis
  REGION 1..378: note = tr|A0A0B1PXX6|A0A0B1PXX6_9RHIZ Queuine tRNA-ribosyltransferase OS=Aureimonas altamirensis; OX = 370622 GN=tgt PE=3 SV=1
MSQEFAFTLINTDGKARRGEITMPRGTVRTPAFMPVGTAGTVKAMYLSQVRELGSDIILGNVYHLMLRPGAERVGRLGGLHEFARWPWPILTDSGGFQVMSLASLRKLTEKGVTFRSHVDGSVHELTPERSIEIQGLLDSDIQMQLDECVRLPADRREIERAMEMSLRWAERCAVAFGNQPGKAMFGIVQGGDQPDLRIRSATELAAMNLKGYAVGGLAVGEPQEVMLETLDETLPSLPVDKPRYLMGVGTPDDIVKSVARGIDMFDCVMPTRAGRHGLAFTRHGRINLRNAIHAEDAAPLDETSDCPAARDYSRAYLHHLVRTSEALGGMLLTWNNLAYYQSLMAGIRAAIEEGRFAAYAAEVTEGWARGEARRKLA

SEQ ID NO: 51935 - protein, 379 aa, unidentified
  source 1..379: note = Aureimonas flava
  REGION 1..379: note = tr|A0A3A1WE02|A0A3A1WE02_9RHIZ Queuine tRNA-ribosyltransferase OS=Aureimonas flava OX=2320271; GN = tgt PE=3 SV=1
MSQFTFDVSATDGLARRGTISMPRGVVRTPAFMPVGTAATVKAMYLDQVRDLGSDIILGNTYHLMLRPGAERVARLGGLHDFARWPHPILTDSGGFQVMSLASLRKMSEQGVTFRSHIDGTVHELTPERSIEIQGLLDSDIQMQLDECIRLPAERSEIERAMELSLRWAERCAVAFGDQPGKAMFGIVQGGDDAALRIRSAERLRDMGLKGYAVGGLAVGEPQDVMLAMLGETVPVLPHGKPRYLMGVGTPDDILKSIMRGIDMFDCVMPTRAGRHGLAFTRHGRINLKNARHAEDAAPLDERSACPATRDYSRAYLHHLVRTQETLGAMLLTWNNLAYYQQLMSGARDAIERGAFADFVAETTEGWVRGERERGTARS

SEQ ID NO: 51936 - protein, 378 aa, Aureimonas frigidaquae
  REGION 1..378: note = tr|A0A0P0Z3T3|A0A0P0Z3T3_9RHIZ Queuine tRNA-ribosyltransferase OS=Aureimonas frigidaquae; OX = 424757 GN=tgt PE=3 SV=1
MTPEFTFQLLATDGRARRGEISMPRGTVRTPAFMPVGTAGTVKAMYLSQVRELGSDIILGNVYHLMLRPGAERVARLGGLHDFARWPWPILTDSGGFQVMSLAGLRKLTEEGVTFRSHIDGSVHELTPERSIEIQGLLDSDIQMQLDECIRLPAPREEIERAMELSLRWAERSAVAFGNQPGKAMFGIVQGGDQPDLRIRSAERLTAMNLKGYAVGGLAVGEPQHVMLETLDGTLPSLPTHKPRYLMGVGTPDDILQSVARGIDMFDCVMPTRAGRHGLAFTRHGRVNLRNAVHAEDPAPLDATSDCPATRDYARAYLHHLVRSNEALGGMLLTWNNLAYYQSLMAGIRDAISQGRFATYAAEVSEGWARGEALRKAR

SEQ ID NO: 51937 - protein, 382 aa, unidentified
  source 1..382: note = Aureimonas jatrophae
  REGION 1..382: note = tr|A0A1H0MGA0|A0A1H0MGA0_9RHIZ Queuine tRNA-ribosyltransferase OS=Aureimonas jatrophae OX=1166073; GN = tgt PE=3 SV=1
MNAHTPDAPAADFSFRLIAEDGRARRGEIRMPRGTVRTPAFMPVGTAATVKAMYPGQVRELGADIILGNTYHLMLRPGAERVARLGGLHEFARWPHPILTDSGGFQVMSLSALRQMSEKGVTFRSHIDGSTHEMTPERSIEIQGLLGSDIQMQLDECIRLPADREEIRRAMELSLRWAERCAVAFGTQPGKAMFGIVQGGDQPDLRIRSAEALTALELKGYAVGGLAVGEPQSVMLATLDETLPSLPRLKPRYLMGVGTPDDIIQSVARGIDMFDCVMPTRAGRHGQAFTPYGRLNLRNAKHAEDTRPLDETSDCPASRDYSRAYLHHLVKSEETLGSMLLTWHNLAYYQTLMAGIRAAIDAGRFETFRAETTARWTGGEEG

SEQ ID NO: 51938 - protein, 379 aa, unidentified
  source 1..379: note = Aureimonas phyllosphaerae
  REGION 1..379: note = tr|A0A1I2FD03|A0A1I2FD03_9RHIZ Queuine tRNA-ribosyltransferase OS=Aureimonas phyllosphaerae; OX = 1166078 GN=tgt PE=3 SV=1
MTEFQFNVSATDGLARRGTIRMPRGEIRTPAFMPVGTAATVKAMYLDQVRDLGSDIILGNTYHLMLRPGAERVARLGGLHEFARWPYPILTDSGGFQVMSLASLRKMSEEGVTFRSHVDGSVHELTPERSIEIQGLLDSDIQMQLDECIRLPAERPEVERAMELSLRWAERCAIAFGNQPGKAMFGIVQGGDVVDLRVRSAERLRAMELKGYAVGGLAVGEPQEVMLRILEETVPVMPVEKPRYLMGVGTPDDLLQSIARGIDMFDCVMPTRAGRHGLAFTRHGRINLRNARHAEDATPLDEHSDCPASRDYARAYLHHLVRTEETLGAMLLTWNNLAYYQTLMAGARQAIETERFGDFVAETTEGWAKGEEARGAFRR

SEQ ID NO: 51939 - protein, 379 aa, Aureimonas sp.
  REGION 1..379: note = tr|A0A0Q5HPZ0|A0A0Q5HPZ0_9RHIZ Queuine tRNA-ribosyltransferase OS=Aureimonas sp. Leaf324; OX = 1736336 GN=tgt PE=3 SV=1
MTEFQFSVSATDGLARRGTIRMPRGDVRTPAFMPVGTAATVKAMYLDQVRDLGSDIILGNTYHLMLRPGAERVARLGGLHDFARWPYPILTDSGGFQVMSLASLRKMSEKGVTFRSHVDGSVHELTPERSIEIQGLLDSDIQMQLDECIRLPAERSEVERAMELSLRWAERCAIAFGNQPGKAMFGIVQGGDVVDLRIRSAERLRAMNLKGYAVGGLAVGEPQEVMLRILGETVPVMPAEKPRYLMGVGTPDDLLQSIARGIDMFDCVMPTRAGRHGLAFTRYGRINLRNARHAEDASPLDDRSDCPASRDYARAYLHHLVRTEETLGAMLLTWNNLAYYQTLMAGARQAIENGRFADFVAETTEGWTKGEEARGVSRS

SEQ ID NO: 51940 - protein, 379 aa, Aureimonas sp.
  REGION 1..379: note = tr|A0A0S2EPT3|A0A0S2EPT3_9RHIZ Queuine tRNA-ribosyltransferase OS=Aureimonas sp. AU20 OX=1349819; GN = tgt PE=3 SV=1
MTTNEFGFRLLATDGKARRGEITMPRGTIRTPAFMPVGTAGTVKAMYLDQVHELGSDIILGNTYHLMLRPGAERVARLGGLHEFARWPFPILTDSGGFQIMSLSSLRKMSEKGVTFRSHVDGSVHDLSPERSIEIQGLLDADIQMQLDECIRLPAERSEIERAMELSLRWAERSAVAFGNQPGKAMFGIVQGGDQPDLRIRSAERLAAMNLKGYAVGGLAVGEPQAVMLETLQETLPSLPTEKPRYLMGVGTPDDILQSVARGIDMFDCVMPTRAGRHGLAFTRDGRVNLKNARHAEDPRPLDDTSDCPATRDYSRAYLHHLVRADEALAGMLLTWNNLAYYQRLMAGMRLAIEEGHFDDFAAETTERWTRGEAARKAA

SEQ ID NO: 51941 - protein, 379 aa, Aureimonas ureilytica
  REGION 1..379: note = tr|A0A147DBF1|A0A147DBF1_9RHIZ Queuine tRNA-ribosyltransferase OS=Aureimonas ureilytica OX=401562; GN = tgt PE=3 SV=1
MTVTEFGFRLLAKDGKARRGEISMPRGTIRTPAFMPVGTAATVKAMYLDQVRELGSDIILGNTYHLMLRPGAERVARLGGLHEFARWPYPILTDSGGFQIMSLASLRKMSEQGVTFRSHVDGSVHELSPERSIEIQGLLDADIQMQLDECIRLPADRNEIERAMELSLRWAERSAIAFGTQPGKAMFGIVQGGDQPDLRIRSAERLTAMNLKGYAVGGLAVGEPQSVMLETLDETLPSLPVEKPRYLMGVGTPDDILQSVARGIDMFDCVMPTRAGRHGLAFTKDGRVNLKNARHAEDPKPLDETSDCPATRDYSRAYLHHLVRADEALAGMLLTWNNLAYYQRLMAEMREAIELGRFQDFAAETTARWSRGEAARKAA

SEQ ID NO: 51942 - protein, 379 aa, Aureimonas ureilytica
  REGION 1..379: note = tr|A0A175R5D0|A0A175R5D0_9RHIZ Queuine tRNA-ribosyltransferase OS=Aureimonas ureilytica OX=401562; GN = tgt PE=3 SV=1
MTVTEFGFRLLATDGKARRGEISMPRGTIRTPAFMPVGTAATVKAMYLDQVRELGSDIILGNTYHLMLRPGAERVARLGGLHEFARWPYPILTDSGGFQIMSLASLRKMSEQGVTFRSHVDGSVHELSPERSIEIQGLLDADIQMQLDECIRLPADRNEIERAMELSLRWAERSAVAFGTQPGKAMFGIVQGGDQPDLRIRSAERLTAMNLKGYAVGGLAVGEPQSVMLETLDETLPSLPVEKPRYLMGVGTPDDILQSVARGIDMFDCVMPTRAGRHGLAFTKDGRVNLKNARHAEDPKPLDETSDCPATRDYSRAYLHHLVRADEALAGMLLTWNNLAYYQRLMAEMREAIELGRFQDFAAETTARWARGEAARKAA

SEQ ID NO: 51943 - protein, 376 aa, Aureitalea marina
  REGION 1..376: note = tr|A0A2S7KMZ8|A0A2S7KMZ8_9FLAO Queuine tRNA-ribosyltransferase OS=Aureitalea marina OX=930804; GN = tgt PE=3 SV=1
MQFNLAAKDPHSKARAGTITTDHGQIQTPIFMPVGTLATVKGVHQRELTEEIDPDIILGNTYHLYLRPQIDILEKAGGLHKFMNWDRNILTDSGGYQVYSLSANRKIKEEGVKFKSHIDGSYHVFTPENVMDIQRSIGADIIMAFDECTPYPCDYDYAKRSMHMTHRWLDRCLNRLEEVPYKYDYSQTFFPIVQGSTYKDLRKQSAEYIASVGAEGNAIGGLSVGEPAEEMYAMTEVVCEVLPEDKPRYLMGVGTPINILENIALGIDMFDCVMPTRNGRNGMLFTAHGTINIKNKKWEDDFSPIDEMGITWVDTAYSKAYLRHLFSVGEMLGRQIASIHNLGFYLWLVREARKHILAGDFASWKDQMVRQMNQRL

SEQ ID NO: 51944 - protein, 376 aa, Aureitalea sp.
  REGION 1..376: note = tr|A0A2S0HY07|A0A2S0HY07_9FLAO Queuine tRNA-ribosyltransferase OS=Aureitalea sp. RR4-38; OX = 2094025 GN=tgt PE=3 SV=1
MHFKLEGKDEQSSARAGTIKTGHGSIETPIFMPVGTVGTVKGVHQRELSEDINPDIILGNTYHLYLRPQTQILIKAGGLHKFMNWDRNILTDSGGYQVYSLSANRKIKEEGVKFKSHIDGSYHVFTPENVMEIQRAIGADIIMAFDECTPYPCDYNYAKRSMHMTHRWLDRCLSHLEKTPLKYDYEQAFFPIVQGSTYKDLREQSAEYIANAGAVGNAIGGLSVGEPAEEMYEMTAVVTNILPEDKPRYLMGVGTPINILENIALGIDMFDCVMPTRNGRNGMLFTAHGTINIKNKKWEDDFSAIDEMNITWVDTAYSKAYLRHLFTVNEMLGRQIATIHNLGFYMWLVREARKHILDGDFRSWKDKMVKQMDKRL

SEQ ID NO: 51945 - protein, 382 aa, unidentified
  source 1..382: note = Auricoccus indicus
  REGION 1..382: note = tr|A0A1Q1G0Y0|A0A1Q1G0Y0_9STAP Queuine tRNA-ribosyltransferase OS=Auricoccus indicus OX=1849491; GN = tgt PE=3 SV=1
MAAITYEHIKTCKQSGARLGKVHTPHGTFETPIFMPVGTLATVKTMSPEELLQVSSQIILSNTYHLWLRPGSDIIKEAGGLHKFMNWDHPILTDSGGFQVFSLSDMRKIEEEGVHFRHHLNGSKLFLSPEKAMDIQHDLGSDIMMSFDECPPFPAEYDYVKQSIERTTRWAHRGLEHHIKSGHDKHQALFGIVQGGEYEALRTQSAKELVAMDFPGYSIGGLSVGEPKDIMYRMLEHTTPLLPFHKPRYLMGVGSPDALIEGVIRGIDMFDCVLPTRIARNGTTMTSNGRVVVKKEQYARDFTPLDESCDCYTCKNYTKAYLRHLIKTDEILGLRLTSIHNLYFLLKLMENVRQAIREDRLLDFKEEFFEQYGLNVENPKNF

SEQ ID NO: 51946 - protein, 459 aa, Auritidibacter sp.
  REGION 1..459: note = tr|A0A318AIB4|A0A318AIB4_9MICC Queuine tRNA-ribosyltransferase OS=Auritidibacter sp. NML120636; OX = 2170743 GN=tgt PE=3 SV=1
MADYPQTRRQPSDPTPAVVPTHHPSPRDVSFSIQTRMDSGLGRTGVIHTPHGQIQTPAFIPVATQASVKAVAPEQMSAIGAQALLGNAYHLYLQPGAELVDRAGGLGQFMNWSGPTFTDSGGFQVMSLGSGFKKVIDMSGPHAPDGTGSDDDTAAGKNRLAHVDDDGVWFTSHLDGSKHRFSPEISMNIQHQLGADIMFAFDELTTLHNSRRYQETSLERTRLWAQRCLDHHAGLTAHRSDRPYQALFGVIQGAQYEDLRRKACQDLSAMQADFVTDNGSDRAGFDGYGIGGALEKKNLGAIVSWCAQELPEDKPRHLLGISEPDDLLWAIESGADTFDCVSPTRVARTGAFYTDYGRINLPRAQFKDDFAPLQPGCDCYTCAHYSRAYLRHLIKAKELLVHTLISIHNERFVIRLVETIRTSMIEGTYPELKEQVLGRYYSAEASDPPGASARFSVTP

SEQ ID NO: 51947 - protein, 459 aa, Auritidibacter sp.
  REGION 1..459: note = tr|A0A318ADP2|A0A318ADP2_9MICC Queuine tRNA-ribosyltransferase OS=Auritidibacter sp. NML120779; OX = 2170744 GN=tgt PE=3 SV=1
MADYPQTRRQPSDPTPAVVPTHHPSPRDVSFSIQTRMDSGLGRTGVIHTPHGQIQTPAFIPVATQASVKAVAPEQMSAIGAQALLGNAYHLYLQPGAELVDRAGGLGQFMNWSGPTFTDSGGFQVMSLGSGFKKVIDMSGPHAPDGTGSDDDTAAGKNRLAHVDDDGVWFTSHLDGSKHRFSPEISMNIQHQLGADIMFAFDELTTLHNSRRYQETSLERTRLWAQRCLDHHAGLTAHRSDRPYQALFGVIQGAQYEDLRRKACQDLSAMQADFVTDNGTDRAGFDGYGIGGALEKKNLGTIVSWCAQELPEDKPRHLLGISEPDDLLWAIESGADTFDCVSPTRVARTGAFYTDYGRINLPRAQFKDDFAPLQPGCDCYTCAHYSRAYLRHLIKAKELLVHTLISIHNERFVIRLVETIRTSMIEGTYPELKEQVLGRYYSAEASDPPGASARFSVTP

SEQ ID NO: 51948 - protein, 402 aa, Avibacterium avium
  REGION 1..402: note = tr|A0A379ARU6|A0A379ARU6_AVIAV Queuine tRNA-ribosyltransferase OS=Avibacterium avium OX=751; GN = tgt PE=3 SV=1
MTMKFKLHKTDGTARRGTMTFQRPQGEFEVQTPAFMPVGTYGTVKGMTPEEVRATGAEILLGNTFHLWLRPGQEIMRKHGDLHDFMSWHRPILTDSGGFQVFSLGKLRKITEEGVKFQNPINGERIFLSPEKSMEIQYDLGSDIVMIFDECTPYPATFDYAKKSMEMSLRWAKRSRNRFDELGNQNALFGIVQGGVYEELRKVSVEGLVEIGFDGYAVGGLAVGEPKEDMHRILEYVCPQLPADKPRYLMGVGKPEDLVEGVRRGIDMFDCVMPTRNARNGHLFVTDGIVKIRNAKYRDDTSPLDPECDCYTCKNYTKAYLYHLDKCGEILGARLNTIHNLRYYQRLMAQIREAIENDTFEQFVQDFYARIGKPVPPLQSEVQQNAQAANAQSSNPQGEQNA

SEQ ID NO: 51949 - protein, 400 aa, Avibacterium endocarditidis
  REGION 1..400: note = tr|A0A2S5AHT2|A0A2S5AHT2_9PAST Queuine tRNA-ribosyltransferase OS=Avibacterium endocarditidis; OX = 380674 GN=tgt PE=3 SV=1
MKFKLHKTDGTARRGTMTFQRPQGEFEVQTPAFMPVGTYGTVKGMTPEEVRATGAEILLGNTFHLWLRPGQEIMRKHGDLHDFMNWHRPILTDSGGFQVFSLGKLRKITEEGVKFQNPINGERIFLSPEKSMEIQYDLGSDIVMIFDECTPYPATFDYAKKSMEMSLRWAKRSRDRFDELGNKNALFGIVQGGVYEELRKVSLEGLVNIGFDGYAVGGLAVGEPKEDMHRILEYVCPQLPADKPRYLMGVGKPEDLVEGVRRGIDMFDCVMPTRNARNGHLFVTDGIVKIRNAKYRDDTSPLDPECDCYTCKNYTKAYLYHLDKCGEILGARLNTIHNLRYYQRLMAQIREAIENDSFEQFVQDFYARIGKPVPPLQSEVQQNAQAANAQSSNPQGEQNA

SEQ ID NO: 51950 - protein, 402 aa, Avibacterium gallinarum
  REGION 1..402: note = tr|A0A379AUX0|A0A379AUX0_AVIGA Queuine tRNA-ribosyltransferase OS=Avibacterium gallinarum OX=755; GN = tgt PE=3 SV=1
MTMKFKLHKTDGTARRGTMTFQRPQGEFEVQTPAFMPVGTYGTVKGMTPEEVRATGAEILLGNTFHLWLRPGQEIMRKHGDLHDFMNWHRPILTDSGGFQVFSLGKLRKITEEGVKFQNPINGERIFLSPEKSMEIQYDLGSDIVMIFDECTPYPATFDYAKKSMEMSLRWAKRSRDRFDELGNKNALFGIVQGGVYEELRKVSLEGLVNIGFDGYAVGGLAVGEPKEDMHRILEYVCPQLPADKPRYLMGVGKPEDLVEGVRRGIDMFDCVMPTRNARNGHLFVTDGIVKIRNAKYRDDTSPLDPECDCYTCKNYTKAYLYHLDKCGEILGARLNTIHNLRYYQRLMAQIREAIENDTFEQFVQDFYARIGKPVPPLQSEVQQNAQAANAQSSNPQGEQNA

SEQ ID NO: 51951 - protein, 400 aa, Avibacterium paragallinarum
  REGION 1..400: note = tr|S6EF75|S6EF75_AVIPA Queuine tRNA-ribosyltransferase OS=Avibacterium paragallinarum JF4211 OX=1351754 GN=tgt PE=3 SV=1
MKFKLHKTDGTARRGTMTFQRPQGEFEVQTPAFMPVGTYGTVKGMTPEEVRETGAEILLGNTFHLWLRPGQEIMRKHGDLHDFMNWHRPILTDSGGFQVFSLGKLRKITEEGVKFQNPINGERIFLSPEKSMEIQYDLGSDIVMIFDECTPYPATFDYAKKSMEMSLRWAKRSRNRFDELGNQNALFGIVQGGVYEELRKVSVEGLVEIGFDGYAVGGLAVGEPKEDMHRILEYVCPQLPADKPRYLMGVGKPEDLVEGVRRGIDMFDCVMPTRNARNGHLFVTDGIVKIRNAKYRDDTSPLDPECDCYTCKNYTKAYLYHLDKCGEILGARLNTIHNLRYYQRLMAQIRQAIDEDRFDQFVVDFYARIGKPVPPLQSEVQQNAQAANAQSSSPQGEQNA

SEQ ID NO: 51952 - protein, 400 aa, Avibacterium paragallinarum
  REGION 1..400: note = tr|A0A4Q7GCT0|A0A4Q7GCT0_AVIPA Queuine tRNA-ribosyltransferase OS=Avibacterium paragallinarum; OX = 728 GN=tgt PE=3 SV=1
MKFKLHKTDGTARRGTMTFQRPQGEFEVQTPAFMPVGTYGTVKGMTPEEVRETGAEILLGNTFHLWLRPGQEIMRKHGDLHDFMNWHLPILTDSGGFQVFSLGKLRKITEEGVKFQNPINGERIFLSPEKSMEIQYDLGSDIVMIFDECTPYPATFDYAKKSMEMSLRWAKRSRNRFDELGNQNALFGIVQGGVYEELRKVSVEGLVEIGFDGYAVGGLAVGEPKEDMHRILEYVCPQLPADKPRYLMGVGKPEDLVEGVRRGIDMFDCVMPTRNARNGHLFVTDGIVKIRNAKYRDDTSPLDPECDCYTCKNYTKAYLYHLDKCGEILGARLNTIHNLRYYQRLMAQIRQAIDEDRFDQFVVDFYARIGKPVPPLQSEVQQNAQAANAQSSSPQGEQNA

SEQ ID NO: 51953 - protein, 397 aa, Avibacterium volantium
  REGION 1..397: note = tr|A0A3S4HJE6|A0A3S4HJE6_AVIVO Queuine tRNA-ribosyltransferase OS=Avibacterium volantium OX=762; GN = tgt PE=3 SV=1
MTMKFKLHKTDGTARRGTMTFQRPQGEFEVQTPAFMPVGTYGTVKGMTPEEVRATGAEILLGNTFHLWLRPGQEIMRKHGDLHDFMNWHRPILTDSGGFQVFSLGKLRKITEEGVKFQNPINGERIFLSPEKSMEIQYDLGSDIVMIFDECTPYPATFDYAKKSMEMSLRWAKRSRDRFDELGNKNALFGIVQGGVYEELRKVSLEGLVNIGFDGYAVGGLAVGEPKEDMHRILEYVCPQLPADKPRYLMGVGKPEDLVEGVRRGIDMFDCVMPTRNARNGHLFVTDGIVKIRNAKYRDDTSPLDPECDCYTCKNYTKAYLYHLDKCGEILGARLNTIHNLRYYQRLMAQIREAIENDTFEQFVQDFYARIGKPVPPLQSEVQQNAQASNPQGEQNV

SEQ ID NO: 51954 - protein, 370 aa, Azoarcus communis
  REGION 1..370: note = tr|A0A2U8GTD8|A0A2U8GTD8_9RHOO Queuine tRNA-ribosyltransferase OS=Azoarcus communis OX=41977; GN = tgt PE=3 SV=1
MQFELLTTSGSARRGRLTLAHGVVETPVFMPVGTYGTVKAMTPTMLADIGAQICLGNTFHLWLRPGLDVIAAHGGLHGFMGWDKPILTDSGGFQVFSLGALRKITEEGVKFASPIDGAKLFLTPEISMQIQHTLNSDVVMIFDECTPYPATRDEAAKSMRMSQRWAQRSRDEFDRLENTNALFGIVQGGMYEDLRDESLAALDEIGFHGFAIGGLSVGEPKEDMRRILAHTAPRLPVGKPRYLMGVGTPEDIVEGVAAGIDMFDCVMPTRNARNGWLFTRFGDIKIKNATHKLDTRPLDPTCDCYTCQNFSRAYLHHLHRTGEILGSMLNTIHNLRYYQTLTAELRDAIAVDGFAAFVERFQRDRNAGTV

SEQ ID NO: 51955 - protein, 370 aa, Azoarcus communis
  REGION 1..370: note = tr|A0A323V0S9|A0A323V0S9_9RHOO Queuine tRNA-ribosyltransferase OS=Azoarcus communis SWub3 = DSM 12120 OX=1121029 GN=tgt PE=3 SV=1
MQFELLATSGQARRGRMTLAHGVVETPVFMPVGTYGTVKAMTPDMLRDIGAQICLGNTFHLWLRPGLEVVAAHGGLHGFMAWDKPLLTDSGGFQVFSLGALRKITEEGVKFASPVDGAKLFLTPEISMQIQHTLNSDVVMIFDECTPYPATRDEAAKSMRLSQRWARRSRDEFDRLGNTNALFGIVQGGMYEDLRNESLAALEDIGFHGFAIGGLSVGEPKEDMQRILAHTAPRLPVHKPRYLMGVGTPEDIVEGVAAGIDMFDCVMPTRNARNGWLFTRYGDIKIKNAIHKADTRPLDPSCDCYTCRNFSRSYLHHLHRSGEILGSMLNTIHNLHYYQTLTRELREAIAVGRFDDYVSRFRSERANGTT

SEQ ID NO: 51956 - protein, 370 aa, Azoarcus indigens
  REGION 1..370: note = tr|A0A4R6E0E9|A0A4R6E0E9_9RHOO Queuine tRNA-ribosyltransferase OS=Azoarcus indigens OX=29545; GN = tgt PE=3 SV=1
MNFDLLASDGSARRGRLTLAHGTVETPVFMPVGTYGTVKAMTPAALNDIGASICLGNTFHLWLRPGLEVVAAHGGLHRFMGWDKPILTDSGGFQVFSLGALRKISEEGVKFASPIDGARLFLTPEVSMQIQHTLNSDVVMIFDECTPYPASRDEAAKSMRLSQRWARRSRDEFDRLGNANALFGIVQGGMYEDLRDESLAALQEIGFHGFAIGGLSVGEPKEDMARILAHTAPRLPREKPRYLMGVGTPEDIVAGVAAGIDMFDCVMPTRNARNGWLFTRYGDLKIKNAVHKADPRPLDPSCDCYACRNFSRAYLHHLHRTGEILGSMLNTIHNLRYYQVLTAEIREAIAAGDFDGFRQRFAADRARGTA

SEQ ID NO: 51957 - protein, 370 aa, Azoarcus sp.
  REGION 1..370: note = sp|A1K3W9|TGT_AZOSB Queuine tRNA-ribosyltransferase; OS = Azoarcus sp. (strain BH72) OX=62928 GN=tgt PE=3 SV=1
MQFELLSTSAGARRGRLTLAHGAVETPVFMPVGTYGTVKAMTPAMLSDVGAQICLGNTFHLWLRPGLDIVGAHGGLHRFMGWDKPILTDSGGFQVFSLGALRKISEEGVKFASPIDGARLFLTPEISMQIQTVLNSDVVMIFDECTPYPATRDEAAKSMRLSRRWARRSRDEFDRLENANALFGIVQGGMYEDLRDESLGALQDIGFHGFAIGGLSVGEPKDDMARILAHTAPRLPADKPRYLMGVGTPEDIVDGIANGIDMFDCVMPTRNARNGWLFTRYGDLKIKNAVHKADTRPLDPSCSCYTCRNFSRSYLHHLHRAGEILGSMLNTVHNLHYYQTLTAELRDAIAADRFADYVTRFRSERATGAH

SEQ ID NO: 51958 - protein, 370 aa, Azoarcus sp.; identical to SEQ ID NO: 51954
  REGION 1..370: note = tr|A0A558DHW5|A0A558DHW5_9RHOO Queuine tRNA-ribosyltransferase OS=Azoarcus sp. PHD OX=1628740; GN = tgt PE=3 SV=1

SEQ ID NO: 51959 - protein, 370 aa, Azoarcus tolulyticus
  REGION 1..370: note = tr|A0A1N6V048|A0A1N6V048_9RHOO Queuine tRNA-ribosyltransferase OS=Azoarcus tolulyticus OX=34027; GN = tgt PE=3 SV=1
MQFDLITQDGAARRGRLTLAHGVVETPVFMPVGTYGTVKAMTPAALDDIGAQICLGNTFHLWLRPGLEVVAAHGGLHDFMGWNKPILTDSGGFQVFSLGALRKISEEGVKFASPIDGAKLLLTPEISMQIQHTLNSDIAMIFDECTPYPATRDEAAKSMRLSQRWAKRSRDEFDKLGNANALFGIVQGGMYEDLRDESLAALEDIGFHGYAIGGLSVGEPKDDMERILAHTAPRLPQHKPRYLMGVGTPEDIVAGVTAGIDMFDCVMPTRNARNGWLFTRFGDIKIKNAIHKQDTRPLDPSCDCYTCRNFSRAYLHHLHRAGEILGSMLNTIHNLRYYQVLTAELRTAIDAGAFNAYLGRFRGERSTGTQ

SEQ ID NO: 51960 - protein, 376 aa, Azomonas agilis
  REGION 1..376: note = tr|A0A562IZI4|A0A562IZI4_9GAMM Queuine tRNA-ribosyltransferase OS=Azomonas agilis OX=116849; GN = tgt PE=3 SV=1
MSQCHMSFELLATEGRARRGRLVFPRGVVETPAFMPVGTYGTVKGMLPRDLEAIGAQIILGNTFHLWLRPGTDIIRAHGDLHDFAQWQRPILTDSGGFQVFSLGALRKIKEEGVYFASPVDGRKVFMGPEESMQVQRDLGSDVVMIFDECTPYPADEATARQSMELSLRWALRSKQAHADNPAALFGIVQGGMHESLRMRSLEGLCEIGFDGLAIGGLSVGEPKEDMLRILDFLPPQMPADKPRYLMGVGKPEDLVEAVRRGIDMFDCVMPTRNARNGHLFTDTGVVKIRNSAHKHDDTPLDPTCDCYTCKHFSRAYLHHLDKCGEMLGSMLNTIHNLRYYQYLMAGLRDAIQQGTLAAFVDSFYAKRGLPTPALV

SEQ ID NO: 51961 - protein, 370 aa, Azonexus fungiphilus
  REGION 1..370: note = tr|A0A495VMT4|A0A495VMT4_9RHOO Queuine tRNA-ribosyltransferase OS=Azonexus fungiphilus OX=146940; GN = tgt PE=3 SV=1
MQFELLKTDGGARRGTLTLAHGVVQTPVFMPVGTYGTVKAMTPQSLDDIGAQICLGNTFHLWLRPGLEVVKAHDGLHDFMNWRKPILTDSGGFQVFSLGALRKITEEGVKFSSPHDGAKLFLSPEISMQIQKVLNSDIVMIFDECTPYPASHEEAAKSMRMSMRWARRSRDEHDKLENANALFGIVQGGMYEDLRDESIAGLCDIGFDGMAIGGLSVGEPKDDMARILAHTAPRLPTNKPRYLMGVGTPEDLVNGVKNGIDMFDCVMPTRNARNGHLFTRFGDVKIKNARYRADTGPLDPSCSCYTCTQFTRSYLHHLYRNGEILGGMLNTIHNLHFYQTIMAEMRAAIESGKLDEWSSAFARDRTSGEC

SEQ ID NO: 51962 - protein, 370 aa, Azonexus hydrophilus
  REGION 1..370: note = tr|A0A1R1HZY9|A0A1R1HZY9_9RHOO Queuine tRNA-ribosyltransferase OS=Azonexus hydrophilus OX=418702; GN = tgt PE=3 SV=1
MQFELHKTDGAARRGTVTLAHGQVQTPVFMPVGTYGTVKAMTPQSLNDIGAQICLGNTFHLWLRPGLDVVAAHNGLHDFMNWQKPILTDSGGFQVFSLGAMRKITEEGVKFSSPHDGAKLFLTPEISMQIQKVLNSDIVMIFDECTPYPASHDEAAKSMRMSMRWAQRSRDEHNRLENGNALFGIVQGGMYEDLRDESVAGLCDIGFDGMAIGGLSVGEPKDDMARILTHTAPRLPTNKPRYLMGVGTPEDLVNGVKNGIDMFDCVMPTRNARNGHLFTRFGDVKIKNARYKLDTGPLDPSCTCYTCTQFTRSYLHHLFRNGEILGGMLNTIHNLHFYQTIMAEMRAAIESGKLEEWSTAFARDRSAGQC

SEQ ID NO: 51963 - protein, 378 aa, Azorhizobium caulinodans
  REGION 1..378: note = tr|A8I5P9|A8I5P9_AZOC5 Queuine tRNA-ribosyltransferase OS=Azorhizobium caulinodans (strain ATCC 43989 / DSM 5975 / JCM 20966 / NBRC 14845 / NCIMB 13405 / ORS 571) OX =438753 GN=tgt PE=3 SV=1
MTDTFSFKVHATDGTARTGAISTPRGEIRTPAFMPVGTVATVKGIYPEQVRATGADILLGNTYHLMLRPSAERVAKLGGLHKFMRWERPILTDSGGFQVMSLSGLRKITEKGVTFRSHVDGALHEMTPERSIEIQGLLGADIQMQLDECVSLPCEEAEAERAMRLSLRWAERSKKAFELQPKGRALYGIVQGGAVPRLRIESARELAAMDFPGYSIGGLAVGEPQEVMLDMIETVEPHLPKEKPRYLMGVGTPDDMLEAVARGIDMFDCVMPTRSGRHALAFTRFGRINLKNARHAEDSRPLDEESDCPALRDYSRAYLHHLVRCEEMLGAMLISWANLHYYQDLMRGIRGAIAEGRFEDFRRETKEGWARGDIPRLA

SEQ ID NO: 51964 - protein, 367 aa, Azorhizobium sp.
  REGION 1..367: note = tr|A0A258K2F7|A0A258K2F7_9RHIZ Queuine tRNA-ribosyltransferase (Fragment) OS=Azorhizobium sp. 35-67-5 OX=1970321 GN=B7Y75_01545 PE=3 SV=1
MTDTFSFRLNATDGTARTGIVSTPRGEIRTPAFMPVGTVATVKGVYPDQVRATGADILLGNTYHLMLRPGAERIAALGGLHNFMRWDRPILTDSGGFQVMSLSQLRKLDETGVTFRSHIDGAIHHLTPERAMEIQGLLGADIQMQLDECVRLPCPDAEAARAMQLSLRWAARSKRAFERQPKGRAVFGIVQGGAVEALRVESARALADMDFPGYSIGGLAVGEPQEIMLRMIETVEPHLPTTKPRYLMGVGTPDDLLEAVGRGIDMFDCVMPTRSGRHALAFTRFGRINLKNARHQNDPRPLDEESDCPALRDYSRAYLHHLIRCGEMLGGMLLSWANLHYYQDLMRGARAAIAEGRYDAYRAETKA

SEQ ID NO: 51965 - protein, 374 aa, Azospira oryzae
  REGION 1..374: note = tr|G8QJX4|G8QJX4_AZOOP Queuine tRNA-ribosyltransferase OS=Azospira oryzae (strain ATCC BAA-33 / DSM 13638 / PS) OX=640081 GN=tgt PE=3 SV=1
MQFELLKTDGQARRGTLTLAHGTVQTPVFMPVGTYGTVKAMTPQSLHDIGAQICLGNTFHLWLRPGLEVIKAHGGLHDFMGWNKPILTDSGGFQVFSLGALRKITEEGVKFSSPIDGAKLFLTPEESMRIQHTLNSDIVMIFDECTPYPATVDEAAKSMRLSLRWAQRSIDEHRRLGNGNALFGIVQGGMYETLRDESLAGLDEMGFDGMAIGGLSVGEPKEDMARILAHTAPKLPAHKPRYLMGVGTPEDLVHAVSQGIDMFDCVMPTRNARNGHLFTRYGDLKIKNAIHRQDTGPLDPSCDCYTCRNFSRAYLHHLFRAGEILGSMLNTIHNLHYYQVLMAELRAAIEEGRLQPHMENFHRDRSRGASPAAG

SEQ ID NO: 51966 - protein, 231 aa, Azospira oryzae
  REGION 1..231: note = tr|A0A2W5H481|A0A2W5H481_9RHOO Queuine tRNA-ribosyltransferase (Fragment) OS=Azospira oryzae; OX = 146939 GN=tgt PE=3 SV=1
MRFELIARDGAARRGRLTLAHGTVDTPAFMPVGTYGAVKAMSPAELKGLGTQIVLGNTFHLWLRPGLEVIKAHGGLHRFIGWDGPILTDSGGFQVFSLGKLRSISEEGVAFRSPVNGDRCFLTPEEAMRIQRVLNADVAMVFDECTPYPADEAQTRASMELSLRWAERSKRAFEGSENALFGIVQGGMFEHLREASLKGLMDIGFDGYAIGGLSVGEPKEEMLRILDHTAA

SEQ ID NO: 51967 - protein, 372 aa, Azospira sp.
  REGION 1..372: note = tr|A0A2R5EEE3|A0A2R5EEE3_9RHOO Queuine tRNA-ribosyltransferase OS=Azospira sp. I13 OX=1765050; GN = tgt PE=3 SV=1
MQFELLKTDGQARRGTLTLAHGVVQTPVFMPVGTYGTVKAMTPQSLHDIGAQICLGNTFHLWLRPGLEVVKAHGGLHDFMGWDKPILTDSGGFQVFSLGALRKITEEGVKFSSPIDGAKLFLTPEESMRIQHTLNSDIVMIFDECTPYPATLDEAAKSMRLSLRWAQRSIDEHRRLGNGNALFGIVQGGMYEELRNESLAGLDAMGFDGMAIGGLSVGEPKEDMARILAHTAPKLPSHKPRYLMGVGTPEDLVHAVSQGIDMFDCVMPTRNARNGHLFTRYGDLKIKNAIHRQDTGPLDPSCDCYTCRNFSRAYLHHLFRAGEILGSMLNTIHNLHYYQVLMAELRAAIEEGRLQPHMESFHRDRARGACAA

SEQ ID NO: 51968 - protein, 400 aa, Azospirillum brasilense
  REGION 1..400: note = tr|A0A4D8PT06|A0A4D8PT06_AZOBR Queuine tRNA-ribosyltransferase OS=Azospirillum brasilense OX=192; GN = tgt PE=3 SV=1
MTGIGFELLKTDGRARRGRVSTAHGVINTPAFMPVGTAATVKAMTSDAVKSTGAEILLGNTYHLMLRPTAERVGQLGGLHRFMNWDKPILTDSGGFQVMSLSDLRTMTEEGVTFKSHLDGTKHHLTPERSIQIQHLLDSNITMCLDECTPFPATEAQAASSMRLSMRWARRSKDAFVERSGYGLFGIVQGGVYADLRAESVAALSEIGFDGYAIGGLAVGEGQETMFTVLDFTEPLMVKERPRYLMGVGRPSDLIGAVRRGVDMFDCVMPTRSGRTGQAFVRRGTINIRNARHAHDERPLDEECGCPACRNHSRAYLHHLFKAGEMLGPMLLTWHNLHYYQDLMAELRQAIEDGRFEEVASALEARLNEGDVPATEDPLAALKVKPAKPAKPAKKESADV

SEQ ID NO: 51969 - protein, 400 aa, Azospirillum brasilense
  REGION 1..400: note = tr|G8AKA0|G8AKA0_AZOBR Queuine tRNA-ribosyltransferase OS=Azospirillum brasilense Sp245; OX = 1064539 GN=tgt PE=3 SV=1
MTGIGFELLKTDGRARRGRVSTAHGVINTPAFMPVGTAATVKAMTSDAVKSTGAEILLGNTYHLMLRPTAERVGQLGGLHRFMNWDKPILTDSGGFQVMSLSDLRTMTEEGVTFKSHLDGSKHHLTPERSIQIQHLLDSNITMCLDECTPFPATEAQAASSMRLSMRWAKRSKDAFVERPGYGLFGIVQGGVYADLRAESVAALSDIGFDGYAIGGLAVGEGQETMFTINIRNARHAHRDRPRYLMGVGRPSDLIGAVRRGVDMFDCVMPTRSGRTGQAFVRRGTINIRNARHAHDERPLDEECGCPACRNHSRAYLHHLFKAGEMLGPMLLTWHNLHYYQDLMAELRQAIEDGRFDEVAGALEARLNEGDIPATEDPLAHLKVKPAKPAKSAKKESADV

SEQ ID NO: 51970 - protein, 411 aa, Azospirillum doebereinerae
  REGION 1..411: note = tr|A0A433J503|A0A433J503_9PROT Queuine tRNA-ribosyltransferase OS=Azospirillum doebereinerae; OX = 92933 GN=tgt PE=3 SV=1
MTGIGFELLATDGRARRGRVTTAHGSIETPAFMPVGTAATVKAMTTDAVASTGAEILLGNTYHLMLRPTAERVAQLGGLHRFMNWDKPILTDSGGFQVMSLSDLRTMSEEGVTFKSHLDGSRHHLTPERSIQIQHLLDSNITMCLDECTPFPATEAQAESSMRLSMRWARRSKDAFVERPGYGLFGIVQGSVYPELRAESVAALSDIGFDGYAIGGLAVGEGQETMFTVLDFTEPAMLKQRPRYLMGVGRPSDLIGAVRRGVDMFDCVMPTRSGRTGQAFVRRGTINIRNARHAHDDRPLDAECGCPACRSYGRGYLHHLFKANEMLGPMLLTWHNLHYYQDLMREMRGAIAEGRFEQVASALEARLTEGDVEATTDPIAKPPKPPKQNRPPKPEAKTEAAAETKDTTDEQ

SEQ ID NO: 51971 - protein, 404 aa, unidentified
  source 1..404: note = Azospirillum humicireducens
  REGION 1..404: note = tr|A0A168Y6Q7|A0A168Y6Q7_9PROT Queuine tRNA-ribosyltransferase OS=Azospirillum humicireducens; OX = 1226968 GN=tgt PE=3 SV=1
MTGIGFDLLATDGRARRGRVTTAHGTIETPAFMPVGTAATVKAMTTDAVASTGAEILLGNTYHLMLRPTAERVAQLGGLHRFMNWDKPILTDSGGFQVMSLSDLRTMSEEGVTFKSHLDGSRHHLTPERSIQIQHMLDSNITMCLDECTPFPATEAQAESSMRLSMRWARRSKDAFVERPGYGLFGIVQGGIYPEQRAESVAALTDIGFDGYAIGGLAVGEGQETMFRVLDFTEPLMVKDRPRYLMGVGRPSDLIGAVRRGVDMFDCVMPTRSGRTGQAFVRRGTINIRNARHAHDERPLDSECGCPACRSYSRGYLHHLFKADEMLGPMLLTWHNLHYYQDLMRTMRQAIADGNFEEVAGAMEARLNEGDIEATVDPIAKPGKPPKQGRPPKKDRVAEDKTDD

SEQ ID NO: 51972 - protein, 404 aa, Azospirillum lipoferum
  REGION 1..404: note = tr|A0A5A9GV11|A0A5A9GV11_AZOLI Queuine tRNA-ribosyltransferase OS=Azospirillum lipoferum OX=193; GN = tgt PE=3 SV=1
MTGIGFDLLATDGRARRGRVTTAHGTIETPAFMPVGTAATVKAMTTDAVASTGAEILLGNTYHLMLRPTAERVAQLGGLHRFMNWDKPILTDSGGFQVMSLSDLRTMSEEGVTFKSHLDGSRHHLTPERSIQIQHMLDSNITMCLDECTPFPATEAQAESSMRLSMRWARRSKDAFVERPGYGLFGIVQGSVYPEQRAESVAALTDIGFDGYAIGGLAVGEGQETMFRVLDFTEPLMVKDRPRYLMGVGRPSDLIGAVRRGVDMFDCVMPTRSGRTGQAFVRSGTINIRNARHAHDERPLDAECSCPACRSYSRGYLHHLFKADEMLGPMLLTWHNLHYYQDVMRTMRQAIENGNFEEVASAMETRLNEGDIEATVDPIAKPGKPPKQGRPPKAERVAEEKTDD

SEQ ID NO: 51973 - protein, 431 aa, Azospirillum lipoferum
  REGION 1..431: note = tr|G7Z201|G7Z201_AZOL4 Queuine tRNA-ribosyltransferase OS=Azospirillum lipoferum (strain 4B) OX=862719 GN=tgt PE=3 SV=1
MTGIGFDLLATDGRARRGRVTTAHGTIETPAFMPVGTAATVKAMTTDAVASTGAEILLGNTYHLMLRPTAERVAQLGGLHRFMNWNKPILTDSGGFQVMSLSDLRTMSEEGVTFKSHLDGSRHHLTPERSIQIQHMLDSNITMCLDECTPFPATEAQAESSMRLSMRWARRSKDAFVERPGYGLFGIVQGGIYPEQRAESVAALTDIGFDGYAIGGLAVGEGQETMFRVLDFTEPLMVKDRPRYLMGVGRPSDLIGAVRRGVDMFDCVMPTRSGRTGQAFVRRGTINIRNARHAHDERPLDAECGCPACRSYSRGYLHHLFKADEMLGPMLLTWHNLHYYQDVMRTMRQAIADGNFEEVAGAMEARLNEGDIEATVDPIAKPGKPPKQGRPPKAGKDSDPPKAGKDSAPPKAGKDSAPPKIGREAEEKTDD

SEQ ID NO: 51974 - protein, 413 aa, Azospirillum oryzae
  REGION 1..413: note = tr|A0A1X7H7I4|A0A1X7H7I4_9PROT Queuine tRNA-ribosyltransferase OS=Azospirillum oryzae OX=286727; GN = tgt PE=3 SV=1
MTGIGFDLLATDGRARRGRVTTAHGTIETPAFMPVGTAATVKAMTTDAVASTGAEILLGNTYHLMLRPTAERVAQLGGLHRFMNWDKPILTDSGGFQVMSLSDLRTMSEEGVTFKSHLDGSRHHLTPERSIQIQHMLDSNITMCLDECTPFPATEAQAESSMRLSMRWARRSKDAFVERPGYGLFGIVQGSVYPDLRAESVAALSDIGFDGYAIGGLAVGEGQETMFRVLDFTEPLMVKDRPRYLMGVGRPSDLIGAVRRGVDMFDCVMPTRSGRTGQAFVRRGTINIRNARHAHDERPLDAECGCPACRSYSRGYLHHLFKADEMLGPMLLTWHNLHYYQDVMRTMRQAIEDGNFEEVASAMESRMNDGDIEATVDPIAKPGKPPKQGRPPKAGKDSDPPKAERVAEEKTDD

SEQ ID NO: 51975 - protein, 413 aa, Azospirillum oryzae
  REGION 1..413: note = tr|A0A5A9G5J0|A0A5A9G5J0_9PROT Queuine tRNA-ribosyltransferase OS=Azospirillum oryzae OX=286727; GN = tgt PE=3 SV=1
MTGIGFDLLATDGRARRGRVTTAHGTIETPAFMPVGTAATVKAMTTDAVASTGAEILLGNTYHLMLRPTAERVAQLGGLHRFMNWDKPILTDSGGFQVMSLSDLRTMSEEGVTFKSHLDGSRHHLTPERSIQIQHMLDSNITMCLDECTPFPATEAQAESSMRLSMRWARRSKDAFVERPGYGLFGIVQGSVYPELRAESVAALSDIGFDGYAIGGLAVGEGQETMFRVLDFTEPLMVKDRPRYLMGVGRPSDLIGAVRRGVDMFDCVMPTRSGRTGQAFVRRGTINIRNARHAHDERPLDADCNCPTCRSYSRGYLHHLFKADEILGPMLLTWHNLHYYQDVMRTMRQAIEDGNFEEIASAMEARMNEGDIEATVDPIAKPGKPPKQGRPPKAGKDSDPPKAERVAEEKTDD

SEQ ID NO: 51976 - protein, 431 aa, unidentified
  source 1..431: note = Azospirillum palustre
  REGION 1..431: note = tr|A0A2B8B3P8|A0A2B8B3P8_9PROT Queuine tRNA-ribosyltransferase OS=Azospirillum palustre; OX = 2044885 GN=tgt PE=3 SV=1
MTGIGFDFLATDGRARRGRLTTAHGTIETPAFMPVGTAATVKAMTTDAVASTGAEILLGNTYHLMLRPTAERVAQLGGLHRFMNWDKPILTDSGGFQVMSLSDLRTMSEEGVTFKSHLDGSRHHLTPERSIQIQHMLDSNITMCLDECTPFPATEAQAEASMRLSMRWARRSKDAFVERPGYGLFGIVQGSVYPEQRAESVAALTDIGFDGYAIGGLAVGEGQETMFRVLDFTEPLMVKDRPRYLMGVGRPSDLIGAVRRGVDMFDCVMPTRSGRTGQAFVRRGTINIRNARHAHDERPLDAECGCPTCRSYSRGYLHHLFKADEMLGPMLLTWHNLHYYQDVMRTMRQAIADGTFEEVAGAMEARMNEGDIEATVDPIAKPGKPPKQGRPPKAGKDSAPPKAGEDSAPPKADKDSAPPEAERVAEEKTDE

SEQ ID NO: 51977 - protein, 431 aa, Azospirillum sp.
  REGION 1..431: note = tr|A0A2U1WH96|A0A2U1WH96_9PROT Queuine tRNA-ribosyltransferase OS=Azospirillum sp. TSA6c; OX = 709813 GN=tgt PE=3 SV=1
MTGIGFDLLATDGRARRGRVTTAHGTIETPAFMPVGTAATVKAMTTDAVASTGAEILLGNTYHLMLRPTAERVAQLGGLHRFMNWDKPILTDSGGFQVMSLSDLRTMSEEGVTFKSHLDGSRHHLTPERSIQIQHMLDSNITMCLDECTPFPATEAQAESSMRLSMRWARRSRDAFVERPGYGLFGIVQGSIYPEQRAESVAALTDIGFDGYAIGGLAVGEGQETMFRVLDFTEPLMVKDRPRYLMGVGRPSDLIGAVRRGVDMFDCVMPTRSGRTGQAFVRRGTINIRNARHAHDERPLDAECGCPTCRSYSRGYLHHLFKADEMLGPMLLTWHNLHYYQDVMRTMRQAIADGNFEKVAGAMEARMNEGDIEATVDPIAKPGKPPKQGRPPKAGKDSVPPKADKDNAPPKADKDSAPPEAERVAEENTDE

SEQ ID NO: 51978 - protein, 413 aa, Azospirillum sp.
  REGION 1..413: note = tr|A0A2U1XAJ9|A0A2U1XAJ9_9PROT Queuine tRNA-ribosyltransferase OS=Azospirillum sp. TSH20; OX = 652754 GN=tgt PE=3 SV=1
MTGIGFDLLATDGRARRGRVTTAHGTIETPAFMPVGTAATVKAMTTDAVASTGAEILLGNTYHLMLRPTAERVAQLGGLHRFMNWNKPILTDSGGFQVMSLSDLRTMSEEGVTFKSHLDGSLHHLTPERSIQIQHMLDSNITMCLDECTPFPATEAQAESSMRLSMRWARRSKDAFVERPGYGLFGIVQGSVYPELRAESVAALSDIGFDGYAIGGLAVGEGQETMFRVLDFTEPLMVKDRPRYLMGVGRPSDLIGAVRRGVDMFDCVMPTRSGRTGQAFVRRGTINIRNARHAHDERPLDADCTCPACRSYSRGYLHHLFKADEMLGPMLLTWHNLHYYQDVMRTMRQAIEDGNFEEVASAMEARMNEGDIEATVDPIAKPGKPPKQGRPPKAGKDSDPPKAERVAEEKTDD

SEQ ID NO: 51979 - protein, 404 aa, Azospirillum thiophilum
  REGION 1..404: note = tr|A0A0F2KYG4|A0A0F2KYG4_9PROT Queuine tRNA-ribosyltransferase OS=Azospirillum thiophilum; OX = 528244 GN=tgt PE=3 SV=1
MTGIGFDLLATDGRARRGRVTTAHGTIETPAFMPVGTAATVKAMTTDAVASTGAEILLGNTYHLMLRPTAERVAQLGGLHRFMNWDKPILTDSGGFQVMSLSDLRTMSEEGVTFKSHLDGSRHHLTPERSIQIQHMLDSNVTMCLDECTPFPATEAQAESSMRLSMRWARRSKDAFVERPGYGLFGIVQGGIYPEQRAESVAALTDIGFDGYAIGGLAVGEGQETMFRVLDFTEPLMVKDRPRYLMGVGRPSDLIGAVRRGVDMFDCVMPTRSGRTGQAFVRRGTINIRNARHAHDERPLDADCGCPTCRSYGRGYLHHLFKADEMLGPMLLTWHNLHYYQDLMRTMRQAIADGNFEEVAGTMEARLTEGDVEATLDPIAKPGKPPKQGRPPKKDRVEEDKTDE

SEQ ID NO: 51980 - protein, 374 aa, Azotobacter beijerinckii
  REGION 1..374: note = tr|A0A1I4C2J7|A0A1I4C2J7_9GAMM Queuine tRNA-ribosyltransferase OS=Azotobacter beijerinckii; OX = 170623 GN=tgt PE=3 SV=1
MSHMSFELLATDGKARRGRLTFPRGVVETPAFMPVGTYGTVKGMLPRDIEAIGAQIILGNTFHLWLRPGTEVIRRHGDLHDFMQWQGPILTDSGGFQVFSLGALRKIKEEGVYFASPVDGAKVFMGPEESMQVQRELGSDIVMIFDECTPYPADEEVARRSMELSLRWAKRSKIAHEGNPAALFGIVQGGMHEDLRLRSLEGLNEIGFDGLAIGGLSVGEPKEEMIRVLDFLPPQLPADKPRYLMGVGKPEDLVEGVRRGVDMFDCVMPTRNARNGHLFVDTGVLKIRNAVHRHDESPLDPACDCYTCKHFSRAYLHHLDKCGEMLGSMLNTIHNLRHYQRLMAGLREAIQQGKLAAFVDSFYARRGLPVPPLT

SEQ ID NO: 51981 - protein, 374 aa, Azotobacter beijerinckii
  REGION 1..374: note = tr|A0A1H6Y877|A0A1H6Y877_9GAMM Queuine tRNA-ribosyltransferase OS=Azotobacter beijerinckii; OX = 170623 GN=tgt PE=3 SV=1
MSHMSFELLATDGKARRGRLTFPRGVVETPAFMPVGTYGTVKGMLPRDIEAIGAQIILGNTFHLWLRPGTEVIRRHGDLHDFMQWQGPILTDSGGFQVFSLGALRKIKEEGVYFASPVDGAKVFMGPEESMQVQRELGSDIVMIFDECTPYPADEEVARRSMELSLRWAKRSKVAHEGNPAALFGIVQGGMHEDLRLRSLEGLEEIGFDGLAIGGLSVGEPKEEMIRVLDFLPPQLPADKPRYLMGVGKPEDLVEGVRRGVDMFDCVMPTRNARNGHLFVDTGVLKIRNAVHRHDESPLDPACDCYTCKHFSRAYLHHLDKCGEMLGSMLNTIHNLRHYQRLMAGLREAIQQGKLAAFVDSFYARRGLPVPPLT

SEQ ID NO: 51982 - protein, 371 aa, Azotobacter chroococcum
  REGION 1..371: note = tr|A0A0C4WKA3|A0A0C4WKA3_9GAMM Queuine tRNA-ribosyltransferase OS=Azotobacter chroococcum NCIMB 8003 OX=1328314 GN=tgt PE=3 SV=1
MSFELLATDGKARRGRLTFPRGVVETPAFMPVGTYGTVKGMLPRDIEAIGAQIILGNTFHLWLRPGTEVIRRHGDLHDFMQWQGPILTDSGGFQVFSLGALRKIKEEGVYFASPVDGAKVFMGPEESMQVQRELGSDIVMIFDECTPYPADEEVARRSMELSLRWAKRSKVAHEGNPAALFGIVQGGMHEDLRLRSLEGLEEIGFDGLAIGGLSVGEPKEEMIRVLDFLPPRLPADKPRYLMGVGKPEDLVEGVRRGIDMFDCVMPTRNARNGHLFVDTGVLKIRNAVHRHDESPLDPACDCYTCKHFSRAYLHHLDKCGEMLGSMLNTIHNLRHYQRLMAGLREAIQQGKLAAFVDTFYARRGLPVPPLT

SEQ ID NO: 51983 - protein, 371 aa, Azotobacter chroococcum; identical to SEQ ID NO: 51982
  REGION 1..371: note = tr|A0A4Q9VLM7|A0A4Q9VLM7_9GAMM Queuine tRNA-ribosyltransferase OS=Azotobacter chroococcum OX=353; GN = tgt PE=3 SV=1

SEQ ID NO: 51984 - protein, 371 aa, Azotobacter vinelandii
  REGION 1..371: note = sp|C1DE76|TGT_AZOVD Queuine tRNA-ribosyltransferase; OS = Azotobacter vinelandii (strain DJ / ATCC BAA-1303); OX = 322710 GN=tgt PE=3 SV=1
MTFELLATDGKARRGRLTFPRGVVETPAFMPVGTYGTVKGMLPRDIEAIGAQIILGNTFHLWLRPGTEVIRRHGDLHDFMQWHGPILTDSGGFQVFSLGALRKIREEGVYFASPVDGAKVFMGPEESMRVQRDLGSDVVMIFDECTPYPADEEVARRSMELSLRWAGRSKIAHEGNPAALFGIVQGGMHEDLRLRSLDGLEEIGFDGLAIGGLSVGEPKEEMIRVLDFLPPRLPADKPRYLMGVGKPEDLVEGVRRGIDMFDCVMPTRNARNGHLFVDSGVLKIRNAVHRHDESPLDPACDCHTCKHFSRAYLHHLDKCGEMLGSMLNTIHNLRHYQRLMTGLREAIQQGKLAAFVDTFYARRGLPVPPLT

SEQ ID NO: 51985 - protein, 371 aa, Azotobacter vinelandii; identical to SEQ ID NO: 51984
  REGION 1..371: note = tr|M9YDF8|M9YDF8_AZOVI Queuine tRNA-ribosyltransferase OS=Azotobacter vinelandii CA6; OX = 1283331 GN=tgt PE=3 SV=1

SEQ ID NO: 51986 - protein, 381 aa, unidentified; identical to SEQ ID NO: 51256
  source 1..381: note = Bacillaceae bacterium
  REGION 1..381: note = tr|A0A3E0JTL3|A0A3E0JTL3_9BACI Queuine tRNA-ribosyltransferase OS=Bacillaceae bacterium; OX = 1889774 GN=tgt PE=3 SV=1

SEQ ID NO: 51987 - protein, 379 aa, unidentified
  source 1..379: note = Bacillaceae bacterium
  REGION 1..379: note = tr|A0A271MA89|A0A271MA89_9BACI Queuine tRNA-ribosyltransferase OS=Bacillaceae bacterium SAOS 7; OX = 2015052 GN=tgt PE=3 SV=1
MSAIKYELIKTCKQTGARLGRVHTPHGSFETPIFMPVGTLATVKTMSPEDLKEMGANIILSNTYHLWLRPGHDIVQEAGGLHKFMNWDRPILTDSGGFQVFSLSEFRKIEEEGVHFRNHLNGDKLFLSPEKAMEIQNALGSDIMMAFDECPPYPAEYDYMKRSVERTSRWAERCLKAHARPEDQGLFGIVQGGEYEELRRQSAADLVSMDFPGYAIGGLSVGEPKDVMNRVLDFTTPFLPADKPRYLMGVGSPDSLIDGAIRGVDMFDCVLPTRIARNGTLMTSEGRLVVKNAKYARDFGPLDENCDCYTCRNYSRAYIRHLIRTNETFGIRLTTYHNLYFLIKLMEQVRQAIREDRLGDFRDEFFEAYGFNRPDAKNF

SEQ ID NO: 51988 - protein, 381 aa, unidentified
  source 1..381: note = Bacilli bacterium
  REGION 1..381: note = tr|A0A0K0GDB7|A0A0K0GDB7_9FIRM Queuine tRNA-ribosyltransferase OS=Bacilli bacterium VT-13-104; OX = 1637974 GN=tgt PE=3 SV=1
MKLTPITYELIKIDKQTGARLGRVHTPHGSFDTPTFMPVGTLATVKTMSPEELESMNANIILSNTYHLWLRPGEDIIREAGGLHKFMNWDGAILTDSGGFQVFSLSDMREIKEEGVHFRNHLNGEKLFLSPEKAMEIQNALGSDIMMAFDECPPYPATHEYMKSSVERTSRWAERCLEAHKRKDVQGLFGIVQGGEFEDLRKQSANDLISLDFPGYAIGGLSVGEPKDVMNRVLEFTTPLLPANKPRYLMGVGSPDSLIDGAIRGVDMFDCVLPTRIARNGTCMTSTGRLVVRNAKYARDFRPIDENCDCHVCKNYSRAYIRHLVKCNETFGFRLTTYHNLYFLLKLMEQVRFAISEDRLGDFREEFFEQYGFNKPDAKNF

SEQ ID NO: 51989 - protein, 381 aa, Bacillus aerius
  REGION 1..381: note = tr|A0A3A9DXS6|A0A3A9DXS6_9BACI Queuine tRNA-ribosyltransferase OS=Bacillus aerius OX=293388; GN = tgt PE=3 SV=1
MSQQPIRYEFIKACKQTGARLGRVHTPHGSFETPVFMPVGTLATVKTMAPEELKEMGAGIILSNTYHLWLRPGHDIVKEAGGLHQFMNWDRAILTDSGGFQVFSLSEFRKIEEEGVHFRNHLNGDKLFLSPEKAMDIQNALGSDIMMAFDECPPYPAEYDYMKRSVERTSRWAERCLKAHKRPDEQGLFGIVQGGEYENLRKQSAKDLISLDFPGYAIGGLSVGEPKDVMNRVLEFTTPLLPADKPRYLMGVGSPDSLIDGAIRGVDMFDCVLPTRIARNGTLMTSEGRLVVKNAKYERDFRPIDEQCDCYTCRNYSRAYIRHLIRCNETFGIRLTSYHNLYFLLKLMGQVRDAIREDRLGDFREEFFERYGFNKPNAKSF

SEQ ID NO: 51990 - protein, 381 aa, Bacillus aerophilus
  REGION 1..381: note = tr|A0A410KM96|A0A410KM96_9BACI Queuine tRNA-ribosyltransferase OS=Bacillus aerophilus OX=293389; GN = tgt PE=3 SV=1
MSQLPIRYEFIKSCKQTGARLGRVHTPHGSFETPVFMPVGTLATVKTMAPEELKAMEAGIILSNTYHLWLRPGHDIVKEAGGLHKFMNWDRAILTDSGGFQVFSLSEFRKIEEEGVHFRNHLNGDKLFLSPEKAMEIQNALGSDIMMAFDECPPYPAEYDYMKRSVERTSRWAERCLTAHQRPEDQGLFGIVQGGEYEELRKQSAKDLVSLDFPGYAIGGLSVGEPKDVMNRVLEFTTPYLPADKPRYLMGVGSPDSLIDGAIRGVDMFDCVLPTRIARNGTLMTSEGRLVVKNAKYERDFRPIDENCDCYTCKNYTRAYIRHLIRTNETFGIRLTTYHNLHFLLKLMEQVREAIREDRLGDFREEFFERYGFNKPNAKNF

SEQ ID NO: 51991 - protein, 379 aa, Bacillus akibai
  REGION 1..379: note = tr|W4QT76|W4QT76_BACA3 Queuine tRNA-ribosyltransferase OS=Bacillus akibai (strain ATCC 43226 / DSM 21942 / JCM 9157 / 1139) OX=1236973 GN=tgt; PE = 3 SV=1
MTAITYEHIKTCKQSGARLGKVHTPHGTFETPIFMPVGTLATVKTMSPEDLKDMNAQIILSNTYHLWLRPGHDIIQEAGGLHKFMNWDKPILTDSGGFQVFSLSDLRKIEEEGVHFRNHLNGDKLFLSPEKAMQIQNALGSDIMMAFDECPPYPAEHDYMKKSVERTSRWAERCLSAHERPADQGLFGIVQGGEYEDLRKQSAEDLVSLDFPGYAVGGLSVGEPKHVMNRVLEFTTPHLPVNKPRYLMGVGSPDALIDGAIRGIDMFDCVLPTRIARNGTLMTSTGRLVVRNAKYARDFRPLDENCDCHVCQNYSRAYIRHLVKCEETFGFRLTSYHNLYFLLKLMEQVRQAIREDRLLDFREEFFEQYGFNKPNAKNF

SEQ ID NO: 51992 - protein, 379 aa, unidentified
  source 1..379: note = Bacillus albus
  REGION 1..379: note = tr|A0A1J9UI85|A0A1J9UI85_9BACI Queuine tRNA-ribosyltransferase OS=Bacillus albus OX=2026189; GN = tgt PE=3 SV=1
MTAIRYEFIKTCKQTGARLGRVHTPHGSFDTPTFMPVGTLATVKTMSPEELKAMDSGIILSNTYHLWLRPGHEIIREAGGLHKFMNWDRAILTDSGGFQVFSLSDFRRIEEEGVHFRNHLNGDKLFLSPEKAMEIQNALGSDIMMAFDECPPFPATFEYMKKSVERTSRWAERCLKAHERPQDQGLFGIVQGGEFEELRRQSAKDLVSMDFPGYAVGGLSVGEPKDIMNRVLEFTTPLLPDNKPRYLMGVGSPDSLIDGAIRGIDMFDCVLPTRIARNGTCMTSEGRLVVKNAKFARDFGPLDPNCDCYTCKNYSRAYIRHLMKCDETFGIRLTSYHNLHFLLNLMEQVRQAIREDRLGDFREEFFEQYGFNKPNAKNF

SEQ ID NO: 51993 - protein, 379 aa, Bacillus alcalophilus
  REGION 1..379: note = tr|A0A094WI64|A0A094WI64_BACAO Queuine tRNA-ribosyltransferase OS=Bacillus alcalophilus ATCC 27647 = CGMCC 1.3604 OX=1218173 GN=tgt PE=3 SV=1
MAAVTYELIKTCKQSGARLGKVHTPHGTIETPIFMPVGTLATVKTMSPEDLYDMNAQIILSNTYHLWLRPGHKIIEEAGGLHQFMNWKRPILTDSGGFQVFSLSDLRKIEEEGVHFRNHLSGEKLFLSPEEAMNIQNSLGSDIMMAFDECPPYPADYDYMKQSVERTSRWAERCLTAHKRPEDQGLFGIIQGGEYEELRKQSAADLISLDFPGYAIGGLSVGEPKDVMNRVLEFTTPLMPANKPRYLMGVGSPDSLIDGAIRGVDMFDCVLPTRIARNGTCMTSEGRLVVRNAKYARDFRPLDENCDCHVCQNYSRAYIRHLVKCEETFGFRLTSYHNLYFLLNLMEQVKQAIREDRLLDFREEFFEQYGFNKPNAKNF

SEQ ID NO: 51994 - protein, 381 aa, Bacillus altitudinis
  REGION 1..381: note = tr|A0A5K1NCW7|A0A5K1NCW7_9BACI tRNA-guanine transglycosylase OS=Bacillus altitudinis OX=293387; GN = B4133_2659 PE=4 SV=1
MSQLPIRYEFIKSCKQTGARLGRVHTPHGSFETPVFMPVGTLATVKTMAPEELKAMEAGIILSNTYHLWLRPGHDIVKEAGGLHKFMNWDRAILTDSGGFQVFSLSEFRKIEEEGVHFRNHLNGDKLFLSPEKAMEIQNALGSDIMMAFDECPPYPAEYDYMKRSVERTSRWAERCLTAHQRPDDQGLFGIVQGGEYEELRKQSAKDLVSLDFPGYAIGGLSVGEPKDVMNRVLEFTTPYLPADKPRYLMGVGSPDSLIDGAIRGVDMFDCVLPTRIARNGTLMTSEGRLVVKNAKYERDFRPIDENCDCYTCKNYTRAYIRHLIRTNETFGIRLTTYHNLHFLLKLMEQVREAIREDRLGDFREEFFERYGFNKPNAKNF

SEQ ID NO: 51995 - protein, 381 aa, Bacillus altitudinis; identical to SEQ ID NO: 51990
  REGION 1..381: note = tr|A0A5D4PQI8|A0A5D4PQI8_9BACI Queuine tRNA-ribosyltransferase OS=Bacillus altitudinis OX=293387; GN = tgt PE=3 SV=1

SEQ ID NO: 51996 - protein, 381 aa, Bacillus amyloliquefaciens
  REGION 1..381: note = tr|A0A4V7TR92|A0A4V7TR92_BACAM Queuine tRNA-ribosyltransferase OS=Bacillus amyloliquefaciens; OX = 1390 GN=tgt PE=3 SV=1
MAEQPIRYEFIKECKQTGARLGRVHTPHGSFETPVFMPVGTLATVKTMSPDELKSMDAGIILSNTYHLWLRPGHDIVKEAGGLHQFMNWDRAILTDSGGFQVFSLSKFRNIEEEGVHFRNHLNGDKLFLSPEKAMEIQNALGSDIMMAFDECPPYPAEYDYMKRSVERTSRWAERCLKAHGRSDEQGLFGIVQGGEYEDLRTQSAKDLVSLDFPGYAIGGLSVGEPKHVMNRVLEFTTPLLPKDKPRYLMGVGSPDALIDGAIRGVDMFDCVLPTRIARNGTVFTNEGRLNMKNAKYERDFRPIDEECSCHTCKNYSRAYIRHLIRCNETFGIRLTTYHNLHFLLHLMEQVRQAIREDRLGDFREEFFERYGYNKPNAKSF

SEQ ID NO: 51997 - protein, 379 aa, Bacillus amyloliquefaciens
  REGION 1..379: note = tr|A0A2S4ELK5|A0A2S4ELK5_BACAM Queuine tRNA-ribosyltransferase OS=Bacillus amyloliquefaciens; OX = 1390 GN=tgt PE=3 SV=1
MPAVTYEHIKTCKQSGARLGIVHTPHGSFETPMFMPVGTKATVKTMSPEELRQIEAKIILGNTYHLWLQPGNDIIKHAGGLHKFMNWNGPILTDSGGFQVFSLSNLRKISEEGVEFRHHTNGSKLFLSPEKSMEIQNDLGSDIMMAFDECPPMPSEYKYVKDSIERTTRWAERCLKAHARPEDQALFGIIQGGEYKDLREQSAKELVELDFPGYAIGGLSVGEPKPVMYEMVEHTEQFMPKDKPRYLMGVGSPDALIECSIRGMDMFDCVLPTRIARNGTCMTSNGRLVIKNAKFADDLRPLDENCDCYTCKNYSRAYIRHLIKAEETFGIRLTTIHNLHFLLKLMEDIRQAIREDRLLDFKAEFFEQYGLNVDNPKNF

SEQ ID NO: 51998 - protein, 379 aa, Bacillus anthracis; identical to SEQ ID NO: 51992
  REGION 1..379: note = sp|Q81LH2|TGT_BACAN Queuine tRNA-ribosyltransferase; OS = Bacillus anthracis OX=1392 GN=tgt PE=3 SV=1

SEQ ID NO: 51999 - protein, 379 aa, Bacillus anthracis; identical to SEQ ID NO: 51992
  REGION 1..379: note = sp|C3P9A4|TGT_BACAA Queuine tRNA-ribosyltransferase; OS = Bacillus anthracis (strain A0248) OX=592021 GN=tgt PE=3; SV = 1

SEQ ID NO: 52000 - protein, 379 aa, Bacillus aquimaris
  REGION 1..379: note = tr|A0A1J6VXY8|A0A1J6VXY8_9BACI Queuine tRNA-ribosyltransferase OS=Bacillus aquimaris OX=189382; GN = tgt PE=3 SV=1
MTAIKYEHIKTCKQTGARLGRVHTPHGSFETPVFMPVGTLATVKTMSPEDLKSMDAGIILSNTYHLWLRPGHEIIREAGGLHKFMNWDRAILTDSGGFQVFSLSKLRKIEEEGVHFRHHLNGDKLFLSPEKAMEIQNALGSDIMMAFDECPPYPAEYEYMKSSVERTSRWAERCLQAHQRPQDQGLFGIVQGGEYEELRKQSARDLVSLDFPGYAVGGLSVGEPKDVMNRVLEFTTPHLPDDKPRYLMGVGSPDSLIDGAIRGIDMFDCVLPTRIARNGTLMTSEGRLVVKNAKYARDFRPIDENCDCYTCKNYSRAYIRHLIKCDETFGIRLTTYHNLHFLLNLMEQVRQAIREDRLGDFREEFFEQYGFNRQDAKNF

SEQ ID NO: 52001 - protein, 379 aa, Bacillus aquimaris
  REGION 1..379: note = tr|A0A5D4U9E4|A0A5D4U9E4_9BACI Queuine tRNA-ribosyltransferase OS=Bacillus aquimaris OX=189382; GN = tgt PE=3 SV=1
MTAIRYEHFKTCKQTGARLGRVHTPHGSFDTPVFMPVGTLATVKTMSPEDLKAMEAGIILSNTYHLWLRPGHEIIKEAGGLHKFMNWDRAILTDSGGFQVFSLSEFRKIEEEGVHFRNHLNGDKLFLSPEKAMEIQNALGSDIMMAFDECPPYPAEHEYMKRSVERTSRWAERCLEAHQRPQDQGLFGIVQGGEYEDLRRQSAKDLVSLDFPGYAVGGLSVGEPKDVMNKVLEFTTPLLPDNKPRYLMGVGSPDALIDGAIRGIDMFDCVLPTRIARNGTLMTSKGRLVVKNAKFARDFNPIDENCDCYTCRNYSRAYIRHLIKSDESFGIRLTTYHNLHFLLKLMEQVRQAIREDRLGDFREEFFEAYGYNRPDAKNF

SEQ ID NO: 52002 - protein, 379 aa, Bacillus aryabhattai
  REGION 1..379: note = tr|A0A1G6M4J1|A0A1G6M4J1_9BACI Queuine tRNA-ribosyltransferase OS=Bacillus aryabhattai B8W22; OX = 1358420 GN=tgt PE=3 SV=1
MTAIRYEHIKTCKQTGARLGIVHTPHGSFETPIFMPVGTLATVKTMSPEDLKAMGAGIILSNTYHLWLRPGHEIVKKAGGLHKFMNWDRPILTDSGGFQVFSLSDLRRIEEEGVHFRNHLNGDKLFLSPEKAMDIQNALGSDIMMAFDECPPYPAEYDYLKRSVERTSRWAERCLEAHSRPQDQGLFGIVQGGEFEDLRRQSAADLVSMDFPGYAVGGLSVGEPKDVMNRVLEFTTPYLPTDKPRYLMGVGSPDSLIDGAIRGIDMFDCVLPTRIARNGTLMTSEGRLVVKNAKYAEDFGPIDPNCDCYTCQNYSRAYIRHLIRCNETFGIRLTSYHNLYFLLNLMEQVREAIREDRLGDFRDEFFEKYGFNGPDAKNF

SEQ ID NO: 52003 - protein, 379 aa, Bacillus aryabhattai; identical to SEQ ID NO: 52002
  REGION 1..379: note = tr|A0A0J6Q716|A0A0J6Q716_9BACI Queuine tRNA-ribosyltransferase OS=Bacillus aryabhattai OX=412384; GN = tgt PE=3 SV=1

SEQ ID NO: 52004 - protein, 379 aa, Bacillus asahii
  REGION 1..379: note = tr|A0A398BC49|A0A398BC49_9BACI Queuine tRNA-ribosyltransferase OS=Bacillus asahii OX=228899; GN = tgt PE=3 SV=1
MTAIRYEHIKTCKQTGARLGIVHTPHGSFETPAFMPVGTMATVKTMSPEELKQMGAGIILSNTYHLWLRPGHDIVKEAGGLHQFMNWDRPILTDSGGFQVFSLSDFRKIEEEGVHFRNHLNGDKLFLSPEKAMEIQNALGSDIMMAFDECPPFPATEEYMKKSVERTSRWAERCLKAHERPQDQGLFGIVQGGEYEHLRKQSAQDLISLDFPGYAIGGLSVGEPKDIMNRVLEFTTPLLPADKPRYLMGVGSPDSLIDGAIRGVDMFDCVLPTRIARNGTLMTSNGRLVVKNAKYARDFGPLDENCTCHVCQNYSRAYIRHLIKCDETFGIRLTTYHNLHFLLNLMEQVRQAIREDRLGDFREEFFEQYGFNKPNAKNF

SEQ ID NO: 52005 - protein, 381 aa, Bacillus atrophaeus
  REGION 1..381: note = tr|A0A0H3E4I7|A0A0H3E4I7_BACA1 Queuine tRNA-ribosyltransferase OS=Bacillus atrophaeus (strain 1942) OX=720555 GN=tgt PE=3 SV=1
MAEQPIRYEFIKECKQTGARLGRVHTPHGSFDTPVFMPVGTLATVKTMSPDELKAMDAGIILSNTYHLWLRPGHDIVKEAGGLHKFMNWDRAILTDSGGFQVFSLSKFRNIEEEGVHFRNHLNGDKLFLSPEKAMEIQNALGSDIMMAFDECPPYPAEYDYMKRSVERTSRWAERCLEAHSRSDEQGLFGIVQGGEYEELRTQSAKDLISLDFPGYAIGGLSVGEPKDVMNRVLEFTTPLLPKDKPRYLMGVGSPDALIDGALRGVDMFDCVLPTRIARNGTVFTAEGRLNMKNAKFERDFRPIDEECDCHTCKNYSRAYIRHLIRCNETFGIRLTTYHNLHFLLNLMEQVRQAIREDRLGDFREEFFERYGYNKPNAKSF

SEQ ID NO: 52006 - protein, 381 aa, Bacillus atrophaeus; identical to SEQ ID NO: 52005
  REGION 1..381: note = tr|A0A080ULK6|A0A080ULK6_BACAT Queuine tRNA-ribosyltransferase OS=Bacillus atrophaeus OX=1452; GN = tgt PE=3 SV=1

SEQ ID NO: 52007 - protein, 381 aa, unidentified
  source 1..381: note = Bacillus australimaris
  REGION 1..381: note = tr|A0A0P7FT66|A0A0P7FT66_9BACI Queuine tRNA-ribosyltransferase OS=Bacillus australimaris; OX = 1326968 GN=tgt PE=3 SV=1
MSQLPIRYEFIKSCKQTGARLGRVHTPHGSFETPVFMPVGTLATVKTMAPEELKAMDAGIILSNTYHLWLRPGHDIVKEAGGLHKFMNWDRAILTDSGGFQVFSLSEFRKIEEEGVHFRNHLNGDKLFLSPEKAMDIQNALGSDIMMAFDECPPYPAEYDYMKRSVERTSRWAERCLTAHQRPEDQGLFGIVQGGEYEELRKQSAKDLVSLDFPGYAIGGLSVGEPKDVMNRVLEFTTPFLPADKPRYLMGVGSPDSLIDGAIRGVDMFDCVLPTRIARNGTLMTSEGRLVVKNAKYERDFRPIDENCDCYTCKNYTRAYIRHLIRTNETFGIRLTTYHNLHFLLKLMEQVREAIREDRLGDFREEFFERYGFNKPNAKNF

SEQ ID NO: 52008 - protein, 379 aa, Bacillus azotoformans
  REGION 1..379: note = tr|K6D9F3|K6D9F3_BACAZ Queuine tRNA-ribosyltransferase OS=Bacillus azotoformans LMG 9581; OX = 1131731 GN=tgt PE=3 SV=1
MTAIRYELIKTCKQTGARLGRVTTPHSTFETPVFMPVGTLATVKTMSPDELKEMGAGIILSNTYHLWLRPGEDIVQEAGGLHSFMNWDGSILTDSGGFQVFSLSDLRDITEEGVHFRNHLNGEKLFLSPEKAMQIQNALGSDIMMAFDECPPYPATPEYMKNSVERTSRWAERCLEAHSRKETQGLFGIVQGGEYEEFRKQSAKDLVSLDFPGYAVGGLSVGEPKEVMNRVLEFTTPWLPENKPRYLMGVGSPDSLIDGSIRGIDMFDCVLPTRIARNGTVMTSVGRLVVRNAKYARDFTPLDPNCDCKVCKNYSRAYIRHLIRCNETFGIRLTTYHNLYFLLKLMENVRQAIREDRLGDFREEFFEQYGFNRPDAKNF

SEQ ID NO: 52009 - protein, 379 aa, Bacillus azotoformans
  REGION 1..379: note = tr|A0A072NQ81|A0A072NQ81_BACAZ Queuine tRNA-ribosyltransferase OS=Bacillus azotoformans MEV2011; OX = 1348973 GN=tgt PE=3 SV=1
MTAIRYELIKTCKQTGARLGRVTTPHSTFETPVFMPVGTLATVKTMSPDELAEMGAGIILSNTYHLWLRPGEDIVKEAGGLHSFMNWNGSILTDSGGFQVFSLSDLRDITEEGVHFRNHLNGEKLFLSPEKAMQIQNALGSDIMMAFDECPPYPATPEYMKNSVERTSRWAERCLEAHSRKETQGLFGIVQGGEYEEFRKQSAKDLTSLDFPGYAVGGLSVGEPKEVMNRVLEFTTPWLPENKPRYLMGVGSPDSLIDGSIRGIDMFDCVLPTRIARNGTVMTSVGRLVVRNAKYARDFTPLDPNCDCKVCKNYSRAYIRHLIRCNETFGIRLTTYHNLYFLLKLMENVRQAIREDRLGDFREEFFEQYGFNRPDAKNF

SEQ ID NO: 52010 - protein, 379 aa, unidentified
  source 1..379: note = Bacillus bacterium
  REGION 1..379: note = tr|A0A3D0E233|A0A3D0E233_9BACI Queuine tRNA-ribosyltransferase OS=Bacillus bacterium OX=2053512; GN = tgt PE=3 SV=1
MPAITYELIKTCKQTGARLGMIHTPHGSYETPMFMPVGTLATVKTMSPEELKEMGAGIILSNTYHLWLRPGEDIVEEAGGLHKFMNWDQGILTDSGGFQVFSLSEFREIEEEGVHFRNHLNGDKLFLSPEKAMSVQNSLGSDIMMAFDECPPYPASHEYMKKSVERTSRWAERCLKAHERPEDQGLFGIVQGGEYEDLRKQSAKELVSLDFPGYAIGGLSVGEPKDVMNRVLEFTTPLLPSDKPRYLMGVGSPDSLVDGAIRGVDMFDCVLPTRIARNGTLMTSQGRLVVKNAAYARDFGPLDENCDCYACRNYSRAYIRHLIKCNETLGIRLTTYHNLYFLLKLMKQVRDAIKEDRLGDFRKEFFERYGFNRPDAKNF

SEQ ID NO: 52011 - protein, 379 aa, unidentified
  source 1..379: note = Bacillus bacterium
  REGION 1..379: note = tr|A0A506QDD5|A0A506QDD5_9BACI Queuine tRNA-ribosyltransferase OS=Bacillus bacterium OX=2053512; GN = tgt PE=3 SV=1
MTAIRYEFIKTCKQTGARLGRVHTPHGSFDTPTFMPVGTLATVKTMSPEELKAMDSGIILSNTYHLWLRPGHEIVREAGGLHKFMNWDRAILTDSGGFQVFSLSDFRRIEEEGVHFRNHLNGDKLFLSPEKAMEIQNALGSDIMMAFDECPPFPATFEYMKKSVERTSRWAERCLKAHERPQDQGLFGIVQGGEFEELRRQSAKDLVSMDFPGYAIGGLSVGEPKDIMNRVLEFTTPLLPDDKPRYLMGVGSPDSLIDGAIRGVDMFDCVLPTRIARNGTCMTSEGRLVVKNAKFARDFGPLDPNCDCYTCKNYSRAYIRHLMKCDETFGIRLTSYHNLHFLLNLMEQVRQAIREDRLGDFREEFFEQYGFNKPNAKNF

SEQ ID NO: 52012 - protein, 379 aa, Bacillus badius
  REGION 1..379: note = tr|A0A0C2XUP4|A0A0C2XUP4_BACBA Queuine tRNA-ribosyltransferase OS=Bacillus badius OX=1455 GN=tgt; PE = 3 SV=1
MPAIKYELIKTCKQTGARLGRVHTPHGSFETPVFMPVGTLATVKTMSPEELKEMGANIILSNTYHLWLRPGHEIVKEAGGLHKFMNWDRSILTDSGGFQVFSLSDFRKIEEEGVHFRNHLNGDKLFLSPEKAMEIQNALGSDIMMAFDECPPYPAEYDYMKRSVERTSRWAERCLNAHVRPEDQGLFGIVQGGEYEELRRQSANDLVSLDFPGYAIGGLSVGEPKDVMNRVLEFTTPLLPSHKPRYLMGVGSPDSLIDGAIRGVDMFDCVLPTRIARNGTLMTSEGRLVVKNAKYARDYGPLDENCDCYTCRNYSRAYIRHLIRCNETFGIRLTTYHNLYFLIKLMEQVREAIKEDRLGDFREEFFEAYGFNRPDAKNF

SEQ ID NO: 52013 - protein, 379 aa, Bacillus badius
  REGION 1..379: note = tr|A0A162X8V6|A0A162X8V6_BACBA Queuine tRNA-ribosyltransferase OS=Bacillus badius OX=1455 GN=tgt; PE = 3 SV=1
MPAIKYELIKTCKQTGARLGRVHTPHGSFETPVFMPVGTLATVKTMSPEELKEMGANIILSNTYHLWLRPGHEIVKEAGGLHRFMNWDRSILTDSGGFQVFSLSDFRKIEEEGVHFRNHLNGDKLFLSPEKAMEIQNALGSDIMMAFDECPPYPAEYDYMKRSVERTSRWAERCLNAHARPEDQGLFGIVQGGEYEELRRQSANDLVSLDFPGYAIGGLSVGEPKDVMNRVLEFTTPLLPSHKPRYLMGVGSPDSLIDGAIRGVDMFDCVLPTRIARNGTLMTSEGRLVVKNAKYARDYGPLDENCDCYTCRNYSRAYIRHLIRCNETFGIRLTTYHNLYFLIKLMEQVREAIKEDRLGDFREEFFEAYGFNRPDAKNF

SEQ ID NO: 52014 - protein, 379 aa, Bacillus bataviensis
  REGION 1..379: note = tr|K6DD14|K6DD14_9BACI Queuine tRNA-ribosyltransferase OS=Bacillus bataviensis LMG 21833; OX = 1117379 GN=tgt PE=3 SV=1
MTAIRYELIKTCKQTGARLGRVHTPHGSFDTPAFMPVGTLATVKTMSPEDLKEMGAGIILSNTYHLWLRPGQEIIKEAGGLHKFMNWDRAILTDSGGFQVFSLSEFRKIEEEGVHFRNHMSGEKLFLSPEKAMEIQNALGSDIMMAFDECPPFPATFEYMQKSVERTSRWAERCLKAHERTDDQGLFGIVQGGEYEELRKQSARDLTSLDFPGYAIGGLSVGEPKDIMNRMLEFTTPLLPSNKPRYLMGVGSPDSLIDGSIRGIDMFDCVLPTRIARNGTLMTSEGRLVVKNAKFAKDFGPLDPECDCYTCRNYSRAYIRHLIKCDETFGIRLTSYHNLYFLLRLMEKVRQAIMEDRLGDFREEFFERYGFNKPNAKNF

SEQ ID NO: 52015 - protein, 379 aa, Bacillus bataviensis
  REGION 1..379: note = tr|A0A561DGK7|A0A561DGK7_9BACI Queuine tRNA-ribosyltransferase OS=Bacillus bataviensis OX=220685; GN = tgt PE=3 SV=1
MTAIRYELIKTCKQTGARLGRVHTPHGSFDTPAFMPVGTLATVKTMSPEDLKEMGAGIILSNTYHLWLRPGHEIIKEAGGLHKFMNWDRAILTDSGGFQVFSLSEFRKIEEEGVHFRNHMSGEKLFLSPEKAMEIQNALGSDIMMAFDECPPFPATFEYMKKSVERTSRWAERCLNAHQRPQDQGLFGIVQGGEYEELRRQSANDLVSLDFPGYAVGGLSVGEPKDVMNRVLEFTTPMLPTNKPRYLMGVGSPDSLIDGAIRGIDMFDCVLPTRIARNGTLMTSTGRLVVKNAQFARDFGPLDPECDCYTCRNYSRAYIRHLIKCDETFGIRLTSYHNLYFLLRLMEKVRQAIMEDRLGDFREEFFERYGFNKPNAKNF

SEQ ID NO: 52016 - protein, 379 aa, Bacillus beveridgei
  REGION 1..379: note = tr|A0A1D7QU04|A0A1D7QU04_9BACI Queuine tRNA-ribosyltransferase OS=Bacillus beveridgei OX=632773; GN = tgt PE=3 SV=1
MSAVTYEHIKTCKQSGARLGKVHTPHGTFETPIFMPVGTLATVKTMSPEDLLGMNAQIILSNTYHLWLRPGEDIIKEAGGLHQFMNWHRPILTDSGGFQVFSLSDLRNITEEGVHFRNHLSGEKLFLSPEKAMRIQNDLGPDIMMAFDECPPYPAEHAYMKASVERTSRWAERCLEGHQRPQDQGLFGIIQGGEYEDLRRQSAEDLVSLDFPGYAIGGLSVGEPKDVMNQVLEFTTPFLPENKPRYLMGVGTADSLIDGAIRGIDMFDCVLPTRIARNGTLMTSEGRLVVRNAKFARDFRPLDENCDCYVCQNHSRAYIRHLIKANETLGLRLCSYHNLYFLLDLMEKVRGAIREDRLLDFREEFFEQYGFNKPNAKNF

SEQ ID NO: 52017 - protein, 379 aa, unidentified
  source 1..379: note = Bacillus bombysepticus
  REGION 1..379: note = tr|A0A023PBX1|A0A023PBX1_9BACI Queuine tRNA-ribosyltransferase OS=Bacillus bombysepticus str. Wang OX=1330043 GN=tgt PE=3 SV=1
MTAIRYEFIKTCKQTGARLGRVHTPHGSFDTPTFMPVGTLATVKTMSPEELKAMDSGIILSNTYHLWLRPGHEIIREAGGLHKFMNWDRAILTDSGGFQVFSLSDFRRIEEEGVHFRNHLNGDKLFLSPEKAMEIQNALGSDIMMAFDECPPFPATFEYMKKSVERTSRWAERCLKAHERPQDQGLFGIVQGGEYEELRRQSAKDLVSMDFPGYAVGGLSVGEPKDIMNRVLEFTTPLLPDNKPRYLMGVGSPDSLIDGAIRGIDMFDCVLPTRIARNGTCMTSEGRLVVKNAKFARDFGPLDPNCDCYTCKNYSRAYIRHLMKCDETFGIRLTSYHNLHFLLNLMEQVRQAIREDRLGDFREEFFEQYGFNKPNAKNF

SEQ ID NO: 52018 - protein, 379 aa, Bacillus boroniphilus
  REGION 1..379: note = tr|W4RHM7|W4RHM7_9BACI Queuine tRNA-ribosyltransferase OS=Bacillus boroniphilus JCM 21738; OX = 1294265 GN=tgt PE=3 SV=1
MSAIRYELIKTCKQTGARLGRVHTPHGSFETPVFMPVGTLATVKTMSPEELVQMGAGIILSNTYHLWLRPGHEIVKEAGGLHKFMNWDRAILTDSGGFQVFSLSEFRKIEEEGVHFRNHLNGDKLFLSPEKAMEIQNALGSDIMMAFDECPPYPAEYDYMKKSVERTSRWAERCLTAHQRPQDQGLFGIVQGGEYEELRKQSAKDLVSMDFPGYAVGGLSVGEPKDVMDRVLEFTTPWLPTDKPRYLMGVGSPDSLIDGAIRGIDMFDCVLPTRIARNGTLMTSEGRLVVKNAKFARDFGPLDPNCDCYTCKNYSRAYIRHLIKTDESFGIRLTSYHNLYFLLKLMEQVRQAIREDRLGDFREEFFEQYGYNKPNAKNF

SEQ ID NO: 52019 - protein, 379 aa, Bacillus butanolivorans
  REGION 1..379: note = tr|A0A0M0EZ71|A0A0M0EZ71_9BACI Queuine tRNA-ribosyltransferase OS=Bacillus butanolivorans; OX = 421767 GN=tgt PE=3 SV=1
MTAIRYELIKTCKQTGARLGRVHTPHGSFDTPAFMPVGTMATVKTMSPEDLKQMGAGIILSNTYHLWLRPGHEIIKEAGGLHKFMNWDRAILTDSGGFQVFSLSEFRKIEEEGVHFRNHINGDKLFLSPEKAMEIQNALGSDIMMAFDECPPFPATEEYMKKSVERTSRWAERCLNAHERPKDQGLFGIVQGGEFENLRKQSAKDLVSLDFPGYAIGGLSVGEPKDIMNRVLEFTSPLLPTNKPRYLMGVGSPDSLIDGALRGVDMFDCVLPTRIARNGTLMTSNGRLVVKNAKYARDFGPIDENCDCHVCKNYSRAYIRHLIKCEETFGIRLTTYHNLHFLLNLMEQVRQAIREDRLGDFREEFFEQYGFNKPNAKNF

SEQ ID NO: 52020 - protein, 380 aa, unidentified
  source 1..380: note = Bacillus caldolyticus
  REGION 1..380: note = tr|A0A2H5KKQ9|A0A2H5KKQ9_BACCL Queuine tRNA-ribosyltransferase OS=Bacillus caldolyticus OX=1394; GN = tgt PE=3 SV=1
MTTPIRFELIKTCRQTGARLGILHTPHGSFETPMFMPVGTLATVKTLSPEELKEMGAGVILSNTYHLWLRPGHDIVEEAGGLHAFMNWDRGILTDSGGFQVFSLSEFRRIEEEGVYFRNHLNGDKLFLSPEKAVEIQNALGADIIMAFDECPPYPATYEYMKQSIERTSRWAERCLKAHRRPNEQGLFGIVQGGEYEDLRRQSARDLVSLDFPGYAVGGLSVGEPKEVMNRVLEFTTPLLPADKPRYLMGVGSPDSLIDGAIRGIDMFDCVLPTRIGRNGTVMTSEGRVVIKNAQYARDFSPLDPNCDCYTCRNYTRAYIRHLIKCDETFGIRLTSYHNVYFLIKLMEQVRQAIREDRLADFREEFFERYGFNKPNAKNF

SEQ ID NO: 52021 - protein, 379 aa, unidentified
  source 1..379: note = Bacillus camelliae
  REGION 1..379: note = tr|A0A2N3LKY7|A0A2N3LKY7_9BACI Queuine tRNA-ribosyltransferase OS=Bacillus camelliae OX=1707093; GN = tgt PE=3 SV=1
MTAIKYELIKTCKQTGARLGKIHTPHGSYDTPMFMPVGTLATVKTMSPEELKEIGSGVILSNTYHLWLRPGHDIVREAGGLHKFMNWDQAILTDSGGFQVFSLSDFRKIEEEGVHFRNHLNGDKLFLSPEKSMEIQNALGSDIMMAFDECPPFPATHEYMKKSVERTSRWAERCLKSHNRTSDQGLFGIVQGGEYEDLRRLSAADLTSLDFPGYAVGGLSVGEPKDVMNRVLEFTTPLLPANKPRYLMGVGSPDSLIDGAIRGIDMFDCVLPTRIARNGTVMTSEGRLVVKNAKYARDFSPLDKNCDCYACRNYTRAYIRHLMKCDETFGIRLTSYHNLYFLLQLMKEVRQAIMEDRLGDFREEFFEQYGFNRPDAKNF

SEQ ID NO: 52022 - protein, 379 aa, unidentified
  source 1..379: note = Bacillus campisalis
  REGION 1..379: note = tr|A0A0M2SHI4|A0A0M2SHI4_9BACI Queuine tRNA-ribosyltransferase OS=Bacillus campisalis OX=1408103; GN = tgt PE=3 SV=1
MSAISYELIKTCKQTGARLGRVHTPHGSFETPAFMPVGTLATVKTMAPEELKEMGAGIILSNTYHLWLRPGHETIREAGGLHKFMNWDRAILTDSGGFQVFSLSEFRKIEEEGVHFRNHLNGDKLFLSPEKAMEIQNALGSDIMMAFDECPPYPASFEYMKASVERTSRWAERCLKAHKRPEDQGLFGIVQGGEYEELRKQSAKDLVSLDFPGYAVGGLSVGEPKDVMNRALEFTTPLLPANKPRYLMGVGSPDSLIDGSIRGIDMFDCVLPTRIARNGTLMTSQGRLVVKNAQYAKDFGPIDPECSCYTCRNYSRAYIRHLIKCDETFGIRLTTYHNLHFLLQLMEQVRQAIREDRLGDFREEFFERYGFNKPNAKNF

SEQ ID NO: 52023 - protein, 379 aa, Bacillus canaveralius
  REGION 1..379: note = tr|A0A2N5GH42|A0A2N5GH42_9BACI Queuine tRNA-ribosyltransferase OS=Bacillus canaveralius; OX = 1403243 GN=tgt PE=3 SV=1
MTAIRYELIKTCKQTGARLGRVHTPHGSFETPVFMPVGTLATVKTMSPEELTEMGAGIILSNTYHLWLRPGHDIIKEAGGLHKFMNWDKAILTDSGGFQVFSLSEFRKIEEEGVHFRNHLNGDKLFLSPEKAMDIQNALGSDIMMAFDECPPYPASFEYMKSSVERTSRWAERCLAAHKRPKDQGLFGIVQGGEYEELRKQSARDLVSLDFPGYAVGGLSVGEPKDVMNTVLEFTTPLLPANKPRYLMGVGSPDSLIDGAIRGIDMFDCVLPTRIARNGTLMTSEGRLVVKNAKYARDFGPLDPECDCYTCRNYSRAYIRHLIRSEETFGIRLTTYHNLYFLLKLMEQVRQAIREDRLGDFKEEFFEKYGFNKPNAKNF

SEQ ID NO: 52024 - protein, 379 aa, unidentified
  source 1..379: note = Bacillus caseinilyticus
  REGION 1..379: note = tr|A0A1H3K6R5|A0A1H3K6R5_9BACI Queuine tRNA-ribosyltransferase OS=Bacillus caseinilyticus; OX = 1503961 GN=tgt PE=3 SV=1
MAAITYEHIKTCKQSGARLGIVHTPHGSFETPMFMPVGTLATVKTMSPEDLKDMGAKIILSNTYHLWLRPGNEIIKEAGGLHRFMNWDRPILTDSGGFQVFSLSDMRKITEEGVEFRNHLNGERLFLTPEKCMEIQNDLGPDIMMAFDECPPYPAEYDYLKASVERTSRWAERCLKAHKRPEDQGLFGIVQGGEYEDLRRQSAEDLISLDFPGYAVGGLSVGEPKEVMNRVLEFTTPLLPADKPRYLMGVGSPDSLVDGSIRGIDMFDCVLPTRIARNGTLMTSTGRLVVRNAKYARDYRPLDENCDCHVCQNYSRAYIRHLVKCGETFGFRLTTYHNLYFLLKLMENIRQAIREDRLLDYREEFFEAYGFNKPDAKNF

SEQ ID NO: 52025 - protein, 379 aa, unidentified
  source 1..379: note = Bacillus cavernae
  REGION 1..379: note = tr|A0A3S0TTS5|A0A3S0TTS5_9BACI Queuine tRNA-ribosyltransferase OS=Bacillus cavernae OX=1674310; GN = tgt PE=3 SV=1
MTAIRYEHIKTDKQTGARLGIVHTPHGSFETPAFMPVGTLATVKTMSPEDLKTLGAGIILSNTYHLWLRPGHDIIKEAGGLHKFMNWDRAILTDSGGFQVFSLSEFRKIEEEGVHFRNHLNGDKLFLSPEKAMEIQNALGSDIMMAFDECPPFPATFEYMKKSVERTSRWAERCLAAHKRPEDQGLFGIIQGGEFEELRKQSAKDLVSLDFSGYAVGGLSVGEPKDVMNKVLEFTTPLLPADKPRYLMGVGSPDSLIDGAIRGIDMFDCVLPTRIARNGTLMTSTGRLVVKNAKYARDFGPLDENCDCYVCKNYSRAYIRHLIRCEETFGIRLTTYHNLHFLLNLMEQVRQAIREDRLGDFREEFFERYGFNKPGAKNF

SEQ ID NO: 52026 - protein, 379 aa, Bacillus cellulosilyticus
  REGION 1..379: note = tr|E6TV73|E6TV73_BACCJ Queuine tRNA-ribosyltransferase OS=Bacillus cellulosilyticus (strain ATCC 21833 / DSM 2522 / FERM P-1141 / JCM 9156 / N-4) OX=649639 GN=tgt PE =3 SV=1
MAAITYEHIKTCKQSGARLGIVHTPHGSFETPMFMPVGTLATVKTMSPEDLKDMGAKIILSNTYHLWLRPGHDIIKEAGGLHKFMNWDRPILTDSGGFQVFSLSDMRKITEEGVEFKNHLNGERLFLSPEKCMSIQNDLGPDIMMAFDECPPYPAEYDYMKASVERTTRWAERCIKSHARPDEQGLFGIVQGGEYEELRRQSANDLIAMDFPGYAIGGLSVGEPKDVMNRVLEYTTPLLPQDKPRYLMGVGSPDSLVDGAIRGIDMFDCVLPTRIARNGTLMTSEGRLVVRNAKYARDFRPIDENCSCHVCQNYSRAYIRHLVKCSETFGFRLTTYHNLHFLLTLMENVRTAIREDRLLDFREEFFEMYGFNKPNAKNF

SEQ ID NO: 52027 - protein, 379 aa, Bacillus cereus; identical to SEQ ID NO: 52017
  REGION 1..379: note = sp|Q817W6|TGT_BACCR Queuine tRNA-ribosyltransferase; OS = Bacillus cereus (strain ATCC 14579 / DSM 31 / JCM 2152 / NBRC 15305 / NCIMB 9373 / NRRL B-3711) OX=226900 GN=t gt; PE = 3 SV=1

SEQ ID NO: 52028 - protein, 379 aa, Bacillus cereus; identical to SEQ ID NO: 51992
  REGION 1..379: note = tr|J8J3P4|J8J3P4_BACCE Queuine tRNA-ribosyltransferase OS=Bacillus cereus VD102; OX = 1053228 GN=tgt PE=3 SV=1

SEQ ID NO: 52029 - protein, 379 aa, Bacillus circulans
  REGION 1..379: note = tr|A0A0J1I8N5|A0A0J1I8N5_BACCI Queuine tRNA-ribosyltransferase OS=Bacillus circulans OX=1397; GN = tgt PE=3 SV=1
MTAIRYEFIKTCKQTGARLGIVHTPHGSFETPAFMPVGTLATVKTMAPEDLKTMGANIILSNTYHLWLRPGHDIVKEAGGLHKFMNWDKAILTDSGGFQVFSLSDFRKIEEEGVHFRNHLNGDKLFLSPEKAMEIQNALGSDIMMAFDECPPYPAEYDYMKKSVDRTSRWAERCLKAHKRPEDQGLFGIIQGGEYEELRKQSARDLVSLDLPGYAVGGLSVGEPKDVMNRVLEFTTPLMPDNKPRYLMGVGSPDSLIDGAIRGIDMFDCVLPTRIARNGTVMTSEGRLVVKNAKYARDFGPLDPECDCYTCKNYSRAYIRHLIRCDETFGIRLTSYHNLYFLLNLMENVRDAIRNDRLGDFKEEFFERYGFNKPNAKNF

SEQ ID NO: 52030 - protein, 379 aa, Bacillus circulans
  REGION 1..379: note = tr|A0A553SKE4|A0A553SKE4_BACCI Queuine tRNA-ribosyltransferase OS=Bacillus circulans OX=1397; GN = tgt PE=3 SV=1
MTAIRYELIKTCKQTGARLGIVHTPHGSFETPAFMPVGTLATVKTMAPEDLKTMGANIILSNTYHLWLRPGHEIVKEAGGLHKFMNWDKAILTDSGGFQVFSLSDFRKIQEEGVHFRNHLNGDKLFLSPEKAMEIQNALGSDIMMAFDECPPYPAEYDYMKASVERTSRWAERCLKAHGRPEDQGLFGIIQGGEYEELRKQSARDLVSLDFPGYAVGGLSVGEPKDVMNRVLEFTTPLMPDNKPRYLMGVGSPDSLIDGAIRGIDMFDCVLPTRIARNGTCMTSEGRLVVKNAKYARDFGPLDPECDCYTCKNYSRAYIRHLIKCDETFGIRLTSYHNLYFLLNLMENVRQAIREDRLGDFKEEFFERYGFNKPNAKNF

SEQ ID NO: 52031 - protein, 383 aa, Bacillus clausii
  REGION 1..383: note = sp|Q5WHR2|TGT_BACSK Queuine tRNA-ribosyltransferase; OS = Bacillus clausii (strain KSM-K16) OX=66692 GN=tgt PE=3; SV = 1
MTAAITYEHIKTCKQSGARLGRVHTPHGTIETPMFMPVGTLATVKTMSPEDLKAMDAQIILSNTYHLWLRPGEEIIKEAGGLHQFMNWDKPILTDSGGFQVFSLSDLRKITEEGVHFRNHLSGEKLFLSPEKAMQIQHVLGSDIMMAFDECPPYPADHSYMKASVERTSRWAERCLAEHKRSGKDSVQGLFGIIQGGEYEDLRKQSANDLTALDFPGYAVGGLSVGEPKDVMNHVLEFTTPLMPEDKPRYLMGVGSPDSLIDGAIRGIDMFDCVLPTRIARNGTCMTSAGRLVVRNAKYARDFSPLDEKCDCHVCRTYSRAYIRHLIKCEETFGFRLTTYHNLYFLLNLMKQVRQAIMDDCLLDFREQFFEEYGFNKENARNF

SEQ ID NO: 52032 - protein, 383 aa, Bacillus clausii; identical to SEQ ID NO: 52031
  REGION 1..383: note = tr|A0A268NYS9|A0A268NYS9_BACCS Queuine tRNA-ribosyltransferase OS=Bacillus clausii OX=79880; GN = tgt PE=3 SV=1

SEQ ID NO: 52033 - protein, 379 aa, Bacillus coagulans
  REGION 1..379: note = tr|A0A412GZT0|A0A412GZT0_BACCO Queuine tRNA-ribosyltransferase OS=Bacillus coagulans OX=1398; GN = tgt PE=3 SV=1
MAAITYELIKTEKHTGARLGKLHTPHGTYDTPMFMPVGTLATVKTMSPEELKTMGAGTILSNTYHLWLRPGHDIVKEAGGLHKFMNWDQAILTDSGGFQVFSLSKIRDITEEGVHFRNHLNGDKLFLSPEKSMEIQNALGSDIMMAFDECPPYPASYEYMKQSVERTARWAERCLRAHARPGVQGLFGIVQGGAYEDLRLESANALVSLGFPGYAIGGLSVGEPKDVMNRMLAFTTPLLPSDKPRYLMGVGSPDSLIDGAIRGIDMFDCVLPTRIARNGTVMTSTGRLVVKNAQYARDFRPLDEHCDCYTCRHYSRAYIRHLIKCGETFGIRLTTYHNLYFLLKLMENVRQAIREDRLLDFKEEFFEQYGFNRPDAKNF

SEQ ID NO: 52034 - protein, 152 aa, Bacillus coagulans
  REGION 1..152: note = tr|A0A150JZQ7|A0A150JZQ7_BACCO tRNA-guanine transglycosylase OS=Bacillus coagulans OX=1398; GN = B4098_2579 PE=4 SV=1
MNRMLAFTTPLLPSDKPRYLMGVGSPDSLIDGAIRGIDMFDCVLPTRIARNGTVMTSTGRLVVKNAQYARDFRPLDEHCDCYTCRHYSRAYIRHLIKCGETFGIRLTTYHNLYFLLKLMENVRQAIREDRLLDFKEEFFEQYGFNRPDAKNF

SEQ ID NO: 52035 - protein, 379 aa, Bacillus coahuilensis
  REGION 1..379: note = tr|A0A147K6Y1|A0A147K6Y1_9BACI Queuine tRNA-ribosyltransferase OS=Bacillus coahuilensis p1.1.43; OX = 1150625 GN=tgt PE=3 SV=1
MTAIRYELIKTCKQTGARLGRVHTPHGSFETPVFMPVGTLATVKTMSPEDLIQLGAGIILSNTYHLWLRPGHEIIKEAGGLHKFMNWDRAILTDSGGFQVFSLSEFRKIEEEGVHFRNHLNGDKLFLSPEKAMEIQNALGSDIMMAFDECPPYPAEYDYMKKSVERTSRWAERCLTAHARPLDQGLFGIVQGGEYEDLRKQSAKDLISLDFPGYAIGGLSVGEPKDVMNRVLEFTTPWLPNDKPRYLMGVGSPDSLIDGAIRGVDMFDCVLPTRIARNGTLMTSNGRLVVKNAKYARDFGPIDENCSCHVCKNYSRAYIRHLIKCEETFGIRLTTYHNLHFLLNLMEQVRQAIREDRLGDFREEFFEQYGFNRPDAKNF

SEQ ID NO: 52036 - protein, 379 aa, Bacillus cohnii
  REGION 1..379: note = tr|A0A223KTA8|A0A223KTA8_9BACI Queuine tRNA-ribosyltransferase OS=Bacillus cohnii OX=33932 GN=tgt; PE = 3 SV=1
MTAIKYELIKTCKQTGARLGRVHTPHGSFETPVFMPVGTLATVKTMSPEDLKQMGAGIILSNTYHLWLRPGHEIVKEAGGLHKFMNWDRAILTDSGGFQVFSLSEFRKIEEEGVHFRNHLNGDKLFLSPEKAMEIQNALGSDIMMAFDECPPYPATEEYMRRSVERTSRWAERCLTAHKRPEDQGLFGIIQGGEFEHLRKQSAKDLVSLDFPGYAVGGLSVGEPKDVMNRVLEFTTPWMPDNKPRYLMGVGSPDSLIDGAIRGIDMFDCVLPTRIARNGTLMTSEGRLVVKNAKFARDFDPIDPECDCYTCKNYSRAYIRHLIKCDETFGIRLTTYHNLHFLLKLMENVRQAIREDRLGDFREEFFEKYGFNKPGAKNF

SEQ ID NO: 52037 - protein, 379 aa, unidentified
  source 1..379: note = Bacillus cucumis
  REGION 1..379: note = tr|A0A2N5H6Z0|A0A2N5H6Z0_9BACI Queuine tRNA-ribosyltransferase OS=Bacillus cucumis OX=1740721; GN = tgt PE=3 SV=1
MTAIRYELIKTCKQTGARLGRVHTPHGSFDTPAFMPVGTLATVKTMSPEDLKEMGAGIILSNTYHLWLRPGHEIIREAGGLHKFMNWDRAILTDSGGFQVFSLSEFRKIEEEGVHFRNHMSGEKLFLSPEKAMEIQNALGSDIMMAFDECPPYPATFEYMKKSVERTSRWAERCLNAHQRPEDQGLFGIVQGGEYEELRRQSANDLVSLDFPGYAVGGLSVGEPKDVMNRVLEFTTPMLPSNKPRYLMGVGSPDSLIDGAIRGIDMFDCVLPTRIARNGTLMTSTGRLVVKNAQFARDFGPLDPECDCYTCRNYSRAYIRHLIKCDETFGIRLTSYHNLYFLLRLMEKVRQAIMEDRLGDFREEFFERYGFNKPNAKNF

SEQ ID NO: 52038 - protein, 379 aa, unidentified
  source 1..379: note = Bacillus cytotoxicus
  REGION 1..379: note = sp|A7GT99|TGT_BACCN Queuine tRNA-ribosyltransferase; OS = Bacillus cytotoxicus (strain DSM 22905 / CIP 110041 / 391-98 / NVH 391-98) OX=315749 GN=tgt PE=3 SV=1
MTAIRYEFIKKCKQTGARLGRVHTPHGSFDTPTFMPVGTLATVKTMSPEELKAMDSGIILSNTYHLWLRPGHEIVREAGGLHKFMNWDRAILTDSGGFQVFSLSDFRRIEEEGVYFRNHLNGDKLFLSPEKAMEIQNALGSDIMMAFDECPPFPATFEYMKKSVERTSRWAERCLNAHQRPEDQGLFGIVQGGEFEELRRQSAKDLVSMDFPGYAVGGLSVGEPKDIMNRVLEFTTPLLPENKPRYLMGVGSPDSLIDGAIRGIDMFDCVLPTRIARNGTCMTSQGRLVVKNAKFARDFGPLDPNCDCYTCKNYSRAYIRHLMKCDETFGIRLTSYHNLHFLLNLMEQVRQAIREDRLGDFREEFFEQYGFNKPNAKNF

SEQ ID NO: 52039 - protein, 379 aa, unidentified; identical to SEQ ID NO: 52038
  source 1..379: note = Bacillus cytotoxicus
  REGION 1..379: note = tr|A0A2S1AE34|A0A2S1AE34_9BACI Queuine tRNA-ribosyltransferase OS=Bacillus cytotoxicus OX=580165; GN = tgt PE=3 SV=1

SEQ ID NO: 52040 - protein, 379 aa, Bacillus daliensis
  REGION 1..379: note = tr|A0A1H0BLM2|A0A1H0BLM2_9BACI Queuine tRNA-ribosyltransferase OS=Bacillus daliensis OX=745820; GN = tgt PE=3 SV=1
MPAITYEHIKTCKQSGARLGIVHTPHGSFETPIFMPVGTLATVKTMSPDDLVEMNAQIILSNTYHLWLRPGEDIIEEAGGLHKFMNWDRPILTDSGGFQVFSLSDLRNITEEGVHFRNHLSGEKLFLTPEKSMQIQNSLGPDIMMAFDECPPYPAEHKYMKDSVERTSRWAERCLEAHKRPGDQGLFGIIQGGEHPDLRRQSAEDLVSLDFPGYAIGGLSVGEPKDVMNRVLEETTPFMPDNKPRYLMGVGSADSLIDGAIRGVDMFDCVLPTRIARNGTLMTSSGRLVVRNAKFARDFRPLDENCNCKVCKNYSRAYLRHLIKSNETLGLILCSYHNLHFLITLMDKVRQAIREDRLLDFREQFFEAYGFNKPDAKNF

SEQ ID NO: 52041 - protein, 379 aa, unidentified
  source 1..379: note = Bacillus deserti
  REGION 1..379: note = tr|A0A2N5M951|A0A2N5M951_9BACI Queuine tRNA-ribosyltransferase OS=Bacillus deserti OX=673318; GN = tgt PE=3 SV=1
MNPIRYEHIKTCKQTGARLGIVHTPHGSFETPVFMPVGTLATVKTMSPEELTAMGAGIILSNTYHLWLRPGNDIVREAGGLHKFMNWDKAILTDSGGFQVFSLSEFRKIEEEGVHFRNHLNGDKLFLSPEKAMHIQNDLGSDIMMAFDECPPFPATHEYMKKSVERTSRWAERCLNAHNRPQDQGLFGIVQGGEYEDLRKMSAKDLTSLDFPGYAVGGLSVGEPKDVMNRVLEFTTPLLPADKPRYLMGVGSPDSLIDGAIRGIDMFDCVLPTRIARNGTLMTSNGRVVIKNAKYARDFGPLDENCSCHVCQNYSRAYIRHLIRCEETLGIRLTTYHNLHFLVNLMEQVRQAIREDRLGDFREEFFERYGFNKPDAKNF

SEQ ID NO: 52042 - protein, 379 aa, unidentified
  source 1..379: note = Bacillus enclensis
  REGION 1..379: note = tr|A0A0V8HMQ0|A0A0V8HMQ0_9BACI Queuine tRNA-ribosyltransferase OS=Bacillus enclensis OX=1402860; GN = tgt PE=3 SV=1
MTAIKYEHIKTCKQTGARLGRVHTPHGSFETPVFMPVGTLATVKTMSPEDLKSMDAGIILSNTYHLWLRPGHEIIREAGGLHKFMNWDRAILTDSGGFQVFSLSKLRKIEEEGVHFRHHLNGDKLFLSPEKAMEIQNALGSDIMMAFDECPPYPAEYEYMKSSVERTSRWAERCLQAHQRPQDQGLFGIVQGGEYEELRKQSARDLVSLDFPGYAVGGLSVGEPKDVMNRVLEFTTPHLPDDKPRYLMGVGSPDSLIDGAIRGIDMFDCVLPTRIARNGTLMTSEGRLVVKNAKYARDFRPIDENCDCYTCKNYSRAYIRHLIKCDETFGIRLTTYHNLHFLLNLMEQVRQAIREDRLGDFREEFFEQYGFNRPDAKNF

SEQ ID NO: 52043 - protein, 379 aa, Bacillus endophyticus
  REGION 1..379: note = tr|A0A329ERF1|A0A329ERF1_9BACI Queuine tRNA-ribosyltransferase OS=Bacillus endophyticus OX=135735; GN = tgt PE=3 SV=1
MTAIRYEHIKTCKQTGARLGRVHTPHGTFETPTFMPVGTLATVKTMSPEELKQMGAGIILSNTYHLWLRPGHEIVKKAGGLHKFMNWDRPILTDSGGFQVFSLSEFRKIQEEGVHFRNHLSGEKLFLSPEGAMEIQNALGSDIMMAFDECPPYPASYEYMKKSVERTSRWAERCLEAHARPNDQGLFGIVQGGEYEELRKQSAKDLISLDFPGYAIGGLSVGEPKDVMNRVLEFTTPLLPTDKPRYLMGVGSPDSLVDGAIRGVDMFDCVLPTRIARNGTLMTSEGRLVVRNAKFAEDFRPIDENCDCYTCQNYSRAYIRHLIRSNETFGLRLTSYHNLYFLLKLMEQVRQAIREDRLGDFRDEFFEQYGFNKPNAKNF

SEQ ID NO: 52044 - protein, 379 aa, unidentified
  source 1..379: note = Bacillus endozanthoxylicus
  REGION 1..379: note = tr|A0A5J5HVK8|A0A5J5HVK8_9BACI tRNA guanosine(34) transglycosylase Tgt OS=Bacillus endozanthoxylicus; OX = 2036016 GN=tgt PE=4 SV=1
MTAVTYELIKTCKQTGARLGRVHTPHGSFETPVFMPVGTLATVKTMSPEDLKEMGAGIILSNTYHLWLRPGHDIVKEAGGLHKFMNWDRAILTDSGGFQVFSLSEFRKIEEEGVHFRNHLNGDKLFLSPEKAMEIQNALGSDIMMAFDECPPYPAEFDYMKKSVERTSRWAERCLKAHARPNDQGLFGIVQGGEYEELRKQSARDLVSLDFPGYAIGGLSVGEPKDVMNRVLEFTTPLLPTDKPRYLMGVGSPDSLIDGAIRGVDMFDCVLPTRIARNGTLMTSSGRLVVKNAKYAKDFGPIDEHCDCYTCRNYSRAYIRHLIRCDETFGIRLTSYHNLYFLVKLMEQVRQAIREDRLGDFREEFFERYGFNKPNAKNF

SEQ ID NO: 52045 - protein, 379 aa, unidentified
  source 1..379: note = Bacillus filamentosus
  REGION 1..379: note = tr|A0A0H4KPJ3|A0A0H4KPJ3_9BACI Queuine tRNA-ribosyltransferase OS=Bacillus filamentosus; OX = 1402861 GN=tgt PE=3 SV=1
MTAIRYEHIKTCKQTGARLGRVHTPHGTFETPTFMPVGTLATVKTMSPEELKQMGAGIILSNTYHLWLRPGHEIVKKAGGLHKFMNWDRPILTDSGGFQVFSLSEFRKIQEEGVHFRNHLSGEKLFLSPEGAMEIQNALGSDIMMAFDECPPYPASYEYMKKSVERTSRWAERCLEAHARPNDQGLFGIVQGGEYEELRKQSAKDLISLDFPGYAIGGLSVGEPKDVMNRVLEFTTPLLPTDKPRYLMGVGSPDSLVDGAIRGVDMFDCVLPTRIARNGTLMTSEGRLVVRNAKFAEDFRPIDENCDCYTCQNYSRAYIRHLIRANETFGLRLTSYHNLYFLLKLMEQVRQAIREDRLGDFRDEFFEQYGFNKPNAKNF

SEQ ID NO: 52046 - protein, 379 aa, unidentified
  source 1..379: note = Bacillus filamentosus
  REGION 1..379: note = tr|A0A1X7CV04|A0A1X7CV04_9BACI Queuine tRNA-ribosyltransferase OS=Bacillus filamentosus; OX = 1402861 GN=tgt PE=3 SV=1
MTAIRYEHIKTCKQTGARLGRVHTPHGTFETPTFMPVGTLATVKTMSPEELKQMGAGIILSNTYHLWLRPGHEIVKKAGGLHKFMNWDRPILTDSGGFQVFSLSEFRKIQEEGVHFRNHLSGEKLFLSPEGAMEIQNALGSDIMMAFDECPPYPASYEYMKKSVGRTSRWAERCLEAHARPNDQGLFGIVQGGEYEELRKQSAKDLISLDFPGYAIGGLSVGEPKDVMNRVLEFTTPLLPTDKPRYLMGVGSPDSLVDGAIRGVDMFDCVLPTRIARNGTLMTSEGRLVVRNAKFAEDFRPIDENCDCYTCQNYSRAYIRHLIRANETFGLRLTSYHNLYFLLKLMEQVRQAIREDRLGDFRDEFFEQYGFNKPNAKNF

SEQ ID NO: 52047 - protein, 379 aa, Bacillus firmus
  REGION 1..379: note = tr|A0A0J5VEM9|A0A0J5VEM9_BACFI Queuine tRNA-ribosyltransferase OS=Bacillus firmus OX=1399 GN=tgt; PE = 3 SV=1
MTAIRYELIKTCKQTGARLGRVHTPHGSFETPVFMPVGTLATVKTMSPEELVEMGAGIILSNTYHLWLRPGQEIVEEAGGLHKFMNWDRAILTDSGGFQVFSLSEFRKIEEEGVHFRNHLNGDKLFLSPEKAMDIQNSLGSDIMMAFDECPPYPASFEYMKKSVERTSRWAERCLKAHKRPNDQGLFGIIQGGEYEELRKQSARDLTSLDFPGYAVGGLSVGEPKDVMNRVLEFTTPLMPSDKPRYLMGVGSPDSLIDGSIRGIDMFDCVLPTRIARNGTLMTSNGRLVVKNAKFARDFGPIDENCDCYTCRNYSRAYIRHLIRCDETFGIRLTTYHNLYFLLKLMEQVRQAIREDRLGDFREEFFERYGFNKPNAKNF

SEQ ID NO: 52048 - protein, 379 aa, Bacillus firmus
  REGION 1..379: note = tr|A0A366JYG0|A0A366JYG0_BACFI Queuine tRNA-ribosyltransferase OS=Bacillus firmus OX=1399 GN=tgt; PE = 3 SV=1
MTAIRYELIKTCKQTGARLGRVHTPHGSFETPVFMPVGTLATVKTMSPEELVEMGAGIILSNTYHLWLRPGQEIVEEAGGLHKFMNWDRAILTDSGGFQVFSLSEFRKIEEEGVHFRNHLNGDKLFLSPEKAMDIQNSLGSDIMMAFDECPPYPASFEYMKKSVERTSRWAERCLQAHKRPNDQGLFGIIQGGEYEELRKQSARDLTSLDFPGYAVGGLSVGEPKDVMNRVLEFTTPLLPSDKPRYLMGVGSPDSLIDGSIRGIDMFDCVLPTRIARNGTLMTSNGRLVVKNAKFARDFGPIDENCDCYTCRNYSRAYIRHLIRCDETFGIRLTTYHNLYFLLKLMEQVRQAIRDDRLGDFREEFFERYGFNKPNAKNF

SEQ ID NO: 52049 - protein, 379 aa, Bacillus flexus
  REGION 1..379: note = tr|A0A4P8X5G0|A0A4P8X5G0_9BACI Queuine tRNA-ribosyltransferase OS=Bacillus flexus OX=86664 GN=tgt; PE = 3 SV=1
MTAIRYEHIKTCKQTGARLGIVHTPHGSFETPIFMPVGTLATVKTMSPEDLKAMGAGIILSNTYHLWLRPGHEIVKKAGGLHKFMNWDRPILTDSGGFQVFSLSDLRRIEEEGVHFRNHLNGDKLFLSPEGAMEIQNALGSDIMMAFDECPPYPAEYDYLKRSVERTSRWAERCLEAHSRPQDQGLFGIVQGGEFEDLRRQSASDLVSMDFPGYAVGGLSVGEPKDVMNRVLEFTTPYLPADKPRYLMGVGSPDSLIDGAIRGIDMFDCVLPTRIARNGTLMTSEGRLVVKNAKYAEDFGPIDPNCDCYTCKNYSRAYIRHLIRSNETFGIRLTSYHNLYFLLNLMEQVREAIREDRLGDFRDEFFDKYGFNGPNAKNF

SEQ ID NO: 52050 - protein, 379 aa, Bacillus foraminis
  REGION 1..379: note = tr|A0A4R2BDW4|A0A4R2BDW4_9BACI Queuine tRNA-ribosyltransferase OS=Bacillus foraminis OX=279826; GN = tgt PE=3 SV=1
MSAIRYELIKTCKQTGARLGRVHTPHGSFETPVFMPVGTLATVKTMSPEELKEMGAGIILSNTYHLWLRPGHEIVREAGGLHKFMNWDRAILTDSGGFQVFSLSEFRKIEEEGVHFRNHLNGDKLFLSPEKAMDIQNALGSDIMMAFDECPPYPASFEYMKSSVERTSRWAERCLAAHNRPNDQGLFGIVQGGEYEELRKQSAKDLVSLDFPGYAVGGLSVGEPKDVMNRVLEFTTPLLPANKPRYLMGVGSPDSLIDGAIRGIDMFDCVLPTRIARNGTLMTSSGRLVVKNAQYARDFGPIDEHCDCYTCRNYSRAYIRHLIKCDETFGIRLTTYHNLYFLVKLMEQVRQAIMEDRLGDFREEFFERYGFNKPDAKNF

SEQ ID NO: 52051 - protein, 379 aa, Bacillus fortis
  REGION 1..379: note = tr|A0A443J3J6|A0A443J3J6_9BACI Queuine tRNA-ribosyltransferase OS=Bacillus fortis OX=254758; GN = tgt PE=3 SV=1
MPAITYELIKTCKQTGARLGMVHTPHGSYETPMFMPVGTLATVKTMSPEELKEMGAGIILSNTYHLWLRPGEDIVEEAGGLHKFMNWDQGILTDSGGFQVFSLSEFRQIEEEGVHFRNHLNGDKLFLSPEKAMSIQNSLGSDIMMAFDECPPYPASHEYMKNSVERTSRWAERCLNAHKRPKDQGLFGIVQGGEYEDLRKQSAKDLVSLDFPGYAIGGLSVGEPKDVMNRMLEFTTPLLPSDKPRYLMGVGSPDSLVDGAIRGVDMFDCVLPTRIARNGTLMTSQGRLVVKNAAYARDFGPLDEDCDCYACRNYSRAYVRHLIKCNETFGIRLTTYHNLYFLLKLMKQVRDAIKEDRLGDFREEFFERYGFNRPDAKNF

SEQ ID NO: 52052 - protein, 379 aa, unidentified
  source 1..379: note = Bacillus freudenreichii
  REGION 1..379: note = tr|A0A3S4RLK5|A0A3S4RLK5_9BACI Queuine tRNA-ribosyltransferase OS=Bacillus freudenreichii; OX = 1783501 GN=tgt PE=3 SV=1
MPAITYELIKTCKQTGARLGMIHTPHGSYETPMFMPVGTLATVKTMSPEELKEMGAGIILSNTYHLWLRPGEDIVEEAGGLHRFMNWDQGILTDSGGFQVFSLSEFREIEEEGVHFRNHLNGDKLFLSPEKAMAIQNSLGSDIMMAFDECPPYPASHEYMKNSVERTSRWAERCLKAHKRADVQGLFGIVQGGEYEDLRKQSAKDLISLDFPGYAIGGLSVGEPKDVMNRVLDFTTPLLPSNKPRYLMGVGSPDSLVDGAVRGVDMFDCVLPTRIARNGTLMTSNGRLVVKNAAYARDFGPLDENCDCHVCRNYSRAYIRHLIKCNETFGIRLTTYHNLYFLLKLMKQVREAIKEDRLGDFREEFFERYGFNRPDAKNF

SEQ ID NO: 52053 - protein, 379 aa, unidentified
  source 1..379: note = Bacillus gaemokensis
  REGION 1..379: note = tr|A0A073KIM3|A0A073KIM3_9BACI Queuine tRNA-ribosyltransferase OS=Bacillus gaemokensis OX=574375; GN = tgt PE=3 SV=1
MTAIRYEFIKTCKQTGARLGRVHTPHGSFDTPTFMPVGTLATVKTMSPEELKAMDSGIILSNTYHLWLRPGHEIVREAGGLHKFMNWDRAILTDSGGFQVFSLSDFRRIEEEGVHFRNHLNGDKLFLSPEKAMEIQNALGSDIMMAFDECPPFPATFEYMKKSVERTSRWAERCLKAHERPQDQGLFGIVQGGEFEELRRQSAKDLVSMDFPGYAIGGLSVGEPKDIMNRVLEFTTPLLPDNKPRYLMGVGSPDSLIDGAIRGVDMFDCVLPTRIARNGTCMTSQGRLVVKNAKFAKDFGPLDPNCDCYTCKNYSRAYIRHLMKCDETFGIRLTSYHNLHFLLNLMEQVRQAIREDRLGDFREEFFEQYGFNKPNAKNF

SEQ ID NO: 52054 - protein, 379 aa, Bacillus galactosidilyticus
  REGION 1..379: note = tr|A0A178A3V4|A0A178A3V4_9BACI Queuine tRNA-ribosyltransferase OS=Bacillus galactosidilyticus; OX = 217031 GN=tgt PE=3 SV=1
MSAITYELIKTCKQTGARLGILHTPHGSYETPMFMPVGTLATVKTMSPEDLKAMGAGVILSNTYHLWLRPGHDIIKEAGGLHSFMNWDQAILTDSGGFQVFSLSEFRRIEEEGVHFRNHLNGDKLFLSPEKSMEIQNALGSDIMMAFDECPPYPASHDYMKKSVERTSRWAERCLEAHNRTEDQGLFGIIQGGEFEDLRKQSANDLVSLDFPGYAVGGLSVGEPKDVMNRMLEFTTPLLPNNKPRYLMGVGSPDSLIDGSIRGIDMFDCVLPTRIARNGTLMTSNGRLVVKNAAYARDFNPIDENCDCYTCRNYSRAYIRHLIKCDETFGIRLTTYHNLHFLLKLMEQVRQAIREDRLGDFKKEFFERYGFNSPDAKNF

SEQ ID NO: 52055 - protein, 379 aa, Bacillus ginsengihumi
  REGION 1..379: note = tr|A0A0A6VF47|A0A0A6VF47_9BACI Queuine tRNA-ribosyltransferase OS=Bacillus ginsengihumi OX=363870; GN = tgt PE=3 SV=1
MTAIKYELIKTCKQTGARLGMIHTPHGSFETPMFMPVGTLATVKTMSPEDLKTMGAGTILSNTYHLWLRPGHDIVREAGGLHKFMNWDQAILTDSGGFQVFSLSKIRDIVEEGVHFRNHLNGDKLFLSPEKSMEIQNALGSDIMMAFDECPPYPAAYDYMKQSVERTSRWAERCLNAHQRPDVQGLFGIVQGGEFEDLRRQSANDLVSLDFPGYAVGGLSVGEPKEVMNRVLEFTTPLLPSNKPRYLMGVGSPDSLIDGAIRGIDMFDCVLPTRIARNGTVMTSKGRLVVKNAKYARDFRPLDEHCDCYTCRNYTRAYIRHLIKCDETFGMRLTTYHNLYFLLKLMENVRQAIREDRLGDFREEFFEQYGFNRPDAKNF

SEQ ID NO: 52056 - protein, 381 aa, unidentified
  source 1..381: note = Bacillus glycinifermentans
  REGION 1..381: note = tr|A0A0J6ERK5|A0A0J6ERK5_9BACI Queuine tRNA-ribosyltransferase OS=Bacillus glycinifermentans; OX = 1664069 GN=tgt PE=3 SV=1
MSQQPIRYEFIKACKQTGARLGKVHTPHGSFETPAFMPVGTLATVKTMSPEELKEMGAGIILSNTYHLWLRPGHEIVKEAGGLHKFMNWDRAILTDSGGFQVFSLSEFRKIEEEGVHFRNHLNGDKLFLSPEKAMEIQNALGSDIMMAFDECPPYPAEYDYMKKSVERTSRWAERCLAAHKRPGDQGLFGIVQGGEYENLRKQSAKDLISLDFPGYAIGGLSVGEPKDVMNRVLEFTTPLLPADKPRYLMGVGSPDSLIDGAIRGVDMFDCVLPTRIARNGTLMTSEGRLVVKNAKYERDFRPIDEHCDCYTCRNYSRAYIRHLIRCNETFGIRLTSYHNLYFLLKLMGQVRDAIREDRLGDFREEFFERYGFNKPNAKSF

SEQ ID NO: 52057 - protein, 378 aa, unidentified
  source 1..378: note = Bacillus gobiensis
  REGION 1..378: note = tr|A0A0M3RB29|A0A0M3RB29_9BACI Queuine tRNA-ribosyltransferase OS=Bacillus gobiensis OX=1441095; GN = tgt PE=3 SV=1
MPIRYELIKTCKQTGARLGKVHTPHGSFDTPAFMPVGTLATVKTMAPEDLKEMGAGIILSNTYHLWLRPGHDIVKEAGGLHKFMNWDRAILTDSGGFQVFSLSEFRKIEEEGVHFRNHLNGDKLFLSPEKAMDIQNALGSDIMMAFDECPPYPAEHKYMKRSVERTSRWAERCLAAHQRPDEQGLFGIVQGGEYEDLRKQSASDLISLDFPGYAIGGLSVGEPKDVMNRVLDFTVPLLPDHKPRYLMGVGSPDSLIDGAIRGVDMFDCVLPTRIARNGTLMTSKGRLVVKNAKYERDFRPIDEECGCYTCRNYSRAYVRHLLRCNETFGIRLTSYHNLHFLLELMGQVREAIRQDRLQDFRGEFFESYGFNLPNAKSF

SEQ ID NO: 52058 - protein, 379 aa, Bacillus halodurans
  REGION 1..379: note = sp|Q9KDI5|TGT_BACHD Queuine tRNA-ribosyltransferase; OS = Bacillus halodurans (strain ATCC BAA-125 / DSM 18197 / FERM 7344 / JCM 9153 / C-125) OX=272558 GN=tgt PE=3 SV= 1
MAAVTYELIKTCKQSGARLGKLHTPHGTIETPIFMPVGTLATVKTMSPEELKQLGAQIILSNTYHLWLRPGHDIVKEAGGLHEFMNWDRPILTDSGGFQVFSLSDLRTIEEEGVHFRNHLSGEKLFLSPEGAMEIQNALGSDIMMAFDECPPYPAERDYMRPSVERTSRWAERCLKAHKRPEDQALFGIIQGGEYEDLRRQSAQDITSLDFPGYAIGGVSVGEPKDVMNRVLEFTTPLLPANKPRYLMGVGSPDSLIDGAIRGIDMFDCVLPTRIARNGTCMTSNGRLVVRNAKYARDFRSLDENCDCHVCQTYTRAYIRHLVKCDETFGFRLTTYHNLYFLLKLMKDVRQAILDDRLLDFREEFFEQYGFNQPNAKNF

SEQ ID NO: 52059 - protein, 379 aa, Bacillus halodurans
  REGION 1..379: note = tr|A0A4Y7WYI3|A0A4Y7WYI3_BACHO Queuine tRNA-ribosyltransferase OS=Bacillus halodurans OX=86665; GN = tgt PE=3 SV=1
MAAVTYELIKTCKQSGARLGKLHTPHGTIETPIFMPVGTLATVKTMSPEELKQLGAQIILSNTYHLWLRPGHDIVKEAGGLHEFMNWDRPILTDSGGFQVFSLSDLRTIEEEGVHFRNHLSGEKLFLSPEGAMEIQNTLGSDIMMAFDECPPYPAERDYMRPSVERTSRWAERCLKAHKRPEDQALFGIIQGGEYEDLRRQSAQDITSLDFPGYAIGGLSVGEPKDVMNRVLEFTTPLLPANKPRYLMGVGSPDSLIDGAIRGIDMFDCVLPTRIARNGTCMTSNGRLVVRNAKYARDFRPLDENCDCHVCQTYTRAYIRHLVKCDETFGFRLTSYHNLYFLLKLMKDVRQAILDDRLLDFREEFFEQYGFNQPNAKNF

SEQ ID NO: 52060 - protein, 381 aa, unidentified
  source 1..381: note = Bacillus halotolerans
  REGION 1..381: note = tr|A0A2S9WMY6|A0A2S9WMY6_9BACI Queuine tRNA-ribosyltransferase OS=Bacillus halotolerans OX=260554; GN = tgt PE=3 SV=1
MAEQPIRYEFIKECKQTGARLGRVHTPHGSFETPVFMPVGTLATVKTMAPEELKAMDAGIILSNTYHLWLRPGQDIVKEAGGLHKFMNWDRAILTDSGGFQVFSLSKFRNIEEEGVHFRNHLNGDKLFLSPEKAMEIQNALGSDIMMAFDECPPYPAEYDYMKRSVERTSRWAERCLNAHARQDEQGLFGIVQGGEYEDLRTQSAKDLISLDFPGYAIGGLSVGEPKDVMNRVLEFTTPLLPKDKPRYLMGVGSPDALIDGAIRGVDMFDCVLPTRIARNGTVFTAEGRLNMKNAKFERDFRPIDEECDCYTCKNYTRAYIRHLIRCNETFGLRLTTYHNLHFLLHLMEQVRQAIREDRLGDFREEFFERYGYNKPNAKSF

SEQ ID NO: 52061 - protein, 381 aa, unidentified
  source 1..381: note = Bacillus haynesii
  REGION 1..381: note = tr|A0A1R1RGY4|A0A1R1RGY4_9BACI Queuine tRNA-ribosyltransferase OS=Bacillus haynesii OX=1925021; GN = tgt PE=3 SV=1
MSQQPIRYEFIKACKQTGARLGRVHTPHGSFETPVFMPVGTLATVKTMAPEELKEMGAGIILSNTYHLWLRPGHDIVKEAGGLHQFMNWDRAILTDSGGFQVFSLSEFRKIEEEGVHFRNHLNGDKLFLSPEKAMEIQNALGSDIMMAFDECPPYPAEYDYMKKSVERTSRWAERCLKAHNRPDEQGLFGIVQGGEYENLRKQSAKDLISLDFPGYAIGGLSVGEPKDVMNRVLEFTTPLLPADKPRYLMGVGSPDSLIDGAIRGVDMFDCVLPTRIARNGTLMTSEGRLVVKNAKYERDFGPIDEQCDCYTCRNYSRAYIRHLIRCNETFGIRLTSYHNLYFLLKLMGQVRDAIREDRLGDFREEFFERYGFNKPNAKSF

SEQ ID NO: 52062 - protein, 381 aa, unidentified
  source 1..381: note = Bacillus haynesii
  REGION 1..381: note = tr|W7RCZ8|W7RCZ8_9BACI Queuine tRNA-ribosyltransferase OS=Bacillus haynesii OX=1925021; GN = tgt PE=3 SV=1
MSQQPIRYEFIKACKQTGARLGRVHTPHGSFETPVFMPVGTLATVKTMAPEELKEMGAGIILSNTYHLWLRPGHDIVKEAGGLHQFMNWDRAILTDSGGFQVFSLSEFRKIEEEGVHFRNHLNGDKLFLSPEKAMEIQNALGSDIMMAFDECPPYPAEYDYMKKSVERTSRWAERCLKAHNRPDEQGLFGIVQGGEYENLRKQSAKDLISLDFPGYAIGGLSVGEPKDVMNRVLEFTTPLLPADKPRYLMGVGSPDSLIDGAIRGVDMFDCVLPTRIARNGTLMTSEGRLVVKNAKYERDFRPIDEQCDCYTCRNYSRAYIRHLIRCNETFGIRLTSYHNLYFLLKLMGQVRDAIREDRLGDFREEFFERYGFNKPNAKSF

SEQ ID NO: 52063 - protein, 379 aa, Bacillus hemicellulosilyticus
  REGION 1..379: note = tr|W4QEE9|W4QEE9_9BACI Queuine tRNA-ribosyltransferase OS=Bacillus hemicellulosilyticus JCM 9152 OX=1236971 GN=tgt PE=3 SV=1
MAAITYEHLKTCKQSGARLGRVHTPHGSFETPIFMPVGTLATVKTMSPEDLKEMNAQIILSNTYHLWLRPGHDIVQEAGGLHQFMNWDRPILTDSGGFQVFSLSDLRKIEEEGVHFRNHLNGDKLFLSPEGAMEIQNALGSDIMMAFDECPPYPAEYDYMKESVERTSRWAERCLEGHKRPEAQGLFGIVQGGEYEELRKQSARDLVSLDFPGYAIGGLSVGEPKDVMNRVLEFTTPHLPFDKPRYLMGVGSADSLIDGAIRGIDMFDCVLPTRIARNGTLMTSEGRLVVRNAKYARDFRPLDENCDCHVCKNYTRAYIRHLIKCEETFGFRLTSYHNLYFLLNLMERVRQAIRDDRLLDFREEFFEQYGFNKPNAKNF

SEQ ID NO: 52064 - protein, 379 aa, unidentified
  source 1..379: note = Bacillus hisashii
  REGION 1..379: note = tr|A0A267TQ57|A0A267TQ57_9BACI Queuine tRNA-ribosyltransferase OS=Bacillus hisashii OX=996558; GN = tgt PE=3 SV=1
MSAIRYELIKTDKQTGARLGILHTPHGSYETPMFMPVGTLATVKTMSPEELKEIGAGVILSNTYHLWLRPGHDIVKEAGGLHQFMNWDQAILTDSGGFQVFSLSEFRKIEEEGVHFRNHLNGDKLFLSPEISMEVQNALGSDIMMAFDECPPYPAEYDYMKKSVERTSRWAERCLKAHKRPKDQGLFGIVQGGEYEELRKQSAEDLVSLDFPGYAVGGLSVGEPKETMNRMLEFTTPLLPADKPRYLMGVGSPDSLIDGAIRGIDMFDCVLPTRIARNGTVMTSSGRLVVKNAKYARDFGPLDEHCDCYTCRNYSRAYIRHLIHTNEILGFRLCTYHNLHFLIQLMERVRQAIREDCLMDFREQFFEQYGFNKPNAKNF

SEQ ID NO: 52065 - protein, 379 aa, Bacillus horikoshii
  REGION 1..379: note = tr|A0A1Y0CTR8|A0A1Y0CTR8_9BACI Queuine tRNA-ribosyltransferase OS=Bacillus horikoshii OX=79883; GN = tgt PE=3 SV=1
MTAIRYELIKTCKQTGARLGIVHTPHGSFETPVFMPVGTLATVKTMSPEDVKAMGAGIILSNTYHLWLRPGNEIVKEAGGLHKFMNWDRAILTDSGGFQVFSLSDLRKIEEEGVHFRNHMNGDKLFLSPEKAMHIQNDLGSDIMMAFDECPPYPATHEYMKKSVERTSRWAERCLEAHQRPQDQGLFGIVQGGEYEDLRKLSAQDLVSMDFPGYAVGGLSVGEPKDVMNRTLEFTTPWLPTDKPRYLMGVGSPDSLIDGAIRGIDMFDCVLPTRIARNGTLMTSEGRLVVKNAKFARDFGPLDPECDCYTCTNYSRAYIRHLIKCDETLGIRLTTYHNLYFLVKLMENVRQAIREDRLGDFKEEFFEKYGFNKPNAKNF

SEQ ID NO: 52066 - protein, 379 aa, Bacillus horikoshii
  REGION 1..379: note = tr|A0A5D4T8M6|A0A5D4T8M6_9BACI Queuine tRNA-ribosyltransferase OS=Bacillus horikoshii OX=79883; GN = tgt PE=3 SV=1
MTAIRYELIKTCKQTGARLGIVHTPHGSFETPVFMPVGTLATVKTMSPEDVKAMGAGIILSNTYHLWLRPGNEIVKEAGGLHKFMNWDRAILTDSGGFQVFSLSDLRKIEEEGVHFRNHMNGDKLFLSPEKAMHIQNDLGSDIMMAFDECPPYPATHEYMKKSVERTSRWAERCLEAHQRPQDQGLFGIVQGGEYEDLRKLSAQDLVSMDFPGYAVGGLSVGEPKDVMNRTLEFTTPWLPTDKPRYLMGVGSPDSLIDGAIRGIDMFDCVLPTRIARNGTLMTSEGRLVVKNAKFARDFGPLDPECDCYTCTNYSRAYIRHLIKCDETLGIRLTTYHNLYFLVKLMEDVRQAIREDRLGDFKEEFFEKYGFNKPNAKNF

SEQ ID NO: 52067 - protein, 379 aa, Bacillus horneckiae
  REGION 1..379: note = tr|A0A2N0ZAU9|A0A2N0ZAU9_9BACI Queuine tRNA-ribosyltransferase OS=Bacillus horneckiae OX=549687; GN = tgt PE=3 SV=1
MTAIRYELIKTCKQTGARLGKVHTPHGSFETPVFMPVGTLATVKTMSPEELVQMGAGIILSNTYHLWLRPGHEIVEEAGGLHKFMNWDRAILTDSGGFQVFSLSDFRKIEEEGVHFRNHLNGDKLFLSPEKAMQIQNSLGSDIMMAFDECPPFPATHDYMKQSVERTSRWAERCLEAHQRPNDQGLFGIVQGGEYKDLRAQSAKDLVSLDFPGYAIGGLSVGEPKDIMNRVLEETTPLLPSDKPRYLMGVGSPDSLIDGAIRGVDMFDCVLPTRIARNGTLMTSNGRLVVKNAKFARDFGPIDENCDCYTCRNYSRAYIRHLIKCDETFGIRLTTYHNLYFLLKLMEQVRQAIREDRLGDFREEFFEQYGFNKPDAKNF

SEQ ID NO: 52068 - protein, 380 aa, Bacillus hwajinpoensis
  REGION 1..380: note = tr|A0A4U1MIC5|A0A4U1MIC5_9BACI Queuine tRNA-ribosyltransferase OS=Bacillus hwajinpoensis; OX = 208199 GN=tgt PE=3 SV=1
MTEPIRYELIKTCKQSGARLGKLHTPHGTFETPMFMPVGTLATVKTMSPEELKEMGAGVILSNTYHLWLRPGHDIVKEAGGLHKFMNWDQPILTDSGGFQVFSLSDLRQIEEKGVHFRNHLSGEKLFLSPEGAMDIQNALGSDIMMAFDECPPYPAEYDYMKSSVERTSRWAERCLTAHARKDVQGLFGIVQGGEYEELRKQSAQDLVSLDFPGYAIGGLSVGEPKDVMNRVLDFTTPHLPSDKPRYLMGVGSPDSLIDGAIRGVDMFDCVLPTRIARNGTLMTSNGRLVVRNAKYARDFGPLDENCDCRVCRNYSRAYIRHLVKANETFGFRLTTYHNLYFLLNLMKQVRQAIMDDRLLDFKEEFFEQYGFNKPNAKNF

SEQ ID NO: 52069 - protein, 379 aa, Bacillus indicus
  REGION 1..379: note = tr|A0A084GWX4|A0A084GWX4_BACID Queuine tRNA-ribosyltransferase OS=Bacillus indicus OX=246786; GN = tgt PE=3 SV=1
MSPIRYELIKTCKQTGARLGRVHTPHGSFETPVFMPVGTLATVKTMSPEELVQMGAGIILSNTYHLWLRPGNEIVKEAGGLHKFMNWDRAILTDSGGFQVFSLSEFRKIEEEGVHFRNHLNGDKLFLSPEKAMQIQNDLGSDIMMAFDECPPFPAEYDYMKKSVERTSRWAERCLTAHERPNDQGLFGIVQGGEYEELRKQSARDLISMDFPGYAVGGLSVGEPKDVMNRVLEFTTPLLPSDKPRYLMGVGSPDSLIDGAVRGIDMFDCVLPTRIARNGTLMTSKGRLVVKNAAFARDYGPIDENCDCYTCRNYSRAYIRHLMKCDETFGIRLTSYHNLHFLLNLMEQVRQAIREDRLGDFRDEFFEQYGFNKPNAKNF

SEQ ID NO: 52070 - protein, 379 aa, Bacillus infantis
  REGION 1..379: note = tr|A0A4Q4CCL7|A0A4Q4CCL7_9BACI Queuine tRNA-ribosyltransferase OS=Bacillus infantis OX=324767; GN = tgt PE=3 SV=1
MTAIRYELIKTCKQTGARLGRVHTPHGSFETPVFMPVGTLATVKTMSPEEVAGMGAGIILSNTYHLWLRPGHDIIKEAGGLHKFMNWNGSILTDSGGFQVFSLSQFRKIEEEGVHFRNHLNGDKLFLSPEKAMEIQNALGSDIMMAFDECPPYPATYEYMKKSVERTSRWAERCLNAHERPNDQGLFGIVQGGEYEELRKQSARDLVSLDFPGYAVGGLSVGEPKDVMNRALEFTTPLLPADKPRYLMGVGSPDSLIDGSIRGIDMFDCVLPTRIARNGTLMTSNGRLVVKNAKFARDFGPIDENCDCYTCRNYSRAYIRHLIKSDETFGIRLTTYHNLYFLVNLMEQVRQAIREDRLGDFREEFFERYGFNKPDAKNF

SEQ ID NO: 52071 - protein, 379 aa, Bacillus infantis; identical to SEQ ID NO: 52070
  REGION 1..379: note = tr|U5LG46|U5LG46_9BACI Queuine tRNA-ribosyltransferase OS=Bacillus infantis NRRL B-14911; OX = 1367477 GN=tgt PE=3 SV=1

SEQ ID NO: 52072 - protein, 381 aa, unidentified
  source 1..381: note = Bacillus intestinalis
  REGION 1..381: note = tr|A0A0K6LVS1|A0A0K6LVS1_9BACI Queuine tRNA-ribosyltransferase OS=Bacillus intestinalis; OX = 1963032 GN=tgt PE=3 SV=1
MAEQPIRYEFIKECKQTGARLGKVHTPHGSFETPVFMPVGTLATVKTMSPEELKAMDAGIILSNTYHLWLRPGHDIVKEAGGLHKFMNWDRAILTDSGGFQVFSLSKFRNIEEEGVHFRNHLNGDKLFLSPEKAMEIQNALGSDIMMAFDECPPYPAEYDYMKRSVERTSRWAERCLNAHNRQDEQGLFGIVQGGEYEDLRTQSAKDLISLDFPGYAIGGLSVGEPKDVMNRVLEFTTPLLPKDKPRYLMGVGSPDALIDGAIRGVDMFDCVLPTRIARNGTVFTAEGRLNMKNAKFERDFRPIDEECDCYTCKNYTRAYIRHLIRCNETFGLRLTTYHNLHFLLHLMEQVRQAIREDRLGDFREEFFERYGYNKPNAKSF

SEQ ID NO: 52073 - protein, 379 aa, Bacillus kochii
  REGION 1..379: note = tr|A0A248TKW5|A0A248TKW5_9BACI Queuine tRNA-ribosyltransferase OS=Bacillus kochii OX=859143; GN = tgt PE=3 SV=1
MTAIRYELIKTCKQTGARLGRVHTPHGSFETPVFMPVGTLATVKTMSPEDLVNMGAGIILSNTYHLWLRPGHELIKEAGGLHEFMNWDRAILTDSGGFQVFSLSDFRKIEEEGVHFRNHLNGDKLFLSPEKAMQIQNALGSDIMMAFDECPPFPATHEYMKKSVERTSRWAERCLEAHERPNDQGLFGIVQGGEYNDLRAQSAKDLVSLDFPGYAIGGLSVGEPKDIMNRVLEETTPLLPNHKPRYLMGVGSPDSLIDGAIRGVDMFDCVLPTRIARNGTLMTSEGRLVVKNAKYARDFGPLDENCDCYTCRNYSRAYIRHLIKCDETFGIRLTTYHNLYFLLKLMEKVREAIREDRLGDFREEFFEKYGFNKPNAKNF

SEQ ID NO: 52074 - protein, 379 aa, Bacillus koreensis
  REGION 1..379: note = tr|A0A0M0L877|A0A0M0L877_9BACI Queuine tRNA-ribosyltransferase OS=Bacillus koreensis OX=284581; GN = tgt PE=3 SV=1
MTAIRYELIKTCKQTGARLGIVHTPHGSFETPTFMPVGTLATVKTMSPEELKQMGAKIILSNTYHLWLRPGHDIVKQAGGLHKFMNWDRPILTDSGGFQVFSLSDFRRIEEEGVHFRNHLNGDKLFLSPEKAMEIQNALGSDIMMAFDECPPYPAEYDYMKSSVERTSRWAERCLKAHGRPEDQGLFGIVQGGEYEDLRRQSASDLVSLDFPGYAVGGLSVGEPKDVMNRVLEFTTPFLPTNKPRYLMGVGTPDSLIDGAIRGIDMFDCVLPTRIGRNGTLMTSEGRLVVKNAKYAEDFRPLDENCDCYTCRNYSRAYIRHLIRCDETFGIRLTSYHNLYFLLNLMEQVREAIREDRLGDFREEFFEKYGFNKPNAKNF

SEQ ID NO: 52075 - protein, 220 aa, Bacillus krulwichiae
  REGION 1..220: note = tr|A0A1X9M709|A0A1X9M709_9BACI Queuine tRNA-ribosyltransferase OS=Bacillus krulwichiae OX=199441; GN = tgt_1 PE=3 SV=1
MAAITYEHIKTCKQSGARLGRVHTPHGSFETPIFMPVGTLATVKTMSPEDLYDMNAQIILSNTYHLWLRPGHDIVKEAGGLHKFMNWNRPILTDSGGFQVFSLSDLRKIEEEGVHFRNHLNGDKLFLSPEGAMEIQNALGSDIMMAFDECPPYPAEYDYMKNSVERTSRWAERCLSAHARPEDQGLFGIVQGGEYEDLRKQSAKDLVSLDFPGYAIGGFL

SEQ ID NO: 52076 - protein, 153 aa, Bacillus krulwichiae
  REGION 1..153: note = tr|A0A1X9M9C2|A0A1X9M9C2_9BACI Queuine tRNA-ribosyltransferase OS=Bacillus krulwichiae OX=199441; GN = tgt_2 PE=4 SV=1
MMNRVLEFTTPHLPSDKPRYLMGVGSADSLIDGAIRGVDMFDCVLPTRIARNGTLMTSKGRLVVRNAKYARDFRPLDENCDCHVCKNYSRAYIRHLIKCEETFGFRLTSYHNLYFLLNLMEQVRQAIREDRLLDFREEFFEMYGFNKPNAKNF

SEQ ID NO: 52077 - protein, 379 aa, unidentified
  source 1..379: note = Bacillus kyonggiensis
  REGION 1..379: note = tr|A0A4U1DBU7|A0A4U1DBU7_9BACI Queuine tRNA-ribosyltransferase OS=Bacillus kyonggiensis; OX = 1037680 GN=tgt PE=3 SV=1
MTAIRYELIKTCKQTGARLGRVHTPHGSFETPVFMPVGTLATVKTMSPEELVQMGAGIILSNTYHLWLRPGHEIVKEAGGLHKFMNWDRAILTDSGGFQVFSLSEFRKIEEEGVHFRNHLNGDKLFLSPEKAMEIQNALGSDIMMAFDECPPFPATFDYMKKSVERTSRWAERCLNAHQRPNDQGLFGIVQGGEYEELRKQSAKDLVSLDFPGYAVGGLSVGEPKDVMNRVLEFTTPLLPNNKPRYLMGVGSPDSLIDGAIRGIDMFDCVLPSRIARNGTLMTSEGRLVVKNAKFARDFGPIDPNCDCYTCKNYSRAYIRHLIRCDETFGIRLTTYHNLYFLLKLMEQVREAIREDRLGDFREEFFERYGFNKPDAKNF

SEQ ID NO: 52078 - protein, 383 aa, Bacillus lehensis
  REGION 1..383: note = tr|A0A4Y7WIC5|A0A4Y7WIC5_9BACI Queuine tRNA-ribosyltransferase OS=Bacillus lehensis OX=300825; GN = tgt PE=3 SV=1
MTVPITYEHIKTCKQTGARLGRVHTPHGTFETPMFMPVGTMATVKTMSPEDLKAMDAQIILSNTYHLWLRPGQDIIEEAGGLHTFMNWDKPILTDSGGFQVFSLSDLRKIEEEGVHFRNHLSGEKLFLSPEKAMQIQHSLGSDIMMAFDECPPYPADYSYMRQSVERTSRWAERCLTEHHQSGKSSIQGLFGIIQGGEYEELRKQSAKDLTSLDFPGYAVGGLSVGEPKDVMNRVLEFTTPLMPADKPRYLMGVGSPDSLIDGVIRGIDMFDCVLPTRIARNGTCMTSEGRLVVRNAKFARDFRPLDENCDCHVCRTYSRAYIRHLIKCEETFGFRLTTYHNLYFLLQLMKKVRQAIMEDRLQDFRDEFFESYGFNKENAKNF

SEQ ID NO: 52079 - protein, 383 aa, Bacillus lehensis
  REGION 1..383: note = tr|A0A060LRS2|A0A060LRS2_9BACI Queuine tRNA-ribosyltransferase OS=Bacillus lehensis G1 OX=1246626; GN = tgt PE=3 SV=1
MTVPITYEHIKTCKQTGARLGRVHTPHGTFETPMFMPVGTMATVKTMSPEDLKAMDAQIILSNTYHLWLRPGQDIVEEAGGLHTFMNWDKPILTDSGGFQVFSLSDLRKIEEEGVHFRNHLSGEKLFLSPEKAMQIQHSLGSDIMMAFDECPPYPADYSYMRQSVERTSRWAERCLTEHHQSGKSSIQGLFGIIQGGEYEELRKQSAKDLTSLDFPGYAVGGLSVGEPKDVMNRVLEFTTPLMPADKPRYLMGVGSPDSLIDGVIRGIDMFDCVLPTRIARNGTCMTSEGRLVVRNAKFARDFRPLDENCDCHVCRTYSRAYIRHLIKCEETFGFRLTTYHNLYFLLQLMKKVRQAIMEDRLQDFRDEFFESYGFNKENAKNF

SEQ ID NO: 52080 - protein, 379 aa, Bacillus lentus
  REGION 1..379: note = tr|A0A2X4VY94|A0A2X4VY94_BACLE Queuine tRNA-ribosyltransferase OS=Bacillus lentus OX=1467 GN=tgt; PE = 3 SV=1
MSAIKYELIKTCKQTGARLGMIHTPHGSFETPMFMPVGTLATVKTMSPEDLKTMGAGIILSNTYHLWLRPGHDIVQEAGGLHKFMNWDQAILTDSGGFQVFSLSDFREIKEEGVHFRNHLNGDKLFLSPEKSMEVQNALGADIMMAFDECPPFPATHEYMKKSVERTSRWAERCLKAHNRPEDQGLFGIVQGGEYEDLRKLSASDLISLDFPGYAIGGLSVGEPKDVMNKVLEFTAPLLPANKPRYLMGVGSPDSLIDGAIRGMDMFDCVLPTRIARNGTLMTSEGRLVVKNAKYARDFRPIDENCDCYTCKNYTRAYIRHLLKCDETFGIRLTTYHNLHFLLKLMEQVKNAIREDRLGDFKEEFFERYGFNRPDAKNF

SEQ ID NO: 52081 - protein, 381 aa, Bacillus licheniformis
  REGION 1..381: note = sp|Q65GP9|TGT_BACLD Queuine tRNA-ribosyltransferase; OS = Bacillus licheniformis (strain ATCC 14580 / DSM 13 / JCM 2505 / NBRC 12200 / NCIMB 9375 / NRRL NRS-1264 / Gibs on 46) OX=279010 GN=tgt PE=3 SV=1
MSQQPIRYEFIKACKQTGARLGRVHTPHGSFETPVFMPVGTLATVKTMSPEELKEMGADIILSNTYHLWLRPGHDIVKEAGGLHQFMNWNRAILTDSGGFQVFSLSEFRKIEEEGVHFRNHLNGDKLFLSPEKAMEIQNALGSDIMMAFDECPPYPAEYDYMKKSVERTSRWAERCLKAHNRPDEQGLFGIVQGGEYENLRKQSAKDLISLDFPGYAIGGLSVGEPKDVMNRVLEFTTPLLPADKPRYLMGVGSPDSLIDGAIRGVDMFDCVLPTRIARNGTLMTSEGRLVVKNAKYERDFRPIDEQCDCYTCRNYSRAYIRHLIRCNETFGIRLTSYHNLYFLLKLMGQVRDAIREDRLGDFREEFFERYGFNKPNAKSF

SEQ ID NO: 52082 - protein, 381 aa, Bacillus licheniformis
  REGION 1..381: note = tr|T5HN73|T5HN73_BACLI Queuine tRNA-ribosyltransferase OS=Bacillus licheniformis CG-B52; OX = 1368424 GN=tgt PE=3 SV=1
MSQQPIRYEFIKACKQTGARLGRVHTPHGSFETPVFMPVGTLATVKTMSPEELKEMGAGIILSNTYHLWLRPGHDIVKEAGGLHQFMNWNRAILTDSGGFQVFSLSEFRKIEEEGVHFRNHLNGDKLFLSPEKAMEIQNALGSDIMMAFDECPPYPAEYDYMKKSVERTSRWAERCLKAHNRPDEQGLFGIVQGGEYENLRKQSAKDLISLDFPGYAIGGLSVGEPKDVMNRVLEFTTPLLPADKPRYLMGVGSPDSLIDGAIRGVDMFDCVLPTRIARNGTLMTSEGRLVVKNAKYERDFRPIDEQCDCYTCRNYSRAYIRHLIRCNETFGIRLTSYHNLYFLLKLMGQVRDAIREDRLGDFREEFFERYGFNKPNAKSF

SEQ ID NO: 52083 - protein, 359 aa, Bacillus litoralis
  REGION 1..359: note = tr|A0A179SV07|A0A179SV07_9BACI Queuine tRNA-ribosyltransferase OS=Bacillus litoralis OX=152268; GN = tgt PE=3 SV=1
MVHTPHGSFETPVFMPVGTLATVKTMSPEDLKQMGAGIILSNTYHLWLRPGHEIVKEAGGLHKFMNWDRAILTDSGGFQVFSLSDMRRIEEEGVHFRNHLNGDKLFLSPEKAMHIQNDLGSDIMMAFDECPPYPAEYEYMKKSVERTSRWAERCLEAHNRPNEQGLFGIIQGGEYEELRKQSARDLVSLDFPGYAVGGLSVGEPKDVMNRVLDFTTPLMPANKPRYLMGVGSPDSLIDGAIRGIDMFDCVLPTRIARNGTLMTSEGRLVVKNAKFAKDFGPLDENCDCYTCRNYSRAYIRHLIKCDETFGLRLTSYHNLYFLVNLMEKVREAIREDRLGDFRDEFFEKYGFNKPNAKNF

SEQ ID NO: 52084 - protein, 381 aa, Bacillus litoralis
  REGION 1..381: note = tr|A0A5C6VZL0|A0A5C6VZL0_9BACI Queuine tRNA-ribosyltransferase OS=Bacillus litoralis OX=152268; GN = tgt PE=3 SV=1
MSTSPIRYELIKTCKQTGARLGIVHTPHGSFETPVFMPVGTLATVKTMSPEDLKQMGAGIILSNTYHLWLRPGNEIVKEAGGLHKFMNWDRSILTDSGGFQVFSLSDFRRIEEEGVHFRNHLNGDKLFLSPEKAMHIQNDLGSDIMMAFDECPPYPAEYDYMKKSVERTSRWAERCLEAHQRPNDQGLFGIIQGGEYEELRKQSARDLVSLDFPGYAVGGLSVGEPKDVMNRVLDFTTPLMPDNKPRYLMGVGSPDSLIDGAIRGIDMFDCVLPTRIARNGTLMTSEGRLVVKNAKFARDFGPLDENCDCYTCKNYSRAYIRHLIKSEETFGLRLTSYHNLYFLVNLMEQVRQAIREDRLGDFRDEFFEKYGFNKPNAKNF

SEQ ID NO: 52085 - protein, 379 aa, unidentified
  source 1..379: note = Bacillus loiseleuriae
  REGION 1..379: note = tr|A0A0K9GWT2|A0A0K9GWT2_9BACI Queuine tRNA-ribosyltransferase OS=Bacillus loiseleuriae; OX = 1679170 GN=tgt PE=3 SV=1
MTAIRYEHIKTCKQSGARLGIVHTPHGSYETPAFMPVGTMATVKTMSPEDLKQMGANIILSNTYHLWLRPGHDIIKEAGGLHKFMNWDRAILTDSGGFQVFSLSDFRKIEEEGVHFRNHLNGDKLFLSPEKAMEIQNALGSDIMMAFDECPPFPATEEYMRKSVERTSRWAERCLNAHERPQDQGLFGIVQGGEFEHLRKQSAKDLVSLDFPGYAIGGLSVGEPKDIMNRVLEFTTPLLPSDKPRYLMGVGSPDSLIDGAIRGVDMFDCVLPTRIARNGTLMTSNGRLVVKNAKYARDFGPIDENCDCHVCKNYSRAYIRHLIKCEETFGIRLTTYHNLHFLLNLMEQVRQAIREDRLLDFREEFFEQYGFNKPNARNF

SEQ ID NO: 52086 - protein, 382 aa, unidentified
  source 1..382: note = Bacillus lonarensis
  REGION 1..382: note = tr|A0A1G6JQA0|A0A1G6JQA0_9BACI Queuine tRNA-ribosyltransferase OS=Bacillus lonarensis OX=1464122; GN = tgt PE=3 SV=1
MAAVTYELIKTCKQSGARLGRVHTPRGSFETPMFMPVGTMATVKTLSPEDLKEVGAEIILSNTYHLWLRPGEDIIRQAGGLHKFMNWNGPILTDSGGFQVFSLSNLRKITEEGVQFRHHLSGEKLFLSPEKAMQIQHALGSDIMMAFDECPPYPAEYEYMKASVERTTRWATRCLETHEQSGQEKAQALFGIVQGGEYEALRKQSANDLTAMDFPGYAIGGLSVGEPKDVMNEVLEFTTPLLPTNKPRYLMGVGSPDSLIDGAVRGIDMFDCVLPTRIARNGTCMTSSGRLVVRNAAYASDFRPLDEQCACHVCRTYSRAYIRHLIKCEETFGFRLTSYHNLYFLLNLMKRVREAIQEDRLLDFRAELFEQYGFNKENARNF

SEQ ID NO: 52087 - protein, 379 aa, Bacillus luciferensis
  REGION 1..379: note = tr|A0A1E2VVZ7|A0A1E2VVZ7_9BACI Queuine tRNA-ribosyltransferase OS=Bacillus luciferensis OX=178774; GN = tgt PE=3 SV=1
MTAIRYEHIKTCKQTGARLGIVHTPHGSFETPAFMPVGTLATVKTMAPEDLKAMGSGIILSNTYHLWLRPGHEIIKKAGGLHKFMNWDRAILTDSGGFQVFSLSQFRKIEEEGVHFRNHLNGDKLFLSPEKAMEIQNALGSDIMMAFDECPPYPAEYDYMKRSVERTSRWAERCLNSHQRPEDQGLFGIVQGGEYEDLRKQSAKDLVSLDFPGYAIGGLSVGEPKDVMNRVLEFTTPFLPTDKPRYLMGVGSPDSLIDGAIRGVDMFDCVLPTRIARNGTCMTSEGRLVIKNAKYAEDYSPLDPNCDCYACKNYTRAYIRHLIRCEETFGMRLTTYHNLHFLLQLMEQVRQAIREDRLGDFREEFFEQYGFNKPNARNF

SEQ ID NO: 52088 - protein, 379 aa, unidentified; identical to SEQ ID NO: 51992
  source 1..379: note = Bacillus luti
  REGION 1..379: note = tr|A0A1J9ZZ40|A0A1J9ZZ40_9BACI Queuine tRNA-ribosyltransferase OS=Bacillus luti OX=2026191 GN=tgt; PE = 3 SV=1

SEQ ID NO: 52089 - protein, 379 aa, unidentified
  source 1..379: note = Bacillus manliponensis
  REGION 1..379: note = tr|A0A073JYR8|A0A073JYR8_9BACI Queuine tRNA-ribosyltransferase OS=Bacillus manliponensis; OX = 574376 GN=tgt PE=3 SV=1
MTAIRYELIKTCKQTGARLGRVHTPHGSFETPIFMPVGTLATVKTMSPEELKAMNAGIILSNTYHLWLRPGHEIVQEAGGLHKFMNWDRPILTDSGGFQVFSLSEFRRIEEEGVHFRNHLNGDKLFLSPEKAMEIQNALGSDIMMAFDECPPFPATYEYMKKSVERTSRWAERCLKAHARPEDQGLFGIVQGGEFEELRRQSAKDLVSMDFPGYAVGGLSVGEPKDIMNRVLEFTTPLLPDNKPRYLMGVGSPDSLIDGAMRGIDMFDCVLPTRIARNGTCMTSEGRLVVKNAKYAKDFGPLDPKCDCYTCTNYSRAYIRHLMKCDETFGIRLTSYHNLHFLLKLMEQVRQAIREDRLGDFREEFFEQYGFNKPNAKNF

SEQ ID NO: 52090 - protein, 379 aa, Bacillus marisflavi
  REGION 1..379: note = tr|A0A5D4RZV3|A0A5D4RZV3_9BACI Queuine tRNA-ribosyltransferase OS=Bacillus marisflavi OX=189381; GN = tgt PE=3 SV=1
MTAIRYEHIKTCKQTGARLGKVHTPHGTFETPVFMPVGTLATVKTMSPEDLKAMDAGIILSNTYHLWLRPGHEIIREAGGLHKFMNWDRAILTDSGGFQVFSLSKLRKIEEEGVHFRHHLNGDKLFLSPEKAMEIQNALGSDIMMAFDECPPYPAEYDYMKSSVERTSRWAERCLEAHQRPQDQGLFGIVQGGEYEELRKQSARDLTSLDFPGYAVGGLSVGEPKDVMNRVLEFTTPHLPFDKPRYLMGVGSPDSLIDGAIRGIDMFDCVLPTRIARNGTLMTSEGRLVVKNAKYARDFRPIDEKCDCYTCKNYSRAYIRHLIKCDETFGIRLTTYHNLHFLLNLMEQVRQAIREDRLGDFREDFFEQYGFNRPDAKNF

SEQ ID NO: 52091 - protein, 379 aa, Bacillus marisflavi
  REGION 1..379: note = tr|A0A0J5TJI0|A0A0J5TJI0_9BACI Queuine tRNA-ribosyltransferase OS=Bacillus marisflavi OX=189381; GN = tgt PE=3 SV=1
MTAIRYEHIKTCKQTGARLGKVHTPHGTFETPVFMPVGTLATVKTMSPEDLKAMDAGIILSNTYHLWLRPGHEIIREAGGLHKFMNWDRAILTDSGGFQVFSLSKLRKIEEEGVHFRHHLNGDKLFLSPEKAMEIQNALGSDIMMAFDECPPYPAEYEYMKSSVERTSRWAERCLEAHQRPQDQGLFGIVQGGEYEELRKQSARDLTSLDFPGYAVGGLSVGEPKDVMNRVLEFTTPHLPFDKPRYLMGVGSPDSLIDGAIRGIDMFDCVLPTRIARNGTLMTSEGRLVVKNAKYARDFRPIDEKCDCYTCKNYSRAYIRHLIKCDETFGIRLTTYHNLHFLLNLMEQVRQAIREDRLGDFREEFFEQYGFNRPDAKNF

SEQ ID NO: 52092 - protein, 379 aa, Bacillus marmarensis
  REGION 1..379: note = tr|U6STP1|U6STP1_9BACI Queuine tRNA-ribosyltransferase OS=Bacillus marmarensis DSM 21297; OX = 1188261 GN=tgt PE=3 SV=1
MAAVTYELIKTCKQSGARLGRVHTPHGTFETPIFMPVGTLATVKTMSPEDLYDMNAQIILSNTYHLWLRPGHDIVKEAGGLHKFMNWDRPILTDSGGFQVFSLSDLRKIEEEGVHFRNHLSGEKLFLSPEGAMDIQNALGSDIMMAFDECPPYPAEYSYMKDSVERTSRWAERCIEAHKRPEDQGLFGIVQGGEYEELRKQSAKDLVSMDFPGYAIGGLSVGEPKDVMNRVLEFTTPWLPDNKPRYLMGVGSPDSLIDGAIRGIDMFDCVLPTRIARNGTCMTSEGRLVVRNAKFARDFRPLDENCDCHVCQNYSRAYIRHLIKCEETFGFRLTTYHNLYFLLNLMEQVRQAIRDDRLLDFREEFFEQYGFNKPNAKNF

SEQ ID NO: 52093 - protein, 379 aa, Bacillus megaterium; identical to SEQ ID NO: 52002
  REGION 1..379: note = tr|D5DT32|D5DT32_BACMQ Queuine tRNA-ribosyltransferase OS=Bacillus megaterium (strain ATCC 12872 / QMB1551) OX=545693 GN=tgt PE=3 SV=1

SEQ ID NO: 52094 - protein, 379 aa, Bacillus megaterium; identical to SEQ ID NO: 52002
  REGION 1..379: note = tr|A0A109GCQ2|A0A109GCQ2_BACME Queuine tRNA-ribosyltransferase OS=Bacillus megaterium OX=1404; GN = tgt PE=3 SV=1

SEQ ID NO: 52095 - protein, 379 aa, unidentified
  source 1..379: note = Bacillus mesonae
  REGION 1..379: note = tr|A0A3Q9QX03|A0A3Q9QX03_9BACI Queuine tRNA-ribosyltransferase OS=Bacillus mesonae OX=1193713; GN = tgt PE=3 SV=1
MTAIRYELIKTCKQTGARLGKVHTPHGSFNTPAFMPVGTLATVKTMAPEELKGMGAGIILSNTYHLWLRPGHEIIKEAGGLHKFMNWDRAILTDSGGFQVFSLSEFRKIEEEGVHFRNHLSGEKLFLSPEKAMEIQNALGSDIMMAFDECPPYPATFEYMKNSVERTSRWAERCLQAHQRPEDQGLFGIVQGGEYEELRKQSAQDLVSLDFPGYAIGGLSVGEPKDIMNRMLEYTTPLLPANKPRYLMGVGSPDSLIDGAIRGVDMFDCVLPTRIARNGTLMTSEGRLVVKNAQYARDFGPLDPECDCYTCKNYSRAYIRHLIRCNETFGIRLTSYHNLYFLLKLMEKVRQAIQEDRLGDFREEFFERYGFNKPNARNF

SEQ ID NO: 52096 - protein, 379 aa, Bacillus methanolicus
  REGION 1..379: note = tr|I3EAW4|I3EAW4_BACMM Queuine tRNA-ribosyltransferase OS=Bacillus methanolicus (strain MGA3 / ATCC 53907) OX=796606 GN=tgt PE=3 SV=1
MTAIRFELIKTDKQTGARLGRVHTPHGSFDTPAFMPVGTLATVKTMAPEDLKEMGAGIILSNTYHLWLRPGHDIVEEAGGLHKFMNWDRAILTDSGGFQVFSLSEFRKIEEEGVYFRNHLNGDKLFLSPEKATEIQNSLGSDIMMVFDECPPFPATFEYMKKSVERTSRWAERCLKAHKRPNDQGLFGIVQGGEYEELRRLSARDLVSLDFPGYAIGGLSVGEPKDVMNRVLEFTTPLLPANKPRYLMGVGSPDSLIDGAIRGIDMFDCVLPTRIARNGTLMTSEGRLVVKNAKYARDFNPLDPNCDCYTCRNYTRAYIRHLIKSEETFGIRLTTYHNLYFLLKLMEQVRQAIREDRLGDFREEFFEKYGFNKPNAKNF

SEQ ID NO: 52097 - protein, 379 aa, Bacillus methanolicus
  REGION 1..379: note = tr|I3DXN8|I3DXN8_BACMT Queuine tRNA-ribosyltransferase OS=Bacillus methanolicus PB1; OX = 997296 GN=tgt PE=3 SV=1
MTAIRFELIKTDKQTGARLGRVHTPHGSFDTPAFMPVGTLATVKTMSPEELKEMGAGIILSNTYHLWLRPGHEIVKEAGGLHKFMNWDRAILTDSGGFQVFSLSEFRKIEEEGVHFRNHLNGDKLFLSPEKATEIQNALGSDIMMAFDECPSYPASFEYMKESVERTSRWAERCLKAHKRPNDQGLFGIVQGGEYEELRRLSAQDLVSLDFPGYAIGGLSVGEPKDVMNRVLEFTTPLLPANKPRYLMGVGSPDSLIDGAIRGIDMFDCVLPTRIARNGTLMTSEGRLVVKNAKYARDFGPLDPNCGCYTCRNYTRAYIRHLIKSDETFGIRLTTYHNLYFLLKLMEQVRQAIREDRLGDFREEFFEKYGFNKPNAKNF

SEQ ID NO: 52098 - protein, 379 aa, unidentified; identical to SEQ ID NO: 51992
  source 1..379: note = Bacillus mobilis
  REGION 1..379: note = tr|A0A1K0BDM9|A0A1K0BDM9_9BACI Queuine tRNA-ribosyltransferase OS=Bacillus mobilis OX=2026190; GN = tgt PE=3 SV=1

SEQ ID NO: 52099 - protein, 379 aa, Bacillus muralis
  REGION 1..379: note = tr|A0A1B3XRP6|A0A1B3XRP6_9BACI Queuine tRNA-ribosyltransferase OS=Bacillus muralis OX=264697; GN = tgt PE=3 SV=1
MTAIRYELIKTCKQTGARLGRVHTPHGSFDTPAFMPVGTLATVKTMSPEDLKQMGAGIILSNTYHLWLRPGHEIIKEAGGLHKFMNWDRAILTDSGGFQVFSLSEFRKIEEEGVHFRNHLNGDKLFLSPEKAMEIQNALGSDIMMAFDECPPFPATEEYMKKSVERTSRWAERCLNAHERPNDQGLFGIVQGGEFENLRKQSAKDLVSLDFPGYAIGGLSVGEPKDIMNRVLEFTSPLLPTNKPRYLMGVGSPDSLIDGAIRGVDMFDCVLPTRIARNGTLMTSNGRLVVKNAKYARDFGPIDENCDCHVCKNYSRAYIRHLIKCEETFGIRLTTYHNLHFLLNLMEQVRQAIREDRLGDFREEFFEQYGFNQPNARNF

SEQ ID NO: 52100 - protein, 379 aa, Bacillus mycoides
  REGION 1..379: note = tr|A0A1S8G350|A0A1S8G350_BACMY Queuine tRNA-ribosyltransferase OS=Bacillus mycoides OX=1405; GN = tgt PE=3 SV=1
MTAIRYEFIKTCKQTGARLGRVHTPHGSFDTPTFMPVGTLATVKTMSPEELKAMDSGIILSNTYHLWLRPGHEIIREAGGLHKFMNWDRAILTDSGGFQVFSLSDFRRIEEEGVHFRNHLNGDKLFLSPEKAMEIQNALGSDIMMAFDECPPFPATFEYMKKSVERTSRWAERCLKAHERPQDQGLFGIVQGGEFEELRRQSAKDLVSMDFPGYAVGGLSVGEPKDIMNRVLEFTTPLLPDNKPRYLMGVGSPDSLIDGAIRGIDMFDCVLPTRIARNGTCMTSQGRLVVKNAKFARDFGPLDPNCDCYTCKNYSRAYIRHLMKCDETFGIRLTSYHNLHFLLNLMEQVRQAIREDRLGDFREEFFEQYGFNKPNAKNF

SEQ ID NO: 52101 - protein, 379 aa, Bacillus mycoides; identical to SEQ ID NO: 52011
  REGION 1..379: note = sp|A9VIP3|TGT_BACMK Queuine tRNA-ribosyltransferase; OS = Bacillus mycoides (strain KBAB4) OX=315730 GN=tgt PE=3; SV = 1

SEQ ID NO: 52102 - protein, 381 aa, unidentified
  source 1..381: note = Bacillus nakamurai
  REGION 1..381: note = tr|A0A150F4T9|A0A150F4T9_9BACI Queuine tRNA-ribosyltransferase OS=Bacillus nakamurai OX=1793963; GN = tgt PE=3 SV=1
MAEQPIRYEFIKECKQTGARLGRVHTPHGSFETPVFMPVGTLATVKTMSPDELKSMDAGIILSNTYHLWLRPGHDIVKEAGGLHQFMNWDRAILTDSGGFQVFSLSKFRNIEEEGVHFRNHLNGDKLFLSPEKAMEIQNALGSDIMMAFDECPPYPAEYDYMKRSVERTSRWAERCLKAHARSDEQGLFGIVQGGEYEDLRTQSAKDLISLDFPGYAIGGLSVGEPKHVMNRVLEFTTPLLPKDKPRYLMGVGSPDALIDGAIRGVDMFDCVLPTRIARNGTVFTNEGRLNMKNAKYERDFRPIDEECSCHTCKNYSRAYIRHLIRCNETFGIRLTTYHNLHFLLHLMEQVRQAIREDRLGDFREEFFERYGYNKPNAKSF

SEQ ID NO: 52103 - protein, 379 aa, Bacillus nanhaiisediminis
  REGION 1..379: note = tr|A0A562QHN0|A0A562QHN0_9BACI Queuine tRNA-ribosyltransferase OS=Bacillus nanhaiisediminis; OX = 688079 GN=tgt PE=3 SV=1
MAAITYEHIKTCKQSGARLGRVHTPHGTFETPIFMPVGTLATVKTMSPEDLYDMNAQIILSNTYHLWLRPGHEIIREAGGLHKFMNWKRPILTDSGGFQVFSLSDLRKIEEEGVHFRNHLNGDKLFLSPEGAMEIQNALGSDIMMAFDECPPYPAEYDYMKKSVERTSRWAERCLTAHARPNDQGLFGIVQGGEYEDLRRQSAEDLVSLDFPGYAIGGLSVGEPKDVMNRVLEFTTPHLPTDKPRYLMGVGSADSLIDGAIRGIDMFDCVLPTRIARNGTLMTSTGRLVVRNAKYARDFRPLDENCDCHVCQNYSRAYIRHLVKCEETFGFRLTSYHNLYFLLNLMEQVRQAIREDRLLDFREEFFEQYGFNKPNAKNF

SEQ ID NO: 52104 - protein, 379 aa, Bacillus nealsonii
  REGION 1..379: note = tr|A0A2N0Z4K7|A0A2N0Z4K7_9BACI Queuine tRNA-ribosyltransferase OS=Bacillus nealsonii OX=115979; GN = tgt PE=3 SV=1
MTAIRYELIKTCKQTGARLGIVHTPHGSFETPAFMPVGTLATVKTMAPEDLKSMGANIILSNTYHLWLRPGHEIVKEAGGLHKFMNWDKAILTDSGGFQVFSLSDFRKIEEEGVHFRNHLNGDKLFLSPEKAMEIQNALGSDIMMAFDECPPYPAEYDYMKKSVERTSRWAERCLKAHNRPEDQGLFGIIQGGEYEELRKQSAKDLVSLDFPGYAVGGLSVGEPKDVMNRVLEFTTPLMPDNKPRYLMGVGSPDSLIDGAIRGIDMFDCVLPTRIARNGTVMTSDGRLVVKNAKYARDFGPLDPECDCYTCKNYSRAYIRHLIRCDETFGIRLTSYHNLYFLLNLMENVRQAIREDRLGDFKEEFFERYGFNKPNAKNF

SEQ ID NO: 52105 - protein, 379 aa, Bacillus nealsonii
  REGION 1..379: note = tr|R9CEC4|R9CEC4_9BACI Queuine tRNA-ribosyltransferase OS=Bacillus nealsonii AAU1; OX = 1202533 GN=tgt PE=3 SV=1
MTAIRYELIKTCKQTGARLGIVHTPHGSFETPAFMPVGTLATVKTMAPEDLKSMGANIILSNTYHLWLRPGHEIVKEAGGLHKFMNWDKAILTDSGGFQVFSLSDFRKIEEEGVHFRNHLNGDKLFLSPEKAMEIQNALGSDIMMAFDECPPYPAEYDYMKRSVERTSRWAERCLKAHNRPEDQGLFGIIQGGEYEELRKQSARDLVSLDFPGYAVGGLSVGEPKDVMNRVLEFTTPLMPDNKPRYLMGVGSPDSLIDGAIRGIDMFDCVLPTRIARNGTVMTSEGRLVVKNAKYARDFGPLDPECDCYTCKNYSRAYIRHLIRCDETFGIRLTSYHNLYFLLNLMENVRDAIKNDRLGDFKEEFFERYGFNKPNAKNF

SEQ ID NO: 52106 - protein, 379 aa, unidentified
  source 1..379: note = Bacillus notoginsengisoli
  REGION 1..379: note = tr|A0A417YTW0|A0A417YTW0_9BACI Queuine tRNA-ribosyltransferase OS=Bacillus notoginsengisoli; OX = 1578198 GN=tgt PE=3 SV=1
MAAIRYELIKTCKQTGARLGRVHTPHGSFETPIFMPVGTLATVKTMSPEDLKEMGAKIILSNTYHLWLRPGHEIIREAGGLHQFMNWDRPILTDSGGFQVFSLSKFRKIEEEGVHFRNHLNGDKLFLSPEKAMEIQNALGPDIMMAFDECPPFPATPEYMKNSVERTSRWAERCLKAHKRPEDQGLFGIVQGGEYEEFRKQSARDLVSLDFPGYAIGGLSVGEPKDVMNRVLEFTTPLLPANKPRYLMGVGSPDSLIDGAIRGVDMFDCVLPTRIARNGTLMTSTGRLVVKNAKYERDFGPIDENCSCYTCRNYSRAYIRHLIRCDETFGIRLTSYHNLHFLIELMEQVRQAIREDRLGDFREEYFERYGFNKPDAKNF

SEQ ID NO: 52107 - protein, 379 aa, unidentified
  source 1..379: note = Bacillus obstructivus
  REGION 1..379: note = tr|A0A1L8ZIE7|A0A1L8ZIE7_9BACI Queuine tRNA-ribosyltransferase OS=Bacillus obstructivus; OX = 1914540 GN=tgt PE=3 SV=1
MTAIKYELIKTCKQTGARLGKIHTPHGSYDTPMFMPVGTLATVKTMSPEELKQIGSGIILSNTYHLWLRPGHEIVKEAGGLHQFMNWDQAILTDSGGFQVFSLSDFRKIEEEGVYFRNHLNGDKLFLSPEKSMEIQNALGSDIMMAFDECPPFPATHEYMKKSVERTSRWAERCLTAHSRKHDQGLFGIVQGGEYEDLRKLSAKDLTSLDFPGYAVGGLSVGEPKDVMNRVLEFTTPLLPTNKPRYLMGVGSPDSLIDGAIRGIDMFDCVLPTRIGRNGTCMTSTGRLVIKNAKYARDYRPLDENCDCYTCKNYSRAYIRHLIKCDETFGIRLTTYHNLYFLIQLMQQVRQAIKEDRLGDFREEFFEQYGFNRPDAKNF

SEQ ID NO: 52108 - protein, 379 aa, Bacillus oceanisediminis
  REGION 1..379: note = tr|A0A1S1YJX5|A0A1S1YJX5_9BACI Queuine tRNA-ribosyltransferase OS=Bacillus oceanisediminis; OX = 665099 GN=tgt PE=3 SV=1
MTAIRYELIKTCKQTGARLGRVHTPHGSFETPVFMPVGTLATVKTMSPEELVEMGAGIILSNTYHLWLRPGQEIVEEAGGLHKFMNWDRAILTDSGGFQVFSLSEFRKIEEEGVHFRNHLNGDKLFLSPEKAMDIQNSLGSDIMMAFDECPPYPASFEYMKKSVERTSRWAERCLQAHKRPNDQGLFGIIQGGEYEELRKQSAKDLTSLDFPGYAVGGLSVGEPKDVMNRVLEFTTPLLPSDKPRYLMGVGSPDSLIDGSIRGIDMFDCVLPTRIARNGTLMTSNGRLVVKNAKFARDFGPIDENCDCYTCRNYSRAYIRHLIRCDETFGIRLTTYHNLYFLLKLMEQVRQAIRDDRLGDFREEFFERYGFNKPNAKNF

SEQ ID NO: 52109 - protein, 379 aa, Bacillus oceanisediminis; identical to SEQ ID NO: 52108
  REGION 1..379: note = tr|A0A169FX00|A0A169FX00_9BACI Queuine tRNA-ribosyltransferase OS=Bacillus oceanisediminis 2691; OX = 1196031 GN=tgt PE=3 SV=1

SEQ ID NO: 52110 - protein, 379 aa, Bacillus okhensis
  REGION 1..379: note = tr|A0A0B0IHD1|A0A0B0IHD1_9BACI Queuine tRNA-ribosyltransferase OS=Bacillus okhensis OX=333138; GN = tgt PE=3 SV=1
MTAITYEHIKTCKQSGARLGRVHTPHGTFETPIFMPVGTLATVKTMSPEDLYDMNAQIILSNTYHLWLRPGHDIIKEAGGLHKFMNWDSPILTDSGGFQVFSLSDLRKIEEEGVHFRNHLNGDKLFLSPEGAMDIQNALGSDIMMAFDECPPYPAEYDYMKKSVERTSRWAERCIKAHARPNDQGLFGIVQGGEYEDLRRQSAEDLISLDFPGYAIGGLSVGEPKDVMNRVLEFTTPHLPENKPRYLMGVGSADSLIDGAIRGIDMFDCVLPTRIARNGTLMTSTGRLVVRNAKYARDFRPLDENCDCHVCQNYSRAYIRHLIKCEETFGFRLTSYHNLYFLLNLMEQVRQAIREDRLLDFREEFFEQYGFNKPNAKNF

SEQ ID NO: 52111 - protein, 379 aa, Bacillus okuhidensis
  REGION 1..379: note = tr|A0A0M0KM70|A0A0M0KM70_9BACI Queuine tRNA-ribosyltransferase OS=Bacillus okuhidensis OX=136160; GN = tgt PE=3 SV=1
MAAVTYELIKTCKQSGARLGKLHTPHGTIETPIFMPVGTLATVKTMSPEELKQLGAQIILSNTYHLWLRPGHDIVKEAGGLHEFMNWDRPILTDSGGFQVFSLSDLRTIEEEGVHFRNHLSGEKLFLSPEGAMEIQNALGSDIMMAFDECPPYPAERDYMRPSVERTSRWAERCLKAHKRPEDQALFGIIQGGEYEDLRRQSAQDITSLDFPGYAIGGLSVGEPKDVMNRVLEFTTPLLPANKPRYLMGVGSPDSLIDGAIRGIDMFDCVLPTRIARNGTCMTSNGRLVVRNAKYARDFRPLDENCDCHVCQTYTRAYIRHLVKCDETFGFRLTTYHNLYFLLKLMKDVRQAILDDRLLDFREEFFEQYGFNQPNAKNF

SEQ ID NO: 52112 - protein, 380 aa, unidentified
  source 1..380: note = Bacillus oleivorans
  REGION 1..380: note = tr|A0A285CVS1|A0A285CVS1_9BACI Queuine tRNA-ribosyltransferase OS=Bacillus oleivorans OX=1448271; GN = tgt PE=3 SV=1
MTLPIRYEFIKACKQSGARLGILHTPHGSFETPMFMPVGTLATVKTMSPEDLKEMGAGVILSNTYHLWLRPGEDIVKGAGGLHGFMNWDQGILTDSGGFQVFSLSDMRRIEEEGVHFRNHLNGDRLFLSPEKAMEIQNALGSDIMMAFDECPPYPATFEYMKKSVERTSRWAERCLKAHKRKDVQGLFGIVQGGEYQELRELSAKDLVSLDFPGYAVGGLSVGEPKDVMNRVLEFTTPLLPADKPRYLMGVGSADSLIDGSIRGIDMFDCVLPTRIARNGTLMTSNGRLNIKNAKFERDYGPLDEHCDCYTCRNYSRAYIRHLIKANETFGIRLTTYHNLYFLLNLMKQVRQAIREDRLLDFREEFFEQYGFNRPNAKNF

SEQ ID NO: 52113 - protein, 379 aa, unidentified; identical to SEQ ID NO: 51992
  source 1..379: note = Bacillus pacificus
  REGION 1..379: note = tr|A0A1J9YQ29|A0A1J9YQ29_9BACI Queuine tRNA-ribosyltransferase OS=Bacillus pacificus OX=2026187; GN = tgt PE=3 SV=1

SEQ ID NO: 52114 - protein, 358 aa, unidentified
  source 1..358: note = Bacillus paralicheniformis
  REGION 1..358: note = tr|A0A1Q8GQH0|A0A1Q8GQH0_9BACI Queuine tRNA-ribosyltransferase OS=Bacillus paralicheniformis; OX = 1648923 GN=tgt PE=3 SV=1
MHTPHGSFETPVFMPVGTLATVKTMAPEELKEMGAGIILSNTYHLWLRPGHDIVKEAGGLHQFMNWDRAILTDSGGFQVFSLSEFRKIEEEGVHFRNHLNGDKLFLSPEKAMDIQNALGSDIMMAFDECPPYPAEYDYMKRSVERTSRWAERCLKAHKRPDEQGLFGIVQGGEYENLRKQSAKDLISLDFPGYAIGGLSVGEPKDVMNRVLEFTTPLLPADKPRYLMGVGSPDSLIDGAIRGVDMFDCVLPTRIARNGTLMTSEGRLVVKNAKYERDFRPIDEQCDCYTCRNYSRAYIRHLIRCNETFGIRLTSYHNLYFLLKLMGQVRDAIREDRLGDFREEFFERYGFNKPNAKSF

SEQ ID NO: 52115 - protein, 381 aa, unidentified; identical to SEQ ID NO: 51989
  source 1..381: note = Bacillus paralicheniformis
  REGION 1..381: note = tr|A0A5A9TKM1|A0A5A9TKM1_9BACI Queuine tRNA-ribosyltransferase OS=Bacillus paralicheniformis; OX = 1648923 GN=tgt PE=3 SV=1

SEQ ID NO: 52116 - protein, 379 aa, unidentified; identical to SEQ ID NO: 51992
  source 1..379: note = Bacillus paramycoides
  REGION 1..379: note = tr|A0A1J9VWK9|A0A1J9VWK9_9BACI Queuine tRNA-ribosyltransferase OS=Bacillus paramycoides; OX = 2026194 GN=tgt PE=3 SV=1

SEQ ID NO: 52117 - protein, 379 aa, unidentified; identical to SEQ ID NO: 51992
  source 1..379: note = Bacillus paranthracis
  REGION 1..379: note = tr|A0A1J9ZQ05|A0A1J9ZQ05_9BACI Queuine tRNA-ribosyltransferase OS=Bacillus paranthracis; OX = 2026186 GN=tgt PE=3 SV=1

SEQ ID NO: 52118 - protein, 379 aa, unidentified
  source 1..379: note = Bacillus persicus
  REGION 1..379: note = tr|A0A1H7XE53|A0A1H7XE53_9BACI Queuine tRNA-ribosyltransferase OS=Bacillus persicus OX=930146; GN = tgt PE=3 SV=1
MSAIRYEFIKTCKQTGARLGRVHTPHGSFDTPAFMPVGTLATVKTMSPEDLKEMGAGIILSNTYHLWLRPGHEIIKEAGGLHKFMNWDRPILTDSGGFQVFSLSEFRKIEEEGVHFRNHLNGDKLFLSPEGAMEIQNALGSDIMMAFDECPPYPATFDYMKASVERTSRWAERCLKAHKRPEDQGLFGIVQGGEYEELRKQSARDLVSLDFPGYAVGGLSVGEPKDVMNRALEFTTPLLPTNKPRYLMGVGSPDSLIDGAIRGIDMFDCVLPTRIARNGTLMTSEGRLVVKNAKYARDFNPIDKNCDCYTCQNYSRAYIRHLIKCEETFGIRLTTYHNLHFLLKLMEQVRQAIMEDRLGDFREEFFERYGFNKPNAKNF

SEQ ID NO: 52119 - protein, 379 aa, unidentified
  source 1..379: note = Bacillus praedii
  REGION 1..379: note = tr|A0A4R1AW33|A0A4R1AW33_9BACI Queuine tRNA-ribosyltransferase OS=Bacillus praedii OX=1742358; GN = tgt PE=3 SV=1
MTAIRYELIKTCKQTGARLGRVHTPHGSFETPVFMPVGTLATVKTMSPEELVQMGAGIILSNTYHLWLRPGQEIVEEAGGLHKFMNWDRAILTDSGGFQVFSLSEFRKIEEEGVHFRNHLNGDKLFLSPEKAMEIQNSLGSDIMMAFDECPPFPATYEYMQKSVERTSRWAERCLNAHKRPNDQGLFGIVQGGEYEELRKQSAKDLVSLDFPGYAVGGLSVGEPKDVMNRVLEFTTPLLPSNKPRYLMGVGSPDSLIDGAIRGIDMFDCVLPTRIARNGTLMTSEGRLVVKNAKFAKDFGPIDEHCDCYTCRNYSRAYIRHLIRCDETFGIRLTTYHNLYFLLKLMEQVRQAIREDRLGDFREEFFERYGFNKPNAKNF

SEQ ID NO: 52120 - protein, 379 aa, Bacillus pseudofirmus
  REGION 1..379: note = tr|A0A1Q9PQE9|A0A1Q9PQE9_BACPF Queuine tRNA-ribosyltransferase OS=Bacillus pseudofirmus OX=79885; GN = tgt PE=3 SV=1
MAAVTYELIKTCKQSGARLGRVHTPHGTFETPIFMPVGTLATVKTMSPEDLYDMNAQIILSNTYHLWLRPGHDIVKEAGGLHKFMNWDRPILTDSGGFQVFSLSDLRKIEEEGVHFRNHLSGEKLFLSPEGAMDIQNALGSDIMMAFDECPPYPAEYSYMKDSVERTSRWAERCIEAHKRPEDQGLFGIVQGGEYEELRKQSAKDLVSMDFPGYAVGGLSVGEPKDVMNRVLEFTTPWLPDNKPRYLMGVGSPDSLIDGAIRGIDMFDCVLPTRIARNGTCMTSEGRLVVRNAKFARDFRPLDENCDCHVCQNYSRAYIRHLIKCEETFGFRLTTYHNLYFLLNLMEQVRQAIRDDRLLDFREEFFEQYGFNKPNAKNF

SEQ ID NO: 52121 - protein, 379 aa, Bacillus pseudofirmus; identical to SEQ ID NO: 52092
  REGION 1..379: note = tr|D3FVV7|D3FVV7_BACPE Queuine tRNA-ribosyltransferase OS=Bacillus pseudofirmus (strain OF4) OX=398511 GN=tgt PE=3 SV=1

SEQ ID NO: 52122 - protein, 379 aa, Bacillus pseudomycoides
  REGION 1..379: note = tr|C3BQE9|C3BQE9_9BACI Queuine tRNA-ribosyltransferase OS=Bacillus pseudomycoides DSM 12442 OX=527000 GN=tgt PE=3 SV=1
MTAIRYEFIKTCKQTGARLGRVHTPHGSFDTPTFMPVGTLATVKTMSPEELKAMDSGIILSNTYHLWLRPGHEIVREAGGLHKFMNWDRAILTDSGGFQVFSLSDFRRIEEEGVHFRNHLNGDKLFLSPEKAMEIQNALGSDIMMAFDECPPFPATFEYMKKSVERTSRWAERCLKAHERPQDQGLFGIVQGGEFEELRRQSAKDLVSMDFPGYAVGGLSVGEPKDIMNRVLEFTTPLLPDNKPRYLMGVGSPDSLIDGAIRGIDMFDCVLPTRIARNGTCMTSQGRLVVKNAKFARDFGPLDPNCDCYTCKNYSRAYIRHLMKCDETFGIRLTSYHNLHFLLNLMEQVRQAIREDRLGDFREEFFEQYGFNKPNAKNF

SEQ ID NO: 52123 - protein, 379 aa, Bacillus pseudomycoides; identical to SEQ ID NO: 52122
  REGION 1..379: note = tr|A0A2A8B258|A0A2A8B258_9BACI Queuine tRNA-ribosyltransferase OS=Bacillus pseudomycoides; OX = 64104 GN=tgt PE=3 SV=1

SEQ ID NO: 52124 - protein, 381 aa, Bacillus pumilus
  REGION 1..381: note = sp|A8FFQ9|TGT_BACP2 Queuine tRNA-ribosyltransferase; OS = Bacillus pumilus (strain SAFR-032) OX=315750 GN=tgt; PE = 3 SV=1
MSQLPIRYEFIKSCKQTGARLGRVHTPHGSFDTPVFMPVGTLATVKTMAPEELKAMEAGIILSNTYHLWLRPGHDIVKEAGGLHKFMNWDRAILTDSGGFQVFSLSEFRKIEEEGVHFRNHLNGDKLFLSPEKAMDIQNALGSDIMMAFDECPPYPAEYDYMKRSVERTSRWAERCLTAHQRPEDQGLFGIIQGGEYEELRKQSAKDLVSLDFPGYAIGGLSVGEPKDVMNRVLEFTTPLLPADKPRYLMGVGSPDSLIDGAIRGVDMFDCVLPTRIARNGTLMTSEGRLVVKNAKYERDFRPIDENCDCYTCKNYTRAYIRHLIKTNETFGIRLTTYHNLHFLLKLMEQVREAIREDRLGDFKEEFFERYGFNEPNAKNF

SEQ ID NO: 52125 - protein, 381 aa, Bacillus pumilus
  REGION 1..381: note = tr|A0A2A5ITK9|A0A2A5ITK9_BACPU Queuine tRNA-ribosyltransferase OS=Bacillus pumilus OX=1408 GN=tgt; PE = 3 SV=1
MSQLPIRYEFIKSCKQTGARLGRVHTPHGSFETPVFMPVGTLATVKTMAPEELKAMDAGIILSNTYHLWLRPGHDIVKEAGGLHKFMNWDRAILTDSGGFQVFSLSEFRKIEEEGVHFRNHLNGDKLFLSPEKAMEIQNALGSDIMMAFDECPPYPAEYDYMKRSVERTSRWAERCLTAHQRPEDQGLFGIVQGGEYEELRKQSAKDLVSLDFPGYAIGGLSVGEPKDVMNRVLEFTTPFLPADKPRYLMGVGSPDSLIDGAIRGVDMFDCVLPTRIARNGTLMTSEGRLVVKNAKYERDFRPIDENCDCYTCKNYTRAYIRHLIRTNETFGIRLTTYHNLHFLLKLMEQVREAIREDRLGDFKEEFFERYGFNKPNAKNF

SEQ ID NO: 52126 - protein, 381 aa, Bacillus safensis
  REGION 1..381: note = tr|A0A5C0WK67|A0A5C0WK67_9BACI Queuine tRNA-ribosyltransferase OS=Bacillus safensis OX=561879; GN = tgt PE=3 SV=1
MSQLPIRYEFIKSCKQTGARLGRVHTPHGSFETPVFMPVGTLATVKTMAPEELKAMDAGIILSNTYHLWLRPGHDIVKEAGGLHKFMNWDRAILTDSGGFQVFSLSEFRKIEEEGVHFRNHLNGDKLFLSPEKAMDIQNALGSDIMMAFDECPPYPAEYDYMKRSVERTSRWAERCLSAHQRPEDQGLFGIVQGGEYEELRKQSAKDLVSLDFPGYAIGGLSVGEPKDVMNRVLEFTTPFLPADKPRYLMGVGSPDSLIDGAIRGVDMFDCVLPTRIARNGTLMTSEGRLVVKNAKYERDFRPIDENCDCYTCKNYTRAYIRHLIRTNETFGIRLTTYHNLHFLLKLMEQVREAIREDRLGDFKEEFFERYGFNKPNAKNF

SEQ ID NO: 52127 - protein, 381 aa, Bacillus safensis
  REGION 1..381: note = tr|A0A1L6ZH57|A0A1L6ZH57_9BACI Queuine tRNA-ribosyltransferase OS=Bacillus safensis OX=561879; GN = tgt PE=3 SV=1
MSQSPIRYEFIKSCKQTGARLGRVHTPHGSFETPVFMPVGTLATVKTMAPEELKAMDAGIILSNTYHLWLRPGHDIVKEAGGLHKFMNWDRAILTDSGGFQVFSLSEFRKIEEEGVHFRNHLNGDKLFLSPEKAMDIQNALGSDIMMAFDECPPYPAEYDYMKRSVERTSRWAERCLTAHQRPEDQGLFGIVQGGEYEELRKQSAKDLVSLDFPGYAIGGLSVGEPKDVMNRVLEFTTPFLPADKPRYLMGVGSPDSLIDGAIRGVDMFDCVLPTRIARNGTLMTSEGRLVVKNAKYERDFRPIDENCDCYTCKNYTRAYIRHLIRTNETFGIRLTTYHNLHFLLKLMEQVREAIREDRLGDFKEEFFERYGFNKPNAKNF

SEQ ID NO: 52128 - protein, 379 aa, unidentified
  source 1..379: note = Bacillus salacetis
  REGION 1..379: note = tr|A0A3A1R4L9|A0A3A1R4L9_9BACI Queuine tRNA-ribosyltransferase OS=Bacillus salacetis OX=2315464; GN = tgt PE=3 SV=1
MTAIRYEHIKTCKQTGARLGRVHTPHGSFDTPVFMPVGTLATVKTMSPEDLKSMEAGIILSNTYHLWLRPGHEIIREAGGLHKFMNWDRAILTDSGGFQVFSLSEFRRIEEEGVHFRNHLNGDKLFLSPEKAMEIQNALGSDIMMAFDECPPYPAERDYMKRSVERTSRWAERCLEAHQRPQDQGLFGIVQGGEYEDLRRQSAKDLVSLDFPGYAVGGLSVGEPKDVMNRVLEFTTPLLPDDKPRYLMGVGSPDALIDGAMRGIDMFDCVLPTRIARNGTLMTSKGRLVVKNAKYARDFSPIDENCDCYTCRNYSRAYIRHLIKCDESFGIRLTTYHNLHFLLKLMEQVRQAIREDRLGDFREEFFEAYGYNRPDAKNF

SEQ ID NO: 52129 - protein, 379 aa, Bacillus salarius
  REGION 1..379: note = tr|A0A3R9QFE0|A0A3R9QFE0_9BACI Queuine tRNA-ribosyltransferase OS=Bacillus salarius OX=284579; GN = tgt PE=3 SV=1
MAAITYELIKTCKQSGARLGKIHTPHGSIDTPIFMPVGTLATVKTLSPDELDEMAAQVILSNTYHLWLRPGEDIVEEAGGLHSFMNWDKPILTDSGGYQVFSLSDLRDIKEEGVHFRNHISGEKLFLSPEKAMTIQNALGPDMMMAFDECPPYPAEEAYMKASVERTSRWAERCLEAHQRPNDQALFGIIQGGEYEHLRKQSANDLISLNFPGYAIGGLSVGEPKDVMNHVLDFTTPLLPKDKPRYLMGVGSADSLIDGAIRGVDMFDCVLPTRIARNGACMTSNGRLVVRNAAYARDFGPIDENCNCYTCRNYSRAYIRHLVKAKETFGFRLTSYHNLYFLLNLMEQVREAIREDRLLDFREAFFEQYGFNSPNAKNF

SEQ ID NO: 52130 - protein, 379 aa, Bacillus salarius
  REGION 1..379: note = tr|A0A428N7P7|A0A428N7P7_9BACI Queuine tRNA-ribosyltransferase OS=Bacillus salarius OX=284579; GN = tgt PE=3 SV=1
MAAITYELIKTCKQSGARLGKIHTPHGSIDTPIFMPVGTLATVKTLSPDELDEMAAQVILSNTYHLWLRPGEDIVQEAGGLHSFMNWDKPILTDSGGYQVFSLSDLRNIKEEGVHFRNHISGEKLFLSPEKAMTIQNALGPDMMMAFDECPPYPAEEEYMKASVERTSRWAERCLEAHQRPSDQALFGIVQGGEYEYLRKQSANDLISLDFPGYAIGGLSVGEPKDVMNHVLDFTTPLLPKDKPRYLMGVGSADSLIDGAIRGVDMFDCVLPTRIARNGACMTSNGRLVVRNAAYARDFKPIDENCNCYTCRNYSRAYIRHLVKSNETFGFRLTSYHNLYFLLNLMKQVREAILEDRLLDFREAFFEQYGFNSPNAKNF

SEQ ID NO: 52131 - protein, 380 aa, unidentified
  source 1..380: note = Bacillus salsus
  REGION 1..380: note = tr|A0A1H0V5K4|A0A1H0V5K4_9BACI Queuine tRNA-ribosyltransferase OS=Bacillus salsus OX=930152; GN = tgt PE=3 SV=1
MTAAVTYELIKTCKQTGARLGKVHTPHGSFDTPAFMPVGTMATVKTMAPEELKEMGSNIILSNTYHLWLRPGHEIIKGAGGLHKFMNWDRAILTDSGGFQVFSLSQFRKIEEEGVHFRNHLNGDKLFLSPEKAMEIQNALGSDIMMAFDECPPYPAEFDYMKKSVERTSRWAERCLQAHARPQDQGLFGIIQGGEYEELRKQSAKDLVSMDFPGYAVGGLSVGEPKDVMNRVLEFTTPLMPSNKPRYLMGVGSPDSLIDGAIRGIDMFDCVLPTRIARNGTLMTSEGRLVVKNAKYAEDYGPIDPNCSCYTCKNYSRAYIRHLIRCEETFGIRLTTYHNLHFLLKLMEQVRQAIMEDRLGDFREEFFEQYGFNKPNAKNF

SEQ ID NO: 52132 - protein, 379 aa, Bacillus selenatarsenatis
  REGION 1..379: note = tr|A0A0A8XAU8|A0A0A8XAU8_9BACI Queuine tRNA-ribosyltransferase OS=Bacillus selenatarsenatis SF-1; OX = 1321606 GN=tgt PE=3 SV=1
MSAIRYELIKTCKQTGARLGRVHTPHGSFETPVFMPVGTLATVKTMSPEELVQMGAGIILSNTYHLWLRPGHEIIKEAGGLHKFMNWDRAILTDSGGFQVFSLSEFRKIEEEGVHFRNHLNGDKLFLSPEKAMEIQNALGSDIMMAFDECPPYPAEYDYMKKSVERTSRWAERCLTAHQRPQDQGLFGIVQGGEYEELRKQSAKDLVSMDFPGYAVGGLSVGEPKDVMDRVLEFTTPWLPTDKPRYLMGVGSPDSLIDGAIRGIDMFDCVLPTRIARNGTLMTSEGRLVVKNAKFARDFGPLDPNCDCYTCKNYSRAYIRHLIKTDESFGIRLTSYHNLYFLLKLMEQVRQAIREDRLGDFREEFFEQYGYNKPNAKNF

SEQ ID NO: 52133 - protein, 379 aa, Bacillus selenitireducens
  REGION 1..379: note = tr|D6XWZ2|D6XWZ2_BACIE Queuine tRNA-ribosyltransferase OS=Bacillus selenitireducens (strain ATCC 700615 / DSM 15326 / MLS10) OX=439292 GN=tgt; PE = 3 SV=1
MTAITYEHIKTCKQSGARLGKVHTPHGSFETPIFMPVGTLATVKTMSPEDLLQMNAQIILSNTYHLWLRPGEDIVKEAGGLHQFMNWHRPILTDSGGFQVFSLSDLRNITEEGVHFRNHLSGEKLFLSPEKAMRIQNDLGPDIMMAFDECPPYPAEHAYMKASVERTSRWAERCLEGHKRPEDQGLFGIVQGGEYEDLRKQSAKDLVSLDFPGYAIGGLSVGEPKDVMNRVLEFTTPWLPEDKPRYLMGVGTADSLIDGAIRGVDMFDCVLPTRIARNGTLMTSKGRLVVRNAKFARDFRPLDENCSCYVCQNHSRAYIRHLIKANETLGLRLCSYHNLHFLIDLMEQVRQAIREDRLLDFRESFFEEYGFNRPDAKNF

SEQ ID NO: 52134 - protein, 379 aa, Bacillus shackletonii
  REGION 1..379: note = tr|A0A0Q3TIG7|A0A0Q3TIG7_9BACI Queuine tRNA-ribosyltransferase OS=Bacillus shackletonii OX=157838; GN = tgt PE=3 SV=1
MTAIKYELIKTCKQTGARLGKIHTPHGSYDTPMFMPVGTLATVKTMSPEELKEIGSGVILSNTYHLWLRPGHEIVREAGGLHQFMNWDQAILTDSGGFQVFSLSDFRKIEEEGVHFRNHLNGDKLFLSPEKSMEIQNALGSDIMMAFDECPPFPATHEYMKKSVERTSRWAERCLKSHNRPSDQGLFGIVQGGEYEDLRRLSAADLTSLDFPGYAVGGLSVGEPKDVMNRVLEFTTPLLPANKPRYLMGVGSPDSLIDGAIRGIDMFDCVLPTRIARNGTVMTSEGRLVVKNAKYARDFSPLDKNCDCYACRNYTRAYIRHLIKCDETFGIRLTSYHNLYFLLQLMKEVRQAIKEDRLGDFREEFFEQYGFNRPDAKNF

SEQ ID NO: 52135 - protein, 381 aa, Bacillus siamensis
  REGION 1..381: note = tr|A0A268DRZ9|A0A268DRZ9_9BACI Queuine tRNA-ribosyltransferase OS=Bacillus siamensis OX=659243; GN = tgt PE=3 SV=1
MAEQPIRYEFIKECKQTGARLGRVHTPHGSFETPVFMPVGTLATVKTMSPDELKSMDAGIILSNTYHLWLRPGHDIVKEAGGLHQFMNWDRAILTDSGGFQVFSLSKFRNIEEEGVHFRNHLNGDKLFLSPEKAMEIQNALGSDIMMAFDECPPYPAEYDYMKRSVERTSRWAERCLEAHGRSDEQGLFGIVQGGEYEDLRTQSAKDLVSLDFPGYAIGGLSVGEPKHVMNRVLEFTTPLLPKDKPRYLMGVGSPDALIDGAIRGVDMFDCVLPTRIARNGTVFTNEGRLNMKNAKYERDFRPIDEECSCHTCKNYSRAYIRHLIRCNETFGIRLTTYHNLHFLLHLMEQVRQAIREDRLGDFREEFFERYGYNKPNAKSF

SEQ ID NO: 52136 - protein, 381 aa, Bacillus siamensis
  REGION 1..381: note = tr|A0A2K9K8S1|A0A2K9K8S1_9BACI Queuine tRNA-ribosyltransferase OS=Bacillus siamensis OX=659243; GN = tgt PE=3 SV=1
MAEQPIRYEFIKECKQTGARLGRVHTPHGSFETPVFMPVGTLATVKTMSPDELKSMDAGIILSNTYHLWLRPGHDIVKEAGGLHQFMNWDRAILTDSGGFQVFSLSKFRNIEEEGVHFRNHLNGDQLFLSPEKAMEIQNALGSDIMMAFDECPPYPAEYDYMKRSVERTSRWAERCLEAHGRSDEQGLFGIVQGGEYEDLRTQSAKDLVSLDFPGYAIGGLSVGEPKHVMNRVLEFTTPLLPKDKPRYLMGVGSPDALIDGAIRGVDMFDCVLPTRIARNGTVFTNEGRLNMKNAKYERDFRPIDEECSCHTCKNYSRAYIRHLIRCNETFGIRLTTYHNLHFLLHLMEQVRQAIREDRLGDFREEFFERYGYNKPNAKSF

SEQ ID NO: 52137 - protein, 379 aa, Bacillus simplex
  REGION 1..379: note = tr|A0A1N6QUS2|A0A1N6QUS2_9BACI Queuine tRNA-ribosyltransferase OS=Bacillus simplex OX=1478 GN=tgt; PE = 3 SV=1
MTAIRYELIKTCKQTGARLGRVHTPHGSFETPAFMPVGTMATVKTMSPEDLKQMGAGIILSNTYHLWLRPGHEIIKEAGGLHKFMNWDRAILTDSGGFQVFSLSEFRKIEEEGVHFRNHLNGDKLFLSPEKAMEIQNALGSDIMMAFDECPPFPATEEYMKKSVERTSRWAERCLNAHERPNDQGLFGIVQGGEFENLRKQSAKDLVSLDFPGYAIGGLSVGEPKDIMNRVLEFTSPLLPTDKPRYLMGVGSPDSLIDGALRGIDMFDCVLPTRIARNGTLMTSNGRLVVKNAKYARDFGPIDENCDCHVCKNYSRAYIRHLIKCEETFGIRLTTYHNLHFLLNLMEQVRQAIREDRLGDFREEFFEQYGFNEPNARNF

SEQ ID NO: 52138 - protein, 379 aa, Bacillus simplex
  REGION 1..379: note = tr|A0A098FI29|A0A098FI29_9BACI Queuine tRNA-ribosyltransferase OS=Bacillus simplex OX=1478 GN=tgt; PE = 3 SV=1
MTAIRYELIKTCKQTGARLGRVHTPHGSFETPAFMPVGTMATVKTMSPEDLKQMGAGIILSNTYHLWLRPGHEIIKEAGGLHKFMNWDRAILTDSGGFQVFSLSEFRKIEEEGVHFRNHLNGDKLFLSPEKAMEIQNALGSDIMMAFDECPPFPATEEYMKKSVERTSRWAERCLNAHERPNDQGLFGIVQGGEFENLRKQSAKDLVSLDFPGYAIGGLSVGEPKDIMNRVLEFTTPLLPSDKPRYLMGVGSPDSLIDGALRGVDMFDCVLPTRIARNGTLMTSNGRLVVKNAKYARDFGPIDENCDCHVCKNYSRAYIRHLIKCEETFGIRLTTYHNLHFLLNLMEQVRQAIREDRLGDFREEFFEQYGFNEPNARNF

SEQ ID NO: 52139 - protein, 379 aa, Bacillus smithii
  REGION 1..379: note = tr|G9QQ31|G9QQ31_9BACI Queuine tRNA-ribosyltransferase OS=Bacillus smithii 7_3_47FAA; OX = 665952 GN=tgt PE=3 SV=1
MPAIKYELLKTCKQTGARLGRVTTPHGSFETPMFMPVGTLATVKTMSPEELKEMGAKIILSNTYHLWLRPGHDIIQEAGGLHSFMNWDGAILTDSGGFQVFSLSKLRRIEEEGVYFRNHLNGEKLFLSPEKAMEIQNALGSDIMMAFDECPPYPAEFDYMKKSIERTSRWAERCLKAHKRPEDQGLFGIVQGGEYKELRRQSANDLVSLDFPGYAIGGLSVGEPKEVMNEMLEFTTPLLPADKPRYLMGVGSPDSLIDGAIRGIDMFDCVLPTRIARNGTLMTSQGRLVVKNAKYARDFRPIDEQCDCYTCRNYSRAYIRHLIHTNETLGIRLTTYHNLYFLLKLMEKIRQAIREDRLGDFREEFFEQYGFNRPDAKNF

SEQ ID NO: 52140 - protein, 379 aa, Bacillus smithii; identical to SEQ ID NO: 52139
  REGION 1..379: note = tr|A0A0H4P4T7|A0A0H4P4T7_9BACI Queuine tRNA-ribosyltransferase OS=Bacillus smithii OX=1479 GN=tgt; PE = 3 SV=1

SEQ ID NO: 52141 - protein, 379 aa, unidentified
  source 1..379: note = Bacillus solani
  REGION 1..379: note = tr|A0A0Q3TBR2|A0A0Q3TBR2_9BACI Queuine tRNA-ribosyltransferase OS=Bacillus solani OX=1637975; GN = tgt PE=3 SV=1
MTAIRYELIKTCKQTGARLGRVHTPHGSFETPVFMPVGTLATVKTMSPEELVEMGAGIILSNTYHLWLRPGQEIVEEAGGLHKFMNWDRAILTDSGGFQVFSLSEFRKIEEEGVHFRNHLNGDKLFLSPEKAMEIQNSLGSDIMMAFDECPPYPATYEYMQKSVERTSRWAERCLQAHKRPKDQGLFGIVQGGEYEELRKQSAKDLVSLDFPGYAVGGLSVGEPKDIMNRVLEFTTPLLPANKPRYLMGVGSPDSLIDGAIRGIDMFDCVLPTRIARNGTLMTSEGRLVVKNAKFARDFGPIDEHCDCYTCRNYSRAYIRHLIRCDETFGIRLTTYHNLYFLLKLMEQVRQAIREDRLGDFREEFFERYGFNKPNAKNF

SEQ ID NO: 52142 - protein, 379 aa, unidentified
  source 1..379: note = Bacillus solimangrovi
  REGION 1..379: note = tr|A0A1E5LBN6|A0A1E5LBN6_9BACI Queuine tRNA-ribosyltransferase OS=Bacillus solimangrovi; OX = 1305675 GN=tgt PE=3 SV=1
MTAIRYELIKTCKQTGARLGKVHTPHGSFDTPVFMPVGTLATVKTMSPGELEEMGANIILSNTYHLWLRPGEDIVKGAGGLHKFMNWNGSILTDSGGFQVFSLSDLRKIEEEGVHFRNHLSGEKLFLSPEKAMQIQNALGSDIMMAFDECPPYPAEYDYMKASVERTSRWAERCLTAHERPQDQGLFGIVQGGEYEDLRKLSARDLISLDFPGYAIGGLSVGEPKDVMNRVLEFTTPLLPSEKPRYLMGVGSPDSLIDGAIRGVDMFDCVLPTRIARNGTLMTSEGRLVVRNAKYARDYGPLDPNCDCHVCRNYSRAYIRHLVKCNETYGFRLTTYHNLYFLLKLMKQVREAILEDRLGDFRDEFFEQYGFNKPNAKNF

SEQ ID NO: 52143 - protein, 381 aa, Bacillus sonorensis
  REGION 1..381: note = tr|M5P6Q2|M5P6Q2_9BACI Queuine tRNA-ribosyltransferase OS=Bacillus sonorensis L12; OX = 1274524 GN=tgt PE=3 SV=1
MSQQPIRYEFIKACKQTGARLGKVHTPHGSFETPAFMPVGTLATVKTMAPEELKEMGAGIILSNTYHLWLRPGHEIVKEAGGLHKFMNWDRAILTDSGGFQVFSLSEFRKIEEEGVHFRNHLNGDKLFLSPEKAMDIQNALGSDIMMAFDECPPYPAEYDYMKKSVERTSRWAERCLAAHKRPDEQGLFGIVQGGEYEDLRKQSAKDLISLDFPGYAIGGLSVGEPKDVMNRVLEFTMPLLPADKPRYLMGVGSPDSLIDGAIRGVDMFDCVLPTRIARNGTLMTSEGRLVVKNAKYERDFRPIDEHCDCYTCRNYSRAYIRHLIRCNETFGIRLTSYHNLYFLLKLMGQVREAIREDRLGDFREEFFERYGFNKPNAKSF

SEQ ID NO: 52144 - protein, 381 aa, unidentified
  source 1..381: note = [Bacillus] sp.
  REGION 1..381: note = tr|A0A150YL32|A0A150YL32_9BACI Queuine tRNA-ribosyltransferase OS=[Bacillus] sp. KCTC 13219; OX = 1811976 GN=tgt PE=3 SV=1
MTQPAIRYELIKTCKQTGARLGIVHTPHGSFETPTFMPVGTQATVKAMSPEELKEMNAGIILSNTYHLWLRPGHDIVKEAGGLHKFMNWDRPILTDSGGFQVFSLSKFRKIEEEGVYFRNHLNGDKLFLSPEKAMEIQNDLGSDIMMAFDECPPYPATYDYMLKSVDRTTRWAKRCKEAHQRPEEQGLFGIIQGGEYEELRRRSAEALVELDFPGYAIGGLSVGEPKEVMNRVLDFTAPLMPENKPRYLMGVGSPDSLIDGAIRGIDMFDCVLPTRIARNGTLMTSEGRMVIKNAKFARDFRPIDENCDCYTCKNYTRAYVRHLLRTEETFGLRLTSYHNLRFLIKLMEDVRQAIREDRLGDFKEEFFEKYGYNLPDAKNF

SEQ ID NO: 52145 - protein, 379 aa, Bacillus sp.
  REGION 1..379: note = tr|A0A0Q9GI17|A0A0Q9GI17_9BACI Queuine tRNA-ribosyltransferase OS=Bacillus sp. Root239 OX=1736499; GN = tgt PE=3 SV=1
MTAIRYEHIKTCKQTGARLGIVHTPHGSFETPIFMPVGTLATVKTMSPEDLKAMGAGIILSNTYHLWLRPGHEIVEKAGGLHKFMNWDRPILTDSGGFQVFSLSDLRRIEEEGVHFRNHLNGDKLFLSPEKAMDIQNALGSDIMMAFDECPPYPAEYDYLKRSVERTSRWAERCLEAHSRPQDQGLFGIVQGGEFEDLRRQSAADLVSMDFPGYAVGGLSVGEPKDVMNRVLEFTTPYLPTDKPRYLMGVGSPDSLIDGAIRGIDMFDCVLPTRIARNGTLMTSEGRLVVKNAKYAEDFGPIDPNCDCYTCQNYSRAYIRHLIRCNETFGIRLTSYHNLYFLLNLMEQVREAIREDRLGDFRDEFFEKYGFNGPDAKNF

SEQ ID NO: 52146 - protein, 379 aa, Bacillus sp.; identical to SEQ ID NO: 51992
  REGION 1..379: note = tr|A0A2B4NRG1|A0A2B4NRG1_9BACI Queuine tRNA-ribosyltransferase OS=Bacillus sp. AFS075960; OX = 2034282 GN=tgt PE=3 SV=1

SEQ ID NO: 52147 - protein, 379 aa, Bacillus sporothermodurans
  REGION 1..379: note = tr|A0A2T6EM64|A0A2T6EM64_9BACI Queuine tRNA-ribosyltransferase OS=Bacillus sporothermodurans; OX = 46224 GN=tgt PE=3 SV=1
MTAIKYELIKTCKQTGARLGKIHTPHGSYDTPMFMPVGTLATVKTMSPEELKEIGSGIILSNTYHLWLRPGHEIVKEAGGLHKFMNWDQAILTDSGGFQVFSLSHFRKIEEEGVFFRNHLNGDKLFLSPEKSMEIQNALGSDIMMAFDECPPFPATHDYMKKSVERTSRWAERCLSAHSRIEDQGLFGIVQGGEYEDLRKLSAKDLTSLDFPGYAVGGLSVGEPKDVMNRVLEFTTPLLPTNKPRYLMGVGSPDSLIDGAIRGIDMFDCVLPTRIGRNGTCMTSTGRLVVKNAKYARDFRPLDENCNCHTCQNYSRAYIRHLIKCDETFGIRLTTYHNLHFLIQLMQQVRQAIKEDRLGDFREEFFEQYGFNRPDAKNF

SEQ ID NO: 52148 - protein, 379 aa, Bacillus sporothermodurans
  REGION 1..379: note = tr|A0A150LFT5|A0A150LFT5_9BACI Queuine tRNA-ribosyltransferase OS=Bacillus sporothermodurans; OX = 46224 GN=tgt PE=3 SV=1
MTAIKYELIKTCKQTGARLGKIHTPHGSYDTPMFMPVGTLATVKTMSPEELKEIGSGIILSNTYHLWLRPGHEIVKEAGGLHKFMNWDQAILTDSGGFQVFSLSHFRKIEEEGVFFRNHLNGDKLFLSPEKSMEIQNALGSDIMMAFDECPPFPATHDYMKKSVERTSRWAERCLSAHSRTEDQGLFGIVQGGEYEDLRKLSAKDLTSLDFPGYAVGGLSVGEPKDVMNRVLEFTTPLLPTNKPRYLMGVGSPDSLIDGAIRGIDMFDCVLPTRIGRNGTCMTSTGRLVVKNAKYARDFRPLDENCNCHTCQNYSRAYIRHLIKCDETFGIRLTTYHNLHFLIQLMQQVRQAIKEDRLGDFREEFFEQYGFNRPDAKNF

SEQ ID NO: 52149 - protein, 381 aa, Bacillus stratosphericus; identical to SEQ ID NO: 51990
  REGION 1..381: note = tr|M5QYT4|M5QYT4_9BACI Queuine tRNA-ribosyltransferase OS=Bacillus stratosphericus LAMA 585 OX=1236481 GN=tgt PE=3 SV=1

SEQ ID NO: 52150 - protein, 381 aa, Bacillus stratosphericus; identical to SEQ ID NO: 52127
  REGION 1..381: note = tr|A0A4Y9JU33|A0A4Y9JU33_9BACI Queuine tRNA-ribosyltransferase OS=Bacillus stratosphericus; OX = 293386 GN=tgt PE=3 SV=1

SEQ ID NO: 52151 - protein, 379 aa, Bacillus subterraneus
  REGION 1..379: note = tr|A0A0D6Z5U5|A0A0D6Z5U5_9BACI Queuine tRNA-ribosyltransferase OS=Bacillus subterraneus OX=285983; GN = tgt PE=3 SV=1
MSAIRYELIKTCKQTGARLGRVHTPHGSFETPVFMPVGTLATVKTMSPEELVQMGAGIILSNTYHLWLRPGHDIIEEAGGLHKFMNWDRAILTDSGGFQVFSLSDLRKIEEEGVHFRNHLNGDKLFLSPEKAIQIQNALGSDIMMAFDECPPYPAEYDYLKKSVERTSRWAERCLTAHQRPQDQGLFGIVQGGENEELRKQSATDLVSLDFPGYAIGGLSVGEPKEVMNRVLEFTTPWLPTDKPRYLMGVGSPDSLIDGAIRGIDMFDCVLPTRIARNGTLMTSEGRLVVKNAKFARDFGPLDPNCDCYTCKNYSRAYIRHLIKTDETFGIRLTSYHNLHFLINLMEQVRQAIREDRLGDFRDEFFEQYGFNKPNAKNF

SEQ ID NO: 52152 - protein, 379 aa, Bacillus subterraneus
  REGION 1..379: note = tr|A0A3R9FEM7|A0A3R9FEM7_9BACI Queuine tRNA-ribosyltransferase OS=Bacillus subterraneus OX=285983; GN = tgt PE=3 SV=1
MSAIRYELIKTCKQTGARLGRVHTPHGSFETPVFMPVGTLATVKTMSPEELVEMGAGIILSNTYHLWLRPGHEIVKEAGGLHKFMNWDRAILTDSGGFQVFSLSEFRKIEEEGVHFRNHLNGDKLFLSPEKAMEIQNALGSDIMMAFDECPPYPAEYDYMKKSVERTSRWAERCLTAHKRPQDQGLFGIVQGGEYEDLRKQSARDLVSMDFPGYAVGGLSVGEPKDVMDRVLEFTTPWLPADKPRYLMGVGSPDSLIDGAIRGIDMFDCVLPTRIARNGTLMTSQGRLVVKNAQFARDFEPLDPNCDCYTCRNYSRAYIRHLIKTDESFGIRLTSYHNLYFLIRLMEQVRQAIREDRLGDFREEFFEQYGYNKPNAKNF

SEQ ID NO: 52153 - protein, 381 aa, Bacillus subtilis
  REGION 1..381: note = sp|O32053|TGT_BACSU Queuine tRNA-ribosyltransferase; OS = Bacillus subtilis (strain 168) OX=224308 GN=tgt PE=3; SV = 1
MAEQPIRYEFIKECKQTGARLGKVHTPHGSFETPVFMPVGTLATVKTMSPEELKAMDAGIILSNTYHLWLRPGQDIVKEAGGLHKFMNWDRAILTDSGGFQVFSLSKFRNIEEEGVHFRNHLNGDKLFLSPEKAMEIQNALGSDIMMAFDECPPYPAEYDYMKRSVERTSRWAERCLNAHNRQDEQGLFGIVQGGEYEDLRTQSAKDLISLDFPGYAIGGLSVGEPKDVMNRVLEFTTPLLPKDKPRYLMGVGSPDALIDGAIRGVDMFDCVLPTRIARNGTVFTAEGRLNMKNAKFERDFRPIDEECDCYTCKNYTRAYIRHLIRCNETFGLRLTTYHNLHFLLHLMEQVRQAIREDRLGDFREEFFERYGYNKPNAKSF

SEQ ID NO: 52154 - protein, 381 aa, Bacillus subtilis; identical to SEQ ID NO: 52153
  REGION 1..381: note = tr|A0A063XIT5|A0A063XIT5_BACIU Queuine tRNA-ribosyltransferase OS=Bacillus subtilis OX=1423; GN = tgt PE=3 SV=1

SEQ ID NO: 52155 - protein, 381 aa, unidentified
  source 1..381: note = Bacillus swezeyi
  REGION 1..381: note = tr|A0A5D4QDD9|A0A5D4QDD9_9BACI Queuine tRNA-ribosyltransferase OS=Bacillus swezeyi OX=1925020; GN = tgt PE=3 SV=1
MSQQPIRYEFIKACKQTGARLGKVHTPHGSFETPVFMPVGTLATVKTMAPEELKEMGAGIILSNTYHLWLRPGHEIVQEAGGLHKFMNWDRAILTDSGGFQVFSLSEFRKIEEEGVHFRNHLNGDKLFLSPEKAMDIQNALGSDIMMAFDECPPYPAEYDYMKRSVERTSRWAERCLAGHKRPDEQGLFGIVQGGEYEDLRKQSAKDLISLDFPGYAIGGLSVGEPKDVMNRVLEFTTPLLPADKPRYLMGVGSPDSLIDGAIRGVDMFDCVLPTRIARNGTLMTSEGRLVVKNAKYERDFRPIDEHCDCYTCRNYSRAYIRHLIRCNETFGIRLTSYHNLYFLLKLMGQVREAIREDRLGDFREEFFERYGFNKPNAKSF

SEQ ID NO: 52156 - protein, 381 aa, unidentified
  source 1..381: note = Bacillus swezeyi
  REGION 1..381: note = tr|A0A1R1Q8T5|A0A1R1Q8T5_9BACI Queuine tRNA-ribosyltransferase OS=Bacillus swezeyi OX=1925020; GN = tgt PE=3 SV=1
MSQQPIRYEFIKACKQTGARLGKVHTPHGSFETPVFMPVGTLATVKTMAPEELKEMGAGIILSNTYHLWLRPGHEIVKEAGGLHKFMNWDRAILTDSGGFQVFSLSEFRKIEEEGVHFRNHLNGDKLFLSPEKAMDIQNALGSDIMMAFDECPPYPAEYDYMKRSVERTSRWAERCLAAHKRPDEQGLFGIVQGGEYEELRKQSAKDLISLDFPGYAIGGLSVGEPKDVMNRVLEFTTPLLPADKPRYLMGVGSPDSLIDGAIRGVDMFDCVLPTRIARNGTLMTSEGRLVVKNAKYERDFRPIDEHCDCYTCRNYSRAYIRHLIRCNETFGIRLTSYHNLYFLLKLMGQVREAIREDRLGDFREEFFERYGFNKPNAKSF

SEQ ID NO: 52157 - protein, 379 aa, Bacillus taeanensis
  REGION 1..379: note = tr|A0A366XW95|A0A366XW95_9BACI Queuine tRNA-ribosyltransferase OS=Bacillus taeanensis OX=273032; GN = tgt PE=3 SV=1
MTAVKYELIKTCKQSGARLGKLHTPHGVIETPIFMPVGTLATVKTMSPEELKEMGSQIILSNTYHLWLRPGHDIVKEAGGLHKFMNWDRPILTDSGGFQVFSLSDLRKITEEGVHFRNHLSGEKLFLSPEGAMDIQNALGSDIMMAFDECPPYPAEYDYMKSSVERTSRWAERCLEAHQRPEDQALFGIVQGGEYEELRKQSARDLVSLDFPGYAVGGLSVGEPKDVMNRVLDFTTPHLPENKPRYLMGVGSPDSLIDGAIRGIDMFDCVLPTRIARNGTCMTSNGRLVVRNAKFARDFAPLDENCDCHVCKTYSRAYIRHLVKANETFGFRLTTYHNLYFLLKLMEQVRQAIREDRLLDFKEEFFEQYGFNKPNAKNF

SEQ ID NO: 52158 - protein, 381 aa, Bacillus tequilensis
  REGION 1..381: note = tr|A0A2X0ZK96|A0A2X0ZK96_9BACI Queuine tRNA-ribosyltransferase OS=Bacillus tequilensis OX=227866; GN = tgt PE=3 SV=1
MAEQPIRYEFIKECKQTGARLGKVHTPHGSFETPVFMPVGTLATVKTMSPEELKAMDAGIILSNTYHLWLRPGHDIVKEAGGLHKFMNWDRAILTDSGGFQVFSLSKFRNIEEEGVHFRNHLNGDKLFLSPEKAMEIQNALGSDIMMAFDECPPYPAEYDYMKRSVERTSRWAERCLNAHSRQDEQGLFGIVQGGEYEDLRTQSAKDLISLDFPGYAIGGLSVGEPKDVMNRVLEFTTPLLPKDKPRYLMGVGSPDALIDGAIRGVDMFDCVLPTRIARNGTVFTAEGRLNMKNAKFERDFRPIDEECDCYTCKNYTRAYIRHLIRCNETFGLRLTTYHNLHFLLHLMEQVRQAIREDRLGDFREEFFERYGYNKPNAKSF

SEQ ID NO: 52159 - protein, 379 aa, unidentified
  source 1..379: note = Bacillus terrae
  REGION 1..379: note = tr|A0A429X1K6|A0A429X1K6_9BACI Queuine tRNA-ribosyltransferase OS=Bacillus terrae OX=1914933; GN = tgt PE=3 SV=1
MSAITYELIKTCKQTGARLGMIHTPHGSYETPMFMPVGTLATVKTMSPEELKEMGAGIILSNTYHLWLRPGEDIVEEAGGLHKFMNWDQGILTDSGGFQVFSLSEFRQIEEEGVHFRNHLNGDKLFLSPEKAMSIQNSLGSDIMMAFDECPPYPASQEYMKNSVERTSRWAERCLAAHKRPEKQGLFGIVQGGEYEQLRKQSARDLVSLDFPGYAIGGLSVGEPKDVMNRVLEFTTPLLPSDKPRYLMGVGSPDSLVDGAIRGVDMFDCVLPTRIARNGTLMTSQGRLVVKNAAYARDFGPLDENCDCYACRNYSRAYVRHLIKCNETFGIRLTTYHNLYFLLKLMKQVRDAIKEDRLGDFREEFFERYGFNRPDAKNF

SEQ ID NO: 52160 - protein, 379 aa, Bacillus thermoamylovorans
  REGION 1..379: note = tr|A0A090IVN0|A0A090IVN0_9BACI Queuine tRNA-ribosyltransferase OS=Bacillus thermoamylovorans; OX = 35841 GN=tgt PE=3 SV=1
MTAISYELIKTDKQTGARLGILHTPHGSYETPMFMPVGTLATVKTMSPEELKEIGAGVILSNTYHLWLRPGHDIVKEAGGLHQFMNWDQAILTDSGGFQVFSLSEFRKIEEEGVHFRNHLNGDKLFLSPEISMEVQNALGSDIMMAFDECPPYPAEYDYMKKSVERTSRWAERCLKAHKRSKDQGLFGIVQGGEYEDLRKQSAEDLVSLDFPGYAVGGLSVGEPKETMNRMLEFTTPLLPADKPRYLMGVGSPDSLIDGAIRGIDMFDCVLPTRIARNGTVMTSTGRLVVKNAKYARDFGPLDDHCDCYACRNYSRAYIRHLIHTNEILGFRLCTYHNLYFLIKLMEQVRQAIREDRLMDFREQFFEQYGFNKPNAKNF

SEQ ID NO: 52161 - protein, 379 aa, Bacillus thermoamylovorans
  REGION 1..379: note = tr|A0A0D0FG03|A0A0D0FG03_9BACI Queuine tRNA-ribosyltransferase OS=Bacillus thermoamylovorans; OX = 35841 GN=tgt PE=3 SV=1
MTAIRYELIKTDKQTGARLGILHTPHGSYETPMFMPVGTLATVKTMSPEELKEIGAGVILSNTYHLWLRPGHDIVKEAGGLHQFMNWDQAILTDSGGFQVFSLSEFRKIEEEGVHFRNHLNGDKLFLSPEISMEVQNALGSDIMMAFDECPPYPAEYDYMKKSVERTSRWAERCLKAHKRPKDQGLFGIVQGGEYEELRKQSAEDLVSLDFPGYAVGGLSVGEPKETMNRMLEFTTPLLPADKPRYLMGVGSPDSLIDGAIRGIDMFDCVLPTRIARNGTVMTSSGRLVVKNAKYARDFCPLDEHCDCYTCRNYSRAYIRHLIHTNEILGFRLCTYHNLHFLIQLMERVRQAIREDCLMDFREQFFEQYGFNKPNAKNF

SEQ ID NO: 52162 - protein, 379 aa, unidentified; identical to SEQ ID NO: 51713
  source 1..379: note = Bacillus thermocopriae
  REGION 1..379: note = tr|A0A410XLY0|A0A410XLY0_9BACI Queuine tRNA-ribosyltransferase OS=Bacillus thermocopriae; OX = 1215031 GN=tgt PE=3 SV=1

SEQ ID NO: 52163 - protein, 379 aa, unidentified
  source 1..379: note = Bacillus thermozeamaize
  REGION 1..379: note = tr|A0A1Y3PS83|A0A1Y3PS83_9BACI Queuine tRNA-ribosyltransferase OS=Bacillus thermozeamaize; OX = 230954 GN=tgt PE=3 SV=1
MSAIRYELIKTCKQTGARLGRLHTPHGTFETPLFMPVGTQASVKAMSPEELKEIGAGVILSNTYHLFLRPGHELVEKAGGLHRFMNWDRAILTDSGGFQVFSLSKLRDIQEEGVTFRSHLSGEKLFISPEKAIAIQNALGADIIMAFDECAPYPADERYIKDSLERTTRWAERCLKAHQKPGTQALFGIVQGGMYPHLRKESARQLVALDFPGYAVGGLSVGEPKSLMYQILEETVPLLPADRPRYLMGVGSPDALIEGVIRGIDMFDCVLPTRIARNGTVMTSQGRLVIRNAQYAEDFRPLDPDCDCYACRHYTRAYIRHLIKAGEIFGIRLTTYHNLYFLVQLMRVVREAIRHDALLDFRNDFFARYGIEHPDDRGF

SEQ ID NO: 52164 - protein, 379 aa, Bacillus thuringiensis; identical to SEQ ID NO: 51992
  REGION 1..379: note = sp|Q6HDA9|TGT_BACHK Queuine tRNA-ribosyltransferase; OS = Bacillus thuringiensis subsp. konkukian (strain 97-27); OX = 281309 GN=tgt PE=3 SV=1

SEQ ID NO: 52165 - protein, 379 aa, Bacillus thuringiensis; identical to SEQ ID NO: 52017
  REGION 1..379: note = tr|A0A0K0SDU9|A0A0K0SDU9_BACT3 Queuine tRNA-ribosyltransferase OS=Bacillus thuringiensis subsp. indiana OX=180850 GN=tgt PE=3 SV=1

SEQ ID NO: 52166 - protein, 379 aa, unidentified
  source 1..379: note = Bacillus timonensis
  REGION 1..379: note = tr|A0A4S3PZN8|A0A4S3PZN8_9BACI Queuine tRNA-ribosyltransferase OS=Bacillus timonensis OX=1033734; GN = tgt PE=3 SV=1
MTAIRYEHIKTCKQTGARLGIVHTPHGSFETPAFMPVGTLATVKTMSPEDLKEMGSGIILSNTYHLWLRPGHDIIKEAGGLHKFMNWDRAILTDSGGFQVFSLSQFREIKEEGVHFRNHLNGDKLFLSPEKSMEIQNALGSDIMMAFDECPPYPASFEYMQKSVERTSRWAERCLKAHNRPQDQGLFGIVQGGEYEELRKQSARDLVSLDFPGYAVGGLSVGEPKDVMNRVLEFTTPLLPTNKPRYLMGVGSPDSLIDGAIRGIDMFDCVLPTRIARNGTLMTSEGRLVVKNAEYARDFRPLDENCDCYTCKNYSRAYIRHLIKTSETFGIRLTTYHNLHFLLKLMEQVRQAIREDRLGDFREEFFERYGFNKPNAKNF

SEQ ID NO: 52167 - protein, 379 aa, unidentified
  source 1..379: note = Bacillus toyonensis
  REGION 1..379: note = tr|A0A2C4VSW5|A0A2C4VSW5_9BACI Queuine tRNA-ribosyltransferase OS=Bacillus toyonensis OX=155322; GN = tgt PE=3 SV=1
MTAIRYEFIKTCKQTGARLGRVHTPHGSFDTPTFMPVGTLATVKTMSPEELKAMDSGIILSNTYHLWLRPGHEIVREAGGLHKFMNWDRAILTDSGGFQVFSLSDFRRIEEEGVHFRNHLNGDKLFLSPEKAMEIQNALGSDIMMAFDECPPFPATFEYMKKSVERTSRWAERCLKAHERPQDQGLFGIVQGGEFEELRRQSAKDLVSMDFPGYAIGGLSVGEPKDIMNRVLEFTTPLLPDDKPRYLMGVGSPDSLIDGAIRGVDMFDCVLPTRIARNGTCMTSGGRLVVKNAKFARDFGPLDPNCDCYTCKNYSRAYIRHLMKCDETFGIRLTSYHNLHFLLNLMEQVRQAIREDRLGDFREEFFEQYGFNKPNAKNF

SEQ ID NO: 52168 - protein, 379 aa, unidentified; identical to SEQ ID NO: 52011
  source 1..379: note = Bacillus toyonensis
  REGION 1..379: note = tr|A0A1V6LMC5|A0A1V6LMC5_9BACI Queuine tRNA-ribosyltransferase OS=Bacillus toyonensis OX=155322; GN = tgt PE=3 SV=1

SEQ ID NO: 52169 - protein, 379 aa, unidentified; identical to SEQ ID NO: 51992
  source 1..379: note = Bacillus tropicus
  REGION 1..379: note = tr|A0A4Y6F6A9|A0A4Y6F6A9_9BACI Queuine tRNA-ribosyltransferase OS=Bacillus tropicus OX=2026188; GN = tgt PE=3 SV=1

SEQ ID NO: 52170 - protein, 379 aa, unidentified
  source 1..379: note = Bacillus tropicus
  REGION 1..379: note = tr|A0A5C5AC23|A0A5C5AC23_9BACI Queuine tRNA-ribosyltransferase OS=Bacillus tropicus OX=2026188; GN = tgt PE=3 SV=1
MTAIRYEFIKTCKQTGARLGRVHTPHGSFDTPTFMPVGTLATVKTMSPEELKAMDSGIILSNTYHLWLRPGHEIVREAGGLHKFMNWDRAILTDSGGFQVFSLSDFRRIEEEGVHFRNHLNGDKLFLSPEKAMEIQNALGSDIMMAFDECPPFPATFEYMKKSVERTSRWAERCLKAHERPQDQGLFGIVQGGEFEELRRQSAKDLVSMDFPGYAIGGLSVGEPKDIMNRVLEFTTPLLPDNKPRYLMGVGSPDSLIDGAIRGVDMFDCVLPTRIARNGTCMTSEGRLVVKNAKFARDFGPLDPNCDCYTCKNYSRAYIRHLMKCDETFGIRLTSYHNLHFLLNLMEQVRQAIREDRLGDFREEFFEQYGFNKPNAKNF

SEQ ID NO: 52171 - protein, 379 aa, Bacillus trypoxylicola
  REGION 1..379: note = tr|A0A162E6E2|A0A162E6E2_9BACI Queuine tRNA-ribosyltransferase OS=Bacillus trypoxylicola; OX = 519424 GN=tgt PE=3 SV=1
MAAVTYELIKTCKQSGARLGKVHTPHGTIETPIFMPVGTLATVKTMSPEDLYDMNAQIILSNTYHLWLRPGHKIIEEAGGLHSFMNWKRPILTDSGGFQVFSLSDLRKIEEEGVHFRNHLSGEKLFLSPEEAMSIQNSLGSDIMMAFDECPPYPADYDYMKQSVERTSRWAERCLSAHKRPDQQGLFGIVQGGEYEELRKQSAKDLTSLDFPGYAIGGLSVGEPKEVMNRVLEFTTPLLPSDKARYLMGVGSPDSLIDGAIRGIDMFDCVLPTRIARNGTCMTSNGRLVVRNAKYAHDFRPLDENCDCHVCKNYSRAYIRHLVKCEETFGFRLTSYHNLYFLLNLMEQVRQAIREDRLLDFREEFFEQYGFNKPNAKNF

SEQ ID NO: 52172 - protein, 379 aa, unidentified
  source 1..379: note = Bacillus urumqiensis
  REGION 1..379: note = tr|A0A2P6MFC8|A0A2P6MFC8_9BACI Queuine tRNA-ribosyltransferase OS=Bacillus urumqiensis OX=1548213; GN = tgt PE=3 SV=1
MPAITYEHIKTCRQSGARLGKVHTPHGTFETPIFMPVGTLATVKTMDPEELKEINAQIILSNTYHLWLRPGADIVEEAGGLHKFMNWDRPILTDSGGFQVFSLSDLRNITEEGVQFRNHLSGEKLFLSPEKSMHVQNQLGPDIMMAFDECPPYPASHEYMKASVERTSRWAERCLSAHQRPEDQGLFGIVQGGEYKDLRRQSAEDLVSLDFPGYAIGGLSVGEPKDVMNQVLEDTTPFLPQDKPRYLMGVGSADSLIDGAIRGIDMFDCVLPTRIARNGTLMTSSGRLVVRNAKFARDFRPLDENCSCKVCQNYSRAYIRHLIKCNETLGLRLCSYHNLHFLLQLMEDVRQAIREDRLLDFREAFFEAYGFNKKDAKNF

SEQ ID NO: 52173 - protein, 381 aa, Bacillus vallismortis
  REGION 1..381: note = tr|A0A1W6HKB6|A0A1W6HKB6_BACVA Queuine tRNA-ribosyltransferase OS=Bacillus vallismortis OX=72361; GN = tgt PE=3 SV=1
MAEQPIRYEFIKECKQTGARLGRVHTPHGSFETPVFMPVGTLATVKTMSPDELKSMDAGIILSNTYHLWLRPGHDIVKEAGGLHKFMNWDRAILTDSGGFQVFSLSKFRNIEEEGVHFRNHLNGDKLFLSPEKAMEIQNALGSDIMMAFDECPPYPAEYDYMKRSVERTSRWAERCLEAHGRSDEQGLFGIVQGGEYEDLRTQSAKDLVSLDFPGYAIGGLSVGEPKHVMNRVLEFTTPLLPKDKPRYLMGVGSPDALIDGAIRGVDMFDCVLPTRIARNGTVFTNEGRLNMKNAKYERDFRPIDEECSCHTCQNYSRAYIRHLIRCNETFGIRLTTYHNLHFLLHLMEQVRQAIREDRLGDFREEFFERYGYNKPNAKSF

SEQ ID NO: 52174 - protein, 381 aa, Bacillus vallismortis
  REGION 1..381: note = tr|A0A410WEB0|A0A410WEB0_BACVA Queuine tRNA-ribosyltransferase OS=Bacillus vallismortis OX=72361; GN = tgt PE=3 SV=1
MAEQPIRYEFIKECKQTGARLGKVHTPHGSFETPVFMPVGTLATVKTMSPEELKAMDAGIILSNTYHLWLRPGQDIVKEAGGLHQFMNWDRAILTDSGGFQVFSLSKFRNIEEEGVHFRNHLNGDKLFLSPEKAMEIQNALGSDIMMAFDECPPYPAEYDYMKRSVERTSRWAERCLNAHSRQNEQGLFGIVQGGEYEDLRTQSAKDLISLDFPGYAIGGLSVGEPKDVMNRVLEFTTPLLPKDKPRYLMGVGSPDALIDGAIRGVDMFDCVLPTRIARNGTVFTADGRLNMKNAKFERDFRPIDEECDCYTCKNYTRAYIRHLIRCNETLGLRLTTYHNLHFLLHLMEQVRQAIREDRLGDFREEFFERYGYNKPNAKSF

SEQ ID NO: 52175 - protein, 381 aa, unidentified
  source 1..381: note = Bacillus velezensis
  REGION 1..381: note = sp|A7Z766|TGT_BACVZ Queuine tRNA-ribosyltransferase; OS = Bacillus velezensis (strain DSM 23117 / BGSC 10A6 / FZB42) OX=326423 GN=tgt PE=3 SV=1
MAEQPIRYEFIKECKQTGARLGRVHTPHGSFETPVFMPVGTLATVKTMSPDELKSMDAGIILSNTYHLWLRPGHDIVKEAGGLHKFMNWDRAILTDSGGFQVFSLSKFRNIEEEGVHFRNHLNGDKLFLSPEKAMEIQNALGSDIMMAFDECPPYPAEYDYMKRSVERTSRWAERCLEAHGRSDEQGLFGIVQGGEYEDLRTQSAKDLVSLDFPGYAIGGLSVGEPKHVMNRVLEFTTPLLPKDKPRYLMGVGSPDALIDGAIRGVDMFDCVLPTRIARNGTVFTNEGRLNMKNAKYERDFRPIDEECSCHTCKNYSRAYIRHLIRCNETFGIRLTTYHNLHFLLHLMEQVRQAIREDRLGDFREEFFERYGYNKPNAKSF

SEQ ID NO: 52176 - protein, 381 aa, unidentified; identical to SEQ ID NO: 52175
  source 1..381: note = Bacillus velezensis
  REGION 1..381: note = tr|S6G2C1|S6G2C1_9BACI Queuine tRNA-ribosyltransferase OS=Bacillus velezensis UCMB5033; OX = 1338518 GN=tgt PE=3 SV=1

SEQ ID NO: 52177 - protein, 379 aa, Bacillus vietnamensis
  REGION 1..379: note = tr|A0A0P6WSX3|A0A0P6WSX3_9BACI Queuine tRNA-ribosyltransferase OS=Bacillus vietnamensis OX=218284; GN = tgt PE=3 SV=1
MTAITYELIKTCKQTGARLGRVHTPHGSFETPAFMPVGTMATVKTMSPEDLKSMESGIILSNTYHLWLRPGHEIIREAGGLHKFMNWDRAILTDSGGFQVFSLSKLRQIEEEGVHFRHHLNGDKLFLSPEKAMEIQNALGSDIMMAFDECPPYPAEYEYMKSSVERTTRWAERCLEAHQRPQDQGLFGIVQGGEYEELRKQSARDLVSMDFPGYAVGGLSVGEPKDVMNRVLDFTTPHLPSDKPRYLMGVGSPDSLIDGSMRGIDMFDCVLPTRIARNGTLMTSEGRLVVKNAKFARDFRPIDENCDCYTCKNYSRAYIRHLIKCDETFGIRLTTYHNLHFLLKLMEQVRQAIREDRLGDFREEFFEQYGFNRPDAKNF

SEQ ID NO: 52178 - protein, 379 aa, Bacillus vietnamensis
  REGION 1..379: note = tr|A0A5D4NZ56|A0A5D4NZ56_9BACI Queuine tRNA-ribosyltransferase OS=Bacillus vietnamensis OX=218284; GN = tgt PE=3 SV=1
MTAIRYEHFKTCKQTGARLGRVHTPHGSFDTPVFMPVGTLATVKTMSPEDLKAMEAGIILSNTYHLWLRPGHEIIREAGGLHKFMNWDRAILTDSGGFQVFSLSEFRKIEEEGVHFRNHLNGDKLFLSPEKAMEIQNALGSDIMMAFDECPPYPAEHEYMKRSVERTSRWAERCLEAHQRPEDQGLFGIVQGGEYEDLRRQSAKDLVSLDFPGYAVGGLSVGEPKDVMNKVLEFTTPLLPDNKPRYLMGVGSPDALIDGAIRGIDMFDCVLPTRIARNGTLMTSKGRLVVKNAKFARDFNPIDENCDCYTCRNYSRAYIRHLIKSDESFGIRLTTYHNLHFLLKLMEQVRQAIREDRLGDFREEFFEAYGYNRPDAKNF

SEQ ID NO: 52179 - protein, 379 aa, Bacillus vireti
  REGION 1..379: note = tr|W1SIS5|W1SIS5_9BACI Queuine tRNA-ribosyltransferase OS=Bacillus vireti LMG 21834; OX = 1131730 GN=tgt PE=3 SV=1
MTAIRYELIKTCKQTGARLGRVHTPHGSFDTPAFMPVGTLATVKTMSPEDLKEMGAGIILSNTYHLWLRPGHEIIKEAGGLHKFMNWDRAILTDSGGFQVFSLSEFRKIEEEGVHFRNHMSGEKLFLSPEKAMEIQNALGSDIMMAFDECPPYPATFDYMKKSVERTSRWAERCLNAHARPEDQGLFGIVQGGEYEELRKQSARDLTSLDFPGYAIGGLSVGEPKDIMNRMLEYTTPLLPSNKPRYLMGVGSPDSLIDGSIRGIDMFDCVLPTRIARNGTLMTSTGRLVVKNAQYARDFGPLDENCDCYTCRNYSRAYIRHLIKCDETFGIRLTSYHNLYFLLRLMEKVRQAIMEDRLGDFREEFFERYGFNKPNAKNF

SEQ ID NO: 52180 - protein, 205 aa, Bacillus wakoensis
  REGION 1..205: note = tr|W4Q3K5|W4Q3K5_9BACI Queuine tRNA-ribosyltransferase OS=Bacillus wakoensis JCM 9140; OX = 1236970 GN=JCM9140_1952 PE=3 SV=1
MTAHARPKDQGLFGIVQGGEYEELRKQSAKDLVSLDFPGYAIGGLSVGEPKDVMNRVLEFTTPHLPENKPRYLMGVGSADSLIDGAIRGIDMFDCVLPTRIARNGTLMTSTGRLVVRNAKYARDFRPLDENCDCHVCQNYSRAYIRHLIKCEETFGFRLTSYHNLYFLLNLMEQVRQAIREDRLLDFREEFFEQYGFNKPNAKNF

SEQ ID NO: 52181 - protein, 381 aa, unidentified
  source 1..381: note = Bacillus weihaiensis
  REGION 1..381: note = tr|A0A1L3MPH6|A0A1L3MPH6_9BACI Queuine tRNA-ribosyltransferase OS=Bacillus weihaiensis OX=1547283; GN = tgt PE=3 SV=1
MSTSPIRYELIKTCKQTGARLGRVHTPHGSFETPVFMPVGTLATVKTMSPEEVKEMGAGIILSNTYHLWLRPGNEIVREAGGLHKFMNWDRAILTDSGGFQVFSLSDFRRIEEEGVHFRNHLNGDKLFLSPEKAMHIQNDLGSDIMMAFDECPPYPADYDYMKKSVERTSRWAERCLEAHQRPNDQGLFGIIQGGEYEELRKQSARDLISLDFPGYAIGGLSVGEPKDVMNRVLEFTAPLMPSNKPRYLMGVGSPDSLIDGAIRGIDMFDCVLPTRIARNGTLMTSEGRLVVKNAKFAKDFGPLDENCDCYTCRNYSRAYIRHLIKSEETFGLRLTSYHNLYFLVNLMEQVRQAIREDRLGDFREEFFEKYGFNKPNAKNF

SEQ ID NO: 52182 - protein, 379 aa, unidentified; identical to SEQ ID NO: 51992
  source 1..379: note = Bacillus wiedmannii
  REGION 1..379: note = tr|A0A1A9PWR0|A0A1A9PWR0_9BACI Queuine tRNA-ribosyltransferase OS=Bacillus wiedmannii OX=1890302; GN = tgt PE=3 SV=1

SEQ ID NO: 52183 - protein, 379 aa, unidentified; identical to SEQ ID NO: 52170
  source 1..379: note = Bacillus wiedmannii
  REGION 1..379: note = tr|A0A2C4QG11|A0A2C4QG11_9BACI Queuine tRNA-ribosyltransferase OS=Bacillus wiedmannii OX=1890302; GN = tgt PE=3 SV=1

SEQ ID NO: 52184 - protein, 379 aa, unidentified
  source 1..379: note = Bacillus wudalianchiensis
  REGION 1..379: note = tr|A0A1B9B8K1|A0A1B9B8K1_9BACI Queuine tRNA-ribosyltransferase OS=Bacillus wudalianchiensis; OX = 1743143 GN=tgt PE=3 SV=1
MPAIKYELIKTCKQTGARLGRVHTPHGSFETPVFMPVGTLATVKTMSPEELKEMDANIILSNTYHLWLRPGHDIIKEAGGLHKFMNWDRSILTDSGGFQVFSLSDFRKIEEEGVHFRNHLNGDKLFLSPEKAMEIQNALGSDIMMAFDECPPYPAEYDYMKRSVERTSRWAERCLQAHARPQDQGLFGIVQGGEYEELRRQSANDLVSLDFPGYAIGGLSVGEPKDVMNRVLEFTTPLLPAQKPRYLMGVGSPDSLIDGAIRGVDMFDCVLPTRIARNGTLMTSEGRLVVKNAKYARDFGPLDPNCDCYTCRNYSRAYIRHLIRCNETFGIRLTTYHNLYFLIKLMEQVREAIKEDRLGDFRDEFFEAYGFNRPDAKNF

SEQ ID NO: 52185 - protein, 381 aa, unidentified
  source 1..381: note = Bacillus xiamenensis
  REGION 1..381: note = tr|K2N8M1|K2N8M1_9BACI Queuine tRNA-ribosyltransferase OS=Bacillus xiamenensis OX=1178537; GN = tgt PE=3 SV=1
MSQLPIRYEFIKSCKQTGARLGRVHTPHGSFETPVFMPVGTLATVKTMAPEELKAMDAGIILSNTYHLWLRPGHDIVKEAGGLHKFMNWDRAILTDSGGFQVFSLSEFRKIEEEGVHFRNHLNGDKLFLSPEKAMEIQNALGSDIMMAFDECPPYPAEYDYMKRSVERTSRWAERCLTAHQRPEDQGLFGIVQGGEYEELRKQSAKDLVSLDFPGYAIGGLSVGEPKDVMNRVLEFTTPFLPADKPRYLMGVGSPDSLIDGAIRGVDMFDCVLPTRIARNGTLMTSEGRLVVKNAKYERDFRPIDENCDCYTCKNYTRAYIRHLIRTNETFGIRLTTYHNLHFLLKLMEQVREAIREDRLGDFREEFFERYGFNKPNAKNF

SEQ ID NO: 52186 - protein, 379 aa, unidentified
  source 1..379: note = Bacillus zeae
  REGION 1..379: note = tr|A0A398B2Y6|A0A398B2Y6_9BACI Queuine tRNA-ribosyltransferase OS=Bacillus zeae OX=1917180 GN=tgt; PE = 3 SV=1
MSAIKYELIKTCKQTGARLGRVHTPHGSFDTPAFMPVGTLATVKTMSPEELKEMGAGIILSNTYHLWLRPGHEIIKEAGGLHKFMNWDRAILTDSGGFQVFSLSEFRKIEEEGVHFRNHMNGDKLFLSPEKAMEIQNALGSDIMMAFDECPPYPAEFDYMKKSVERTSRWAERCLEGHKRPNDQGLFGIIQGGEYEELRKQSAKDLVSLDFPGYAVGGLSVGEPKDVMNRVLEFTTPLLPSSKPRYLMGVGSPDSLIDGAIRGIDMFDCVLPTRIARNGTLMTSNGRLVVKNARYARDFNPIDENCDCHTCRNYSRAYIRHLIKCDETFGIRLTSYHNLYFLLKLMEQVRQAIMEDRLGDFREEFFERYGFNQPGARNF

SEQ ID NO: 52187 - protein, 381 aa, unidentified; identical to SEQ ID NO: 52125
  source 1..381: note = Bacillus zhangzhouensis
  REGION 1..381: note = tr|A0A081LBB0|A0A081LBB0_9BACI Queuine tRNA-ribosyltransferase OS=Bacillus zhangzhouensis; OX = 1178540 GN=tgt PE=3 SV=1

SEQ ID NO: 52188 - protein, 374 aa, unidentified
  source 1..374: note = Unknown
  REGION 1..374: note = tr|A0A0J8YW35|A0A0J8YW35_9GAMM Queuine tRNA-ribosyltransferase OS=bacteria symbiont BFo2 of Frankliniella occidentalis OX=1628856 GN=tgt PE=3 SV=1
MKFEYIKRDGRARRGRLVFDRGVVETPAFMPVGTYGTVKGMTPEEVKETGAQILLGNTFHLWLRPGQEIMKLHGDLHDFMQWQGPILTDSGGFQVFSLGDIRKITEKGVHFRNPINGDPIFLDPEKSMEIQHDLGSDIVMIFDECTPYPADWDYAKRSVEMSLRWAQRSRDRFDELGNKNALFGIVQGGVYEDLRDISVKGLVEIGFDGYAVGGLAVGEPKADMHRILEHVCPQLPEEKPRYLMGVGKPEDLVEGVRRGIDMFDCVMPTRNARNGHLFVTDGVVKIRNAKHKSDTSPLDAECDCYTCKHYTRAYLYHLDRCNEILGARLNTIHNLRYYQRLMAGLRQAIEDDRLEEFVADFYTKIGKEVPALPF

SEQ ID NO: 52189 - protein, 376 aa, unidentified
  source 1..376: note = Unknown
  REGION 1..376: note = tr|A0A0J8YIT9|A0A0J8YIT9_9GAMM Queuine tRNA-ribosyltransferase OS=bacteria symbiont BFo1 of Frankliniella occidentalis OX=1628855 GN=tgt PE=3 SV=1
MKFELDTTDGRARRGRLVFDRGVVETPAFMPVGTYGTVKGMTPEEVQDTGAQIILGNTFHLWLRPGQEIMKLHGDLHDFMQWKGPILTDSGGFQVFSLGDIRKITEKGVHFRNPINGDAIFLDPEKSMEIQYDLGSDIVMIFDECTPYPADWDYAKRSMEMSLRWAQRSRDRFDSLGNKNALFGIIQGSVYEDLRDVSVKGLVEIGFDGYAVGGLAVGEPKEDMHRILEHVCPQLPQDKPRYLMGVGKPQDLVEGVRRGIDMFDCVMPTRNARNGHLFVTDGVVKIRNAKYKDDTSPLDAECDCYTCRNYSRAYLYHLDRCNEILGARLNTIHNLRYYQRLMAGLRQAIEEGKLEHFVTEFYQRTGLAVPPLPSDN

SEQ ID NO: 52190 - protein, 387 aa, unidentified
  source 1..387: note = Bacteriodetes bacterium
  REGION 1..387: note = tr|A0A522F8A1|A0A522F8A1_9BACT Queuine tRNA-ribosyltransferase OS=Bacteriodetes bacterium; OX = 2507565 GN=tgt PE=3 SV=1
MIFKIDHTDKETKARAGEITTAHGKIQTPIFMPVGTRGTVKAVHQHELKEEVKAQIILGNTYHLYLKPGMDVIEKAGGLHKFIGWDLPLLTDSGGFQIFSLADERRQSQPGAKPVRKITEEGVKFNADTDGSIHFFSPENTIDIQRTIGADIIMAFDECTPYPCEYEYAKNSMGMTHRWLKRCITQFNKTEGKYGYAQDLFPIVQGSVYKDLRIQSAEFVASQNCEGNAIGGLSVGEAQEEMFGMTEVVCSILPKEKPRYLMGVGKPEQLLECIALGIDMFDCVMPTRNARNGMLFTSQGTISIRNAKYKDDFSPIDPEGTSFVDNAYSRAYLRHLNFADEMLASMIASVHNLAFYARLMREAREQIVAGTFREWKNKMVKQTEQRL

SEQ ID NO: 52191 - protein, 375 aa, unidentified
  source 1..375: note = Bacteriodetes bacterium
  REGION 1..375: note = tr|A0A522FW22|A0A522FW22_9BACT Queuine tRNA-ribosyltransferase OS=Bacteriodetes bacterium; OX = 2507565 GN=tgt PE=3 SV=1
MLFELTKQCHESKARAGLLKINGTEIPTPVFMPVGTQGTVKAISQEILNELDARIILSNTYHLYLRPGTEVIEHFRGLHNFINWNKSILTDSGGYQIFSLQDLRKLTEEGVSFSSHIDGSKHFFSPESVVDIQRKLGSDIMMVLDECTPYPATKDIASKSADLSHRWAIRAKDSFIKSKSLYNREQFLFSIGQGSVYPDLRRDYLKKMFDIEFDGYAIGGLSVGEPADLMYEIVDVSTDLLPSNKPRYLMGVGTPENILEAIERGIDMFDCVLPTRNARNGQLFTSKGKINIRNAQYKFSDEPIDNVIGLKSSNSYSLGYLRHLFIAGEILGLQLASKQNIAFYLWLVRTVREKILSGEFITWKKSFLQNYQNSD

SEQ ID NO: 52192 - protein, 386 aa, unidentified
  source 1..386: note = Bacterioplanes sanyensis
  REGION 1..386: note = tr|A0A222FMH1|A0A222FMH1_9GAMM Queuine tRNA-ribosyltransferase OS=Bacterioplanes sanyensis; OX = 1249553 GN=tgt PE=3 SV=1
MTRKCHMNFTLLGQDDSSFARRGTLSFPRGDVQTPAFMPVGTYGTVKGVTTDQVEELGAEIILGNTFHLMLRPGTEIIQQHGDLHDFIGWDKPILTDSGGFQVFSLGDMRKITEEGVTFRSPVNGEKVLMTPESSMQVQRELGSDIVMIFDECTPYPATEKEAADSMRMSLRWAKRSKEAHGDSTAALFGIIQGGMYEALRDESLEGLTAIGFDGYAVGGLSVGEPKPDMMRVLRHTAPKMPADKPRYLMGVGKPEDLVEGVRRGIDMFDCVMPTRNARNSHLFTSTGVLKIRNAANRTDTGPVDPECDCYTCKNYSRAYLHHLDRCKEILGATLNSIHNLHYYQTLMAGLRRALEEGTFADFVDEFYAKRGLPTPALDVPDQAPE

SEQ ID NO: 52193 - protein, 400 aa, Bacteriovorax sp.
  REGION 1..400: note = tr|A0A1J5KNJ4|A0A1J5KNJ4_9PROT Queuine tRNA-ribosyltransferase OS=Bacteriovorax sp. MedPE-SWde; OX = 1860085 GN=tgt PE=3 SV=1
MRIQDQVKEHFSFELVHVDKKTGARAGVIKTPHGDIPTPVFMPVGTHGAVKALTPNFLEDLDTKIILSNTYHLHLSPGSKIVEKAGGLHKFMHWNRPILTDSGGFQVFSLQGKSIKEEGAEFKDHKGKTIMLSPETSIQIQQELGSDIMMAFDECIPYPATRDYTKTSIDRTHRWLDRCIETWTNPKQALFGIIQGSTYDDYRKECIDELVKRDLPGYAIGGVSVGEGHDLMEKIVKYAAPKMPADKPRYVMGVGNPEDLLMIWENGADMSDCIIPTKFGRGGTLFTNRGKIRIKHKNYRRDFFPIEPNCKCYCCKNFTRAYVKHLFDSNEILGQILATMHNIEFYKSMAEGAREAILEDRYSEWKEAFLANYTKDEDKSPKGPKGSKGKDDKKKSRRNK

SEQ ID NO: 52194 - protein, 371 aa, Bacteriovorax sp.
  REGION 1..371: note = tr|T0STT5|T0STT5_9PROT Queuine tRNA-ribosyltransferase OS=Bacteriovorax sp. BSW11_IV; OX = 1353529 GN=tgt_2 PE=3 SV=1
MTMYKEVAKSGKARAGVITTAHGEIETPIFMPVGTRASVKCMWQHELEEVGAQIILGNTYHLYLKPGHELVEKVGGGLHGFMNWKKPILTDSGGYQVFSLSDINKLTEEGVTFQSHIDGSYHLITPEKSMEIQKALGSDIVMAFDECPALPASKERLRESMELTLRWAKRCKDVELKPHQHLFGIIQGGLHKDLRTECMERLKEIDFPGYALGGLSVGEKNDEMVEFLNDFVHTMPDDKPRYLMGVGKPLDVLNGIRAGLDMFDCVLPTRNARNGQFLTSHGPLSIKKEKFKEDTLPPDPDCSCKVCQNYSRSYIRHLFNVGEYLAGQLISFHNLHFYLTMVKEARQAIIDDRFEEYYAEFKTKYTSEKWK

SEQ ID NO: 52195 - protein, 392 aa, Bacteriovorax stolpii
  REGION 1..392: note = tr|A0A2K9NR68|A0A2K9NR68_9PROT Queuine tRNA-ribosyltransferase OS=Bacteriovorax stolpii OX=960; GN = tgt PE=3 SV=1
MSADKPRIQDQVKEHFKFKLEHVDKHSKARAGVITTPHGDIPTPVFMPVGTHGAIKALQPQVLEDMDTKIILSNTYHLHLTPGSDLVKKAGGLHKFMNWPRPILTDSGGFQVFSLQKKSIKEEGAEFKDQKGQKILLSPETSITIQQNLGSDIMMAFDECIPYPATREYTKNSMDRTHRWLDRCIETWNNPKQALFGIIQGSTYNDLRKECVDELVKRDLPGYAIGGVSVGEGAEWMEKIVSFTAPLMPVDKPRYAMGIGNPEDLIMLWENGIDMSDCIIPTKFARGGTLFTSRGKIRIRHRNYRRDFYPIDHSCSCYTCKNFSRAYIKHLFDSNEILGQVLATTHNIAYYKSLAEGARKAILEDRFLDFKKEFFANYKKDDSKDDDMGGED

SEQ ID NO: 52196 - protein, 375 aa, Bacteriovorax stolpii
  REGION 1..375: note = tr|A0A2K9NUK2|A0A2K9NUK2_9PROT Queuine tRNA-ribosyltransferase OS=Bacteriovorax stolpii OX=960; GN = tgt PE=3 SV=1
MTTEKKIFKKIAQSKKARAGVITTAHGEIETPIFMPVGTRASVKTMWQEELEEMNAQIILGNTYHLYLRPGHELIEKVGAGLHGFMKWDRAILTDSGGYQVFSLSSMNKVTEEGVTFQSHLDGSRHLISPEKSMEIQRALGSDIVMNFDECPALPATKDRLRESMELTLRWAKRCRDYQLKDHQNLFGIIQGGLHHDLRTECMERLKEMNFEGFALGGLSVGEKNEEMVSFLDNFVHTMPEDKPRYLMGVGKPLDILNGIRAGIDMFDCVLPTRNARNGQFLTKGGPLNIKKERFKEDLLPPDPECNCKVCRKYSRAYIRHLFTVGEYLAGNMITYHNLYFYLQMTRDAREAIKADKFDEFYSSFYNSYTSNMWN

SEQ ID NO: 52197 - protein, 401 aa, unidentified
  source 1..401: note = Unknown
  REGION 1..401: note = tr|A0A4Q5NET1|A0A4Q5NET1_9BACT Queuine tRNA-ribosyltransferase OS=bacterium OX=1869227 GN=tgt; PE = 3 SV=1
MKKALEFEIHDRLPGALARTGTITTPHGTIQTPAFIPVGTKATLKALTPEQLSATGAQAVLANAYHLYLRPGHDIIDQAGGLHAFMHWDKPTFTDSGGFQVMSLGVGFKKIIDMDGKTDERPLGKKEKLAWIDNDGVRFKSHLDGSIHKFTPELSMQIQHGIGADITFAFDELTTLHHDYEYQVESLHERTHPWAVRSLAEHQRLNEKRTHRPPQALFGVVQGANYEDLRRECSRFLGSMDFDGYGLGGAFTKENIGEITGWMCQELPENKPRHMLGISEPDDIFDCIENGADTFDCVSPARVGRNGALYTKFGRVNVTRAQYATDFTPFDVDCDCYTCQNFTSAYLHHLFKSGELLSNTLATIHNERFIIRLVDDIRRSISDGTFYDFKQVFLNNYYSTK

SEQ ID NO: 52198 - protein, 375 aa, unidentified
  source 1..375: note = Unknown
  REGION 1..375: note = tr|A0A522WLD6|A0A522WLD6_9BACT Queuine tRNA-ribosyltransferase OS=bacterium OX=1869227 GN=tgt; PE = 3 SV=1
MSFSFTLIKKDITGARLGMVSTPHGAFQTPVFMPVGTRAAVKAMTPEGLRDAGAEIILANTYHLYLRPGHEIIKELGGLHCFMNWDGTILTDSGGFQVFSLGKLRKIDETGVVFNSHLDGARCVLTPESAIEVQQALGADIIMPLDECPPYPASRAYIEESMARTHRWAKRCKGAKTNAAQALFGIVQGGMHADLRKASANALIDMGFDGYALGGLSVGEEKPLMREVVSFSAPLLPESAPRYLMGVGTPEDLVHGVENGIDMFDCVMPTRNARNGTLFTRRGKLVIKNGLYERDSRPVEEGCLCYACRNYSRAYLRHLFMAGEILSSMLNTAHNLYYYCSLMKRMRAAISEGGFNEFKKGFYTDIEAGNMREEP

SEQ ID NO: 52199 - protein, 369 aa, unidentified
  source 1..369: note = Unknown
  REGION 1..369: note = tr|A0A532UFQ6|A0A532UFQ6_9BACT Queuine tRNA-ribosyltransferase OS=bacterium (candidate division B38) B3_B38 OX=2012999 GN=tgt PE=3 SV=1
MFSFRVINSDRQSRARLGEIATPHGVVQTPVFMPVGTQATVKSLTIKELEELGVEIILSNTYHLYLQPGHKIIEKLGGLHRFTSWNKPILTDSGGFQIFSLGTLQKVKEEGIYFTSHLDGSKHFLSPEMVIDIQKSLGADIITTLDQCIPYPASYEYAREAMEITLQWAKRSRTHFGDKTQALFAIVQGSTYPQLREESLSRLLELDFEGIAIGGLSVGEPKDLMYELLEFMEPLLPADKPRYLMGLGTPQDLFDAVALGYDMFDCVMPTRNARNGCLFTRKGKVMIKNARYADDPRPIDQECTCYTCRHFSRAYLRHLFMAKEILSAILNTHHNLHFYLDIMRKIRQSIKDEKLAELKDSFFSSPESG

SEQ ID NO: 52200 - protein, 401 aa, unidentified
  source 1..401: note = Unknown
  REGION 1..401: note = tr|A0A2H0UTZ9|A0A2H0UTZ9_9BACT Queuine tRNA-ribosyltransferase OS=bacterium (Candidatus Gribaldobacteria) CG10_big_fil_rev_8_21_14_0_10_37_21; OX = 2014275 GN=tgt PE=3SV=1
MAFKVLQKSKKSKARLGVIKTPNGVLHTPAFFPVATLANLKTLDSSDIQTLGFEAVLCNTYHLMLKPGSKIVQKMGGLHNFMNFKGIVATDSGGFQVFSLGSGLEHGVGKIAKIFPGKAKAKKTANWKELSSFLESKRKKKSLLKIKEEGVYFQNYLSGEELFLSPEISIQIQQELAADIIFAFDECTSPLHDKDYTRLALERTHRWALRCLEQQQKANGKKRMAKQMLFGIIQGGEYKDLREKSAKFIGSLDFDGFGIGGSLGKTKNKMYQILDWTIPLLPENKPRHLLGIGHLEDFEKAIKKGVDLFDCVYPTRVARHGVAILSKTQNINLQKSIFLQDKNPLSKDCLCPTCQNYSRAYVSHLIRAKEITGMRLLTLHNLYFFKNFIENTRKCIKLGKI

SEQ ID NO: 52201 - protein, 395 aa, unidentified
  source 1..395: note = Unknown
  REGION 1..395: note = tr|A0A2H0UXV5|A0A2H0UXV5_9BACT Queuine tRNA-ribosyltransferase OS=bacterium (Candidatus Gribaldobacteria) CG10_big_fil_rev_8_21_14_0_10_41_12; OX = 2014277 GN=tgt PE=3SV=1
MQFKVIQQSKKSLARLGVIKTAHGDLHTPAFFPVATQAVIKTLTSDNIKQIGFEGILANTYHLYLRPGEKIVNKMGGLHKFMNFNGVMATDSGGFQVFSLGAGIAHGVGKIAKIFPGPQQSKPSTPLFNSCDRRNRNMVRITEEGVYFRSHLDGSQHFLSPEKSMQIQQDLGADITFAFDECTSPLAGQEYTKKAMERTHRWAKRCLRAAQITKNKSLITKQGLFGIIQGGEYKKLREQSAKFIGGLDFNGFGIGGSLGKTKSKMYEILNWTIPLLPQEKPRHLLGIGYLEDFERAIKAGVDLFDCVYPTRFARHGIALTAKKKLNLNQNKFLIDKNPLDKTCTCPTCQNHTRSYICHLFRAKEITGQQLLTMHNLWFFKQFIDKIRQKIAMDKI

SEQ ID NO: 52202 - protein, 377 aa, unidentified
  source 1..377: note = Unknown
  REGION 1..377: note = tr|A0A3A9A783|A0A3A9A783_9BACT Queuine tRNA-ribosyltransferase OS=bacterium 0.1xD8-71 OX=2320099; GN = tgt PE=3 SV=1
MYKIIKQEGSAKRAAFTTVHGTIQTPVFMNVGTVAAIKGAVSTEDLEGIGTQVELSNTYHLHVRPGDQIIRKMGGLHKFMSWNKPILTDSGGFQVFSLAGLRKIKEEGVYFHSHIDGRKIFMGPEESMQIQSNLASTIAMAFDECPSSVAERRYVEDSVARTTRWLMRCKKEMERLNGLADTINHNQLLFGINQGAVFDDIRIEHARRISELDCDGYAIGGLAVGESHEQMYHVIEETVPYLPKDKPTYLMGVGTPANILEAVERGVDFFDCVYPTRNGRHGHLYTNQGKINLFNAKHELDERPIEEGCMCPACRRYSRAYIRHLLKAKEMLGMRLCVLHNLYFYNTMMEEIRNALEAGEFASYKRHKLEGMKALQS

SEQ ID NO: 52203 - protein, 376 aa, unidentified
  source 1..376: note = Unknown
  REGION 1..376: note = tr|A0A3A9AR85|A0A3A9AR85_9BACT Queuine tRNA-ribosyltransferase OS=bacterium 0.1xD8-82 OX=2320100; GN = tgt PE=3 SV=1
MFRLLKQEGRAKRGEFTTVHGIIQTPVFMNVGTVAAIKGAVSTEDLERIHTQVELSNTYHLHVRPGDKIIKQLGGLHKFMSWDRPILTDSGGFQVFSLAGLRRIKEEGVYFHSHIDGRKIFMGPEESMQIQSNLASTIAMAFDECPPSLAERSYVQASVARTSRWLERCKKEMDRLNSLEDTINKKQLLFGINQGAVYADIRIEHAKQIAGLGLDGYAIGGLAVGESHEEMYHIIEETVPFLPEDKPVYLMGVGTPANILEGVERGIDFFDCVYPSRNGRHGHLYTNHGKINLFNAKYEMDDRPIEEGCGCPACRRYSRAYIRHLLKAKEMLGMRLCVLHNLYFYNTMMEEIRDALDAGEFAAYKQRKLAGMISSR

SEQ ID NO: 52204 - protein, 380 aa, unidentified
  source 1..380: note = Unknown
  REGION 1..380: note = tr|A0A3A8U0P4|A0A3A8U0P4_9BACT Queuine tRNA-ribosyltransferase OS=bacterium 1XD21-70 OX=2320103; GN = tgt PE=3 SV=1
MRYQLITVDGRAKRAEVQTVHGTIQTPVFMNVGTAAAIKGAVSTDDLRQIGTQVELSNTYHLHVRTGDKLIRRFGGLHRFMNWDRPILTDSGGFQVFSLAGLRKIKEEGVYFNSHIDGHKIFMGPEESMQIQSNLGSTIAMAFDECPPSRAEYDYIKQSVERTTRWLERCKREMARLNSLPDTINREQLLFGINQGGVAEDIRIEHAKTIARMGLDGYAIGGLAVGESHEEMYHILDVTVLHLPQDKPTYLMGVGTPANILEAVDRGVDFFDCVYPSRNGRHSHVYTNQGKLNLLNQKYELDPRPIEEGCRCPACRSYSRAYIRHLFKAKEMLGMRLCVLHNLYFYNTMMEEIRDAIEEHRYAEYKAKKLSGMEAGTRDD

SEQ ID NO: 52205 - protein, 379 aa, unidentified
  source 1..379: note = Unknown
  REGION 1..379: note = tr|A0A3A9G1S5|A0A3A9G1S5_9BACT Queuine tRNA-ribosyltransferase OS=bacterium 1XD42-44 OX=2320106; GN = tgt PE=3 SV=1
MTPITYELKKTCKQTGARLGRVHTPHGSFDTPAFMPVGTLATVKTMSPEELTEMNANIILSNTYHLWLRPGQDIIKEAGGLHRFMNWDGTILTDSGGFQVFSLSEMRNITEQGVYFRSHLNGEKLFLSPEKAINIQNDLGSDIMMALDECPPYPADHAYMKSSVERTSRWAERCLDAHQRKGEQGLFGIIQGGEYEDLRKQSANDLISLDFPGYAIGGLSVGEPKDVMNRVLEFTTPLMPDDKPRYLMGVGSPDSLIDGAVRGVDMFDCVLPTRIARNGTCMTSNGRLVVRNAKYARDFSPIDENCDCHACKNYTRAYIRHLIKCNETFGFRLTTYHNLYFLLKLMEQVRKAISEDRLGSFREEFFEQYGFNKPNAKNF

SEQ ID NO: 52206 - protein, 380 aa, unidentified
  source 1..380: note = Unknown
  REGION 1..380: note = tr|A0A3A9FGA8|A0A3A9FGA8_9BACT Queuine tRNA-ribosyltransferase OS=bacterium 1XD42-54 OX=2320110; GN = tgt PE=3 SV=1
MYRIITRDGLAKRAEFTTVHGTVQTPLFMNVGTAAAIKGAVATTDLKEIGTQVELSNTYHLHVRPGDHIVKQMGGLHKFMNWDRPILTDSGGFQVFSLASLRKIKEEGVYFQSHIDGRKIFMGPEQSMQIQSNLASTIAMAFDECPSSVADRQYVQNSVDRTTRWLVRCKDEMKRLNALEDTINPHQLLFGINQGAIYDDIRIEHAKRISELDLDGYAVGGLAVGETHEEMYRILDSVVPYLPADKPTYLMGVGTPINILEAVERGVDFFDCVYPSRNGRHGHVYTNDGKLNLFNAKYELDQRPIEEGCGCPACRSYSRGYIRHLLKAKEMLGMRLCVLHNLYFYNHLMEEIRAAIEAGNYSQFKKAKIERYTQNQEKNA

SEQ ID NO: 52207 - protein, 377 aa, unidentified
  source 1..377: note = Unknown
  REGION 1..377: note = tr|A0A3A8YSP6|A0A3A8YSP6_9BACT Queuine tRNA-ribosyltransferase OS=bacterium 1xD42-67 OX=2320107; GN = tgt PE=3 SV=1
MFELLKQEGRARRGIFTCTHGVVQTPVFMNVGTQGAIKGAVSAHDLKEIGCQVELSNTYHLHLRPGDAVIRQMGGLHKFMGWNGPMLTDSGGFQVFSLSGLRKISEEGVTFASHIDGRRIFMGPEESMQIQSNLGSDIAMAFDECVENPSPYEYVKASCERTARWLERCVAKHDKLNSLSDTVDPQQQLFGIDQGGTYADLRVWHMKEIAKLDCDGYAIGGLAVGEPTQVMYDIIDAVEPFMPKDKPRYLMGVGTPSNIIEGVARGIDFFDCVMPARNARHGKLYTWQGTINIKNEKYKLDPRPIDPTCDCPACRSFSRAYLRHLLTAGEMLAMRLAVLHNLHFYNELMARIRESIDSGTFEDFRTKYSGLLDRPAL

SEQ ID NO: 52208 - protein, 376 aa, unidentified
  source 1..376: note = Unknown
  REGION 1..376: note = tr|A0A3A9G2K4|A0A3A9G2K4_9BACT Queuine tRNA-ribosyltransferase OS=bacterium 1XD42-8 OX=2320102; GN = tgt PE=3 SV=1
MYTLLKQEGKARRGCFQTVHGTVQTPAFMNVGTSAAIKGGISSIDLVDLKCQVELCNTYHLHVRPGDDVIYQMGGLHQFMNWHKPILTDSGGFQVFSLAQLRKIKEEGVTFACHLDGKRIFMGPEESMRIQSHLASTIAMAFDECIENPAPYDYVERSIARTTRWLIRCKAEMERLNHLEETINPKQMLFGINQGSTYHDLRIQHMQEIAALGLDGYAIGGLAVGETAQEMYDTIEAVEPYMPLEKPRYLMGVGTPVNILEAVRRGIDLFDCVMPSRNARHGTVFTWDGIRILHNEKYKTDSEPLDPHCNCPVCRNYSRAYLRHLFRTHEMLGMRLGVTHNLYFYNTLMEKIRDALDAGTFESFYQEMVPILGQRI

SEQ ID NO: 52209 - protein, 378 aa, unidentified
  source 1..378: note = Unknown
  REGION 1..378: note = tr|A0A3A9EMJ9|A0A3A9EMJ9_9BACT Queuine tRNA-ribosyltransferase OS=bacterium 1XD42-8 OX=2320102; GN = tgt PE=3 SV=1
MSYRLLKREGTAKRGELYTVHGVIQTPVFMNVGTAGAIKGGVSSADLKNIKTQVELSNTYHLHLRPGDKVIKKLGGLHKFMNWAQPILTDSGGFQVFSLSSLRKIKEEGVYFSSHIDGRKIFMGPEESMSIQSNLASTIAMAFDECPSSKADRAYVQQSADRTVRWLKRCREHLCQLNQKEDTINKKQMLFGINQGGIFKDIRIEHGKKISQFDLDGYAIGGLAVGETHEEMYEIIETVVPYLPLEKPTYLMGVGTPENILEAVERGVDFFDCVYPSRNGRHGHVYTNEGKRNLYNAKYELDDRPIEEGCGCPACKDYTRAYIRHLLKAKEILGMRLCVLHNLYFYNTMMEEIRQSLDEGRFGIYKKQKLEHMRMGGN

SEQ ID NO: 52210 - protein, 382 aa, unidentified
  source 1..382: note = Unknown
  REGION 1..382: note = tr|A0A3A8ZZZ6|A0A3A8ZZZ6_9BACT Queuine tRNA-ribosyltransferase OS=bacterium 1xD42-87 OX=2320113; GN = tgt PE=3 SV=1
MYRILKREGRAKRAEFTTVHGVIQTPVFMNVGTVAAIKGAVSTEDLEQIGTQVELSNTYHLHVRPGDRVIRELGGLHKFMSWNKPILTDSGGFQVFSLAGLRRIKEEGVYFHSHIDGRKIFMGPEESMRIQSNLASTIAMAFDECPASTAERKYVEDSVARTTRWLARCKREMERLNSLDDTINKKQLLFAINQGAVFDDIRIEHAKQIAELGCDGYALGGLAVGESHEQMYHVIEETVPWLPADKPTYLMGVGTPANILEAVERGVDFFDCVYPTRNGRHGHLYTNRGKINLFNAKYELDERPIDEGCPCPACRRYSRAYIRHLLKAKEMLGMRLCVLHNLYFYNTMMTEIRDALDEGRFAEYKRNKLHGMQKAGAENGNA

SEQ ID NO: 52211 - protein, 377 aa, unidentified
  source 1..377: note = Unknown
  REGION 1..377: note = tr|A0A3A8YVP4|A0A3A8YVP4_9BACT Queuine tRNA-ribosyltransferase OS=bacterium 1xD8-6 OX=2320116; GN = tgt PE=3 SV=1
MYRILCRDGNAKRAELSTVHGVVQTPVFMNVGTVGAMKGAVSTQDLQGIKTQVVLCNTYHLHVRPGDMVVKKLGGLHKFMVWDKPILTDSGGFQVFSLAGLRKIKEEGVYFNSHIDGRKIFMGPEESMQIQSHIASTVAMAFDECPPHPATRKYMQDSVDRTTRWLERCKKEMNRLNQLEDTINPEQMLFGINQGGTFSDIRVEHAKRIAEMDLDGYALGGLAVGESHEEMYDIIEKTVPYLPEDKPVYLMGVGTPENILEAVERGVDFFDCVYPARNGRHGHAYTNHGKMNLLNAKYELDDKPLDDTCGCPVCRTYSRAYIRHLLKAKEMLGLRLMVTHNLYFYNTLMEEIRDAIEKGCFQQYKRNKLEQLKEETK

SEQ ID NO: 52212 - protein, 376 aa, unidentified
  source 1..376: note = Unknown
  REGION 1..376: note = tr|A0A3A9EYY1|A0A3A9EYY1_9BACT Queuine tRNA-ribosyltransferase OS=bacterium 1XD8-76 OX=2320115; GN = tgt PE=3 SV=1
MYKVLKKEGRAKRAQLSTVHGVVQTPVFMNVGTAAAIKGAVATSDLEEIGTQIELSNTYHLHVRPGDELIKSVGGLHKFMSWERPILTDSGGFQVFSLAKLRKITEEGVAFHSHIDGRKIFMGPEESMQIQSNLGSTIAMAFDECPSSKADRLYVQNSVDRTTRWLVRCQAKMRELNAGEGTVNPSQLLFGINQGAIFDDIRIEHAKRIAELDLDGYAVGGLAVGETHEEMYHILEETVPYLPEDKPTYLMGVGTPANILESVDRGVDFFDCVYPSRNGRHGHLYTNYGKINLFNQKYERDMRPIEKGCGCPACRRYSRAYIRHLLKAKEMLGMRLCVLHNLYFYNTMMTEIREALDEGRFAAYKRAKLERMAQGQ

SEQ ID NO: 52213 - protein, 378 aa, unidentified
  source 1..378: note = Unknown
  REGION 1..378: note = tr|A0A4Q2B8N3|A0A4Q2B8N3_9BACT Queuine tRNA-ribosyltransferase OS=bacterium 1XD8-92 OX=2320884; GN = tgt PE=3 SV=1
MYRLLKQEGRAKRGEFHTVHGIIQTPVFMNVGTAAAIKGAVSTEDLEGIKTQVELSNTYHLHVRPGDEIVKKMGGLHKFMSWDKPILTDSGGFQVFSLASLRKIKEEGVYFHSHVDGRKIFMGPEESMRIQSNLASTIAMAFDECPSSRADRSYVQASVERTTRWLGRCKKEMGRLNGLEDTINRHQMLFAINQGAVFADIRIEHAKRIAEMELDGYAVGGLAVGESHEEMYYILEETVPHLPLEKPTYLMGVGTPANILEGVERGVDFFDCVYPSRNGRHGHLYTNNGKINLFNAKYETDGRPIEEGCGCPACRRYSRAYIRHLLKAKEMLGMRLCVLHNLYFYNTMMEEIRDALDKGCFAAYKKNKLEKMRNLQKE

SEQ ID NO: 52214 - protein, 377 aa, unidentified
  source 1..377: note = Unknown
  REGION 1..377: note = tr|A0A4Q2BRA2|A0A4Q2BRA2_9BACT Queuine tRNA-ribosyltransferase OS=bacterium 1XD8-92 OX=2320884; GN = tgt PE=3 SV=1
MFRILKKEGNAKRGEFTTVHGIINTPVFMNVGTVAAIKGAVSTEDLEQIRTQVELSNTYHLHVRPGEQIIKQLGGLHKFMSWDKPILTDSGGFQVFSLAKLRRIKEEGVYFNSHIDGRKIFMGPEQSMQIQSALASTIAMAFDECPSSLAERAYVQASVERTTRWLERCKAEMARLNGLEDTINRNQLLFGINQGAVFADIRIEHAKQIAQLSLDGYAIGGLAVGESHEEMYYIIEETVPHLPGDKPVYLMGVGTPANILEGVERGIDFFDCVYPSRNGRHGHLYTNHGKINLFNAKYELDERPIEEGCNCPACRRYSRAYIRHLLKAKEMLGMRLCVLHNLYFYNTMMEEIRDALDNDEFAAYKKRKLEGMMQGEE

SEQ ID NO: 52215 - protein, 387 aa, unidentified
  source 1..387: note = Unknown
  REGION 1..387: note = tr|A0A0S4M779|A0A0S4M779_9BACT Queuine tRNA-ribosyltransferase OS=bacterium 2013Arg42i OX=1561003; GN = tgt PE=3 SV=1
MATIFRSTVLYQHKRLPARIMEVVTPHGKFETPTFMPVGTRAAINGIQQKDLQNTDTTIILGGNTYHMLNSPGMDAIRICGGMHEFMNWNGPMLTDSGGFQVFSISKKSPKKCRIDDTGARFQQNDGKIINLSPKTSILTQKIIGADIIMAFDECTTHSDNREESLRALNRTHRWLSESRETHEYQPFSEYGNHQAFFGIIQGGYFRDLREQSTQFILDMETDGIAIGGEVIGSDMNATEEIISWIMPQLPTNKVRYTMGVGLNPCDLIAVVKRGIDMFDCVAPTRNARHGALYHGHPKIKDDWVTFDTKNIAEGRLLIKKGEYARDERPILEDCSCTTCRNYSRSYLHYLFKSKQTMYNTLSGIHNIHVMQNVCRKMREIIKQNSY

SEQ ID NO: 52216 - protein, 376 aa, unidentified
  source 1..376: note = Unknown
  REGION 1..376: note = tr|A0A0N0CZ12|A0A0N0CZ12_9BACT Queuine tRNA-ribosyltransferase OS=bacterium 336/3 OX=1664068; GN = tgt PE=3 SV=1
MKFELLHTDSQTKARLGKIETDHGVIETPIFMPVGTAGTVKAVHTRELHNDIQAQIILGNTYHLYLRPGLDVLKQAGGLHKFNGWNKPILTDSGGYQVYSLAENRKITEEGVKFKSHIDGSYHFFSPESVMDIERIIGADIMMAFDECPPYPCDYTYAKKSMHLTHRWLERCCKRVDETEGLYGYSQTLFPIVQGSVFKDLRKESAEFIASMGREGNAIGGLSVGEPAEMMYEMTEFVCDILPKDKPRYLMGVGTPANILEGIALGIDMFDCVMPTRNARNGMLFTTQGIINIRNEKWKTDFTPIDETLGGEVSGFYSKAYLRHLMISKEILAAQIASIHNLRFYLWLVAQAKEQIRLGTFKAWKDKMVVDLMRKL

SEQ ID NO: 52217 - protein, 389 aa, unidentified
  source 1..389: note = Unknown
  REGION 1..389: note = tr|A0A1H8LPW7|A0A1H8LPW7_9BACT Queuine tRNA-ribosyltransferase OS=bacterium A37T11 OX=1855384; GN = tgt PE=3 SV=1
MRIHHNKIAETGQMKFTLQAKDRMSNARAGMMETAHGVIKTPIFMPVGTAGTVKAVHQHELKEAVKAQIILGNTYHLYLRPGLDVLKNAGGLHRFISWDRPLLTDSGGYQVYSLSEVRKIKEEGVTFRSHIDGSKHLFTPENVMDIQRVIGADIIMAFDECTPYPCEYEYARKSLDMTHRWLKRCCGRFDATEGIYGYDQALFPIVQGSVYPDLRKRSAETIAAFGREGNAIGGLSVGEPAEEMYAMTELVCGILPAEKPRYLMGVGTPINLLENIALGIDMFDCVMPTRNARNGMLFTREGIINIKNKKWEADFSPIDETSDLATDQFYSKAYLRHLIHSKEILGAQIATLHNLHFYLWLVGEAREKILDGTFYAWKKEMVKKLGQKI

SEQ ID NO: 52218 - protein, 376 aa, unidentified
  source 1..376: note = Unknown
  REGION 1..376: note = tr|A0A1H9QHZ4|A0A1H9QHZ4_9BACT Queuine tRNA-ribosyltransferase OS=bacterium A52C2 OX=1855383; GN = tgt PE=3 SV=1
MTEFTFALHATDGDARTGAIHTPRGLIRTPAFMPVGTQATVKTMYPGQVRELGADIVLGNTYHLMLRPTAERVARLGGLHEFMRWPHPILTDSGGFQVMSLAQLRKLDEKGVTFRSHLDGSKHHLTPERSIEIQQLLGSDIVMQLDECVGLPSERAEIERAMRLSLRWAERSKQAFGTRPGHALFGIVQGGDQPDLRLESAKGLTELGFEGYAVGGLAVGEPQAVMLDMLDVTCPALPTSRPRYLMGVGTPDDILQSVKRGIDMFDCVMPTRAGRHGLAFTRRGKINLKNARHADDHRPLHEESACPASRDYSRAYLHHLVRTGEALGAMLLTWNNLAYYQELMAGIRASISEGRFEDFMAETREGWAQGDIARLD

SEQ ID NO: 52219 - protein, 372 aa, unidentified
  source 1..372: note = Unknown
  REGION 1..372: note = tr|A0A1V6BZZ3|A0A1V6BZZ3_9BACT Queuine tRNA-ribosyltransferase OS=bacterium ADurb.Bin132; OX = 1866923 GN=tgt PE=3 SV=1
MSCYKLEASSGRARAGVLKTAHGEIKTPVFMPVGTQATVKALTPEQVKEIGFGLILCNTYHLMLQPGEDLVGEAGGLHKFMNWDGSILTDSGGFQVMSQASLREITREGVHFKSYLDGSAHFLTPESAIGIQEKLGSDIAMVLDICTPYPIAQQKARHYTEITHEWAKRSLEARSKPDQLVFGITQGGFELPDRAWSCDAITSMDFDGFAVGSLSVGEPLELAGEILDVVVPRMPKDRPRYLMGVGDPAGIIQGIASGIDMFDCVLPTRLGRNSAVMTKEGTLSISKSRFAKDFRPIEDDCDCYTCRNYTRAYLRHLFKAKEMLAATLASIHNLHFLKRVVDGARNAIIDGTFDQYASRWLNWREDDSTGQD

SEQ ID NO: 52220 - protein, 674 aa, unidentified
  source 1..674: note = Unknown
  REGION 1..674: note = tr|A0A1V6A165|A0A1V6A165_9BACT Queuine tRNA-ribosyltransferase OS=bacterium ADurb.Bin157; OX = 1866935 GN=tgt_2 PE=3 SV=1
MTRLNFNITTKSKKSSARAASFKTLHSEVKTPVFMPVGTRATVKGQTIETLEENGAQVLLANTYHLLLRPGPEVFKKFGGIHNFMNWKGSVLTDSGGFQIFSLHNSREMNEEGAYFKSYIDGQSFMLTPELSIETQKAIGSDIMMVLDHCIPSTAGYDEAKQAMELTHRWAIRSLNARKDSPQSMFGIVQGACHHDLRRESASFLRNQPFDGFAIGGLAVGEPREKCWEFTHCAAQELPENLPRYLMGVGTPIDLLESVNSGVDMFDCIMPSQLGHRGTVFASEGKLQLRRTAYKFDDSKLDPKCDCYTCRSYSKAYLHHLIKSGEPLGWFLLTTHNLAFYHKLMRDMREQIINGTFEEFYKYKREELLRGEDEKIPEQPKRSNFIPKKSSVLGDYSVVENKSGHPCIKQNSSGEIMHSVNNPAEEADLLYIKQSKLYEQIIDITSEKPLTIWDVGLGAGTNAMAAISCFEKAFIEAKGAVRPVHIVSFEIDLDPIKLASTHNKYFVHLRHSAPFKLLQNNIWEHESELLKWTLCEGDFIEKLHEQPIPDIIFYDPFSPKTDGAMWTFSTFKKIHEYCAKSNTSLYTYSNSTAVRATLLTGGFFVGYGVGTGPKTETTVAFTNFETAKRAPNKLLGAEWQARWQRSGSPFPLSLNEKEKTFFTQAIENHPQLKI

SEQ ID NO: 52221 - protein, 381 aa, unidentified
  source 1..381: note = Unknown
  REGION 1..381: note = tr|A0A1V6AED3|A0A1V6AED3_9BACT Queuine tRNA-ribosyltransferase OS=bacterium ADurb.Bin157; OX = 1866935 GN=tgt_1 PE=3 SV=1
MNKNDFKFEVDYKSEECWGRVGRINTRRGEIKTPVFMPVGTVGTVKTLSPEDLRTAGASIILGNTYHLLLRPGTDVLDKFGGLHKMMAWDRPMLTDSGGFQVFSLNKLNKITDDGVEFASHIDGKKYWISPEESMRIQRSIGSDIMMVFDECCPYPADEKRAKSALERSVAWAKRCRIDHPPMRNGQALFGIVQGSMYLPLRLDSIKRTEELGFEGMAVGGLSVGEPKDIMLDVLDKMMPHMPQYLPRYLMGVGTPEDLFYGVERGIDMFDCVHPTRIARHATVFSKTGRISLLNAKWQTDESPIDATCSCYACKTFSKGYMRHLFKAKEILGLRMASLHNITFMINLMDEIRKSLLEKRFNAFKNEFFSSYFSKEDKSGS

SEQ ID NO: 52222 - protein, 433 aa, unidentified
  source 1..433: note = Unknown
  REGION 1..433: note = tr|A0A1V5WQ51|A0A1V5WQ51_9BACT Queuine tRNA-ribosyltransferase OS=bacterium ADurb.Bin212; OX = 1866924 GN=tgt PE=3 SV=1
MKFDLIKNTSDGVRIGKLSTVHGEINTPFFMPVGTVGSVKGVSPHELKELGAQIVLSNTYHLYLRPGEKLIKNMGGLHEFMRWDGPILTDSGGYQVFSLNENKFKSKNLKFKIKEGKSLVKITEDGVEFTSHLDGSKHFFTPEKVVDIQLDLGVDILMPLDVCPSGKASKEEIKEAVELTLRWAKRSKLHFDKKIAKLLNYSIVSFQKDEEKRNNNLTIKQFNNNHQLPALFGIVQGGLDKELRKFCAEELVKLNFDGYAVGGLAVDHETRDMWRTVKLMGQILPIDKPRYLMGVGTPNDIHHAICLGMDMFDCVLPTRLARHGSVFVHKNGISNSKFPISNEISNIKSQNINSNLTIEQFSNNYHLINLLNSKYRTDGGVIEEDCQCPACKGGFSRAYISHLIRNNEMLGMRLATLHNLQKYLDLVKIFDKH

SEQ ID NO: 52223 - protein, 370 aa, unidentified
  source 1..370: note = Unknown
  REGION 1..370: note = tr|A0A1V5VC88|A0A1V5VC88_9BACT Queuine tRNA-ribosyltransferase OS=bacterium ADurb.Bin236; OX = 1866925 GN=tgt PE=3 SV=1
MKFKIEGTEGAARAGAVELPRGSFLTPAFMPVGTQATVKGLSPDELRELGFRVILSNAYHLYLRPGHELVESMGGLHKFMAWDGLALTDSGGYQIFSLKGMIKLTDEGVTFKSHLDGSSHFIRPEDSMMIQRAIGADMVMALDECPPGDSDRKKLEAAVARTAAWLRRCRSVPLKSHQTLIPIIQGGTDREMRRRSAELTLEMDFDAHALGGLSVGEERGAMLDTVEFATPLLPYDKPRYLMGVGMPMDILDAVERGIDMFDCVLPTRMGRNAAAFTSRGRINLRNAAHARDDSPIDPECDGACCRNFSRAYVRHLFMSGEIMAARITSFHNLAFYARMMALARKAILENRFASFKRDFEAKLNDGGVNE

SEQ ID NO: 52224 - protein, 386 aa, unidentified
  source 1..386: note = Unknown
  REGION 1..386: note = tr|A0A1V5UEY9|A0A1V5UEY9_9BACT Queuine tRNA-ribosyltransferase OS=bacterium ADurb.Bin243; OX = 1866936 GN=tgt PE=3 SV=1
MSVHKNDHFEILKKDNKGLGARAGVLKTWRGDIKTPVFMPVGTCATVKAQTTRDLKHAGAQIILANTYHLFIRPGHELIRDAGGLHEFMKWDRPILTDSGGYQVFSLSGTRKITDEKVVFKSFKDGAKMEFSPEKVIRIQQAFGSTIMMVLDECVKYPETEKKAEIAVERTFRWAKRSYAEYLKIMEETGGAHKDMVFGIVQGSTYQDLRKRSVEQITSIPFHGYAIGGLSVGEPNELMYDMLEYLKDLMPQEKPRYLMGVGEVEDIIEGIKNGVDMFDCVIPTRLGRHGVLMTPYGKILIKNAAFRKDFTPPMSNCSCYTCSNFTRAYLHHLFRSEEILSPILNSIHNVHFLIRLAALCREAILEGRYTEFYADYKNGNLVKYQF

SEQ ID NO: 52225 - protein, 380 aa, unidentified
  source 1..380: note = Unknown
  REGION 1..380: note = tr|A0A1V5T310|A0A1V5T310_9BACT Queuine tRNA-ribosyltransferase OS=bacterium ADurb.Bin270; OX = 1866926 GN=tgt PE=3 SV=1
MFKFSETKKSAGTKGRTGIFTTSHGSVITPVFMPVGTLGTVKGITPAELEETGAQIVLSNTYHLFLRPGHELIKSLGGLHKFMSWEKPILTDSGGYQIFSLADLRHKFTEEGVTFQSHLDGGARHFLSPELSIEIQEALGSDIMMVLDECTPYPADEKTTRRSMELSLRWAKRSLDTRKSENALFGIVQGGTHPHLRKEYIEKLLEILPSPSSDRGFDGFSIGGLSVGEPIPLMYEMTELCTSLLPDDRPKYLMGVGTPEDLIEGIDRGIDMFDCVMPTRHARNGSIFTSKGNLNIMNACYTSDPTPMEDGCRCYACRNYSRAYLRHLFICKEMLGPRLATLHNLQFYIDLIGQASLALKEDRYPEFKKKFLTNRKELLC

SEQ ID NO: 52226 - protein, 374 aa, unidentified
  source 1..374: note = Unknown
  REGION 1..374: note = tr|A0A1V5PMF7|A0A1V5PMF7_9BACT Queuine tRNA-ribosyltransferase OS=bacterium ADurb.Bin363; OX = 1866927 GN=tgt PE=3 SV=1
METLHQFKFELLYKSQENNSRLGKVHTPHGIIETPVFMPVGTQATVKTMTSKELLDLKVSIILGNTYHLYLEPGLEVISSARGLHSFMNWHGPILTDSGGFQVFSLQALRDITDEGIVFRSHINGSPHFFTPQKVIEIQMTLNSDIIMPLDECIPWPCEYKDADKALIRTTKWAKISKETLPVDSHQTLFGIVQGGMYPDLRKRSAIELQEIDFKGYSIGGLSVGEPKDIMLHILEETTPVLPEDKPRYLMGVGTPEDFFYCVERGVDMFDCVFPTRIARNGSAFTSNGKINIKNERFSKDQNPLDFDCKCYTCQHHTKSYIRHLFKADEILGPRLMTYHNLYFVLNLMEKIRNSIREGNFNSFKKSFLEKYLS

SEQ ID NO: 52227 - protein, 380 aa, unidentified
  source 1..380: note = Unknown
  REGION 1..380: note = tr|A0A1V5NH54|A0A1V5NH54_9BACT Queuine tRNA-ribosyltransferase OS=bacterium ADurb.Bin400; OX = 1866928 GN=tgt PE=3 SV=1
MRFKLHQKLESGVRIGEIQTPHGSIKTPFFMPVGTVGSVKSVLPRELDEIGAQIVLSNTYHLYLRPGEQLISQFGGLHEFMRWSKPILTDSGGYQVFSLGDRGKEKDSLVKISADGVEFKSHLDGSKHFFTPEKVIQIQLDLGVDILMPLDVCPSGKADREEVRKATELTIEWARRAKEYFDSKVGHLTAGRRPGLHGIVQGGLDPELRRYCAAKLIEIGFDGYSVGGLAVDLETRDMWGIVRLMGEILPEDKPRYLMGVGTPDDIVKLIHLGMDMFDCVLPTRLARHGSVYLRNRGEGLSPDRKNYDLVNIKNAQYRADKNVLDNECGCPACAGGFSRGYISHLLRSNEITGLRLATLHNLFTYLELTREYQGTGEMRS

SEQ ID NO: 52228 - protein, 386 aa, unidentified
  source 1..386: note = Unknown
  REGION 1..386: note = tr|A0A1V5LLA1|A0A1V5LLA1_9BACT Queuine tRNA-ribosyltransferase OS=bacterium ADurb.Bin429; OX = 1866930 GN=tgt_1 PE=3 SV=1
MFSFRVEKTCPVTGARAGVLTTPHGIIETPVFMPVGTQGTVKALSQQELISFDARIILGNTYHLYLRPGPDLLREAGGLHRFMGWNRAILTDSGGFQVFSLPDLRKLSEEGVVFRSHIDGSSHLFTPEKVVEIERAIGSDIMMPLDECIPYPSEREYTARSCGVTIRWAQRSREAFAATDDGSQALFAICQGGVYEDLRVSCAEKLVAMDFPGYAVGGLAVGEPKKELFDTVALSTAILPAHKPRYLMGVGFPDDIVEAVSRGIDMFDCVMPTRNARNGTIFTRYGDLKLRNARHKTDHQPIDTTCTCYACAGTSGVSWDHGGREGFSRAYLHHLDRCGEMLGPMLATVHNLHYYLNLMQEVRNALDTGTFAAFRAQFKAERARGV

SEQ ID NO: 52229 - protein, 165 aa, unidentified
  source 1..165: note = Unknown
  REGION 1..165: note = tr|A0A1V5LKB7|A0A1V5LKB7_9BACT Queuine tRNA-ribosyltransferase OS=bacterium ADurb.Bin429; OX = 1866930 GN=tgt_2 PE=4 SV=1
MAMDFPGYSIGGLSVGEPKELMWAMLDVTTPALPVDRPRYLMGVGMPADLVRGVALGVDMFDCVLPTRMGRNGTVFTWDGRLNLRNAQYERDPGPLDPACPCAICRTFSRAYLRHLLKAGEILAIRSLTYHNLSFYQQLVARMHEEITAGTFSAWADGFLAGYRE

SEQ ID NO: 52230 - protein, 252 aa, unidentified
  source 1..252: note = Unknown
  REGION 1..252: note = tr|A0A1V5LD57|A0A1V5LD57_9BACT Queuine tRNA-ribosyltransferase OS=bacterium ADurb.Bin431; OX = 1866931 GN=tgt PE=3 SV=1
MEIQRDLGSNIMMVLDECAPYPCDYRYALKAHQLTIDWARRSRDAFSEIGERHGFIQHQFAIVQGSVYADLRRQSAEALIEMDFPGYAIGGLSVGEPKQAMFEITGLVTALLPGNKPRYLMGVGKPEDLLEGIELGVDMFDCIMPTRNGRNGTAFTSGGQIVIKNAKFREQFAPLDEACNCYTCRTFTRAYLRHLFSAQEVLVLRLISLHNLHFYLGLMGRARQAILQGRYLEFKKDFLAHYHSNRHHAESS

SEQ ID NO: 52231 - protein, 381 aa, unidentified
  source 1..381: note = Unknown
  REGION 1..381: note = tr|A0A1V5KT62|A0A1V5KT62_9BACT Queuine tRNA-ribosyltransferase OS=bacterium ADurb.Bin478; OX = 1866932 GN=tgt PE=3 SV=1
MFFRLLKTDRHSSARAGILHTGHGAIRTPVFMPVGTQASVKALSPLELQQIRSQIILGNTYHLYLRPGEELVRRAGGLQAFSSWRRPILTDSGGYQIFSLSELNKITSEGVHFRSHLDGSRHFFSPEKVVDIQRDLGSDIMMVLDECAPYPCDYAYAAKAHRLTLDWAQRSLAAFRQSRPRFDHAQYLFAIVQGSVYEDLRRESVHRLVDMDFPGYAIGGLSVGEPKQAMYEMTELCCRSLPPNKPRYLMGVGKPEDLLEGIERGIDMFDCIMPTRNGRNGTAFTSRGQIVIKNAKFREAFQPLDPECDCYTCRTFTRAYLRHLFQAEELLVLRLISLHNVYFYIRLMEAARQAIWQGRFRAFKKKTLEKLTSGRTNYVKI

SEQ ID NO: 52232 - protein, 380 aa, unidentified
  source 1..380: note = Unknown
  REGION 1..380: note = tr|A0A4Z0JPE9|A0A4Z0JPE9_9BACT Queuine tRNA-ribosyltransferase OS=bacterium BCRC 81127 OX=2487723; GN = tgt PE=3 SV=1
MESAIKYTLLKKEKHTGARLGLLETPHGTFETPMFMPVGTEASVKNMAPEDLEKIGASIILANTYHLWLRPGEEIVQEAGGLHKFMNWDKGILTDSGGFQVFSLAKMRDITEAGVHFRNHLNGRQEFLSPEKAIKIENYLGPDIMMSLDECPPFFESYDYIKKSVERTSRWAERGLKAHRNPDWQALFGIVQGAGFEDLRKQSAKDLVSMDFPGYSIGGLSVGESKGEMNRVLDFTTPLLPENKPRYLMGVGTADSLIDGVIRGIDMFDCVLPTRIARNGTCMTSHGRLVVKNAKYAHDFTPLDDNCDCYVCRNYTKAYIRHLINANELFGIHLTSYHNLYFLLNLMKGVRQAIRDDNLLEFREHVFEDYGFNKKNAKNF

SEQ ID NO: 52233 - protein, 381 aa, unidentified
  source 1..381: note = Unknown
  REGION 1..381: note = tr|A0A4Z0J9C6|A0A4Z0J9C6_9BACT Queuine tRNA-ribosyltransferase OS=bacterium BCRC 81129 OX=2487722; GN = tgt PE=3 SV=1
MEPAIKYRLIKTEKHTGARLGELITPHGTFQTPMFMPVGTQAAMKGAISPEELDEMGSQVILANTYHLWLQPGPDLVQEAGGLHKFMNWDKGILTDSGGFQVFSLAKHRKLTEEGVHFRNEINGDRLFLSPEKAIDIENKLGPDIMMSLDECPPFFESYDYVKHSVERTSRWAERGLKAHANPDTQGLFGIVQGAGFEDLRRQSAKDLVSLDFPGYSIGGLSVGESKAEMNRILAFTTPLLPENKPRYLMGVGTADSLIDGVMRGVDMFDCVLPTRIARKGTCMTSHGRVVVKNAVYTHDFGPIDDECDCYVCRHYTRAYLRHLFKADEDFGRRLTSYHNLYFLHHLMKRVRQAILDDNLLDLREEVFEKYGYNAEHPKNF

SEQ ID NO: 52234 - protein, 381 aa, unidentified
  source 1..381: note = Unknown
  REGION 1..381: note = tr|A0A2N5Z9J4|A0A2N5Z9J4_9BACT Queuine tRNA-ribosyltransferase OS=bacterium BM706 OX=2053465; GN = tgt PE=3 SV=1
MKLINRRKKMRIEILKRSQKTKARLTKITTPHSVIETPVFMPVGTKATVKTMSPEELYASDAYIILSNTYHLMLRPGADIVEKAGGLHKFMNYDRSILTDSGGFQVFSLSNLNKIDEDGVVFREHIGGNYIKMTPESSIEIQNKLGADIIMAFDECAPYPCKEDYVISAMKRTHNWAKRSLESHKKKDSQALFGIVQGGMYKKWRKESAEFLASLDFPGYSIGGLSVGEPMELMKEILDHTTDFMPLEKPRYLMGVGSPMELVDGALLGVDMFDCVLPTRLARHGVLLTDHGRMNIKNSRFKEDFTPIDENCDCYTCRNYSRAYLNHLFRSQEMFGLRLNSIHNIHYLIDLMKRLREAIRNEDEVSFRDSLAEKWGDGKYS

SEQ ID NO: 52235 - protein, 370 aa, unidentified
  source 1..370: note = Unknown
  REGION 1..370: note = tr|A0A2H6K3S6|A0A2H6K3S6_9BACT Queuine tRNA-ribosyltransferase OS=bacterium BMS3Abin01 OX=2005709; GN = tgt PE=3 SV=1
MPEFFRYELDAIDGGARAGRLHTPHGVIETPCFMPVGTRATVKALSPRDLEEAGAQVVLANAYHLYFRPGAEAVAARGGLHRFMSWERPILTDSGGFQVFSLEGTTRISGDGVEFRSLYDGSSHFFTPELAVRVQEKLGADIIMCFDECVRAGAAGGYLREAVERTAEWAARCRRAHTRPDQLLMGIIQGGVDHALRRESVERTRELDFGGYAIGGLSVGEERQRMLETMTFTAGLLPRERPRYFMGLGDPSGMLEAIGAGIDMFDCVLPTRDGRNGGALTSSGRLNMRNAAYAEEDGPLEPGCGCYACSNFSRAYIRHLVTQKEILGLQLLSLHNVAFLLNLARQAREAIIAGRFRKFREGVPDLYRAK

SEQ ID NO: 52236 - protein, 377 aa, unidentified
  source 1..377: note = Unknown
  REGION 1..377: note = tr|A0A2H6EH49|A0A2H6EH49_9BACT Queuine tRNA-ribosyltransferase OS=bacterium BMS3Abin03 OX=2005711; GN = tgt PE=3 SV=1
MLKFTIDAKNPDGKARAGQFETAHGIVETPMFMPVGTQGTVKAVNQRFLEQDIKAQIVLSNTYHLFLRPGVEILEKAGGLHKFMNWEKPILTDSGGYQVFSLSDLRKLKPDGVEFSSHLDGSKHFFTPEKVMQIQRSIGSDIMMVLDECTPFPCEYDYAVNSTKLTSDWAALNKEAFEKTKPLYGHEQYLFGIIQGSVYKDLREQSANDLIKLDFDGYAIGGLAVGEPTETMYGMTDFTTGFMPEDKPRYLMGVGRPENILESIDRGIDLFDCVMPTRNARHAILFTWNGVLSLRNAKYKDDFNKVDDECNCYTCRNFSRAYLRHLFIGGEILALELASVHNLHFYLELVTEAKKQILNGSFKEWKTKTINKISIKN

SEQ ID NO: 52237 - protein, 382 aa, unidentified
  source 1..382: note = Unknown
  REGION 1..382: note = tr|A0A2H6EN91|A0A2H6EN91_9BACT Queuine tRNA-ribosyltransferase OS=bacterium BMS3Abin04 OX=2005712; GN = tgt PE=3 SV=1
MNFTLEVKDINSKARAGTILTDHGEIPTPVFMPVGTQGTVKAVTQKVLKEEIQSPIILANTYHLYLRPGTEILEKAGGLHKFMNWDRSILTDSGGFQIYSLSELRKLKSDGVIFRSHLDGSQHLFTPGKVIGIERAIGSDIMMPLDECTPYPCDYDYAKKSKELTSQWAILNKEAFEKTEPLYGHKQSLFGIVQGSIYKDLREGSAKDLMELDFDGYSIGGLAVGEPAEKMYEIVDFTTGILPNEKPRYLMGVGRPENILEAVERGVDMFDCVMPTRNARNAYLFTGKGIVSIRNARYKDDFSSLDENCGCYTCQNFTKAYLRHLFIAKEILALELATIHNLSFYRDLVTTARIKILEGSFSLWKNKIIDKLSVNINSLKEE

SEQ ID NO: 52238 - protein, 389 aa, unidentified
  source 1..389: note = Unknown
  REGION 1..389: note = tr|A0A2H6EWD8|A0A2H6EWD8_9BACT Queuine tRNA-ribosyltransferase OS=bacterium BMS3Abin05 OX=2005713; GN = tgt PE=3 SV=1
MGSFFERITEDPETGARAGILHTNHGDVETPIFMPVGTQGTVKTQSPQELLDNRVQIILGNAYHLYLRPGGELIRNAGGLHKFMSWEQAILTDSGGYQVFSMSDLRRLSSEGVRFQSHVDGSQHLFTPENVTDIQRDLGPDIMMVLDECTPYPCSFEYAQKSHELTIEWAKRSKDRFGNTKALFGYKQFQFGINQGSTYLDLRFKNLEELLKLEFDGYAIGGLAVGEPKSELYKIAGLVASQMPKDKPRYLMGVGKPEDLVEVIALGIDMFDCVMPTRNARNGTVFTWGGRMVIKNASYKSDFRPIDPNCTCTTCRNFSRAYIRHLFSVGEVLALRLATAHNIHFYMELVQKARQAILEKHYKAFKEAFYSDYKVIETESYSKPIKRRK

SEQ ID NO: 52239 - protein, 372 aa, unidentified
  source 1..372: note = Unknown
  REGION 1..372: note = tr|A0A2H6FCC7|A0A2H6FCC7_9BACT Queuine tRNA-ribosyltransferase OS=bacterium BMS3Abin07 OX=2005715; GN = tgt PE=3 SV=1
MEFNIISRDDNARAGIIKTGRGGINTPAFMPVGTNGTVKALGPDDLKSIGAEIMLCNTYHLYLRPGHETIKKLGGLHRFINWDRPILTDSGGFQVYSLSKLRKIEKEGVRFQSHLDGSTHFIGPKEAMEIQKALNADIVMTFDECTPYPAGYDYALKSLELTTEWAKICKSLYSGEQALYGIIQGSTYRDLRERSAEEIISIGFDGYAIGGVSVGEPKDLMYGAIDICTPLMPDNAPRYLMGIGDIHDILHAVSHGIDMFDCVMPTRNARNGTLFTSRGRISIKRTEFREDPNPPDPECGCYTCRNFSNAYLRHLFLNREILSMRLNTIHNLTFYMDFFRSMRESIKDGQFKRFYRRWMSINFGSSGNSVEE

SEQ ID NO: 52240 - protein, 404 aa, unidentified
  source 1..404: note = Unknown
  REGION 1..404: note = tr|A0A2H6FVE1|A0A2H6FVE1_9BACT Queuine tRNA-ribosyltransferase OS=bacterium BMS3Abin10 OX=2005718; GN = tgt PE=3 SV=1
MSEGAQVTSQGSGTIYRSIKTDNNARLGQIYTQHGIINTPAFIPVGTNATVKTMTPEELGVIGAEIILSNSYHLYLRPGHKVIKEIGGLHKFMNWSGPILTDSGGFQVFSLSPLRKITGDGVTFRSHLDGSEHFITPEIVMEIQGALGSDIAMAFDECTPYPASREYTLKSLELTTRWARRCIEAMKLRKWEDKNLSTSQLPNVPTSKPFKQALFGIVQGGTYSDLRKQSADELTAMDFDGFALGGLSVGEPKELMYEMIKFTTPLLPADKPRYLMGIGDLLDVLEAVSAGIDMFDCVMPTRNARNGTLFTSRGRISIKREEFKTDSSPLDPECQCHTCKNYSKAYLRHLFMSREILSMRLNTMHNLHFYLEFFRKMRDSINTGEFDNFRKEQTAVLQNNFNGD

SEQ ID NO: 52241 - protein, 371 aa, unidentified
  source 1..371: note = Unknown
  REGION 1..371: note = tr|A0A2H6G0Q6|A0A2H6G0Q6_9BACT Queuine tRNA-ribosyltransferase OS=bacterium BMS3Abin11 OX=2005719; GN = tgt PE=3 SV=1
MKFDIHQTDGRARASRLVFPRGSVDTPAFLPVGTYGAVKSMTAEELMAGGAQIILGNTFHLMLRPGEDIIREHDGLHRFIHWEKPILTDSGGFQVWSLGKMRKISEEGVRFRSPVDGAEVFLDPERSIDFQHVLGSDIVMIFDECTPYPSTEDETAISMRLSLRWAERCKTAHGEHPSALFGIVQGGMFPDLRQESVEGLKDIGFDGYAIGGLSVGEPTEQMLKVLDGLNPYMPTEKPRYLMGVGRPEDIVEAVSRGIDMFDCVMPTRNARNGWLFAANGNVKIRNAKYAKDTRPVDEECACYTCRYYSRSYLRHLQACNEILGARLATIHNLHYYQQLMNGLRESIANRALRRFIENFYRKRGTQPPDVA

SEQ ID NO: 52242 - protein, 371 aa, unidentified
  source 1..371: note = Unknown
  REGION 1..371: note = tr|A0A2H6H488|A0A2H6H488_9BACT Queuine tRNA-ribosyltransferase OS=bacterium BMS3Bbin01 OX=2005724; GN = tgt PE=3 SV=1
MRFEIGAIDGTARTGSLATSHGVVRTPAFMPVGTRGTVKMVDTRDLAEAGVQMVLANTYHLMLRPGEHVVCDLGGLHSFMGWDAPILTDSGGYQIFSLDANVTEEGVEFRSSYDGSRVELTPEDAVGIQENLGSDIAMILDVLIGLPAPREDVRYAMERTLRWSARAVRVHEREDQALFGIVQGGTDPELRKKSAAMTASLGFDGFGIGGLSVGEPEADRNHAIEVVVAELPEDRVRYTMGLGDTKGMLDGVVRGVDLFDCVWPTRLARHGKVLTSIGDYSIRRAEFKRSDGPLDPNCDCRTCRAHSRGYLRHLFLTGEPTGLRLLTLHNLAYTASLMAQVRESIESGELESFRRATLAARVSTQSEDSLA

SEQ ID NO: 52243 - protein, 368 aa, unidentified
  source 1..368: note = Unknown
  REGION 1..368: note = tr|A0A2H6HG81|A0A2H6HG81_9BACT Queuine tRNA-ribosyltransferase OS=bacterium BMS3Bbin02 OX=2005725; GN = tgt PE=3 SV=1
MNPVTWTVQGTSDSARCGVMNTPHGAVATPAFMPVGTRGTVKGIDRDDLAACGADIMLSNTYHLMLRPGEQVVKELGGLHDFAAWSRPILTDSGGFQIFSLSSKVTEDGVAFRSTYDGSHLMLTPERAIQVQEDLGSDIAMVLDVLVGLPAERAVLDDALERTLRWTERAVGAKRRADRALFGIVQGGVDAELRRRSARGTASLGVAGFGIGGLSVGESAAERNAAIEATVPELPSDKVRYVMGLGDTEGMLDAITRGIDLFDCVLPTRLARHGKVLSRDGDYSIKRTEWTSSSDPLMEGCLCFACQTYTRGYIRHLFNTKELLGLRLATVHNLTYTLTLIADARQAILDNRYSAFAASVKSRRVRDF

SEQ ID NO: 52244 - protein, 379 aa, unidentified
  source 1..379: note = Unknown
  REGION 1..379: note = tr|A0A2H6IBL7|A0A2H6IBL7_9BACT Queuine tRNA-ribosyltransferase OS=bacterium BMS3Bbin07 OX=2005730; GN = tgt PE=3 SV=1
MKFSVIASDGNSRAGIIETERGLVLTPQFMPVGTLGTVKSISPEELGSAGAEVMLCNTYHLYLRPGHETIKRLGGVQKFISWPGPVLTDSGGFQVYSLSRLRIITQDGVEFRSHIDGSLHFIGPEKAMEIQQALGADIIMAFDECTPFPSTYDYALNSLRLTTAWAKRCRSVHPEGSPQALFGIFQGSTYRDLRLKSLEEIVGIGFDGYAAGGLSVGEPKELMYEIIHATGPVMPDVKPRYLMGIGDLLDVLEAVEAGYDIFDCVMPTRNARNGTLFTSTGRISIKRAEFKEDPSPLDPECSCYTCRNFSRAYLRHMYLSREILSMRLNTIHNLSFYLRFFRLMRDSIVMGKFAEFKRKWRDTLERNFVTLQSQTFRSS

SEQ ID NO: 52245 - protein, 367 aa, unidentified
  source 1..367: note = Unknown
  REGION 1..367: note = tr|A0A2H6ITQ8|A0A2H6ITQ8_9BACT Queuine tRNA-ribosyltransferase OS=bacterium BMS3Bbin09 OX=2005732; GN = tgt PE=3 SV=1
MNFEIIHKDGNARLGQITTQRGVINTPAFMPVGTNAAVKAMGPEEMKGLGADIILSNTYHLFLRPGHKVIKEVGGLHKFMNWDGPILTDSGGFQVFSLSPLRNIKNEGVEFRSHIDGSLHFLTPELVMEIQGSLGSDIAMIFDECTPYPATKEYALNSLKLTSKWAKRCLDARNEAQALFGIVQGGMYKDLRKQSADELIAMDFDGYALGGLSVGEPKELMYEMINYSTSLLPEQKPHYLMGIGDLMDVLEAVATGIDMFDCVMPTRNARNGTLFTSRGRVSIKREEFKKDSSPLDPDCDCYTCRNYSKSYLRHLYMSKEILSMRLHTTHNLHFFMEFFRKMREAIGNEEFEKFRKEWTPVLQKNFN

SEQ ID NO: 52246 - protein, 380 aa, unidentified
  source 1..380: note = Unknown
  REGION 1..380: note = tr|A0A2H6IZL2|A0A2H6IZL2_9BACT Queuine tRNA-ribosyltransferase OS=bacterium BMS3Bbin10 OX=2005733; GN = tgt PE=3 SV=1
MSKDFTFHLAATDGAARLGEISCPRGRIRTPAFMPVGTAGTVKAMLPQTVREAGADIVLGNTYHLMLRPGAEQVAALGGLHAFMNWEGPVLTDSGGFQVMSLAKLRKITEAGVTFQSHIDGSTHELTPERSIEIQCLLGADIQMVFDECTPFPCEKGEARASMELSMRWAERSKTAFAKKGKGGQGLFGIVQGGIYPDLREASVEALKQIGFEGYAVGGLAVGEGQERMLETLKVTLPRLPEDKPRYLMGVGTPQDLIHCVARGIDMFDCVMPTRSGRHGQAFTWAGRINLRNAGFADDPRPLDAASSCPAARDYSRAYLHHLVKSREYLAPMLLSWANVHFYQELMAAMRAAIGEGRFEAFARETLARLGANGGSSIQG

SEQ ID NO: 52247 - protein, 375 aa, unidentified
  source 1..375: note = Unknown
  REGION 1..375: note = tr|A0A2H6JAL2|A0A2H6JAL2_9BACT Queuine tRNA-ribosyltransferase OS=bacterium BMS3Bbin12 OX=2005735; GN = tgt PE=3 SV=1
MTGAMRFEVLAADGAARRARMVFARGSVETPAFMPVGTRGTVKAMTPEEVGGLGYELILANTFHLMLRPGMEVIGLHDGLHRFMNWPGPILTDSGGFQVYSLAGMRRIAEKGVTFRSPVDGARVFLGPEESMAVQRGLDSDIVMVFDECTPYPATEDQARESMELSRRWALRSRLAHGDRSASLFGIVQGGMYPQLRAASLAGLMEIGFDGYALGGLSVGEPKEERLKILAEVLPRMPAGAPRYLMGVGTPEDIVDAVCRGVDLFDCVLPTRNARNGFLFVRGGILRLRNSRYRNDTAPPDETCDCYTCRHYSRAYLRHLDRCNEMLGARLNTLHNLHYYARLLSGLREAVAVGRLAAFVREFHAARVQNGENVS

SEQ ID NO: 52248 - protein, 377 aa, unidentified
  source 1..377: note = Unknown
  REGION 1..377: note = tr|A0A2H6JSK4|A0A2H6JSK4_9BACT Queuine tRNA-ribosyltransferase OS=bacterium BMS3Bbin14 OX=2005737; GN = tgt PE=3 SV=1
MRHQTTSPFTLLNRADECRARCGEVTTLHGSFKTPVFMPVGTQGSVKAVTPENLEELGAQIILGNAYHLFLRPGHQLIKRFGGLHTFMHWNRPILTDSGGFQIFSLRKLANISEAGAEFRSHLDGSRRFLSPEDAVQVQEALGADIMMALDTCIPWPADREETAEATALTRRWAARSRAAQPDNGQLLFGIVQGGMYPDLRQQAAAQLVEIGFDGYALGGLSVGEPKELMLEMIEATVASLPPDYPVYLMGVGTPEDLVEGVYRGVDMFDCVMPTRNARNGMLFTSRGRLVIKNACYREDQRPVEEQCACYTCRNYTRAYLRHLFMSREILAYQLNSIHNLHYYCSLMTAMRRAIEEQRFTAFRRAFYAQRDEKPSC

SEQ ID NO: 52249 - protein, 379 aa, unidentified
  source 1..379: note = Unknown
  REGION 1..379: note = tr|A0A117SBY6|A0A117SBY6_9BACT Queuine tRNA-ribosyltransferase OS=bacterium BRH_c32 OX=1734400; GN = tgt PE=3 SV=1
MDFQLLKTDTNSKARLGKITTSHGEIETPIFMPVGTQGTVKAVTPKALKEDVKAQIILGNTYHLYLRPGTEILEKAGGLHKFMGWDRPILTDSGGFQVFSLSELRKLKADGVEFKSHLDGSKHFFSPEKVIKIQRSIGSDFMMPLDECTPFPCEYDYAKKSQELTSKWAVLNKEAFEKSEPLYGHKQYLFGIIQGSVYKDLREKSAADLIALNFDAYAIGGLAVGEPMEQMYELVDFTTDLMPVEKPRYLMGVGRPENILEAIERGVDMFDCVMPTRNARNAYLFTSIGVVSMRNAGYKEDFSPLDPNCSCYTCQNFTKSYLRHLFNAKEILAYELASIHNLTFYLDLVRQAREKIKEGTFSEWKKEIINKLMYNINSI

SEQ ID NO: 52250 - protein, 378 aa, unidentified
  source 1..378: note = Unknown
  REGION 1..378: note = tr|A0A3A9C957|A0A3A9C957_9BACT Queuine tRNA-ribosyltransferase OS=bacterium C-53 OX=2320109; GN = tgt PE=3 SV=1
MYRILKQEGNAKRAEFETVHGTIQTPVFMNVGTVAAIKGAVSTEDLEQIKTQVELSNTYHLHVRPGDEVIKKLGGLHKFMVWDKPILTDSGGFQVFSLAGLRKIKEEGVSFHSHVDGRRIFMGPEESMRIQSNLASTIAMAFDECPSSKADRKYVQDSVDRTARWLVRCKQEMDRLNQLEDTINKKQMLFGINQGAVFADIRIDHAKRISELDLDGYALGGLAVGETHEEMYHIIEETVPHLPQNKPTYLMGVGTPINILEGVERGIDFFDCVYPTRNGRHGHLYTNHGKINLFNAKYELSDQPIEEGCQCPACRRYSRAYIRHLLKAKEMLGMRLCVLHNLYFYNTMMEEIREALDQGCFASYKKKKIEGILSGETD

SEQ ID NO: 52251 - protein, 412 aa, unidentified
  source 1..412: note = Unknown
  REGION 1..412: note = tr|A0A2M7UTM8|A0A2M7UTM8_9BACT Queuine tRNA-ribosyltransferase OS=bacterium CG_4_10_14_0_2_um_filter_48_144 OX=1975563 GN=tgt PE=3 SV=1
MRRPKRQLSTLFHHLLQIWKAIPRFQEKASLKRLRNNPSMFRRIKKSVKSRARFGRLATPHGALATPFFMPVATRGSLKSLDAQGTRDARTEIVLSNTYHLLNRPGYALLEKCGGLHAFMGWNGPILTDSGGYQVFSLARHRKIAALSVSFKDPQTGKTVILTPYNVLKMQRAIGSDIMMVLDVCPPYPSEKEVIQEAIRTTTAWAKSSIMAYRKLGLYRRKERPLLFAITQGGVYDDLRAQHAQTLAKMPFDGYAIGGLAVGEPREKMYHILTNVVQLLPEDKPRYLMGVGKPQDIMRAVQEGVDMFDCVIPTREARHGRIYVFRKRERITATSAEWYETYAIRHARHQKRLVPIDPTCGCFTCGTTTIAYMHHLFRVHDPLAERLATIHNIYFYNELMRLIRRAIRTNDL

SEQ ID NO: 52252 - protein, 396 aa, unidentified
  source 1..396: note = Unknown
  REGION 1..396: note = tr|A0A2M7YV44|A0A2M7YV44_9BACT Queuine tRNA-ribosyltransferase OS=bacterium CG_4_9_14_3_um_filter_65_15 OX=1975567 GN=tgt PE=3 SV=1
MGDLGLATPFSFQVEGRCSGTSARLGRLQCGHGEIRTPVFMPVGTVGSVKAVTFEQVWDTGARLILGNTYHLYLRPGHRLIEELGGLHKFASWEGALLTDSAGFQVFSLSDLNRITDDGVEFRSHLDGSRHFFSPELSMEIQLALGSDIVMAFDQCAPYGADEKEVARAVDRTTDWLRRCREVLPGRLTRNGWERALFGIMQGGVFPELRRRSAEMITELDLPGYAIGGLSVGEPSEALYEVTALAAQLLPDDRPRYLMGVGFPDDILEAVTAGVDMFDCVLPTRMARTGTVLTRDGRLVVKNLAYAADTAPLDAGCGCPVCRRHSRAYIRHLFQAREMLGPTLATIHNLHFYQELMAGIREAIAEDRFAAFADRAISRWREGERVRIDQNGRSRS

SEQ ID NO: 52253 - protein, 448 aa, unidentified
  source 1..448: note = Unknown
  REGION 1..448: note = tr|A0A1J4SBH6|A0A1J4SBH6_9BACT Queuine tRNA-ribosyltransferase OS=bacterium CG1_02_42_9; OX = 1805399 GN=tgt PE=3 SV=1
MKFEILIKDRQSNARAGTISLPHGKVETPSFVPVGTQASVKALSSQELKEIGVKIFFGNTYHLFLRPGAQVIQKLGGIHKFMGWDGPIMTDSGGFQVFSLGLGKLKLKIEKEKLKIAGRYETPYENASPVCAGKLDPSVPIRRLRMTFKESKTGKNQFLAEFAEEGVRFKSHLDGSEHFLTPEKSIQIQKQLGADIILAFDDCTPYPVTYEYARLSMERTHRWAERSLGEFERLRAESGLDHACRRPQSLGSGQSLYGVIQGSTFEDLRKKSARFIDALGTEGIAIGGMAVGESKKLMYKTLEWTIPELEEEKPRHLLGVGEVDDIFEAVERGVDTLDCVTPTRLARHKNLFVHPKIAALEKSKSRFNLIITNAKYAADKSPVDPLCQCVVCQNYSRAYLHHLYKSNEILGVRLGTYHNLYFLVSLMKQIREAIADNRFQRLKQEWLV

SEQ ID NO: 52254 - protein, 369 aa, unidentified
  source 1..369: note = Unknown
  REGION 1..369: note = tr|A0A1L9GU00|A0A1L9GU00_9BACT Queuine tRNA-ribosyltransferase OS=bacterium CG10_37_50 OX=1911686; GN = tgt PE=3 SV=1
  VARIANT 90..92: note = Xaa can be any naturally occurring amino acid
MAEKSFKFKITKEIPGALGRVGTITTPHGEIQTPAFVVVGTKATVKALTPEQIKDLGTQVVLANTYHLFLEPGEKIVAEAGGLHKFMNWXXXLAKIDDDGVTFRSHLDGSELRLTPERSIEIQHQIGADIIFAFDECTAPSASLDYQKEALERTHQWAQRSLKEHQRLNVQARQNFSEKNLGGQALYGIVQGGRHQDLREQSAKFIASLDFDGFGIGGSFDKADMGTAVHWVNSILPVNKPRHLLGIGAVEDLFIGIENGADTFDCVTPTREARNGSLYTLTGRINILNAKFRTDFSPLDPTCACYTCQNFTRAYLAHLFRAKEMLASTLASIHNLYFFVNLVKNIRQSIIEEKFFEFKEQFLSNYHHD

SEQ ID NO: 52255 - protein, 376 aa, unidentified
  source 1..376: note = Unknown
  REGION 1..376: note = tr|A0A1L9GWL5|A0A1L9GWL5_9BACT Queuine tRNA-ribosyltransferase OS=bacterium CG10_46_32 OX=1911907; GN = tgt PE=3 SV=1
MFQIKKQSKRSLARTGVLKTPHGSIQTPFFMPIATKGAVKSLTGDDIRRLKAQIILSNTYHQLLRPGLSILKKAGGLHTFMDWSGPLLTDSGGFQVFSLAKIRKILLDGVRFRSHIDGTEFLFTPKKALEIQEVIGSDIRMILDVCPPYPCTRKEAEKAVDLTTAWAAVSLRGAKRRGNLNGALLFAIVQGSVHRDLRIKSARELVGMNFDGYAIGGLAVGEPFEKALEVLSYVVPELPQNKPRYVMGMGYPEQIVEAVKKGIDMFDCVIPTREARHGRLYFWKNNRHPERSSSGAEGSSFKYTSTSITNARFAKDFSPINAASHIKELKVYTKAYVHHLFRTQEPLAIRLATLNNVDFYLELMRRMRSEISSGKM

SEQ ID NO: 52256 - protein, 433 aa, unidentified
  source 1..433: note = Unknown
  REGION 1..433: note = tr|A0A1L9H1D9|A0A1L9H1D9_9BACT Queuine tRNA-ribosyltransferase OS=bacterium CG10_49_38 OX=1911687; GN = tgt PE=3 SV=1
MAEFNFKIEKKIAGRLGRAGTIMTPHGDISTPAFITVGTKATVKALSPEQVMASGSPAALANTYHLLLEPGAEAVARAGGLHRYMNWPGPLITDSGGFQVFSLGAAYDEGGINKFLKPGLPSRTAPKRPSEEGPREPKPAKIDEDGVTFRSPLDGAEHRLTPESSIQIQHQLGADIIFAFDECTAPTADYVYQKEAMNRTHRWAERSLAEHERLTQAKTRENASKKVLGPLQASLEARLFDKHFPESYSALFGIVQGGRFQDLREASAKFIASLPFAGFGIGGSFDKTDMGTAVGWVNAILPTDKPRHLLGIGEPEDMFEAVAQGADTFDCVTPTRLARHATLLTATGRLNILNAAHRDDPTSIEADCDCYACQNYSRAYLAHLFRAGEIFGATLATIHNLRFMNRLSEQMRAAILAERFLEFKAEWLAKYQR

SEQ ID NO: 52257 - protein, 380 aa, unidentified
  source 1..380: note = Unknown
  REGION 1..380: note = tr|A0A2H0TAG7|A0A2H0TAG7_9BACT Queuine tRNA-ribosyltransferase OS=bacterium CG10_big_fil_rev_8_21_14_0_10_33_18 OX=1975569 GN=tgt PE=3; SV = 1
MLEFRITKKDKNTKARIGELSTQHGVIKTPIFMPVGTCATVKTVSSEELKDLNAEIILSNTYHLYLRPGNQLIKEMGGLHKFMNWDRPILTDSGGYQVFSLGSGSKAENLVKIQKEGVEFKSYLDGSRHFFTPEKVIDIQLDLGSDIIMPLDYCPSAEASKIEIEHAVNITSNWFEKAWKHFQKKTTKLKNKPALFAIIQGGPYEDLRKKSFDFLSQFGVQGFSIGGVANAGESKLKQQKALEYTLPLIQEDKPRYLMGVGEPEDLLEAIERGIDMFDCVVPTRMARNGAVWTKKGRIDLNLAKYKLDPKPIDKCSCKTCQNYSRAYIRHLLKEKEVLGIRLTTMHNLHFIISLMADARKAIQEQKFPQFKKDFFSEFKN

SEQ ID NO: 52258 - protein, 379 aa, unidentified
  source 1..379: note = Unknown
  REGION 1..379: note = tr|A0A1J5DAW1|A0A1J5DAW1_9BACT Queuine tRNA-ribosyltransferase OS=bacterium CG2_30_54_10; OX = 1805403 GN=tgt PE=3 SV=1
MTEPVFRFSIEKSSRECLARAGIIHTRAGDVPTPVYMPVGTCGTVKTLSPAEVKELGGSIILGNTYHLYLRPGTEVLDKFGGLHRFMAWDRPMLSDSGGFQVFSMKKLNRISDEGVMFSSHLDGSKHWLTPEESMRIQRSIGAEIMMVFDECCPFPADAATAGSAVERSVRWAGRCRDDHPPMRAGQALFGIVQGSTFPDLRLESLRRTAEIGFEGLAIGGLSVGESKEEMIGILDRLMPEMPKDVPRYLMGVGSPEDLFRGVERGIDMFDCVLATRIARHGSVFTRGGRVDLTALPWRLSEDPIDRSCSCYACRTFSRGYLRHLFKAKEILALRMASLHNLTFLVNMMSEIREAIFQDRFLALKLEFLGGYLNQKEKK

SEQ ID NO: 52259 - protein, 683 aa, unidentified
  source 1..683: note = Unknown
  REGION 1..683: note = tr|A0A1J5DA94|A0A1J5DA94_9BACT Queuine tRNA-ribosyltransferase OS=bacterium CG2_30_54_10; OX = 1805403 GN=tgt PE=3 SV=1
MSCLNFTIERVSSGSKARAGKFQTPHGLVQTPLFMPVGTSATVKGQTVESLKAAGTNVLLANTYHLLLRPGLEVFRKFGGIHRFMNWDRPVLTDSGGFQIFSLPDSREMNESGARFQSYIDGKTFLLSPESSIEMQEAIGSDIMMALDQCIASTAPFDQAKAAMELTHRWAERSLRARTNSSALFGIIQGACHSELRKQSAGFLSDLSFDGLAIGGLAVGEAPTERYEFTGLVTDNLPHNLPRYLMGVGTPIDILEAVHRGVDMFDCIIPSQFAHRGVAFTSRGKLQCRRTVHKFSEQPIDAQCDCQACKSYSRAYIHHLVKADESLGCYLLTCHNLTFYHRLMNQIRESILNDDFLSFYERMRPALVRIDEDNPGRPPKKARVYRPSRLGDYEVCSFPEGFSSIRQISSGEVMHSVNRPSDEANKLYVEQSHLASRLLNDQNLEGDLVVWDVGLGAAYNAMATLNCFEKIYAGKRENPLRPLRPLRMVSFESDLDPLKLACKDTFRFPHLRHGAPHQILERGKWEHPSGLFSWELLEGDFLHFFESAKVPGLIFYDPFSYKTNSALWTSETFSRIFSCCFSSNTELYTYSSSTAVRVSLLSANFYVAEGVGTGPKADTTIAFTMAKGAEIHPSSPRLLGFDWLIRWRRSESKFPPGLSIEDKTRLEKRIENHPQFAIVPTLR

SEQ ID NO: 52260 - protein, 381 aa, unidentified
  source 1..381: note = Unknown
  REGION 1..381: note = tr|A0A3A9B9W2|A0A3A9B9W2_9BACT Queuine tRNA-ribosyltransferase OS=bacterium D16-34 OX=2320120; GN = tgt PE=3 SV=1
MALFDCTLDAQSGHARALSFETAHGTFQTPMFMPVGTSATVKGITPDQLHALGAQVVLANTYHLSMRPGAELVAEAGGIHSFMNYSGPMLTDSGGFQVFSLADTVKLDNDGLTFRSIYDGAKIRWTPEENMRIQELIGADIAMQLDQCAPYPATKEFVSSAVDLSAKWAKRCLVAHKRPDQTLFGIVQGGMHLDLRLESIARLRAIEDENVSAGGRRFGGFGIGGYSVGEDHEVMFETLGQVARALPKDRPRYLMGVGNPTTLVRAVGEGVDMFDCVLPTRTARMGTAFSSTGRMNLRNAKYAHDFTPLDHACTCSTCQNFTRAYLRHLVKQNEMLGAILLSVHNLHFLIDLMRRARQAVLADTYDEFLQAWMNSSAAQDY

SEQ ID NO: 52261 - protein, 375 aa, unidentified
  source 1..375: note = Unknown
  REGION 1..375: note = tr|A0A3A9D274|A0A3A9D274_9BACT Queuine tRNA-ribosyltransferase OS=bacterium D16-50 OX=2320112; GN = tgt PE=3 SV=1
MYRILKQEGRAKRAELATVHGTIQTPVFMNVGTAAAIKGAVATSDLEQIKTQVELSNTYHLHVRPGDTVVKQLGGLHKFMSWNKPILTDSGGFQVFSLAGLRKIKEEGVYFNSHIDGRKIFMGPEESMQIQSNLASTIAMAFDECAPSKAERSYVQASVDRTARWLERCKNEMKRLNGLEDTINPRQLLFGINQGAVYADIRIQHAKQISELELDGYAVGGLAVGETHEEMYYILDEVVPFLPKDKPTYLMGVGTPANILEGVERGVDFFDCVYPTRNGRHGHLYTNHGKINLFNAQYELDQRPIEEGCGCPACARYSRAYIRHLLKAKEMLGMRLCVLHNLYFYNTMMEEIRAALEEGRFAEYKRQKLAGMAAR

SEQ ID NO: 52262 - protein, 377 aa, unidentified
  source 1..377: note = Unknown
  REGION 1..377: note = tr|A0A3A9C2D1|A0A3A9C2D1_9BACT Queuine tRNA-ribosyltransferase OS=bacterium D16-54 OX=2320104; GN = tgt PE=3 SV=1
MRYQLIATDGRAKRAEVQTVHGTIQTPVFMNVGTVAAIKGAVSTDDLRQIGTQVELSNTYHLHVRTGDKLIRQFGGLHRFMNWDRPILTDSGGFQVFSLAGLRRIREEGVYFNSHIDGRKIFMGPEESMQIQSNLGSTIAMAFDECPSSRADSEYIKSSVERTTRWLERCKKEMARLNSLSDTINREQLLFGINQGGVVESIRIEHAKTIADMDLDGYAVGGLAVGESHEEMYRILDVTVPHLPQNKPTYLMGVGTPANILEAVDRGVDFFDCVYPSRNGRHSHVYTNQGKLNLLNQKYELDSRPIEEGCQCPACRSYSRAYIRHLFKAKEMLGMRLCVLHNLYFYNTMMKEIRDAIEKHRYADYKARKLSGMEAES

SEQ ID NO: 52263 - protein, 377 aa, unidentified
  source 1..377: note = Unknown
  REGION 1..377: note = tr|A0A3A8WJD7|A0A3A8WJD7_9BACT Queuine tRNA-ribosyltransferase OS=bacterium D16-59 OX=2320098; GN = tgt PE=3 SV=1
MYQVLCKDGRAKRGELKTVHGTIQTPVFMNVGTVGAMKGAVSTQDLQSMKTQVVLCNTYHLHVRPGDNIVNQLGGIHKFMVWDKPVLTDSGGFQVFSLAGLRKIKEEGVYFNSHIDGKKIFMGPEESMRIQSNLASTIAMAFDECPPYPAARKYMQDSVDRTTRWLGRCKAEMARLNGSGNALNPKQLLFGINQGGTFDDIRIEHAKQITELELDGYALGGLAVGETHELMYHVIEETVPYLPEDKPVYLMGVGTPENILEAVERGVDFFDCVYPARNGRHGHAYTNHGKMNLFNARYETDDKPIDETCDCPVCRTYSRAYIRHLLKAKETLGLRLMVTHNLYFYNTLMEEIRDAIEKGCYKEYKRKKTEMFKEETK

SEQ ID NO: 52264 - protein, 381 aa, unidentified
  source 1..381: note = Unknown
  REGION 1..381: note = tr|A0A3A9B6N4|A0A3A9B6N4_9BACT Queuine tRNA-ribosyltransferase OS=bacterium D16-63 OX=2320119; GN = tgt PE=3 SV=1
MALFDCTCEARSGHARALSYETVHGTFRTPMFMPVGTSATVKGVLPEQLHELGAQVVLANTYHLAMRPGADVVAEAGGIHAFSGYDGPMLTDSGGFQVFSLADTVRLDDDGVTFQSIYDGAKVRWTPEENMRIQELIGADIAMQLDQCAPYPAERSFVAKAVDYSSAWAERCLAAHQRPDQTLFGIVQGGMHLDLRLESVRRLRAIEDASLAAGGRHFGGFGIGGYSVGESHEVMFETLGEVARACPEDRPRYLMGVGNPTTIVRAIGQGVDMFDCVLPTRTARMGTAFSSTGRMNMRNAQYARDFGPLDPQCSCPTCRQFSRAYIRHLVKQNEMTGGVLLSIHNLHFLLELARRAREAVLAGAYGEFEAAWMASPGARDY

SEQ ID NO: 52265 - protein, 405 aa, unidentified
  source 1..405: note = Unknown
  REGION 1..405: note = tr|A0A2G6NX38|A0A2G6NX38_9BACT Queuine tRNA-ribosyltransferase OS=bacterium DOLJORAL78_65_58; OX = 2044882 GN=tgt PE=3 SV=1
MNTHPLDTPFRFERDKTATDCAGRRGRLVTGHGVIETPVFMPVGTVGSVKAVTFENVWATGARIILGNTYHLYLRPGHELIARLGGLHKFQGWDGALLTDSAGFQVFSLGDLTRITEDGVHFRSHLDGSRHFFSPEVSMEAQLNIGADIIMAFDQCAAYGVSRDEVTAALERTTRWLHRCRDVTGGRTFRKGYERVLFGIMQGGVHEDLRRRSAEEIVALDLPGYAVGGLSVGEPTTAMREITELSAGLLPADKPRYLMGVGFPDDIVAGVAAGIDMFDCVLPTRMARTGTVLTRDGRLVIRNQDQAEDSRPIDAECGCPVCARHSRAYIRHLFSAKELLGPSLASIHNLHFYQELMLGVRRALEEDRFAAFAAEVTRRWQEGEAARLEGVRRRVPGGRQKKRPS

SEQ ID NO: 52266 - protein, 382 aa, unidentified
  source 1..382: note = Unknown
  REGION 1..382: note = tr|A0A2G6F9P3|A0A2G6F9P3_9BACT Queuine tRNA-ribosyltransferase OS=bacterium DOLZORAL124_38_8; OX = 2044884 GN=tgt PE=3 SV=1
MTKNYELQAKCGKARAGVLKTRRGEVQTPFFMSVATRATIKGGVDMQDLEAIQAPVVLCNTYHLHLRPGSEVVAKHGGLHDFMKCDKPMLTDSGGFQVFSIKRKKITEDGVFFNSHIDGQRFYLDAEKSIEIQHNLGADMIMAFDECPPNVPNWHKIRKAVEKTTAWAKRSLEYHWSKFSKDLGPTERPQIFGIVQGGSFSDLRQKSLEEITALDFDGFALGGLAVGETHEQMYKVLDEMAVQLPADKPRYLMGVGTPENLLEAIERGIDMFDCVLPARNARHGTVYTWDGKLKIGNAQYREDMRVLDENSDSPICKRGFTRSYLHHLHRVEEDLAKRYLTMHNLHFFHDLMREARKHIVAGDYSEWKNQLLEKWNGKEIQP

SEQ ID NO: 52267 - protein, 405 aa, unidentified; identical to SEQ ID NO: 52265
  source 1..405: note = Unknown
  REGION 1..405: note = tr|A0A2G6FZ53|A0A2G6FZ53_9BACT Queuine tRNA-ribosyltransferase OS=bacterium DOLZORAL124_64_63; OX = 2044883 GN=tgt PE=3 SV=1

SEQ ID NO: 52268 - protein, 366 aa, Escarpia laminata
  REGION 1..366: note = tr|A0A497U5Q3|A0A497U5Q3_9BACT Queuine tRNA-ribosyltransferase OS=bacterium endosymbiont of Escarpia laminata OX=1221601 GN=tgt PE=3 SV=1
MQFETFHSDGAARRGRLTFARGTVETPAFMPVGTYGTVKAMTPEELTGMGAEIILGNTFHLMLRPGTKVIRAHGDLHGFTHWQGPILTDSGGFQVFSLGKMRKITEKGVAFRSPVNGSKVFMGPEESMQIQRELGSDIVMIFDECTPYPATEEEARVSMELSLRWAGRSRVAHGDNPSALFGIVQGGVFEHLREASLNGLTDIGFDGYAVGGLSVGEPPEDRWRVLDFLSGKLPQDKPRYLMGVGTPEDIVEAVRRGIDMFDCVMPTRNARNGHLFTHQGVVRIRNAVHEYDTGPVDPLCDCYTCKNYSRAYLRHLEKCKEILGARLNTIHNLFYYQTLMRDLRDAIEAGQLERFVSDFYALRSGV

SEQ ID NO: 52269 - protein, 366 aa, Escarpia laminata
  REGION 1..366: note = tr|A0A497TQ00|A0A497TQ00_9BACT Queuine tRNA-ribosyltransferase OS=bacterium endosymbiont of Escarpia laminata OX=1221601 GN=tgt PE=3 SV=1
MQFETFHSDGAARRGRLTFARGTVETPAFMPVGTYGTVKAMTPEELTGMGAEIILGNTFHLMLRPGTKVIRAHGDLHGFTHWQGPILTDSGGFQVFSLGKMRKITEKGVAFRSPVNGSKVFMGPEESMQIQRELGSDIVMIFDECTPYPATEEEARVSMELSLRWAGRSRVAHGDNPSALFGIVQGGVFEHLREASLNGLTDIGFDGYAVGGLSVGEPPEDRWRVLDFLSGKLPQDKPRYLMGVGTPEDIVEAVRRGIDMFDCVMPTRNARNGHLFTHQGVVRIRNAVHEYDAGPVDPLCDCYTCKNYSRAYLRHLDKCNEILGARLNTIHNLFYYQTLMRDLRDAIEAGQLERFVSDFYALRSGV

SEQ ID NO: 52270 - protein, 376 aa, unidentified
  source 1..376: note = Unknown
  REGION 1..376: note = tr|A0A132HRZ2|A0A132HRZ2_9BACT Queuine tRNA-ribosyltransferase OS=bacterium F083 OX=1768114; GN = tgt PE=3 SV=1
MSFEINATDRGCRARAGVIHTCHGDIATPVFMPVGTVGSVKAVHQHELRDDINAQIILGNTYHLYLRPGLGTLQAGGGLHRFMGWERPILTDSGGFQVFSLADNRKIREEGCTFRSHIDGSKHLFTPENVMDIQRVIGADIMMAFDECCPGDADRRYARQSMELTHRWLDRCIARYNSTEPCYGHHQALFPIVQGCQYEDLRRESAAYIAERATEGCAIGGLAVGEPTEVMYEMVALCCDILPADQPRYLMGVGTPANILEAIERGVDMFDCVMPTRNGRNGMLFTAHGTINIKNKKWETCFEPIDPESPAECDRVYTLAYLHHLMRAEEILALQICSIHNLAFYLWLVRTARRHILDGDYARWKSAILPDLMRRI

SEQ ID NO: 52271 - protein, 380 aa, unidentified
  source 1..380: note = Unknown
  REGION 1..380: note = tr|A0A202DN99|A0A202DN99_9BACT Queuine tRNA-ribosyltransferase OS=bacterium F11 OX=1932698 GN=tgt; PE = 3 SV=1
MTPFSVEHRDPKSKARAGRLITPHGVIETPVFMPVGTQATVKTMSSDEIENMGYRILLANTYHLFLRPGLETLQKLGGLHQFMSWPGAILTDSGGYQVFSLATRCQLSEEGVVFSSHVDGKRQKLTPEITTEFQFNIGSDIAMCLDDCPPYPSLKRDAKESMEQTLRWAKRCKMTYETWLEAHQANPLLFGITQGASFTDLREESTQKTVEIGFPGYAIGGLGVGEPKEMTWSLLEASLRPLPEKAPHYLMGFGQPEDFWEGVQRGVDMFDCVLPTRNGRNGQAFTSRGRLQITNAPFREDTQPLDPHCSCLTCQRYSRGYLFHLFRAGELLGPRLITLHNLFYMISLLRTIRKSIIDGHFQEEKEKFLETYKSSENAIC

SEQ ID NO: 52272 - protein, 350 aa, unidentified
  source 1..350: note = Unknown
  REGION 1..350: note = tr|A0A3D8UN11|A0A3D8UN11_9BACT Queuine tRNA-ribosyltransferase (Fragment) OS=bacterium HD9-500m-PIT-SAG08 OX=2283597 GN=DZA33_00950 PE=3 SV=1
LIETHRGKIETPVFMPVGTQATVKACTIDDIKKTGSQIILSNTYHLMIRPGVKRIEDAGGLHKFMNCDLPILTDSGGFQVMSLSKLNKIDKEKGAIFNSHIDGKKFYLSPEESIKIQLGLNSDIVMVMDECPKKTNDYQTIDKSMNLSLYWAERSKKAFGHNPQKALFGIVQGGLFKDLRQKSLKGLLEIGFDGYALGGLAVGETQDEMFTVLDDIKEHLPDDKPHYLMGVGTPNDILGAVKRGVDMFDCVLPTRSGRTGLAFTWQGRVNIKNNKYQNDNTPLDPECKNLNLNKYSKNYLNHLFNTNEILGSMLLTLHNINFYQELMRSIRENIQNDTFDTFHDKYIDKL

SEQ ID NO: 52273 - protein, 380 aa, unidentified
  source 1..380: note = Unknown
  REGION 1..380: note = tr|A0A2H5VPF8|A0A2H5VPF8_9BACT Queuine tRNA-ribosyltransferase OS=bacterium HR08 OX=2035403; GN = tgt PE=3 SV=1
MVIFQLIAEDPATRARAGVLHTAHGPVETPVFMPVGTQATVKALTQEMLEELDARIVLANTYHLFLRPGEHVIRELGGLHRFMAWDRAILTDSGGYQVLSLAPLRTVREEGVHFQSHLDGSRHLLTPERAIEIQVALGSDILMVLDECVGNPAEWAEAERAVRLTTAWARRSKARFEQLREEGLLTPAALFGIIQGSLYRDLRRRSVEELLEIGFDGYAIGGLSVGEEKPAMLDMVEYVAELMPRERPRYLMGVGTPTDLVEGVRRGVDMFDCVLPTRNARNGQVFTSRGPLNIKNAAYARDPRPLDEECACRVCRRYSRAYIRHLYASGEILSAILCTYHNLHFYLDTMRKIRQAIALGNFAEFAQEFSRRYREGRSAS

SEQ ID NO: 52274 - protein, 375 aa, unidentified
  source 1..375: note = Unknown
  REGION 1..375: note = tr|A0A2H5VT35|A0A2H5VT35_9BACT Queuine tRNA-ribosyltransferase OS=bacterium HR09 OX=2035404; GN = tgt PE=3 SV=1
MGRSGTFRVVAREGFARAGELQTPHGIVRTPAFMPVGTAGSVKGLAPWELARLAPEMVLANTYHLLLRPGVEVVAELGGLHRFMGWSGPILTDSGGFQVFSLAQLRRVSEEGVLFRSHIDGTEFVLTPESCMEAQKRLGVDVAMALDVCPALPAPRESLEHAVELTTLWARRCRQALAPGELPLLFGIVQGGLELDLRRQALEALLPLDFDGYALGGFSVGEPPEAMWQAVGVLAPELPEDRPRYLMGVGTVRDILEAVAAGVDLFDCVIPTRNARNGLLHTSRGPVVVKHARYRSCPEPPDPQCSCPTCQTCSLAYLRHLYMAREAAYVVLATVHNLHFYLTLMRQVRSAIIDGRFAELRQGISADLAAAVEVS

SEQ ID NO: 52275 - protein, 380 aa, unidentified
  source 1..380: note = Unknown
  REGION 1..380: note = tr|A0A2H5VZL1|A0A2H5VZL1_9BACT Queuine tRNA-ribosyltransferase OS=bacterium HR10 OX=2035405; GN = tgt PE=3 SV=1
MVTFQLIAEDRATRARAGVLHTAHGPVETPVFMPVGTQATVKALTQEMLEELDARIVLANTYHLFLRPGEHVIRELGGLHRFMAWDRAILTDSGGYQVLSLAPLRTVREEGVHFRSHLDGSRHVLTPERAIEIQVALGSDILMVLDECVGNPAERVEAERAVRLTTAWARRSKARFEQLRAEGLLTPAALFGIIQGSLYADLRRRSMEELLEIGFDGYAIGGLSVGEEKSAMLDMVEYVAELMPRQHPRYLMGVGTPADLIESVRRGVDMFDCVLPTRNARNGQVFTSRGPLNIKNAAYARDPRPLDEECACRVCRRYSRAYIRHLYASGEILSAILCTYHNLHFYLDTMRKIRQAIVLGNFAEFAQEFLRRYQEGRSAS

SEQ ID NO: 52276 - protein, 395 aa, unidentified
  source 1..395: note = Unknown
  REGION 1..395: note = tr|A0A2H5W506|A0A2H5W506_9BACT Queuine tRNA-ribosyltransferase OS=bacterium HR11 OX=2035406; GN = tgt PE=3 SV=1
MRHRHGRHLPGPPSHVDDVTGNRFRILYEDPSSSARIGLYETDHGPVETPCFAPVGTYGAVKAVPHETLEAMGFRLILANTYHLYLRPGPETIRALGGLHRFVAWPHAILTDSGGYQVFSLARLRKVTDEGVTFQSHLDGSLHVLTPERAVEIQEALGSDIAMVLDECPPYGCERSDLEQAVRRTVAWARRSRAVHRRPDQSLWGITQGSTDPQLRRICTEQILEIGFDGYAIGGLAVGEPKAEMYAAIADAAALLPRDHIRYLMGVGLPQDVVYAVMQGVDLMDCVVPTRHARNGYLFTREGPLHIKNSRYQTDPTPPDPTCDCPVCRRYSRAYLRHLFMVREVLFTVLNTVHNLYFYRRLFREIRTAIQEGSLPSLYRFYEDRYGPKTLSAEA

SEQ ID NO: 52277 - protein, 358 aa, unidentified
  source 1..358: note = Unknown
  REGION 1..358: note = tr|A0A2H5WM18|A0A2H5WM18_9BACT Queuine tRNA-ribosyltransferase OS=bacterium HR14 OX=2035409; GN = tgt PE=3 SV=1
MGIQFEIVQTSTRSHARLGRLTTPHGVIETPVFMPVGTQATVKTLSQDELEQLGYRLILGNTYHLYLRPGAERIARMGGLHRFMSWSGAILTDSGGFQVFSLTSLRQIDMEGVTFRSHLDGSEHRFTPELSIRVQSLLGSDIMMAFDECPPYPASREEVALAVERTYRWAIRSRAAWEEAQPAGALFGIVQGGVYEDLRLMSLQQITELNLPGYAIGGVSVGEPVEEMRRITALVAPRLPAEKPRYLMGVGTPDDILHAVQAGVDMFDCVLPTRLGRHGAVFTQNGRHNLRNARFAECMEPIDPTCDCWVCQRYTLAYLHHLFRAGEMLGYRLASYHNLAFYARLMAQIRQRIREGTL

SEQ ID NO: 52278 - protein, 371 aa, unidentified
  source 1..371: note = Unknown
  REGION 1..371: note = tr|A0A2H5WU30|A0A2H5WU30_9BACT Queuine tRNA-ribosyltransferase OS=bacterium HR15 OX=2035410; GN = tgt PE=3 SV=1
MTHNLRFEIVAVSKGSQARAGRLHTAHGVIETPAFMPIGTQASVKTLSQEELEQLGYRLILANTYHLYLRPGAERIARLGGLHAFMSWRGAILTDSGGYQVFSLAPLRQIDDEGVTFRSHIDGSLHRLTPERAIEVQQLLGSDIMMALDECPPYPAEYDTVAHAVERTYRWAIRCKQAWQAKETTRLCPSDGGALFGIVQGGIYEDLRKVSIDQITSLDLPGYAIGGVSVGEPVERMRAIVEFTTPRLPPDRPRYLMGVGTPEDIRHAVACGVDLFDCVLPTRLGRHGAVFTSRGRLNLRNARFAECTEPIDPECDCTVCQRYSLAYIHHLFRAGEMLGYRLASYHNLAYYARWMQTLRKEIMAGGCIRQG

SEQ ID NO: 52279 - protein, 381 aa, unidentified
  source 1..381: note = Unknown
  REGION 1..381: note = tr|A0A2H5X2N5|A0A2H5X2N5_9BACT Queuine tRNA-ribosyltransferase OS=bacterium HR16 OX=2035411; GN = tgt PE=3 SV=1
MRPSPALQFKIVARDPRSQARCGILRLPHGEVETPVFMPVGTQGTVKAMTQEELERLDFRIILCNTYHLYLRPGHERIARAGGLHRFIAWNRNILTDSGGFQVFSLQGLRRVYEDGVEFQSHIDGSIHYFTPERAVEVQHALGADIIMAFDECPPNPCTYEQAKAAMERTHRWAMRCLESHHTEQALFGIVQGSVYEDLREQSARFISELGFPGVAIGGVAVGEEKAEIHRIVAFTTPLLPDGKPRYLMGVGEPDDILQAVASGVDMFDCVLPTRLARNAAMMTRRGRVNLRNAHFADHFGAVDPECDCPVCQRYPAAYIHHLFKAKEILAARLATYHNLYFYQRLMEDIRRAIREGNLEQFTREFLQKYMPEESRLSREE

SEQ ID NO: 52280 - protein, 377 aa, unidentified
  source 1..377: note = Unknown
  REGION 1..377: note = tr|A0A2H5XEG6|A0A2H5XEG6_9BACT Queuine tRNA-ribosyltransferase OS=bacterium HR17 OX=2035412; GN = tgt PE=3 SV=1
MAAQHFRVLARDPNTRARLGELHLAHGTVATPVFMPIATQGTVKMLTADDLEALGAQMLLANAYHLHLRPGETLIAQLGGLHRFMGWQRPILTDSGGFQVFSLSTLREVTDEGVRFRSHHDGTDHFLHPETSIRIQEALGSDIAMVFDDVVAYPCPREQAQAAMERSLRWAERCRKAHRRPDQLLFAITHGGVYADLRRWCTERLVAMDFPGYAIGGLSVGEPKEQMFGMVALSTELLPDDKPRYLMGVGTPADIARAVALGVDMFDCVLPTRLGRTGTAFTAQGRLNLRNARYATALEPLDPTCDCVTCRRYSRAYLRHLFKAGEATGPRLLTYHNLHFYLRLMDRLRAAIVAGTVHQIVDEMTRLFPDEPSEREA

SEQ ID NO: 52281 - protein, 376 aa, unidentified
  source 1..376: note = Unknown
  REGION 1..376: note = tr|A0A2H5XLR8|A0A2H5XLR8_9BACT Queuine tRNA-ribosyltransferase OS=bacterium HR18 OX=2035413; GN = tgt PE=3 SV=1
MRFVLERVDTATRARAGRLETPHGTVETPMFMPVGTVGSVKTLGPRELRQDIGAQIILGNTYHLYLRPGLEVLRQAGGLHRFMGWDGPILTDSGGYQVFSLAPLRKLSDEGVVFQSHLDGSRHLFTPENVIDFQRIIGADIMMVLDECPPADVSLEAARRAHELTLRWAARSQQRFSATEPLYGYPQALFGIVQGGVFPALRRASAQALVEMDFPGYAIGGLSVGEPAEVMYEMVEIVTELLPLDRPRYLMGVGTPANLLENIARGIDLFDCVLPTRNGRNGMLFTTEGILNIRNRKWQMDFSPIDPGLEGYVSQTFTKAYLRHLFQAGEILGLQIATLQNLSFYLWLMRAARQAILENRYQSWMNEVLPRISQRL

SEQ ID NO: 52282 - protein, 388 aa, unidentified
  source 1..388: note = Unknown
  REGION 1..388: note = tr|A0A2H5XVG8|A0A2H5XVG8_9BACT Queuine tRNA-ribosyltransferase OS=bacterium HR20 OX=2035415; GN = tgt PE=3 SV=1
MLARSEWFELVATDPASKARAGLLRTEHGVVETPVFMPVATQGAIKALDHRIARELSYRMLLANTYHLYLRPGTDVLRAAGGLHRFMRWHGALLTDSGGFQVYSLGSIRRIRDDGVEFRSHIDGSRHLFTPESVIAHQRAIGADIMMAFDECIGYPATYQQATAAMQRSICWERQCLESHREQEFLYGYRQQLFSIIQGSIYLDLRQRCIEELCALPFDGYAIGGLAVGEPVSVMYEVVDHATDLLPADKARYLMGVGTPQNILRAIELGVDMFDCVMPTRNARNGTLFTTRGRINIRNQRFKFSDEPLDPAWEALGVEPFSLGYVRHLFVSGEILGLTIATMQNLAFYRWLVRTAREKILAGSFRQWAKSFLEQFYPETTLEGERST

SEQ ID NO: 52283 - protein, 387 aa, unidentified
  source 1..387: note = Unknown
  REGION 1..387: note = tr|A0A2H5Y288|A0A2H5Y288_9BACT Queuine tRNA-ribosyltransferase OS=bacterium HR21 OX=2035416; GN = tgt PE=3 SV=1
MEPLDPHGMTFQVVATAPDCSARAGLLWTAHGVVETPAFMPVGTQGSIKALDHRRAQELGAQILLCNAYHLYLRPGIAVIEHFGGLHRFLGWFKPILTDSGGYQIFSLQQLRRISTEGVEFRSHIDGSLHFFTPERVIELQRVLGSDIMMVLDECPPYPAEHSMLEEAVRRTLLWAQRSLAAFRATGSRYGYRQLLFGIAQGGTSTALRRQCLEELCQWDFDGFAIGGLSVGEPTEAMYEMVALSTELMPPERPRYLMGVGTPENILTAIEYGVDLFDCVLPTRNARNGQLFTTRGKINIRNARWRFSDEPIDPALDHPVSRTVTLGYLRHLFLAGEITALVLATEHNLAFYHWLLATARRKIQDGSFRHWKRSFLERIRQTAVESS

SEQ ID NO: 52284 - protein, 380 aa, unidentified
  source 1..380: note = Unknown
  REGION 1..380: note = tr|A0A2H5Y5K4|A0A2H5Y5K4_9BACT Queuine tRNA-ribosyltransferase OS=bacterium HR22 OX=2035417; GN = tgt PE=3 SV=1
MPPEGFRFVVLARDGRARAGFLDTPHGRIPTPCFAPVGTQGAVKTIPAWDLEDLGAHLILANTYHLYLRPGDERIARLGGLHRFMGWNGPILTDSGGFQIFSLQGLREVDEDGVTFRSHLDGSLHRFTPEKAIRIQENLGADLIMCLDECPPPMDYDYNVKALERTHRWAERCRAAHARTDQALFGIVQGGVFEDLRTRSARFLVSLDFPGYAIGGLSVGEPKPLTYRTLELMDALLPEEKPRYLMGVGTLVDFVEAVARGVDLFDCVMPTRVARHGTAITRDGRLNLRNAIYAEDPRPIDEACGCPTCRRFSRAYLRHLFNVGEPLAMYLTTLHNLYTMFRFMEEMRQAILEGRFADFRAAVLEAQATLPMDPEPGVEG

SEQ ID NO: 52285 - protein, 393 aa, unidentified
  source 1..393: note = Unknown
  REGION 1..393: note = tr|A0A2H5YDS5|A0A2H5YDS5_9BACT Queuine tRNA-ribosyltransferase OS=bacterium HR23 OX=2035418; GN = tgt PE=3 SV=1
MDTFSFRLEATCGTARAALLTTPHGTIPTPAFMPVATQASVKALTPAEARACGSHILLCNAYHLALRPGVEVVEAFGGLHAFMGWDGPLLTDSGGFQVYSLGDLRKVTEEGILFQSHLDGSTHWLTPETAIRNQEGLGADLITCLDECLPYGAPRDALEQAVARTQRWAERCLHARRRADQALFAIVQGGHDLALRRASAEGLVALNCEGYAVGGLSVGEAKDLFLSLAQFTALLLPTHKPRYLMGVGAPDDLVRCIGMGYDLFDCVLPTRAGRTGGIYTHRGRVDITSARWRVERGPLEEGCDCFTCAHFSAGYVHHLFRAQELLAYRLASLHNLRFYQRLVAQARQAILEGRFPAWQEAFLHTYRPTNEEARLAQHQKRLQSRSLREETWH

SEQ ID NO: 52286 - protein, 402 aa, unidentified
  source 1..402: note = Unknown
  REGION 1..402: note = tr|A0A2H5YPR9|A0A2H5YPR9_9BACT Queuine tRNA-ribosyltransferase OS=bacterium HR26 OX=2035421; GN = tgt PE=3 SV=1
MEHFTILARDAQTRARAGVLRTRRGDVHTPAFMPVGTQASVKSLTPDEIRATGSEIILANTYHLMLRPGLEIIQAAGGLHAFMGWPHPILTDSGGFQVYSLASLREVTERGVRFRSHIDGSLHELTPESVIALQLGFGSDIIMPLDDVVGYDSDLECQREAADRTHRWLLRALDYFRAVVDADDPARPWLFGIVQGGFDLDLRRRSCDFVAGLPLDGCAIGGLSVGEPKPVMLAFLEEVARLLPEDKPRYLMGVGSPEDLWVAVAAGIDLFDCVHPTRVARHGALYTPEGRVDITSSRYRAHFGPVDERCDCLACTQFTAAYLNHLFRARELLAYRLATIHNLRFIQREMERIRRAIKEGRFVIELEEFLARYRPADQEAAAVQRRRRAEAKRLEEVRDVDE

SEQ ID NO: 52287 - protein, 391 aa, unidentified
  source 1..391: note = Unknown
  REGION 1..391: note = tr|A0A2H5Z843|A0A2H5Z843_9BACT Queuine tRNA-ribosyltransferase OS=bacterium HR28 OX=2035423; GN = tgt PE=3 SV=1
MQSFMIVRRESTTYARLGLLRTRRGIVHTPAFMPVGTQATVKSLTPEEIRATGSEIILANTYHLFLRPGPQVLEAVGGLHIFMGWDGPILTDSGGFQVYSLAKLRQVTERGVIFRSHIDGSLCELTPESVIDLQFIFGSDIVMPLDDVVGYGEPEQRQRDAMERTHRWLRRSIERFQERTANMSAEERPLLFGIAQGGFDATRRQQSAATIAALPVDGFAIGGLSVGEPKPLLEAMLAASLQALPEDRPRYLMGVGAPEDLWRAVALGVDLFDCVLPTRLARHGALFTSSGRIDITSARFKFLTAPVDETCDCYTCRHFSAAYLHHLFRAKELLAYRLATIHNLRFIQNLMQKMRAAIAEGTFAAAWEQFLAAYQSTENAREEAVLLEGEE

SEQ ID NO: 52288 - protein, 390 aa, unidentified
  source 1..390: note = Unknown
  REGION 1..390: note = tr|A0A2H5ZDN7|A0A2H5ZDN7_9BACT Queuine tRNA-ribosyltransferase OS=bacterium HR29 OX=2035424; GN = tgt PE=3 SV=1
MIAFEVLAGPGEPVAPRRGRLLTPRGCVETPAFMPVGTLATVKALLPEEVEAAGAEMILVNAYHLYLRPGHRLIERFGGIHRFMGWSRPILSDSGGFQVFSLARLVRVDDAGVRFRSHIDGSEHFYTPELAVEVQQALGVDIAMPLDHVVPGGSPEPDARDAAERTLRWFERCRRAAGDLPLFAIVQGGVYPELRRWHARALAALDAPGYAIGGLSVGEPKTEMWRTLELTCAELPASKPRYLMGVGSPEDIVEAVARGVDMFDCVLPTRLGRNGGLFTDDGRVNIRSARFAEAEGPVDPDCDCLTCRRFPAAYLHHLFRNEELLGYRLATIHNLRYLARLIGRIRAAIEQGRFLAFAAEFLARYRPADEAVRLAQREKWLERKARASGP

SEQ ID NO: 52289 - protein, 384 aa, unidentified
  source 1..384: note = Unknown
  REGION 1..384: note = tr|A0A2H5ZLB8|A0A2H5ZLB8_9BACT Queuine tRNA-ribosyltransferase OS=bacterium HR30 OX=2035425; GN = tgt PE=3 SV=1
MMQVSPSKIGIPESTDHFQIRGEDGGARCGVMTTAHGQVVTPAFMPVATQGSVKGLTPRDLRGLGTQILLANTYHLTLRPGVDVIQDLGGLHRFMGWDGPILTDSGGYQVYSLAPLRKITDEGVLFRSHIDGQTVFFTPESVIQIQKALGVDIAMVLDECPPAGAPRNQVETATRRSLSWAVRSRALSDSSGTLVFGIVQGGTFTDLRRWHCRELVALDFPGYAVGGLSVGEERGVTLEVAAVTAEELPRDRPRYLMGVGYPEDLIRFVAMGYDLFDCVLPTRNARNGLLFTSNGRLNIRLARFQRDENPPDPLCSCYTCSNFSRAYLRHLSLAKEISAAILATTHNLYFYQRLMRDMQTAIIRHSFAPWAEATIARLEQECQP

SEQ ID NO: 52290 - protein, 374 aa, unidentified
  source 1..374: note = Unknown
  REGION 1..374: note = tr|A0A2H6A1B7|A0A2H6A1B7_9BACT Queuine tRNA-ribosyltransferase OS=bacterium HR33 OX=2035428; GN = tgt PE=3 SV=1
MFEFIVEGVNGEARAGRLKLPHGTVRTPCFMPVGTQGTVRALSPFDLKAAGAEMVLANTYHLHVRPGEETIAALGGLHRFMAWDRPLLTDSGGFQVFSLEVLRRVDEEGVEFRSPVDGQVRRLTPELAVEIQWTLGSDIAMVLDHVVPGTASRSEAEDAWERTRRWTERAVRRHLELAGRSPGRQTLWPIVQGATYPDLRRAAVAQILDVADWNGIAVGGLAVGEPKEAMYQVLEGMLPSLPAQLPRYLMGVGFPEDLLRSIALGMDLFDCVAPTRNGRNGSAFTPEGPLNIRNAAFRRDSRPLDETCDCETCRTYSRGYLRHLFMAEELLGLRLLSLHNVRFLIRLAETARDRILAGTFDTWHRDWLARYEGK

SEQ ID NO: 52291 - protein, 378 aa, unidentified
  source 1..378: note = Unknown
  REGION 1..378: note = tr|A0A2H6A954|A0A2H6A954_9BACT Queuine tRNA-ribosyltransferase OS=bacterium HR35 OX=2035430; GN = tgt PE=3 SV=1
MFEVIKFSKKSKARLGIIKTFHGEIKTPAFVPVATKGTIKALPQIFFKEIGIQLAFVNTYHLVNHPGAEIIDKAGGIHKYANLNLPLMSDSGGFQVFSLAQKKRVKLRNDEETILVKIEEDRVVFRSNFNNKELEFTPEKSIDYQIKIGADLVMAFDECITYPTTYDYAKKATQRTHSWLLRCLDYFSKNKKNYQYIYGIIQGSVFEDLRKESAKFVINQPVDGIAVGGVSVGESKEEMRLAVNWISDYLPKDKPVHLLGVGRIDDIIDLVVYGIDTFDCSEPTRIARTGWLYQINDENNLKDFLTIIDIEKNIYKENFEKVDQKCNCYVCQNFTKAYLHHLFKEKEILASVLATYHNLYLMERFFEKIREEIANDKL

SEQ ID NO: 52292 - protein, 370 aa, unidentified
  source 1..370: note = Unknown
  REGION 1..370: note = tr|A0A2H6ABS5|A0A2H6ABS5_9BACT Queuine tRNA-ribosyltransferase OS=bacterium HR36 OX=2035431; GN = tgt PE=3 SV=1
MDAVCFEVLATSGKARLGRMKTPHGIVDTPAFMPVGTQATVKGLLPEQLHQAGVQMLLANTYHLALRPGAELIALLGGLHQFMAWEGPILTDSGGYQVFSLAAIRRISDHGVEFRSHLDGSLLELTPERAVEIQELLGSDIAMCLDECPPYDASDSVLREAVRRTVHWAERCRKAQRRPDQALFGIVQGGLDLGLRRECVRALLALDFPGYALGGFSVGEPPELMYPIMTQTADWLPEHKPRYLMGVGRPQDILEAVAAGVDLFDCVLPTRNGRNAQAFARTGVLRLRNAVHRTDPRPLEDDCPCVACRQFSRAYLHHLFHADEMLGPILVSLHNITFYQRLMGEIRQAIAQGRFAEYRAARLAQCQAGN

SEQ ID NO: 52293 - protein, 367 aa, unidentified
  source 1..367: note = Unknown
  REGION 1..367: note = tr|A0A2H6AM25|A0A2H6AM25_9BACT Queuine tRNA-ribosyltransferase OS=bacterium HR37 OX=2035432; GN = tgt PE=3 SV=1
MFKFEVIKKDKDTGARIGKIYTDHGIITTPAFMPVATRASVKGMTPDEVRDLGFEIVVVNAYHMYLRPGHITVKELGGLHRFMAWDNPILTDSGGFQVLSLSKVRKVKEEGILFRSHIDGSEHFLTPAKSIEIQEALGADIMMCLDECPPHDAPYEYIKRSTDLTTKWARLSKEARSNPEKPLFGIVQGGVFPELREKSALELLEIGFDGYAIGGLGIGESKEETYEIAEFTASYLPYDKPRYLMGLGMPEDIVEAVSMGIDLFDCVLPTRNARNGSLFTNRGKVVIKNAKYEKDDTPVDENCGCYTCTRFSKAYLRHLYQASEILASRLLTLHNLYYYGWLMKKIREAIENGGFSSFRSRFYSKEG

SEQ ID NO: 52294 - protein, 345 aa, unidentified
  source 1..345: note = Unknown
  REGION 1..345: note = tr|A0A2H6AR18|A0A2H6AR18_9BACT Queuine tRNA-ribosyltransferase OS=bacterium HR38 OX=2035433; GN = tgt PE=3 SV=1
MKGLLPKDLKAIGSQVLLANTYHLLLRPGPERVQALGGLHRFAGWDGPWLTDSGGFQVMSLGHLRRIDEEGVVFQSHLDGSLIRLTPERSIAIQEALGADFIMAFDECPPYPSSPEYLKASLERTLRWLERSLKAKTRPDQALFGIAQGGTDAGLRALSTRETLRFDLPGYAIGGLAVGETKEEMFPMVALSTEILPEAKPRYLMGVGHPEDLVAAMGLGVDLFDSVYPTRTGRFGSALVPEGRINLKNAQYLEDKRPLEEGCDCYACQTFSRAYIAHLVRAEEMLGGILLSLHNLRFLHRLTERAREAIRQGSYGAFAREFAERRFGKEIPPWFREAMAAGGHW

SEQ ID NO: 52295 - protein, 376 aa, unidentified
  source 1..376: note = Unknown
  REGION 1..376: note = tr|A0A2H6B263|A0A2H6B263_9BACT Queuine tRNA-ribosyltransferase OS=bacterium HR40 OX=2035435; GN = tgt PE=3 SV=1
MTIGFEVLARDGAARRGRLTTAHGTVETPAFMPVGTAATVKALTVDMLHATGTEMVLANSYHLMLRPGAERVARLGGLHRFMRWEKPILTDSGGYQVMSLASLRSLDERGVRFRSHLDGSLHELTPERAIEIQQLLDADIAMQLDECLKLPAPPEEVRRAMELSLRWAERSRRSFTERPGYGLFGIVQGGTDEGLRRRSAEALVGIGFDGYAIGGLAVGEPQAEMFATLEATVPFLPEDRPRYLMGVGKPLDILGAVLRGVDMFDCVLPTRSGRTGQAFTRFGPVNLRNARHADDPRPLDGESLCPAARDYSRAYLHHLVRANEILASILLTWNNVWFYQELMRNIRRAIEEGRLGAFAAAFAADWQRGDIPPWRG

SEQ ID NO: 52296 - protein, 376 aa, unidentified
  source 1..376: note = Unknown
  REGION 1..376: note = tr|A0A3L7ZXV5|A0A3L7ZXV5_9BACT Queuine tRNA-ribosyltransferase OS=bacterium J10(2018) OX=2320122; GN = tgt PE=3 SV=1
MDFKLQATDKSSGARAGLITTDHGVIETPIFMPVGTAGTVKAVHQHELTDDINAQIILGNTYHLYLRPGTDILKAAGGLHKFNGWEKPILTDSGGFQVFSLSANRKLKEEGAYFRSHIDGSKHLFTPENVVDIQRVIGADIMMALDECPSGTADYDYAKKSLGLTLRWLQRGWDRYKSTEGLYGHSQAYFPIVQGCTYPDLRRESAKFVADLGADGNAIGGLAVGEPAEVMYDMIEVVNDILPVDKPRYLMGVGTPANILEAIERGVDMMDCVMPTRNGRNGMLFTAHGIMNMRNKKWADDFSPLQEDGPSYVDRFYSKAYVRHLFASQEILGMQIASIHNLAFYLWLVKEARRHILAGDFKPWKDEMVKRVTQRL

SEQ ID NO: 52297 - protein, 376 aa, unidentified
  source 1..376: note = Unknown
  REGION 1..376: note = tr|A0A4S1ID57|A0A4S1ID57_9BACT Queuine tRNA-ribosyltransferase OS=bacterium M00.F.Ca.ET.141.01.1.1 OX=2563898 GN=tgt PE=3 SV=1
MTETFTFKVLATDGKARRGLIDMPRGEIRTPAFMPVGTGGTVKAMYMDQVRGVGADIILGNTYHLMLRPGAERVARLGGLHEFARWPHPILTDSGGFQVMSLSKLRKLTEKGVTFRSHIDGAPYEMSPERSIEIQGLLDSDIQMQLDECTALPAELKEIERAMELSLRWAERCKTAFGDQPGKAMFGIVQGGDNAALRVRSAQALSAMDLKGYAVGGLAVGEPQAVMLDMLDITCPELPDNKPRYLMGVGTPDDILKSVARGIDMFDCVMPTRAGRHGLAYTRRGKVNLRNARHADDPRPLDEESDCPAARDYSRAYLHHLVRSQEALGAMLLTWNNLSYYQKLMQDIRAAIEIGAFELRSGEISEGWAKGDLPVL

SEQ ID NO: 52298 - protein, 376 aa, unidentified
  source 1..376: note = Unknown
  REGION 1..376: note = tr|A0A4S1HYC3|A0A4S1HYC3_9BACT Queuine tRNA-ribosyltransferase OS=bacterium M00.F.Ca.ET.141.01.1.1 OX=2563898 GN=tgt PE=3 SV=1
MSRLQFQLKTRDGRARRGRLTFPRGTVETPAFMPVGTYGSVKGILPDQVRALGAEIILGNTFHLYLRPGLDIIADHGGLHGFCRWDGPILTDSGGFQVFSLAHRRKITEQGVTFASPTDGARVFLGPEESMKIQKVLDSDIVMIFDECTPYPATEDVARRSMELSLRWAQRSRNAHDELGNDAALFGIVQGGVHTDLRSRSADALQAIGFDGYAIGGLAVGEPEHERNAMLDHLDPELPGDRPRYLMGVGRPEDLVEGVARGVDMFDCVMPTRNARNGHYFTSFGTVRIRNSQYARDMDPIEPGCGCVACTGGYTRSYLRHLDRCNEMLAPMLGTLHNLFYYEKLMADIRAAIEAGTFLAFRESFYAARGAVAPPL

SEQ ID NO: 52299 - protein, 376 aa, unidentified
  source 1..376: note = Unknown
  REGION 1..376: note = tr|A0A4V3NUS8|A0A4V3NUS8_9BACT Queuine tRNA-ribosyltransferase OS=bacterium M00.F.Ca.ET.146.01.1.1 OX=2563899 GN=tgt PE=3 SV=1
MAETFSFKVLASDGKARRGLVSMPRGEIRTPAFMPVGTGGTVKAMYMDQVRGVGADIILGNTYHLMLRPGAERVARLGGLHEFARWPHPILTDSGGFQVMSLSKLRKLTEQGVTFRSHIDGAPYEMSPERSIEIQGLLDSDIQMQLDECTALPAKPKEIERAMELSLRWAERCKTAFGDQPGKAMFGIVQGGDSAPMRVRSAQALKAMDLKGYAVGGLAVGEPQSVMLEMLDITCPELPANKPRYLMGVGTPDDILKSVARGIDMFDCVMPTRAGRHGLAYTRRGKVNLRNARHADDPRPLDEESDCPAARDYSRAYLHHLVRSQESLGAMLLTWNNLSYYQKLMQDIRAAIEAQAFEARAAEITEGWARGDIPAI

SEQ ID NO: 52300 - protein, 376 aa, unidentified
  source 1..376: note = Unknown
  REGION 1..376: note = tr|A0A4S1BJ98|A0A4S1BJ98_9BACT Queuine tRNA-ribosyltransferase OS=bacterium M00.F.Ca.ET.152.01.1.1 OX=2563900 GN=tgt PE=3 SV=1
MAETFTFKVLAADGKARRGLIDMPRGEIRTPAFMPVGTGGTVKAMYMDQVRGVGADIILGNTYHLMLRPGAERVARLGGLHEFARWPQPILTDSGGFQVMSLSKLRKLTEKGVTFRSHIDGAPYEMSPERSIEIQGLLDSDIQMQLDECTALPAPLKEIERAMELSLRWAERCRTAFGDQPGKAMFGIVQGGDNPALRVRSAQALSAMDLKGYAVGGLAVGEPQAVMLDMLDITCPELPADRPRYLMGVGTPDDILKSVARGIDMFDCVMPTRAGRHGLAYTKRGKVNLRNARHADDPRPLDEESDCPAARDYSRAYLHHLVRSQEALGAMLLTWNNLSYYQKLMQDIRAAIEAGSFEARGAEISEGWARGDIPAL

SEQ ID NO: 52301 - protein, 391 aa, unidentified
  source 1..391: note = Unknown
  REGION 1..391: note = tr|A0A4S0YBP0|A0A4S0YBP0_9BACT Queuine tRNA-ribosyltransferase OS=bacterium M00.F.Ca.ET.155.01.1.1 OX=2563901 GN=tgt PE=3 SV=1
MTTGHPSPQPADGLQFELLGTDGLARRGRVTLNHGVVETPIFMPVGTYGTVKAVQPRELEEMHAQIILGNTFHLWLRPGLETIAAHGGLHGFMGWKKPILTDSGGFQVFSLGELRKITEDGVTFASPINGDKLFLSPEVSMQIQKVLNSDIVMQFDECTPYATNNVPTSRQEAADSMRMSMRWAQRSIDEFRRLGNPNALFGIVQGGMFEDLRDESLAGLAEKDFHGLAIGGLSVGEPKEDMMRVLNHIGPKLPANKPHYLMGVGTPEDLVAGVAAGVDMFDCVMPTRNARNGWLFTRFGDIKIRNATHKNSRRPLDEQCGCYTCRNFTRGYLHHLHRVGEILGAQLNTIHNLHYYLELMQEMRDAIDAKMFEAFRKRFHENRARGIDEAP

SEQ ID NO: 52302 - protein, 376 aa, unidentified; identical to SEQ ID NO: 52299
  source 1..376: note = Unknown
  REGION 1..376: note = tr|A0A4S0ZLH9|A0A4S0ZLH9_9BACT Queuine tRNA-ribosyltransferase OS=bacterium M00.F.Ca.ET.156.01.1.1 OX=2563902 GN=tgt PE=3 SV=1

SEQ ID NO: 52303 - protein, 376 aa, unidentified
  source 1..376: note = Unknown
  REGION 1..376: note = tr|A0A4S0ZSG6|A0A4S0ZSG6_9BACT Queuine tRNA-ribosyltransferase OS=bacterium M00.F.Ca.ET.156.01.1.1 OX=2563902 GN=tgt PE=3 SV=1
MAETFTFKVLATDGKARRGLIDMPRGEIRTPAFMPVGTGGTVKAMYMDQVRGVGADIILGNTYHLMLRPGAERVARLGGLHEFARWPHPILTDSGGFQVMSLSKLRKLTEKGVTFRSHIDGAAYEMSPERSIEIQGLLDSDIQMQLDECTALPAELKEIERAMDLSLRWAERCKTAFGDQPGKAMFGIVQGGDNAALRVRSAQALSAMNLKGYAVGGLAVGEPQAVMLDMLDITCPELPDKKPRYLMGVGTPDDILKSVARGIDMFDCVMPTRAGRHGLAYTRRGKVNLRNARHADDPRPLDEESDCPAARDYSRAYLHHLVRSQEALGAMLLTWNNLSYYQKLMQDIRAAIESGTFELRSGEISEGWAKGDLPVL

SEQ ID NO: 52304 - protein, 376 aa, unidentified
  source 1..376: note = Unknown
  REGION 1..376: note = tr|A0A4S0WY91|A0A4S0WY91_9BACT Queuine tRNA-ribosyltransferase OS=bacterium M00.F.Ca.ET.157.01.1.1 OX=2563903 GN=tgt PE=3 SV=1
MAETFSFKVLASDGKARRGLVSMPRGEIRTPAFMPVGTGGTVKAMYMDQVRGVGADIILGNTYHLMLRPGAERVARLGGLHEFARWPHPILTDSGGFQVMSLSKLRKLTEQGVTFRSHIDGAPYEMSPERSIEIQGLLDSDIQMQLDECTALPAKPKEIERAMELSLRWAERCKTAFGDQPGKAMFGIVQGGDSAPMRVRSAQALKAMDLKGYAVGGLAVGEPQSVMLEMLDITCPELPADKPRYLMGVGTPDDILKSVARGIDMFDCVMPTRAGRHGLAYTRRGKVNLRNARHADDPRPLDEESDCPAARDYSRAYLHHLVRSQESLGAMLLTWNNLSYYQKLMQDIRAAIEAQAFEASAAEITEGWARGDIPAI

SEQ ID NO: 52305 - protein, 376 aa, unidentified; identical to SEQ ID NO: 52304
  source 1..376: note = Unknown
  REGION 1..376: note = tr|A0A4S0WCC7|A0A4S0WCC7_9BACT Queuine tRNA-ribosyltransferase OS=bacterium M00.F.Ca.ET.159.01.1.1 OX=2563904 GN=tgt PE=3 SV=1

SEQ ID NO: 52306 - protein, 376 aa, unidentified; identical to SEQ ID NO: 52300
  source 1..376: note = Unknown
  REGION 1..376: note = tr|A0A4S2K0C0|A0A4S2K0C0_9BACT Queuine tRNA-ribosyltransferase OS=bacterium M00.F.Ca.ET.162.01.1.1 OX=2563905 GN=tgt PE=3 SV=1

SEQ ID NO: 52307 - protein, 376 aa, unidentified; identical to SEQ ID NO: 52298
  source 1..376: note = Unknown
  REGION 1..376: note = tr|A0A4S0ZC26|A0A4S0ZC26_9BACT Queuine tRNA-ribosyltransferase OS=bacterium M00.F.Ca.ET.163.01.1.1 OX=2563906 GN=tgt PE=3 SV=1

SEQ ID NO: 52308 - protein, 376 aa, unidentified; identical to SEQ ID NO: 52299
  source 1..376: note = Unknown
  REGION 1..376: note = tr|A0A4S0YQH2|A0A4S0YQH2_9BACT Queuine tRNA-ribosyltransferase OS=bacterium M00.F.Ca.ET.163.01.1.1 OX=2563906 GN=tgt PE=3 SV=1

SEQ ID NO: 52309 - protein, 376 aa, unidentified
  source 1..376: note = Unknown
  REGION 1..376: note = tr|A0A4S1HA55|A0A4S1HA55_9BACT Queuine tRNA-ribosyltransferase OS=bacterium M00.F.Ca.ET.168.01.1.1 OX=2563907 GN=tgt PE=3 SV=1
MHDKFTFTLKATSDGARLGEVAMPRGVIRTPAFMPVGTVGTVKAMYLDQVRELGADIILGNTYHLMLRPGPERVARLGGLHELIRWPHPILTDSGGFQVMSLSGLRKLDEKGVTFKSHVDGSLHHMSPERSIEIQGLLDSDIQMQLDECIALPAERKEIERAMEMSLRWAERCRVAFGDQPGKAMFGIVQGGDQPDLRIRSAEGLKQLDLKGYAVGGLAVGEPQNVMLGMLDITLPVLPTEKPRYLMGVGTPDDILKSVARGIDMFDCVMPTRSGRHGLAFTRRGKVNIRNARHAEDMRPLDEQSNCPASRDYSRAYLHHLVRANEALGGMLLSWHNLAYYQELMQGIRKSIEEGCFADFYAETIEMWARGDIDPV

SEQ ID NO: 52310 - protein, 376 aa, unidentified; identical to SEQ ID NO: 52298
  source 1..376: note = Unknown
  REGION 1..376: note = tr|A0A4S0R2L1|A0A4S0R2L1_9BACT Queuine tRNA-ribosyltransferase OS=bacterium M00.F.Ca.ET.177.01.1.1 OX=2563908 GN=tgt PE=3 SV=1

SEQ ID NO: 52311 - protein, 376 aa, unidentified
  source 1..376: note = Unknown
  REGION 1..376: note = tr|A0A4S0R239|A0A4S0R239_9BACT Queuine tRNA-ribosyltransferase OS=bacterium M00.F.Ca.ET.177.01.1.1 OX=2563908 GN=tgt PE=3 SV=1
MAETFSFKLTATDGRARRGLISMPRGEIRTPAFMPVGTGGTVKAMYMDQVRGVGADIILGNTYHLMLRPGAERIAKLGGLHEFARWPHPILTDSGGFQVMSLSKLRKLTEKGVTFRSHIDGAPYEMSPERSIEIQGLLDSDIQMQLDECTALPAKPTEIERAMELSLRWAERCKTAFGDQPGKAMFGIVQGGDSAVMRVRSAQALKAMDLKGYAVGGLAVGEPQAVMLEMLEITCPELPADRPRYLMGVGTPDDILKSVARGIDMFDCVMPTRAGRHGLAYTRRGKINLRNARHADDPRPLDEESDCPAARDYSRAYLHHLVRSQESLGAMLLTWNNLSYYQRLMQDIRAAIEAQAFEARAAEISEGWARGDIAAI

SEQ ID NO: 52312 - protein, 376 aa, unidentified; identical to SEQ ID NO: 52309
  source 1..376: note = Unknown
  REGION 1..376: note = tr|A0A4S0N219|A0A4S0N219_9BACT Queuine tRNA-ribosyltransferase OS=bacterium M00.F.Ca.ET.179.01.1.1 OX=2563909 GN=tgt PE=3 SV=1

SEQ ID NO: 52313 - protein, 379 aa, unidentified
  source 1..379: note = Unknown
  REGION 1..379: note = tr|A0A4V3MFI6|A0A4V3MFI6_9BACT Queuine tRNA-ribosyltransferase OS=bacterium M00.F.Ca.ET.180.01.1.1 OX=2563910 GN=tgt PE=3 SV=1
MPAVTYEHIKTCKQSGARLGIVHTPHGSFETPMFMPVGTKATVKTMSPEELHQMEAKIILGNTYHLWLQPGNDIIKKSGGLHQFMNWNGPILTDSGGFQVFSLSNLRKITEEGVEFRHHTNGSKLFLSPEKSMQIQNDLGSDIMMAFDECPPMPAEYKYVKDSIERTSRWAARCLQAHQRPEDQALFGIIQGGEYKDLRQQSAEELVALDFPGYAIGGLSVGEPKPVMYDMVSHTQQFMPKDKPRYLMGVGSPDALIECSIRGMDMFDCVLPTRIARNGTCMTSHGRVTIKNAKYAEDLGPLDDNCDCYTCKNYSRAYIRHLIKAEETFGIRLTTYHNLHFLLKLMENIRQAIRDDRLLDFKEEFFEQYGLNVENPKNF

SEQ ID NO: 52314 - protein, 391 aa, unidentified; identical to SEQ ID NO: 52301
  source 1..391: note = Unknown
  REGION 1..391: note = tr|A0A4S0ISX3|A0A4S0ISX3_9BACT Queuine tRNA-ribosyltransferase OS=bacterium M00.F.Ca.ET.191.01.1.1 OX=2563911 GN=tgt PE=3 SV=1

SEQ ID NO: 52315 - protein, 376 aa, unidentified; identical to SEQ ID NO: 52309
  source 1..376: note = Unknown
  REGION 1..376: note = tr|A0A4S0GRP5|A0A4S0GRP5_9BACT Queuine tRNA-ribosyltransferase OS=bacterium M00.F.Ca.ET.194.01.1.1 OX=2563912 GN=tgt PE=3 SV=1

SEQ ID NO: 52316 - protein, 376 aa, unidentified; identical to SEQ ID NO: 52303
  source 1..376: note = Unknown
  REGION 1..376: note = tr|A0A4V3LP40|A0A4V3LP40_9BACT Queuine tRNA-ribosyltransferase OS=bacterium M00.F.Ca.ET.199.01.1.1 OX=2563913 GN=tgt PE=3 SV=1

SEQ ID NO: 52317 - protein, 376 aa, unidentified; identical to SEQ ID NO: 52298
  source 1..376: note = Unknown
  REGION 1..376: note = tr|A0A4S0FBP3|A0A4S0FBP3_9BACT Queuine tRNA-ribosyltransferase OS=bacterium M00.F.Ca.ET.199.01.1.1 OX=2563913 GN=tgt PE=3 SV=1

SEQ ID NO: 52318 - protein, 376 aa, unidentified; identical to SEQ ID NO: 52300
  source 1..376: note = Unknown
  REGION 1..376: note = tr|A0A4R9ZKZ2|A0A4R9ZKZ2_9BACT Queuine tRNA-ribosyltransferase OS=bacterium M00.F.Ca.ET.205.01.1.1 OX=2563914 GN=tgt PE=3 SV=1

SEQ ID NO: 52319 - protein, 376 aa, unidentified; identical to SEQ ID NO: 52299
  source 1..376: note = Unknown
  REGION 1..376: note = tr|A0A4R9UGA3|A0A4R9UGA3_9BACT Queuine tRNA-ribosyltransferase OS=bacterium M00.F.Ca.ET.221.01.1.1 OX=2563915 GN=tgt PE=3 SV=1

SEQ ID NO: 52320 - protein, 376 aa, unidentified; identical to SEQ ID NO: 52299
  source 1..376: note = Unknown
  REGION 1..376: note = tr|A0A4R9UWR4|A0A4R9UWR4_9BACT Queuine tRNA-ribosyltransferase OS=bacterium M00.F.Ca.ET.222.01.1.1 OX=2563916 GN=tgt PE=3 SV=1

SEQ ID NO: 52321 - protein, 376 aa, unidentified; identical to SEQ ID NO: 52299
  source 1..376: note = Unknown
  REGION 1..376: note = tr|A0A4R9TVX4|A0A4R9TVX4_9BACT Queuine tRNA-ribosyltransferase OS=bacterium M00.F.Ca.ET.227.01.1.1 OX=2563917 GN=tgt PE=3 SV=1

SEQ ID NO: 52322 - protein, 391 aa, unidentified; identical to SEQ ID NO: 52301
  source 1..391: note = Unknown
  REGION 1..391: note = tr|A0A4R9RD40|A0A4R9RD40_9BACT Queuine tRNA-ribosyltransferase OS=bacterium M00.F.Ca.ET.228.01.1.1 OX=2563918 GN=tgt PE=3 SV=1

SEQ ID NO: 52323 - protein, 379 aa, unidentified; identical to SEQ ID NO: 52313
  source 1..379: note = Unknown
  REGION 1..379: note = tr|A0A4R9ST31|A0A4R9ST31_9BACT Queuine tRNA-ribosyltransferase OS=bacterium M00.F.Ca.ET.229.01.1.1 OX=2563919 GN=tgt PE=3 SV=1

SEQ ID NO: 52324 - protein, 376 aa, unidentified
  source 1..376: note = Unknown
  REGION 1..376: note = tr|A0A4R9S1U0|A0A4R9S1U0_9BACT Queuine tRNA-ribosyltransferase OS=bacterium M00.F.Ca.ET.230.01.1.1 OX=2563920 GN=tgt PE=3 SV=1
MAETFSFKVLASDGKARRGLVSMPRGEIRTPAFMPVGTGGTVKAMYMDQVRGVGADIILGNTYHLMLRPGAERVARLGGLHEFARWPHPILTDSGGFQVMSLSKLRKLTEQGVTFRSHIDGAPYEMSPERSIEIQGLLDSDIQMQLDECTALPAKPKEIERAMELSLRWAERCKTAFGDQPGKAMFGIVQGGDSAPMRVRSAQALKAMDLKGYAVGGLAVGEPQSVMLEMLDITCPELPADKPRYLMGVGTPDDILKSVARGIDMFDCVMPTRAGRHGLAYTRRGKVNLRNARHADDPRPLDEESDCPAARDYSRAYLHHLVRSQESLGAMLLTWNNLSYYQKLMQDIRAAIEAQAFEARAAEITEGWARGDIPAI

SEQ ID NO: 52325 - protein, 378 aa, unidentified
  source 1..378: note = Unknown
  REGION 1..378: note = tr|A0A4R9RZ72|A0A4R9RZ72_9BACT Queuine tRNA-ribosyltransferase OS=bacterium M00.F.Ca.ET.230.01.1.1 OX=2563920 GN=tgt PE=3 SV=1
MQFTLHKTATGESRARRGTVHLAHGDVQTPAFMPVGTYGTVKGMLPRDIHEIGAEIILGNTFHLWLRPTTDVIDKFGGLHDFIGWNKPILTDSGGFQVFSLGAMRKIVEEGVHFRSPIDGAKVFLSPEISMQIQYSLNSDIVMQFDECTPYPATPSEADTSLELSLRWGERCKNAHEKLGNQNALFGIIQGSMYRNLREKSLEGLLAIGFDSYAIGGLSVGEPKEEMMAVLDYLPDDMPADKPRYLMGVGKPEDIVEAVRRGVDMFDCVMPTRNARNGHYFTTFGAVKIKNAVHRFDQSPLDSECDCYTCQNFSRAYLHHLFKCNEMLSAQLGTIHNLRYYQRLMTDIRQSIEDDKFDAFVDTFYQQQNLPKPDLHLT

SEQ ID NO: 52326 - protein, 391 aa, unidentified
  source 1..391: note = Unknown
  REGION 1..391: note = tr|A0A5J4E255|A0A5J4E255_9BACT Queuine tRNA-ribosyltransferase OS=bacterium MnTg02 OX=2080452; GN = tgt PE=4 SV=1
MSAEPESRNAVSKPIHFHLEATDQAARLGAISTSHGVIRTPAFMPVGTAATVKAMFPECVKATGTDVLLGNTYHLMLRPGAERVARLGGLHQFMNWNGPILTDSGGFQVMSLAKLRKISEQGVIFQSHIDGATHELTPERSIEIQVLLGADIVMAFDECTPFPCKREEAQESMELSMRWAERSKTAFGSQTHHALYGIVQGGIHPDLRERSAKALLDIGFDGYAVGGLAVGEGQEMMLKTLEQTVPCLPADKPRYLMGVGTPDDILSAVERGIDMFDCVMPTRSGRHGQAFTWEGRVNLRNAVHADDPRPLDAASACPAANSYSRAYLHHLVKSGEYLAAMLLTWANVHFYQDFMQAIRTAIAENRFQDFARETRARLGSQDEDRGGAPVI

SEQ ID NO: 52327 - protein, 371 aa, unidentified
  source 1..371: note = Unknown
  REGION 1..371: note = tr|A0A5J4EBG2|A0A5J4EBG2_9BACT Queuine tRNA-ribosyltransferase OS=bacterium MnTg04 OX=2080454; GN = tgt PE=4 SV=1
MKFELLAADGDARLGRMSFARGIVDTPAFMPVGTYGAVKTMTAEELTDLGTQIILGNTFHLMLRPGAAVIEKHGGLHRFMHWDGPILTDSGGFQVWSLAPLRKITPQGVRFRSPVDGGEIFLSPEKSMEVQHALAADIVMVFDECTPHPASFGQAQASMELSLGWAEKCRRRFDELKKSSADEALFGIVQGGMYPDLRQVSLAGLTRLDFDGYALGGLSVGESEEQRSMVLETTVPLMPADKPRYLMGVGTPADIVRAVARGIDMFDCVMPTRHARNGYLFSSEGVLKIRNARFREDDAPIDPACDCYTCKHYSRGYLRHLDACGEMLGARLNTIHNLHFYQQLMTRIRTLIGEGRFADFARKFPAGVQAV

SEQ ID NO: 52328 - protein, 384 aa, unidentified
  source 1..384: note = Unknown
  REGION 1..384: note = tr|A0A4S1M983|A0A4S1M983_9BACT Queuine tRNA-ribosyltransferase OS=bacterium NHP-B OX=2491344; GN = tgt PE=3 SV=1
MDLYPHFRFDITHQSTKSGARVGTLTTPHGTLSTPAFIFCATKASLKGVSTAALREAGVPIILSNTYHLMLQPGAELIQRLGGLHKFMNWSGPLLTDSGGFQIFSLGHGHVTDEIKGRARAPKKNCLRICEDGVTFTSYRDGQKHHLTPEKSIDIQQKLGADLIVSFDECTPYHVSEAYTEKSMRLSTRWGKRCLDFFTQHNHHTQALYSVIQGGIYPHLRQESADFANQHAFFGHAIGGSLGASTAQMNEVVDMTTSYLDKKRPIHLLGIGKLHDIETHIQRGIDTFDCVHPTRLARHGGALMCPHTHGKDHLNIKNAQYRTDDTPLDKQCPCPTCKHYSRAYLHHLFKAGEILGPIALTQHNVAFMVSWMERLKGEILANRI

SEQ ID NO: 52329 - protein, 358 aa, unidentified
  source 1..358: note = Unknown
  REGION 1..358: note = tr|A0A132H4M3|A0A132H4M3_9BACT Queuine tRNA-ribosyltransferase OS=bacterium P201 OX=1768112; GN = tgt PE=3 SV=1
MSTDHGPIETPIFMPVGTAGTVKACHLRDVRDEVKAQIILGNTYHLYLRPGLDVLEAAGGLHKFNGWDRPILTDSGGFQVFSLTGIRKMKEEGVTFQSHIDGSRHLFTPENVMDIQRSIGADIMMAFDECTPGTADYHYAKPSMERTHRWLDRCIDRFNATQPKYGFEQALFPIVQGCVYRDLREQSAEYIASKNAAGNAIGGLAVGEPTEVMYEMIELVNAILPKDRPRYLMGVGTPANILESISRGVDMFDCVMPTRNGRNGMIFTSEGIINLKNEKWKYDFSPVDPNGETFVDAQYTRAYLRHLFVAGEILGPMIASLHNIGFYLWLVRESRKHIIAGDFAEWRDVMLKKVTTRL

SEQ ID NO: 52330 - protein, 374 aa, unidentified
  source 1..374: note = Unknown
  REGION 1..374: note = tr|A0A4Q2RDS0|A0A4Q2RDS0_9BACT Queuine tRNA-ribosyltransferase OS=bacterium RmlP001 OX=2316527; GN = tgt PE=3 SV=1
MTADFRYELLGQDGAARTGLIHTGRGPIRTPAFMPVGTAGTVKAMYMDQVRDLGADIVLGNTYHLMVRPGAERVAELGGLHGFSTWAGPILTDSGGFQVMSLAKLRKLDETGVTFQSHIDGSKHRLTPERSMEIQALLGSDIQMQLDECVRLPAPDAEVERAMLLSLRWAERSLQAFDARPGRACFGIVQGGTVPALRVESAKRLAAMPFGGLAIGGLAVGEPQADMLATIEAVEPHLPAGKPRYLMGVGTPDDLVEAVRRGVDMFDCVMPTRAGRHGLAYTRFGKVNLRNARHAADPRPLDAASDCPAARDYSRAYLHHLVKSDEILGMMLLTWVNLSYYQALMAGLRAAIAARSLDGFVAETKAGWAAGLGD

SEQ ID NO: 52331 - protein, 380 aa, unidentified
  source 1..380: note = Unknown
  REGION 1..380: note = tr|A0A4Q2U9N4|A0A4Q2U9N4_9BACT Queuine tRNA-ribosyltransferase OS=bacterium RmlP026 OX=2316528; GN = tgt PE=3 SV=1
MTADTRQDLPFRYEHLGQDGAARTGLIHTGRGTIRTPAFMPVGTAGTVKAMYMGQVRELGADIVLGNTYHLMVRPGAERVAELGGLHRFSTWSGPMLTDSGGFQVMSLAKLRKLDETGVTFQSHIDGSKHALTPERSMEIQALLGSDIQMQLDECVRLPAPDAEVERAMLLSLRWAERSLKAFEAKPGRACFGIVQGGTVAALRVESAKQLAAMPFGGIAIGGLAVGEPQADMLAAIETVEPHLPADKPRYLMGVGTPDDLVEAVRRGVDMFDCVMPTRAGRHGLAYTRFGKVNLRNARHAADPRPLDEASDCPAARDYSRAYLHHLVKSDEILGMMLLTWVNLSYYQSLMAGLRAAIAARRLDDVVAETKAGWDRGLGD

SEQ ID NO: 52332 - protein, 394 aa, unidentified
  source 1..394: note = Unknown
  REGION 1..394: note = tr|A0A177PX31|A0A177PX31_9BACT Queuine tRNA-ribosyltransferase OS=bacterium SCGC AG-212-C10; OX = 1799370 GN=tgt PE=3 SV=1
MPGVTFSFRLTSTPSGPVAPRTGVITTARGEIQTPVIMPVGTLATVKSLSPQDVAATNAEILLVNAYHLYLRPGHDLVARLGGVHRFMDWPGPILSDSGGFQVFSLARLGKVSEEGVRFRSHIDGSEHFYTPELAMAVQRSLGVDIAMPLDHVLPGTAELGPAEEAAQRTLRWYERCRQSAGGTATFAIIQGGTHTALRRWHARELRALDPPGFSIGGLSVGESKQDMWAMTEAVTSELPVDKPRYLMGVGSPEDLVNGVMRGVDMFDCVLATRLGRNGSLFTDDGRLNLRNARYREDPGAADPGCDCVACRRFTLAYLHHLFRNEELLGYRLASIHNIRYLVRLMERMRGAIRERTAEAFARTFLERYRVVDHTVRGEQKDKWLQQSAFEPGS

SEQ ID NO: 52333 - protein, 371 aa, unidentified
  source 1..371: note = Unknown
  REGION 1..371: note = tr|A0A0S8JGH8|A0A0S8JGH8_9BACT Queuine tRNA-ribosyltransferase OS=bacterium SM23_57 OX=1703763; GN = tgt PE=3 SV=1
MKQVFSFERQATQDRARACTFRTPHGDFQTPVFAPVGTQASVKSLTPRHLHEIQSSLILANTYHLYLRPGVDVVAEMGGLHDFMGWQKPILTDSGGFQVFSLAGINHIDDDGVTFKSHIDGSIHRLTPEKAITIQEKLGADIIMAFDECAEPYDRSYNLLAMERTHTWAQRCLEAKSRSDQALFGIVQGGIFPDLREESATYIGNQYFDGIAIGGLSVGETKDEMHAVLEVVDSILPEDKPRYLMGVGTPEDIVNSVMRGIDIFDCVLPTRLARHKAAFTTGGRINLSKAEHIKSTLPIDKSCTCYTCQNFTRAYLRHLILAKEMLASTLLSIHNLHTLINLTKEIRKSIIEGRFDKFVQEFFQKPKSDQV

SEQ ID NO: 52334 - protein, 377 aa, unidentified
  source 1..377: note = Unknown
  REGION 1..377: note = tr|A0A3R7VES2|A0A3R7VES2_9BACT Queuine tRNA-ribosyltransferase OS=bacterium TMED144 OX=1986778; GN = tgt PE=3 SV=1
  VARIANT 103: note = Xaa can be any naturally occurring amino acid
  VARIANT 238: note = Xaa can be any naturally occurring amino acid
MQFNLLNQDPKSSARLGSVSTHHSTFETPIFMPVGTQASVKTIDPEYLHKSGTEIILSNTYHLYLRPGQELINQAGGLHNFMGWNKSILTDSGGFQVFSLAKXNKITDEGVEFQSHLDGSKHFLTPELSMRIQRNLGSDILMSFDHCPPSSHDKKNIELSVSRTTKWTKNCIDYLSENDPLYDWDQSFFPIVQGGIFPDLRKRSALELIPMAKCGIAIGGLAVGEEKSAMFEMISLLXEILPIDQPRYLMGVGRPTDLIKAISLGVDMFDCVMPTRNARNGQLFTSDGIINIENAKYKNSMIEVDKNCDCYTCKNFSRAYLRHLFNVKEMLGLRLATIHNLSYYANLMKKTKEEIKNNNFSNWSNDYISKMVYHNGM

SEQ ID NO: 52335 - protein, 377 aa, unidentified
  source 1..377: note = Unknown
  REGION 1..377: note = tr|A0A1Z9KN29|A0A1Z9KN29_9BACT Queuine tRNA-ribosyltransferase OS=bacterium TMED181 OX=1986654; GN = tgt PE=3 SV=1
MTAGFDFQVEARCESARAGVLTTPRGQVQTPVFMPVGTQGTVKGVTPDQLTDCGTQIVLSNTYHLAVRPGVDTVRTLGGLHQVMGWDRPILTDSGGFQVFSLGHRNRISEQGVEFRNHIDGSPLLLTPESVLDIQAGLGSTIAMILDECPAGGVSRDEVARAVVRTHRWALRAHEHRQRLDLREPMAVFGIMQGGTHEDLRRESAEQLLEIPFDAYAVGGVSVGEGREALLSTIGLSAPLLPFDRPRYLMGVGGLEEFIVAVDRGIDMFDCVIPTRNARNASLFLSDGTHLNMKNARHRQDPGPIEEGCDCLACRRFSRGTLHHLYQRKEILAYTLGSLHNIRVFHRFLENAREAILSGHWLSFRDEFLGALSSRSG

SEQ ID NO: 52336 - protein, 377 aa, unidentified
  source 1..377: note = Unknown
  REGION 1..377: note = tr|A0A1Z9LZ06|A0A1Z9LZ06_9BACT Queuine tRNA-ribosyltransferase OS=bacterium TMED198 OX=1986779; GN = tgt PE=3 SV=1
MKQSIFTILSKCSNTSAREGVVKTDNGDIHTPVFMPVGTYGAVKTLSYKNLEQISSSIILGNTYHLYIRPGNEIIAKHGGLHKFINWKKPILTDSGGFQVFSLRGKRKISEEGVTFQSHLDGSSHLFTPESVVETQRILGSDFMMMLDVCPPGDADFKTWEKALNITTRWAKRGMDHFNKTKDLYGHSQVLVPIIQGGTNKDLRIKSANELLALDSPLYAIGGLAVGEPKEEMLNSIEVVNDIIPKEKPRYLMGVGTPTDLVQAVARGVDMFDCVMPSRNARNGQLFTRNGKVNIRNSKYKNDTNPIDIESKSDLSLNYSKGYLHHLFKIEEMLGYTIATLHNLSFYLDLMSKIRSQINNGTFSYWSKEFISNYEGK

SEQ ID NO: 52337 - protein, 360 aa, unidentified
  source 1..360: note = Unknown
  REGION 1..360: note = tr|A0A424SBI7|A0A424SBI7_9BACT Queuine tRNA-ribosyltransferase OS=bacterium TMED221 OX=1986656; GN = tgt PE=3 SV=1
MSNLNFKIINTDGNARAGILNVNNKNVLTPTFMPVATKGALKSTPHEMLDKTTVLLANTYHLYLRPGAEIINDLGGLHRFMNWDNLILTDSGGFQGWSLPTKKVESGIQFKNVYDGSSFLMTPELSIKTQNLLGSDIAMIFDYVVDIDANNYLQNEAIQTTEHWAKIAKQVHNNNNQALFGIVQGGLVEEYREKSALSMVNLDFDGYAIGGLALGESREDRKSIVNFTTDFLPLEKPRYVMGLGDTLGLIDLISEGIDMFDCVWPARLARHGKLITGNTYINIKNQKFASDPRPIDDYCPCFTCKNYSRAFLKHLLKNEQTTAWLYLTIHNLIQTEIMLDEARKSILESDFENFKKRYIK

SEQ ID NO: 52338 - protein, 377 aa, unidentified
  source 1..377: note = Unknown
  REGION 1..377: note = tr|A0A1Z9RWB4|A0A1Z9RWB4_9BACT Queuine tRNA-ribosyltransferase OS=bacterium TMED250 OX=1986657; GN = tgt PE=3 SV=1
  VARIANT 59: note = Xaa can be any naturally occurring amino acid
MKFSILAKDSNSSGRYGEISTDHSTFKTPVFMPVGTSAAVKTIDPKLLKNQDIGIILSXTYHLYIRPGHEIIRSAGGLHKFMNWDNSILTDSGGFQVFSLAKLNKISDDGVKFQSHIDGSTHFFSPELSMDIQRFLGTDIIMAFDECPPANVEKSVVSSAVDRTHDWIKKCKAHLKKSKPLYSWSQTLFPIVQGGIYPDLRKKSLEQLTSYADCGIAIGGLAVGEDKTAMLDVIEFMDDYLPKDQPRYLMGVGRPTDLIKAIQRGIDMFDCVIPTRNARNGQLFTSDGIVNIGNGEYKKSFEQIDKKCNCYTCTNFSKAYLRHLFNIGEVLGLRLATIHNLHYYNNLMLTVRDKIQSNIFHDWSKSYLKEMEYHDGM

SEQ ID NO: 52339 - protein, 378 aa, unidentified
  source 1..378: note = Unknown
  REGION 1..378: note = tr|A0A1Z9SN09|A0A1Z9SN09_9BACT Queuine tRNA-ribosyltransferase OS=bacterium TMED264 OX=1986658; GN = tgt PE=3 SV=1
MLKFSIHKIDSQCRARTGSINNDHGKIETPVFMPVGTVGAVKTFSPEELECFNSEIILGNTYHLFLRPGIEVIHKAGGLHAFTSWQRPILTDSGGFQVFSLAKLNKISDDGVEFQSHIDGSRHFLSPEISMKIQRNLGADIIMAFDECPPGNSNLNILKNAVNRTSSWMKRCSKWLQDNPPFYKYGQTIFPILQGGIDKELRKQSIDELLPYAKCGIAIGGLAVGEEKQAMMDTIEHCTEFLPTFQPRYLMGVGKPTDIIKAVKRGVDMFDCVMPTRNGRNGHIFTSNGVINIRNQKYKEDLSPLDSNSSHKWGKQFSKAYVRHLFNINEVLGIRIASTLNLAYYQNLMLIIRKEINNSTFNDWSQIILREMRNMKGM

SEQ ID NO: 52340 - protein, 377 aa, unidentified
  source 1..377: note = Unknown
  REGION 1..377: note = tr|A0A424SIK0|A0A424SIK0_9BACT Queuine tRNA-ribosyltransferase OS=bacterium TMED46 OX=1986782; GN = tgt PE=3 SV=1
  VARIANT 54: note = Xaa can be any naturally occurring amino acid
  VARIANT 103: note = Xaa can be any naturally occurring amino acid
  VARIANT 108: note = Xaa can be any naturally occurring amino acid
  VARIANT 122: note = Xaa can be any naturally occurring amino acid
MKFSLKKTDPNSNARTGILYTGHGEIETPVFMPVGTVGAVKTFTPEELKDINSXIILGNTYHLYLRPGTPIIERAGGLHSFISWDRPILTDSGGFQVFSLARXNKISXEGVAFQSHLDGSKXLFTPEISMKIQRDLGSDIIMAFDECPPGKSSLETVKNAVRRTTDWMSRCHKWLSKNPERYSHEQAIFPIIQGGTHHSLRLQSAEQLISYSTIGMAIGGLAVGEEKDAMLDTVEYCDSILPKDQARYLMGVGKPSDILAAVNRGVDMFDCVMPTRNGRNGHIFTSKGVINIRNEKFKEDLGPVDNESSHPWGQKFSRSYVRHLFNINEVLGLRIASTLNLVYYHDLMKRIKNEIVKGNFNNWSKETLNKMKDMKGM

SEQ ID NO: 52341 - protein, 375 aa, unidentified
  source 1..375: note = Unknown
  REGION 1..375: note = tr|A0A1Z8L1H5|A0A1Z8L1H5_9BACT Queuine tRNA-ribosyltransferase OS=bacterium TMED6 OX=1986783; GN = tgt PE=3 SV=1
MSIFNIKHQSKKSSARTGILKTAHGTINTPFFMPIATYGAVKTQSSSDIKKLPSDILLSNTYHLYIRPGTDILEKAGGLHKFMNWNDIILTDSGGYQVYSLQGMRKITDDGVTFQSHLDGSKHHFTPEKVVDIQRSIGSDIMMMLDVCPPGDANKKEWVEALNLTTKWAMRAKKYYDQTKPLYGHHQIISPIVQGGTDLNLRKQSAMELIDINCDMYAIGGLAVGEPKEEMLKVVNYMDTILPKEKPRYLMGVGTPADLVENILNGVDMFDCVMPTRNARNSQLFTFNGKVNIKNSKYKDDFSPIDGNDFSLMSTQYSKAYLHHLFKTNEILGLRIATQHNLKFYMHLMNEIRKKINADCFEGWAKDFLCRYNNE

SEQ ID NO: 52342 - protein, 377 aa, unidentified
  source 1..377: note = Unknown
  REGION 1..377: note = tr|A0A1Z8ZAY2|A0A1Z8ZAY2_9BACT Queuine tRNA-ribosyltransferase OS=bacterium TMED80 OX=1986784; GN = tgt PE=3 SV=1
  VARIANT 135: note = Xaa can be any naturally occurring amino acid
  VARIANT 146: note = Xaa can be any naturally occurring amino acid
  VARIANT 180: note = Xaa can be any naturally occurring amino acid
  VARIANT 225: note = Xaa can be any naturally occurring amino acid
  VARIANT 232: note = Xaa can be any naturally occurring amino acid
  VARIANT 236: note = Xaa can be any naturally occurring amino acid
MNFSITTQDKKTSARTGLIKTEHGDIQTPVFMPVGTIGAVKTFSPHELEGLGADIILGNTYHLYLRPGTEVINHAGGLHKFSNWTRPILTDSGGFQVFSLANLNKINDDGVEFQSHLDGSYHTITPEISMQIQRXLGSDIIMAFDXCPPGKSELDEVTKAVKRTNEWFIRCKNYLKDNPXLYKHSQTLFPIIQGGINHKMREMSIEGLVPQADFGIAIGGLAVGXEKNAMFXTIEXCDSLLPKDRPRYLMGVGRPTDIVKAIRRGVDMFDCVMPTRNGRNGQIFTSNGTINITNEKYKDDHSFIDENSNHAFGRMFTKAYIRHLFGVKEILGLRIASTLNLSFYISLIKKIQEVIHLGEFDSWSTSWLNEMKYHRGM

SEQ ID NO: 52343 - protein, 380 aa, unidentified
  source 1..380: note = Unknown
  REGION 1..380: note = tr|A0A1Z9AXH9|A0A1Z9AXH9_9BACT Queuine tRNA-ribosyltransferase OS=bacterium TMED88 OX=1986661; GN = tgt PE=3 SV=1
MKASGFLLRIENTEGEARTGTLTTPHGRVSTPAFMPVATFGAVRGISAADLQSVGAQILLSNTYHLHERPGEETVASLGGLHGFTGWSGPWLTDSGGYQVTSLSDRMKIDEDGVIFASPLDGKKRRLSPEGVIQIQESLGSDIAMVLDECLPALQKDSPEENRTRMEAAMMRSLRWAERAARARRSEAQAVFGIVQGGIDETLRQQSAEELTRIGFDGAAHGGLGLGESRAQRMEAVRVAHSVLPSDQPRYLMGLGRPIDLIDGIACGIDLFDCVVPTRNGRHGLLFTSQGILSLKNAVYRSDERPIDPNCDCPACVGHSRGYLRHLFKCGEALAPRLAALHNLRFYLSLLEQSRQAISEGGFAAFRSEMATRLEHRLAD

SEQ ID NO: 52344 - protein, 379 aa, unidentified
  source 1..379: note = Unknown
  REGION 1..379: note = tr|A0A1Z9BCK6|A0A1Z9BCK6_9BACT Queuine tRNA-ribosyltransferase OS=bacterium TMED88 OX=1986661; GN = tgt PE=3 SV=1
MSFDYALEATSGQARAGRFNTPHGPIQTPTFMPVGTHGAIKAMTPDQVQATGAQVVLANTYHLALRPGEGLVEKLGGLHAFMQWPGPILTDSGGFQVFSLPSAQINDRGVRFTNEVNGDTMDLTPERAMEIQNTLGADIIMAFDECTPYPATRKLAATGVRRTLMWMERCLAAHQRADQALFPIVQGSTFPELREECAKELVAMDSPGYAIGGVSVGEGHELLCEVTRHAAPLLPDNKPRYLMGVGLPEDLIACVGFGIDMFDCVIPTRYARSATVFTARGRIRLTHRRYRRDTYPIDPSCECYACQDGRFSRAYLHHLFNANEVLSAILCSIHNVHFYTQLMTSARNAILAGRYPEFASRFLEGYQRDSKKPSKARGR

SEQ ID NO: 52345 - protein, 143 aa, unidentified
  source 1..143: note = Unknown
  REGION 1..143: note = tr|A0A355TP28|A0A355TP28_9BACT tRNA guanosine(34) transglycosylase Tgt (Fragment) OS=bacterium UBP9_UBA11836; OX = 2060920 GN=tgt PE=4 SV=1
MRYELGTEARLGRIDTPHGSIETPEFLPVGTLATVKGLMPKQLEELGVQGMLSNTYHLFLRPGSDIVEEMGGLHKFMNWKRPVMTDSGGFQAFSLGAARQLGIGKIGVFPGNGADISLKKGDAYKPLAHIDEDGVVFRSFLDG

SEQ ID NO: 52346 - protein, 182 aa, unidentified
  source 1..182: note = Unknown
  REGION 1..182: note = tr|A0A355TPQ1|A0A355TPQ1_9BACT tRNA guanosine(34) transglycosylase Tgt (Fragment) OS=bacterium UBP9_UBA11836; OX = 2060920 GN=tgt PE=4 SV=1
FLDGSKHRLNPEISIRIQEQLGADIILAFDECTSPAASYEYTAMSLERTHRWAVRSLEARRDTPQALYGIVQGGEWQDLREKSVEFISSLPFQGFDIGGSLGKSKHDMHKVLDWTIPGLPHNKPRHLLGIGEVDDLFEGVQRGIDTFDCVIPTRFARTSNLFVPYDVPGANKRGTLVLRNAE

SEQ ID NO: 52347 - protein, 394 aa, unidentified
  source 1..394: note = Unknown
  REGION 1..394: note = tr|A0A0A1PVK1|A0A0A1PVK1_9BACT Queuine tRNA-ribosyltransferase OS=bacterium YEK0313 OX=1522316; GN = tgt PE=3 SV=1
MSHRPDLATPDAASGERAAFAFRIDGRDGAARTGLITTPRGAIRTPAFMPVGTQGTVKGMYMDQVRALGADVILGNTYHLMLRPGAERIAALGGLHRFGGWTGPILTDSGGFQVMSLSKLRKLDERGVTFASHIDGSRFDLTPERSVEIQGLLGSDIQMQLDECVALPNERAAIDRAMRLSIRWAERSKRAFESQPAGRALFGIVQGGDQPDLRVESAKALAGMDFPGYSIGGLAVGEPQAVMLAMIEEVMPHLPDGKPHYLMGVGTPDDLLASVARGIDMFDCVMPTRNGRHGQAFTRFGKLNFRNARHADDPRPVDETSSCPAARDYSRAYLHHLVRTEEMLGAMLVTWINLAYYQDLMAGARAAIAAGRFADYAAEVREGWKRGDIAPHAG

SEQ ID NO: 52348 - protein, 376 aa, unidentified
  source 1..376: note = Bacteroidaceae bacterium
  REGION 1..376: note = tr|A0A5C6HPI6|A0A5C6HPI6_9BACT Queuine tRNA-ribosyltransferase OS=Bacteroidaceae bacterium HV4-6-C5C OX=2600309 GN=tgt PE=3 SV=1
MTFELQYTDSKSNARAGLISTDHGQIQTPIFMPVGTAGSVKGVHQTELKEDIKAQIILGNTYHLYLRPGLDVIENAGGLHKFNGFDRPMLTDSGGFQVFSLSSIRKLREEGAEFRSHIDGSKHVFTPEKVMDIERTIGADIMMAFDECPPGTSDYQYAKKSLGLTHRWLDRCIKRFNETEPKYGYHQALFPIVQGCVYPDLRKQSAEFVASKEAEGNAIGGLAVGEPVEKMYEMIEVVNEILPKDKPRYLMGVGTPVNILEGIERGVDMFDCVMPTRNGRNGMLFTKDGIINMRNKKWEMDFSPIEADGASIVDTLYNKAYLRHLFHAQELLAMQIASIHNLAFYLWLVGEARKHIIAGDFSVWKPMMVKRVSTRL

SEQ ID NO: 52349 - protein, 376 aa, unidentified
  source 1..376: note = Bacteroidales bacterium
  REGION 1..376: note = tr|U5Q718|U5Q718_9BACT Queuine tRNA-ribosyltransferase OS=Bacteroidales bacterium CF; OX = 1400053 GN=tgt PE=3 SV=1
MRYEKIARDQESSASCGLLHTDHGVIETPIFMPVGTAGTVKAVYHRDLKEDIKAQIILGNTYHLYLRPGTDIINKAGGLHKFISWDRPILTDSGGYQVFSLAENRKLTHDGCTFRSHIDGSKHLFTPENVVEIQRLIGADIIMALDECPPGDSDHKYAKSSLQLTKQWLERGVVHFDKTEPLYGYSQSFFPIVQGCVYPDLRVEAAEHAVSLDREGYAIGGLSVGEPTEQMYQMLEVLDPILPKDKPRYLMGVGTPANILEGIARGVDMFDCVMPTRNARNGMLFTSGGIINIRNKKWADDFSPIDENGTSFVDKCYSRSYLRHLFISSEILGAQIASEHNLAFYLWLVDQARLHIKAGDFVTWKNSMVKKLETRL

SEQ ID NO: 52350 - protein, 376 aa, unidentified
  source 1..376: note = Bacteroidales bacterium
  REGION 1..376: note = tr|A0A4S4H8K0|A0A4S4H8K0_9BACT Queuine tRNA-ribosyltransferase OS=Bacteroidales bacterium; OX = 2030927 GN=tgt PE=3 SV=1
MDFKIEATAPHTNARAGEITTDHGKIPTPIFMPVGTVGSVKAVHMRELRDDIDAKIILGNTYHLYLRPGLDILRNAGGLHKFNGWERPILTDSGGFQVFSLSSNRKLKEEGAWFRSHIDGSKHLFTPEGVVDIQRVIGADIMMALDECTPGTADLDYAKKSLALTQRWLERGWKRYKETEGLYGYRQAYFPIVQGCVYPELRREAAKHIADLGAEGNAIGGLAVGEPTEKMYEMIEVVNDILPTDKPRYLMGVGTPANILEAIDRGVDMMDCVMPTRNGRNGMLFTRNGIMNMRNKKWADDYSPLDEGGAAWVDEVYSKAYVRHLFVSQELLAMQIASVHNLAFYLWLVKEARRHIIAGDFKSWKTEMVERVTRRL

SEQ ID NO: 52351 - protein, 376 aa, Bacteroides acidifaciens
  REGION 1..376: note = tr|A0A4Y9GTG3|A0A4Y9GTG3_9BACE Queuine tRNA-ribosyltransferase OS=Bacteroides acidifaciens; OX = 85831 GN=tgt PE=3 SV=1
MTFDLQYTDTKSNARTGLITTDHGQIQTPIFMPVGTLGTVKGVHQTELKEDIQAQIILGNTYHLYLRPGLEVIEKAGGLHRFNGFDRPMLTDSGGFQVFSLAGIRKLREEGAEFRSHIDGSKHIFTPEKVMDIERTIGADIMMAFDECPPGDSDYAYAKKSLGLTHRWLDRCIKRFNETEPKYGYNQSLFPIVQGCVYTDLRKQSAEFVASKGADGNAIGGLAVGEPVDKMYEMIEVVNEILPKDKPRYLMGVGTPVNILEGIERGVDMFDCVMPTRNGRNGMLFTKDGIINMRNKKWEMDFSPIEADGASSVDTLYTKAYLRHLFHAQELLAMQIASIHNLAFYLWLVGEARKHIIAGDFSTWKPMMVKRVSTRL

SEQ ID NO: 52352 - protein, 376 aa, Bacteroides acidifaciens
  REGION 1..376: note = tr|A0A3L7Z8R5|A0A3L7Z8R5_9BACE Queuine tRNA-ribosyltransferase OS=Bacteroides acidifaciens; OX = 85831 GN=tgt PE=3 SV=1
MTFDLQYTDTKSNARAGLITTDHGQIQTPIFMPVGTLGTVKGVHQTELKEDIQAQIILGNTYHLYLRPGLEVIEKAGGLHRFNGFDRPMLTDSGGFQVFSLAGIRKLREEGAEFRSHIDGSKHIFTPEKVMDIERTIGADIMMAFDECPPGDSDYAYAKKSLGLTHRWLDRCIKRFNETEPKYGYNQSLFPIVQGCVYTDLRKQSAEFVASKGADGNAIGGLAVGEPVDKMYEMIEVVNEILPKDKPRYLMGVGTPVNILEGIERGVDMFDCVMPTRNGRNGMLFTKDGIINMRNKKWEMDFSPIEADGASSVDTLYTKAYLRHLFHAQELLAMQIASIHNLAFYLWLVGEARKHIIAGDFSTWKPMMVKRVSTRL

SEQ ID NO: 52353 - protein, 376 aa, Bacteroides caccae
  REGION 1..376: note = tr|R5UWU9|R5UWU9_9BACE Queuine tRNA-ribosyltransferase OS=Bacteroides caccae CAG:21; OX = 1263037 GN=tgt PE=3 SV=1
MTFELQYTDTKSNARAGLITTDHGQIQTPIFMPVGTLGTVKGVHLTELKEDIRAQIILGNTYHLYLRPGLEVIEKAGGLHRFNGFDRPMLTDSGGFQVFSLAGIRKLREEGAEFRSHIDGSKHIFTPEKVMDIERTIGADIMMAFDECPPGDSDYAYAKKSLGLTHRWLDRCIQRFNETEPKYGYNQSLFPIVQGCVYPDLRKQSAEFVASKGADGNAIGGLAVGEPVDKMYEMIEIVNEILPKDKPRYLMGVGTPVNILEGIERGVDMFDCVMPTRNGRNGMLFTKDGIINMRNKKWEMDFSPIEVDGASSVDTLYSKAYLRHLFHAQELLAMQIASIHNLAFYLWLVGEARKHIIAGDFSTWKPMMVKRVSTRL

SEQ ID NO: 52354 - protein, 376 aa, Bacteroides caccae; identical to SEQ ID NO: 52353
  REGION 1..376: note = tr|A0A174LCJ2|A0A174LCJ2_9BACE Queuine tRNA-ribosyltransferase OS=Bacteroides caccae OX=47678; GN = tgt PE=3 SV=1

SEQ ID NO: 52355 - protein, 376 aa, unidentified
  source 1..376: note = Bacteroides caecimuri
  REGION 1..376: note = tr|A0A4S2CF67|A0A4S2CF67_9BACE Queuine tRNA-ribosyltransferase OS=Bacteroides caecimuri; OX = 2516958 GN=tgt PE=3 SV=1
MTFELQYTDTKSNARAGLITTDHGQIQTPIFMPVGTLGTVKGVHLTELKEDIQAQIILGNTYHLYLRPGLDVIEKAGGLHRFNGFDRPMLTDSGGFQVFSLAGIRKLREEGAEFRSHIDGSKHIFTPEKVMDIERTIGADIMMAFDECPPGDSDYEYAKKSLGLTHRWLDRCIQRFNETEPKYGYKQALFPIVQGCVYPDLRKQSAEFIASKGAEGNAIGGLAVGEPVDKMYEMIEIVNEILPKDKPRYLMGVGTPVNILEGIERGVDMFDCVMPTRNGRNGMLFTKDGIINMRNKKWETDFSPIEADGASSVDTLYSKAYLRHLFHAQELLAMQIASIHNLAFYLWLAGEARKHIIAGDFSTWKPMMVKRVSTRL

SEQ ID NO: 52356 - protein, 376 aa, unidentified
  source 1..376: note = Bacteroides caecimuris
  REGION 1..376: note = tr|A0A1C7GZ40|A0A1C7GZ40_9BACE Queuine tRNA-ribosyltransferase OS=Bacteroides caecimuris; OX = 1796613 GN=tgt PE=3 SV=1
MTFELQYTDTKSNARAGLITTDHGQIQTPIFMPVGTLGTVKGVHLTELKEDIQAQIILGNTYHLYLRPGLDVIEKAGGLHRFNGFDRPMLTDSGGFQVFSLAGIRKLREEGAEFRSHIDGNKHIFTPEKVIDIERTIGADIMMAFDECPPGDSDYEYAKKSLGLTHRWLDRCIQRFNETEPKYGYKQALFPIVQGCVYPDLRKQSAEFIASKGAEGNAIGGLAVGEPVDKMYEMIEIVNEILPKDKPRYLMGVGTPVNILEGIERGVDMFDCVMPTRNGRNGMLFTKDGIINMRNKKWETDFSPIEADGASSVDTLYSKAYLRHLFHAQELLAMQIASIHNLAFYLWLAGEARKHIIAGDFSTWKPMMVKRVSTRL

SEQ ID NO: 52357 - protein, 376 aa, unidentified; identical to SEQ ID NO: 52355
  source 1..376: note = Bacteroides caecimuris
  REGION 1..376: note = tr|A0A3A9B9U0|A0A3A9B9U0_9BACE Queuine tRNA-ribosyltransferase OS=Bacteroides caecimuris; OX = 1796613 GN=tgt PE=3 SV=1

SEQ ID NO: 52358 - protein, 376 aa, Bacteroides cellulosilyticus
  REGION 1..376: note = tr|E2NKI6|E2NKI6_9BACE Queuine tRNA-ribosyltransferase OS=Bacteroides cellulosilyticus DSM 14838 OX=537012 GN=tgt PE=3 SV=1
MTFDLQYTDSKSNARAGLITTDHGQIETPIFMPVGTVGTVKGVHVTELKEDIKAQIILGNTYHLYLRPGLDVLEKAGGLHKFNGFDRPMLTDSGGFQVFSLSGIRKLREEGAEFRSHIDGSKHIFTPEKVMDIERTIGADIMMAFDECPPGDSDYAYAKKSLGLTHRWLDRCIQRFNETEPKYGYQQSLFPIVQGCVYPDLRKQSAEYIASKGADGNAIGGLAVGEPVDKMYEMIELVNEILPKDKPRYLMGVGTPVNILEGIERGVDMFDCVMPTRNGRNGMLFTKDGIINMRNKKWETDFSPIEADGASAVDTLYSKAYLRHLFHAQELLAMQIASIHNLAFYLWLVGEARKHIIAGDFSTWKPMMVKRVSTRL

SEQ ID NO: 52359 - protein, 376 aa, Bacteroides cellulosilyticus; identical to SEQ ID NO: 52358
  REGION 1..376: note = tr|A0A0P0G6F9|A0A0P0G6F9_9BACE Queuine tRNA-ribosyltransferase OS=Bacteroides cellulosilyticus; OX = 246787 GN=tgt PE=3 SV=1

SEQ ID NO: 52360 - protein, 376 aa, Bacteroides clarus
  REGION 1..376: note = tr|A0A1Y4JVN8|A0A1Y4JVN8_9BACE Queuine tRNA-ribosyltransferase OS=Bacteroides clarus OX=626929; GN = tgt PE=3 SV=1
MTFELQYTDSKTNARAGLITTDHGQIETPIFMPVGTLGTVKGVHLTELKEDIKAQIILGNTYHLYLRPGLDVIEKAGGLHKFNGFDRPMLTDSGGFQVFSLAGIRKLREEGAEFRSHIDGSKHVFTPERVMDIERTIGADIMMAFDECTPGDAEYAYAKKSMEMTHRWLNRCITRFNETEPKYGYHQALFPIVQGCVYPDLRKRSAEFIASKGAEGNAIGGLAVGEPTEKMYEMIELVNEILPKDKPRYLMGVGTPVNILEGIERGVDMFDCVMPTRNGRNGMLFTKDGIINMRNKKWETDFSPIEADGASYVDTLYSKAYLRHLFHAQELLAMQIASIHNLAFYLWLAGEARKHIIAGDFSTWKPMMVQRVSTRL

SEQ ID NO: 52361 - protein, 376 aa, Bacteroides clarus
  REGION 1..376: note = tr|A0A412N043|A0A412N043_9BACE Queuine tRNA-ribosyltransferase OS=Bacteroides clarus OX=626929; GN = tgt PE=3 SV=1
MTFELQYTDSKTNARAGLITTDHGQIETPIFMPVGTLGTVKGVHLTELKEDIKAQIILGNTYHLYLRPGLDVIEKAGGLHKFNGFDRPMLTDSGGFQVFSLAGIRKLREEGAEFRSHIDGSKHVFTPERVMDIERTIGADIMMAFDECTPGDAEYAYAKKSMEMTHRWLDRCITRFNETEPKYGYHQALFPIVQGCVYPDLRKRSAEFIASKGAEGNAIGGLAVGEPTEKMYEMIELVNEILPKDKPRYLMGVGTPVNILEGIERGVDMFDCVMPTRNGRNGMLFTKDGIINMRNKKWETDFSPIEADGASYVDTLYSKAYLRHLFHAQELLAMQIASIHNLAFYLWLAGEARKHIIAGDFSTWKPMMVQRVLTRL

SEQ ID NO: 52362 - protein, 371 aa, unidentified
  source 1..371: note = [Bacteroides] coagulans
  REGION 1..371: note = tr|A0A2U1E2G9|A0A2U1E2G9_9FIRM Queuine tRNA-ribosyltransferase OS=[Bacteroides] coagulans; OX = 46507 GN=tgt PE=3 SV=1
MSFEFEVLKKDDRTKARVGVLKTPHGDIPTPIFMPVGTRATVKTLSNNELLDLNTKIILSNTYHLFLRPGDELIKKAGGLHKFMNWKLPILTDSGGFQVFSLTENRQITEEGVHFRSHIDGSKVFLSPEKSISVQENLGSDIMMAFDECAPYPADYDYIKHSMDRTLRWLERCVNAKTRDDQALFGIVQGGMYKDLRKLSAIETCKFDLKGYAVGGLSVGEPIEVLKEMLDTCTDYMPEDKPRYHMGVGSPDYLFESVERGIDMADCVLPTRIARNGAAFTKYGRINLKNAKFTEDFTPIEEDCDCYACRNHTKAYIRHLVMNGEILGGRLLSLHNVRFLLKLMENIRKSVIDGNFLEYKEEFYKNYGYLD

SEQ ID NO: 52363 - protein, 376 aa, Bacteroides coprocola
  REGION 1..376: note = tr|A0A412GD66|A0A412GD66_9BACE Queuine tRNA-ribosyltransferase OS=Bacteroides coprocola OX=310298; GN = tgt PE=3 SV=1
MKFELQYTDPRSNARAGLITTDHGQIETPIFMPVGTLGSVKAVHLHELKEDIKAQIILGNTYHLYLRPGLDTLEKAGGLHKFNGFDRPMLTDSGGFQVFSLAGIRKMREEGVEFRSHIDGSKHLFTPERVMDIERTIGADIMMAFDECTPGTADYNYAKKSMELTHRWLDRCITRFNETEPKYGYQQSLFPIVQGCVYPDLRRRSAEYIASKNADGNAIGGLAVGEPTEKMYEMIEVVNEILPTDKPRYLMGVGTPVNILEGIERGVDMFDCVMPTRNGRNGMLFTKDGIMNMRNKKWENDFSPIEADGASYVDTMYSRAYLRHLFHAQELLALQIASIHNLAFYLWLVGEARKHIIAGDFSTWKPAMVKRISTRL

SEQ ID NO: 52364 - protein, 376 aa, Bacteroides coprocola; identical to SEQ ID NO: 52363
  REGION 1..376: note = tr|R6C2Z6|R6C2Z6_9BACE Queuine tRNA-ribosyltransferase OS=Bacteroides coprocola CAG:162; OX = 1263040 GN=tgt PE=3 SV=1

SEQ ID NO: 52365 - protein, 376 aa, Bacteroides coprophilus
  REGION 1..376: note = tr|R6TCP7|R6TCP7_9BACE Queuine tRNA-ribosyltransferase OS=Bacteroides coprophilus CAG:333; OX = 1263041 GN=tgt PE=3 SV=1
MTFELQYTDPRSNARAGLITTDHGQIETPIFMPVGTLGTVKGVHLHELKDDIKAQIILGNTYHLYLRPGLDIIEGAGGLHKFNGFDRPMLTDSGGFQVFSLSGIRKMREEGVEFRSHIDGSKHLFTPERVMDIERTIGADIMMAFDECTPGTADYEYARKSMEMTHRWLDRCLTRFNETEPKYGYNQSLFPIVQGCVYPDLRKRSAEYIASKNADGNAIGGLAVGEPTEKMYEMIEVVNEILPTDRPRYLMGVGTPINILEGIERGVDMFDCVMPTRNGRNGMLFTKDGIMNMRNKKWENDYSPIEADGASYVDTMYSRAYLRHLFHAQELLAMQIASIHNLAFYLWLVGEARKHIIAGDFSTWKPAMVKRLSTRL

SEQ ID NO: 52366 - protein, 394 aa, Bacteroides coprophilus
  REGION 1..394: note = tr|S0F753|S0F753_9BACE Queuine tRNA-ribosyltransferase OS=Bacteroides coprophilus DSM 18228 = JCM 13818 OX=547042 GN=tgt PE=3 SV=1
MPLTLPKLKKKKTPKNSNMTFELQYTDPRSNARAGLITTDHGQIETPIFMPVGTLGTVKGVHLHELKDDIKAQIILGNTYHLYLRPGLDIIEGAGGLHKFNGFDRPMLTDSGGFQVFSLSGIRKMREEGVEFRSHIDGSKHLFTPERVMDIERTIGADIMMAFDECTPGTADYEYARKSMEMTHRWLDRCLTRFNETEPKYGYNQSLFPIVQGCVYPDLRKRSAEYIASKNADGNAIGGLAVGEPTEKMYEMIEVVNEILPTDRPRYLMGVGTPINILEGIERGVDMFDCVMPTRNGRNGMLFTKDGIMNMRNKKWENDYSPIEADGASYVDTMYSRAYLRHLFHAQELLAMQIASIHNLAFYLWLVGEARKHIIAGDFSTWKPAMVKRLSTRL

SEQ ID NO: 52367 - protein, 376 aa, Bacteroides coprosuis
  REGION 1..376: note = tr|F3ZPG9|F3ZPG9_9BACE Queuine tRNA-ribosyltransferase OS=Bacteroides coprosuis DSM 18011; OX = 679937 GN=tgt PE=3 SV=1
MKFDLQYTDPKTNARAGLITTAHGQIQTPIFMPVGTIGSVKGVQVSHLKEDIKAQIILGNTYHLYLRPGLEVLERAGGLHKFNSFDRPMLTDSGGFQVFSLSGIRKITEEGVEFRSHIDGSKHFFSPERVMDIERTIGADIMMAFDECPPGTATYEYAKNSMGLTHRWLDRCIKRFNETEDKYGYEQTLFPIVQGCVYPDLRKQSAEFIASKEADGNAIGGLAVGEPVEKMYEMIELVNEILPKAKPRYLMGVGTPMNILEGIERGVDMFDCVMPTRNGRNGMLFTKDGIINMKNKKWEFDFSPIEANGASFVDTLYTKAYLRHLFHAKELLAMEIASIHNLAFYLWLVGEARKHIIAGDFSTWKPMMVKRLSTRL

SEQ ID NO: 52368 - protein, 376 aa, Bacteroides dorei
  REGION 1..376: note = tr|A0A076IQJ2|A0A076IQJ2_9BACE Queuine tRNA-ribosyltransferase OS=Bacteroides dorei OX=357276; GN = tgt PE=3 SV=1
MTFDLQYTDPKSNARAGLITTDHGQIETPIFMPVGTLGTVKGVHLHELKEDIKAQIILGNTYHLYLRPGLDIIERAGGLHKFNGFDRPMLTDSGGFQVFSLSGIRKMREEGVEFRSHIDGSKHLFTPERVMDIERTIGADIMMAFDECTPGTADYEYAKKSMQLTHRWLDRCIKHFNETVPKYGYQQSLFPIVQGCVYPDLRKQSAEYIASKGADGNAIGGLAVGEPTEKMYEMIEVVNEILPKDKPRYLMGVGTPVNILEGIERGVDMFDCVMPTRNGRNGMLFTKNGIMNMRNKKWEDDYSPIEAEGASYVDTMYSRAYLRHLFHAQELLAMQIASIHNLAFYLWLAGEARKHIIAGDFSTWKPMMVKRLSTRL

SEQ ID NO: 52369 - protein, 376 aa, Bacteroides dorei
  REGION 1..376: note = tr|A0A0K2HM43|A0A0K2HM43_9BACE Queuine tRNA-ribosyltransferase OS=Bacteroides dorei OX=357276; GN = tgt PE=3 SV=1
MTFDLQYTDPKSNARAGLITTDHGQIETPIFMPVGTLGTVKGVHLHELKEDIKAQIILGNTYHLYLRPGLDIIERAGGLHKFNGFDRPMLTDSGGFQVFSLSGIRKMREEGVEFRSHIDGSKHLFTPERVMDIERTIGADIMMAFDECTPGTADYEYAKKSMQLTHRWLDRCIKHFNETDPKYGYQQSLFPIVQGCVYPDLRKQSAEYIASKGADGNAIGGLAVGEPTEKMYEMIEVVNEILPKDKPRYLMGVGTPVNILEGIERGVDMFDCVMPTRNGRNGMLFTKNGIMNMRNKKWEDDYSPIEAEGASYVDTMYSRAYLRHLFHAQELLAMQIASIHNLAFYLWLAGEARKHIIAGDFSTWKPMMVKRLSTRL

SEQ ID NO: 52370 - protein, 376 aa, Bacteroides eggerthii
  REGION 1..376: note = tr|R5K1B1|R5K1B1_9BACE Queuine tRNA-ribosyltransferase OS=Bacteroides eggerthii CAG:109; OX = 1263043 GN=tgt PE=3 SV=1
MTFELQYTDSKTNARAGLITTDHGQIETPIFMPVGTLGTVKGVHLTELKEDIKAQIILGNTYHLYLRPGLDVIEKAGGLHKFNGFDRPMLTDSGGFQVFSLSGIRKLREEGAEFRSHIDGSKHIFTPEKVMDIERTIGADIMMAFDECTPGDAEYAYAKKSMEMTHRWLDRCIKRFNETDPKYGYHQALFPIVQGCVYPDLRKRSAEFIASKGAEGNAIGGLAVGEPTEKMYEMIELVNEILPKEKPRYLMGVGTPVNILEGIERGVDMFDCVMPTRNGRNGMLFTKDGIINMRNKKWETDFSPIEADGASYVDTLYSKAYLRHLFHAQELLAMQIASIHNLAFYLWLVGEARKHIIAGDFSTWKPMMVQRVSTRL

SEQ ID NO: 52371 - protein, 376 aa, Bacteroides eggerthii; identical to SEQ ID NO: 52370
  REGION 1..376: note = tr|A0A380YMQ5|A0A380YMQ5_9BACE Queuine tRNA-ribosyltransferase OS=Bacteroides eggerthii OX=28111; GN = tgt PE=3 SV=1

SEQ ID NO: 52372 - protein, 376 aa, Bacteroides faecichinchillae
  REGION 1..376: note = tr|A0A1M5CRX2|A0A1M5CRX2_9BACE Queuine tRNA-ribosyltransferase OS=Bacteroides faecichinchillae; OX = 871325 GN=tgt PE=3 SV=1
MTFELQYTDTKSNARTGLITTDHGQIQTPIFMPVGTLGTVKGVHLTELKEDIQAQIILGNTYHLYLRPGLDVIEKAGGLHRFNGFDRPMLTDSGGFQVFSLAGIRKLREEGAEFRSHIDGSKHIFTPEKVMDIERTIGADIMMAFDECPPGDSDYEYAKKSLGLTHRWLDRCIQRFNETEPKYGYKQSLFPIVQGCVYPDLRKQSAEFIASKNADGNAIGGLAVGEPVDKMYEMIEIVNEILPKDKPRYLMGVGTPVNILEGIERGVDMFDCVMPTRNGRNGMLFTKDGIINMRNKKWETDFSPIEIDGASIVDTLYSKAYLRHLFHAQELLAMQIASIHNLAFYLWLVGEARKHIIAGDFSTWKPMMVKKVSSRL

SEQ ID NO: 52373 - protein, 376 aa, Bacteroides faecis
  REGION 1..376: note = tr|A0A1H2ZF47|A0A1H2ZF47_9BACE Queuine tRNA-ribosyltransferase OS=Bacteroides faecis MAJ27; OX = 1077285 GN=tgt PE=3 SV=1
MTFELQYTDTKSNARAGLITTDHGQIQTPIFMPVGTLGTVKGVHLTELKEDIQAQIILGNTYHLYLRPGLDVIEKAGGLHRFNGFDRPMLTDSGGFQVFSLAGIRKLREEGAEFRSHIDGSKHIFTPEKVMDIERTIGADIMMAFDECPPGDSDYAYAKKSLGLTHRWLDRCIQRFNETEPKYGYHQSLFPIVQGCVYQDLRKQSAEFVASKGADGNAIGGLAVGEPVDKMYEMIEVVNEILPKDKPRYLMGVGTPVNILEGIERGVDMFDCVMPTRNGRNGMLFTKDGIINMRNKKWETDFSPIEADGASAVDTLYSKAYLRHLFHAQELLAMQIASIHNLAFYLWLVGEARKHIIAGDFSTWKPMMVKRVSTRL

SEQ ID NO: 52374 - protein, 376 aa, Bacteroides faecis
  REGION 1..376: note = tr|R6V3D7|R6V3D7_9BACE Queuine tRNA-ribosyltransferase OS=Bacteroides faecis CAG:32; OX = 1263044 GN=tgt PE=3 SV=1
MTFELQYTDTKSNARAGLITTDHGQIQTPIFMPVGTLGTVKGVHLTELKEDIQAQIILGNTYHLYLRPGLDVIEKAGGLHRFNGFDRPMLTDSGGFQVFSLAGIRKLREEGAEFRSHIDGSKHIFTPEKVMDIERTIGADIMMAFDECPPGDSDYAYAKKSLGLTHRWLDRCIQRFNETEPKYGYHQSLFPIVQGCVYQDLRKQSAEFVASKGADGNAIGGLAVGEPVDKMYEMIEVVNEILPKDKPRYLMGVGTPVNILEGIERGVDMFDCVMPTRNGRNGMLFTKDGIINMRNKKWETDFSPIEADGASAVDTLYSKAYLRHLFHAQELLAMQIASIHNLAFYLWLAGEARKHIIAGDFSTWKPMMVKRVSTRL

SEQ ID NO: 52375 - protein, 376 aa, Bacteroides finegoldii
  REGION 1..376: note = tr|R6RU02|R6RU02_9BACE Queuine tRNA-ribosyltransferase OS=Bacteroides finegoldii CAG:203; OX = 1263045 GN=tgt PE=3 SV=1
MTFELQYTDTKSNARAGLITTEHGQIQTPIFMPVGTLGTVKGVHLTELKEDIQAQIILGNTYHLYLRPGLDVIEKAGGLHRFNGFDRPMLTDSGGFQVFSLAGIRKLREEGAEFRSHIDGSKHIFTPEKVMDIERTIGADIMMAFDECPPGDSDYAYAKKSLGLTHRWLDRCIQRFNETEPKYGYNQSLFPIVQGCVYPDLRKQSAEFVASKGADGNAIGGLAVGEPVDKMYEMIEIVNEILPKDKPRYLMGVGTPVNILEGIERGVDMFDCVMPTRNGRNGMLFTKDGIINMRNKKWETDFSPIEADGASYVDTLYSKAYLRHLFHAQELLAMQIASIHNLAFYLWLAGEARKHIIAGDFSTWKPMMVRKVSTRL

SEQ ID NO: 52376 - protein, 376 aa, Bacteroides finegoldii
  REGION 1..376: note = tr|K5DH66|K5DH66_9BACE Queuine tRNA-ribosyltransferase OS=Bacteroides finegoldii CL09T03C10 OX=997888 GN=tgt PE=3 SV=1
MTFELQYTDTKSNARAGLITTDHGQIQTPIFMPVGTLGTVKGVHLTELKEDIRAQIILGNTYHLYLRPGLDVIEKAGGLHRFNGFDRPMLTDSGGFQVFSLAGIRKLREEGAEFRSHIDGSKHIFTPEKVMDIERTIGADIMMAFDECPPGDSDYAYAKKSLGLTHRWLDRCIQRFNETEPKYGYNQSLFPIVQGCVYPDLRKQSAEFVASKGADGNAIGGLAVGEPVDKMYEMIEIVNEILPKDKPRYLMGVGTPVNILEGIERGVDMFDCVMPTRNGRNGMLFTKDGIINMRNKKWETDFSPIEADGASYVDTLYSKAYLRHLFHAQELLAMQIASIHNLAFYLWLAGEARKHIIAGDFSTWKPMMVRKVSTRL

SEQ ID NO: 52377 - protein, 376 aa, Bacteroides fluxus
  REGION 1..376: note = tr|F3PU77|F3PU77_9BACE Queuine tRNA-ribosyltransferase OS=Bacteroides fluxus YIT 12057; OX = 763034 GN=tgt PE=3 SV=1
MTFELQYTDSKTNARAGLITTDHGQIETPIFMPVGTVGTVKGVHLPELKEDIKAQIILGNTYHLYLRPGLEVIEKAGGLHKFNGFDRPMLTDSGGFQVFSLSGIRKLREEGAEFRSHIDGSKHIFTPEKVMDIERTIGADIMMAFDECPPGDSDYEYAKKSLGLTHRWLDRCIKRFNETEPKYGYQQSLFPIVQGCVYRDLREQSAEFVASKGADGNAIGGLAVGEPVDKMYEMIELVNGILPKDKPRYLMGVGTPVNILEGIERGVDMFDCVMPTRNGRNGMIFTKDGIINMRNKKWEMDFSPIEADGASYVDTMYSKAYLRHLFHAQELLAMQIASIHNLAFYLWLAGEARKHIIAGDFSTWKPMMVKRVSTRL

SEQ ID NO: 52378 - protein, 376 aa, Bacteroides fragilis
  REGION 1..376: note = tr|A0A015S5F2|A0A015S5F2_BACFG Queuine tRNA-ribosyltransferase OS=Bacteroides fragilis str. 3986 N(B)19 OX=1339289 GN=tgt PE=3 SV=1
MTFELQYTDAKSNARAGLITTDHGQIQTPIFMPVGTIGSVKGVHQTELKEDIQAQIILGNTYHLYLRPGLDVLERAGGLHKFNGFDRPMLTDSGGFQVFSLSGIRKLREEGAEFRSHIDGSKHIFTPEKVMDIERIIGADIMMAFDECPPGDSDYAYAKKSLGLTHRWLDRCIQRFNETEPKYGYSQSLFPIVQGCVYPDLRKQSAEYIASKDADGNAIGGLAVGEPVDKMYEMIELVNEILPKDKPRYLMGVGTPVNILEGIERGVDMFDCVMPTRNGRNGMLFTKDGIMNMRNKKWEADFSPIEADGASYVDTLYSKAYLRHLFHAQELLAMQIASIHNLAFYLWLVGEARKHIIAGDFSTWKPMMVKRVSTRL

SEQ ID NO: 52379 - protein, 376 aa, Bacteroides fragilis
  REGION 1..376: note = tr|A0A081UE67|A0A081UE67_BACFG Queuine tRNA-ribosyltransferase OS=Bacteroides fragilis OX=817; GN = tgt PE=3 SV=1
MTFELQYTDAKSNARAGLITTAHGQIQTPIFMPVGTIGSVKGVHQTELKEDIQAQIILGNTYHLYLRPGLEVLEKAGGLHKFNGFDRPMLTDSGGFQVFSLSGIRKLREEGAEFRSHIDGSKHIFTPEKVMDIERIIGADIMMAFDECPPGDSDYEYAKKSLGLTHRWLDRCIQRFNETEPKYGYNQSLFPIVQGCVYPDLRKQSAEYIASKGADGNAIGGLAVGEPVDKMYEMIELVNEILPKDKPRYLMGVGTPVNILEGIERGVDMFDCVMPTRNGRNGMLFTKDGIMNMRNKKWEADFSPIEADGASYVDTLYSKAYLRHLFHAQELLAMQIASIHNLAFYLWLVGEARKHIIAGDFSTWKPMMVKRVSTRL

SEQ ID NO: 52380 - protein, 376 aa, Bacteroides graminisolvens
  REGION 1..376: note = tr|A0A351M5E9|A0A351M5E9_9BACE Queuine tRNA-ribosyltransferase OS=Bacteroides graminisolvens; OX = 477666 GN=tgt PE=3 SV=1
MKFELQYTDSKSNARAGLITTDHGQIETPIFMPVGTLGSVKGVHQTELKEDIKAQIILGNTYHLYLRPGLDVLEKAGGLHKFNGFDRPMLTDSGGFQVFSLAGIRKLREEGAEFRSHIDGSKHVFTPEKVMDIERIIGADIMMAFDECPPGDSDYEYAKKSMGLTHRWLDRCIKRFNETEPKYGYSQSLFPIVQGCVYPDLRKQSAEFIASKNADGNAIGGLAVGEPVDKMYEMIELVNEILPTDKPRYLMGVGTPVNILEGIERGVDMFDCVMPTRNGRNGMIFTKDGIMNMRNKKWETDFSPIEADGASYVDTLYSKAYLRHLFHAQELLAMQIASIHNLAFYLWLAGEARKHIIAGDFSIWKPMMVKRVSTRL

SEQ ID NO: 52381 - protein, 376 aa, Bacteroides graminisolvens
  REGION 1..376: note = tr|A0A3D2SD64|A0A3D2SD64_9BACE Queuine tRNA-ribosyltransferase OS=Bacteroides graminisolvens; OX = 477666 GN=tgt PE=3 SV=1
MKFELQYTDSKSNARTGLITTDHGQIETPIFMPVGTLGSVKGVHQTELKEDIKAQIILGNTYHLYLRPGLDVLEKAGGLHKFNGFDRPMLTDSGGFQVFSLAGIRKLREEGAEFRSHIDGSKHVFTPEKVMDIERIIGADIMMAFDECPPGDSDYEYAKKSMGLTHRWLDRCIKRFNETEPKYGYSQSLFPIVQGCVYPDLRKQSAEFIASKNADGNAIGGLAVGEPVDKMYEMIELVNEILPTDKPRYLMGVGTPVNILEGIERGVDMFDCVMPTRNGRNGMIFTKDGIMNMRNKKWETDFSPIEADGASYVDTLYSKAYLRHLFHAQELLAMQIASIHNLAFYLWLAGEARKHIIAGDFSIWKPMMVKRVSTRL

SEQ ID NO: 52382 - protein, 376 aa, Bacteroides helcogenes
  REGION 1..376: note = tr|E6STP4|E6STP4_BACT6 Queuine tRNA-ribosyltransferase OS=Bacteroides helcogenes (strain ATCC 35417 / DSM 20613 / JCM 6297 / P 36-108) OX=693979; GN = tgt PE=3 SV=1
MTFELQYTDSKTNARAGLITTDHGQIETPIFMPVGTVGTVKGVHLPELKEDIKTQIILGNTYHLYLRPGLEVIERAGGLHKFNGFDRPMLTDSGGFQVFSLSGIRKLREEGAEFRSHIDGSKHIFTPEKVMDIERTIGADIMMAFDECPPGNSDYEYAKKSLGLTHRWLDRCIKRFNETEPKYGYRQSLFPIVQGCVYRDLREQSAEFVASKNADGNAIGGLAVGEPVDKMYEMIELVNGILPKDKPRYLMGVGTPVNILEGIERGVDMFDCVMPTRNGRNGMLFTKDGIINMRNKKWEMDYSPVEANGASYVDTIYSKAYLRHLFHAQELLAMQIASIHNLAFYLWLVGEARKHIIAGDFSTWKPMMVKRVSTRL

SEQ ID NO: 52383 - protein, 376 aa, unidentified
  source 1..376: note = Bacteroides heparinolyticus
  REGION 1..376: note = tr|A0A2R3MQ13|A0A2R3MQ13_9BACE Queuine tRNA-ribosyltransferase OS=Bacteroides heparinolyticus; OX = 28113 GN=tgt PE=3 SV=1
MTFELQYTDSKTNARAGLITTDHGQIETPIFMPVGTVGSVKGVHIPELKDDIKAQIILGNTYHLYLRPGLEVIEKAGGLHKFNGFDRPMLTDSGGFQVFSLSGIRKLREEGAEFRSHIDGSKHIFTPEKVMDIERTIGADIMMAFDECPPGDSDYEYAKKSLGLTHRWLDRCIKRFNETEPKYGYRQSLFPIVQGCVYKDLRTQSAEFVASKDADGNAIGGLAVGEPVDKMYEMIELVNGILPKDKPRYLMGVGTPVNILEGIERGVDMFDCVMPTRNGRNGMLFTKDGIINMRNKKWETDFSPIETDGASYVDTLYSKAYLRHLFHAQELLAMQIASIHNLAFYLWLVGEARKHIIAGDFATWKPMMVKRVSTRL

SEQ ID NO: 52384 - protein, 376 aa, unidentified
  source 1..376: note = Bacteroides heparinolyticus
  REGION 1..376: note = tr|A0A3P1ZVL1|A0A3P1ZVL1_9BACE Queuine tRNA-ribosyltransferase OS=Bacteroides heparinolyticus; OX = 28113 GN=tgt PE=3 SV=1
MTFELQYTDSKTNARAGLITTDHGQIETPIFMPVGTVGTVKGVHIPELKDDIKAQIILGNTYHLYLRPGLEVIEKAGGLHKFNGFDRPMLTDSGGFQVFSLSGIRKLREEGAEFRSHIDGSKHIFTPEKVMDIERTIGADIMMAFDECPPGDSDYEYAKKSLGLTHRWLDRCIKRFNETEPKYGYRQSLFPIVQGCVYKDLRTQSAEFVASKDADGNAIGGLAVGEPVDKMYEMIELVNGILPKDKPRYLMGVGTPVNILEGIERGVDMFDCVMPTRNGRNGMLFTKDGIINMRNKKWETDFSPIETDGASYVDTLYSKAYLRHLFHAQELLAMQIASIHNLAFYLWLVGEARKHIIAGDFATWKPMMVKRVSTRL

SEQ ID NO: 52385 - protein, 376 aa, Bacteroides intestinalis
  REGION 1..376: note = tr|A0A139KN08|A0A139KN08_9BACE Queuine tRNA-ribosyltransferase OS=Bacteroides intestinalis; OX = 329854 GN=tgt PE=3 SV=1
MTFDLQYTDSKSNARAGLITTDHGQIETPIFMPVGTVGTVKGVHVTELKEDVKAQIILGNTYHLYLRPGLDVLEKAGGLHKFNGFDRPMLTDSGGFQVFSLSGIRKLREEGAEFRSHIDGSKHIFTPEKVMDIERTIGADIMMAFDECPPGDSDYAYAKKSLGLTHRWLDRCIQRFNETEPKYGYQQSLFPIVQGCVYPDLRKQSAEYIASKGADGNAIGGLAVGEPVDKMYEMIELVNEILPKDKPRYLMGVGTPVNILEGIERGVDMFDCVMPTRNGRNGMLFTKDGIINMRNKKWETDFSPIEADGASAVDTLYSKAYLRHLFHAQELLAMQIASIHNLAFYLWLVGEARKHIIAGDFSTWKPMMVKRVSTRL

SEQ ID NO: 52386 - protein, 376 aa, Bacteroides intestinalis
  REGION 1..376: note = tr|A0A3E4L1D6|A0A3E4L1D6_9BACE Queuine tRNA-ribosyltransferase OS=Bacteroides intestinalis; OX = 329854 GN=tgt PE=3 SV=1
MTFDLQYTDSKSNARAGLITTDHGQIATPIFMPVGTVGTVKGVHVTELKEDIEAQIILGNTYHLYLRPGLDVLEKAGGLHKFNGFDRPMLTDSGGFQVFSLSGIRKLREEGAEFRSHIDGSKHIFTPEKVMDIERTIGADIMMAFDECPPGDSDYAYAKKSLGLTHRWLDRCIQRFNETEPKYGYQQSLFPIVQGCVYPDLRKESAEFIASKGADGNAIGGLAVGEPVDKMYEMIELVNEILPKDKPRYLMGVGTPVNILEGIERGVDMFDCVMPTRNGRNGMLFTKDGIINMRNKKWETDFSPIEADGASAVDTLYSKAYLRHLFHAQELLAMQIASIHNLAFYLWLVGEARKHIIAGDFSTWKPMMVKRVSTRL

SEQ ID NO: 52387 - protein, 376 aa, unidentified
  source 1..376: note = Bacteroides luti
  REGION 1..376: note = tr|A0A1M4SWK1|A0A1M4SWK1_9BACE Queuine tRNA-ribosyltransferase OS=Bacteroides luti OX=1297750; GN = tgt PE=3 SV=1
MTFDLQYTDSKSNARAGLITTDHGQIETPIFMPVGTIGSVKAVHQTELIQDIKAQIILGNTYHLYLRPGLDVLEKAGGLHKFNSFDRPMLTDSGGFQVFSLSGIRKLREEGAEFRSHIDGSKHIFTPEKVMDIERIIGADIMMAFDECPPGDSDYAYAKKSLGLTHRWLDRCLKRFNETEPKYGYNQSLFPIVQGCVYPDLRKQSAEFIASKECDGNAIGGLAVGEPVEKMYEMIELVNEILPKEKPRYLMGVGTPVNILEGIERGVDMFDCVMPTRNGRNGMLFTKNGIMNMRNKKWETDFSPIEADGASYVDTLYSRAYLRHLFHAQELLAMQIASIHNLAFYLWLVGEARKHIIAGDFSTWKPMMVNRISTRL

SEQ ID NO: 52388 - protein, 376 aa, Bacteroides massiliensis
  REGION 1..376: note = tr|U6RL58|U6RL58_9BACE Queuine tRNA-ribosyltransferase OS=Bacteroides massiliensis B84634 = Timone 84634 = DSM 17679 = JCM 13223 OX=1121098 GN=tgt; PE = 3 SV=1
MTFDLQYTDPKSNARAGIITTDHGQIETPIFMPVGTLGTVKGVHLHELKDDIKAQIILGNTYHLYLRPGLDIIERAGGLHKFNGFDRPMLTDSGGFQVFSLSGIRKMREEGVEFRSHIDGSKHMFTPEKVMDIERTIGADIMMAFDECTPGTADYEYAKKSMQLTHRWLDRCLKRFNETEPKYGYKQSLFPIVQGCVYPDLRKQAAEFIASKGADGNAIGGLAVGEPTEKMYEMIEVVNEILPKDKPRYLMGVGTPINILEGIERGVDMFDCVMPTRNGRNGMLFTKDGIMNMRNKKWEDDYSPIEADGASYVDTMYSRAYLRHLFHAQELLAMQIASIHNLAFYLWLVGEARKHIIAGDFSTWKPMMVKRLSTRL

SEQ ID NO: 52389 - protein, 376 aa, Bacteroides nordii
  REGION 1..376: note = tr|A0A413VLN0|A0A413VLN0_9BACE Queuine tRNA-ribosyltransferase OS=Bacteroides nordii OX=291645; GN = tgt PE=3 SV=1
MTFELQYTDAKSNARAGLITTDHGQIQTPIFMPVGTLGTVKGVHLTELKEDIEAQIILGNTYHLYLRPGLEVIEKAGGLHKFNGFDRPMLTDSGGFQVFSLAGIRKLCEEGAEFRSHIDGSKHVFTPEKVMDIERTIGADIMMAFDECPPGDSDYAYAKKSLGLTHRWLDRCIQRFNETEPKYGYNQSLFPIVQGCVYTDLRKQSAEFVASKGADGNAIGGLAVGEPVDKMYEMIEVVNDILPKDKPRYLMGVGTPVNILEGIERGVDMFDCVMPTRNGRNGMLFTKDGIINMRNKKWEMDFSPIEADGASCVDTLYSKAYLRHLFHAQELLAMQIASIHNLAFYLWLVGEARKHIIAGDFSTWKPMMVKRVSTRL

SEQ ID NO: 52390 - protein, 376 aa, Bacteroides nordii
  REGION 1..376: note = tr|I9GSK0|I9GSK0_9BACE Queuine tRNA-ribosyltransferase OS=Bacteroides nordii CL02T12C05; OX = 997884 GN=tgt PE=3 SV=1
MTFELQYTDAKSNARAGLITTDHGQIQTPIFMPVGTLGTVKGVHLTELKEDIEAQIILGNTYHLYLRPGLEVIEKAGGLHKFNGFDRPMLTDSGGFQVFSLAGIRKLREEGAEFRSHIDGSKHVFTPEKVMDIERTIGADIMMAFDECPPGDSDYAYAKKSLGLTHRWLDRCIQRFNETEPKYGYNQSLFPIVQGCVYTDLRKQSAEFVASKGADGNAIGGLAVGEPVDKMYEMIEVVNDILPKDKPRYLMGVGTPVNILEGIERGVDMFDCVMPTRNGRNGMLFTKDGIINMRNKKWEMDFSPIEADGASCVDTLYSKAYLRHLFHAQELLAMQIASIHNLAFYLWLVGEARKHIIAGDFSTWKPMMVKRVSTRL

SEQ ID NO: 52391 - protein, 376 aa, Bacteroides oleiciplenus
  REGION 1..376: note = tr|K9ENR0|K9ENR0_9BACE Queuine tRNA-ribosyltransferase OS=Bacteroides oleiciplenus YIT 12058 OX=742727 GN=tgt PE=3 SV=1
MTFDLQYTDSKSNARAGLITTDHGQIETPIFMPVGTVGTVKGVHVTELKEDIEAQIILGNTYHLYLRPGLDVLEKAGGLHKFNGFDRPMLTDSGGFQVFSLSGIRKLREEGAEFRSHIDGSKHIFTPEKVMDIERTIGADIMMAFDECPPGDSDYAYAKKSLGLTHRWLDRCIQRFNETEPKYGYSQSLFPIVQGCVYPDLRKQSAEFIASKGADGNAIGGLAVGEPVDKMYEMIELVNEILPKDKPRYLMGVGTPVNILEGIERGVDMFDCVMPTRNGRNGMLFTKDGIINMRNKKWEADFSPLEADGASVVDTLYTKAYLRHLFHAQELLAMQIASIHNLAFYLWLVGEARKHIIAGDFSTWKPMMVKRVSTRL

SEQ ID NO: 52392 - protein, 376 aa, Bacteroides oleiciplenus
  REGION 1..376: note = tr|A0A1Q6G4X7|A0A1Q6G4X7_9BACE Queuine tRNA-ribosyltransferase OS=Bacteroides oleiciplenus; OX = 626931 GN=tgt PE=3 SV=1
MTFDLQYTDSKSNARAGLITTDHGQIETPIFMPVGTVGTVKGVHVTELKEDIKAQIILGNTYHLYLRPGLDVLEKAGGLHKFNGFDRPMLTDSGGFQVFSLSGIRKLREEGAEFRSHIDGSKHIFTPEKVMDIERTIGADIMMAFDECPPGDSDYAYAKKSLGLTHRWLDRCIQRFNETEPKYGYNQSLFPIVQGCVYPDLRKQSAEFIASKGADGNAIGGLAVGEPVDKMYEMIELVNEILPKDKPRYLMGVGTPVNILEGIERGVDMFDCVMPTRNGRNGMLFTKDGIINMRNKKWETDFSPIEADGASSVDTLYSKAYLRHLFHAQELLAMQIASIHNLAFYLWLVGEARKHIIAGDFSTWKPMMVKRVSTRL

SEQ ID NO: 52393 - protein, 376 aa, Bacteroides ovatus
  REGION 1..376: note = tr|A7LXK6|A7LXK6_BACO1 Queuine tRNA-ribosyltransferase OS=Bacteroides ovatus (strain ATCC 8483 / DSM 1896 / JCM 5824 / NCTC 11153) OX=411476 GN=tgt; PE = 3 SV=1
MTFELQYTDTKSNARAGLITTDHGQIQTPIFMPVGTLGTVKGVHLTELKEDIQAQIILGNTYHLYLRPGLDVIEKAGGLHRFNGFDRPMLTDSGGFQVFSLAGIRKLREEGAEFRSHIDGSKHIFTPEKVMDIERTIGADIMMAFDECPPGDSDYEYAKKSLGLTHRWLDRCIQRFNETEPKYGYNQSLFPIVQGCVYPDLRKQSAEFVASKGADGNAIGGLAVGEPVDKMYEMIEIVNEILPKDKPRYLMGVGTPVNILEGIERGVDMFDCVMPTRNGRNGMLFTKDGIINMRNKKWETDFSPIEADGASCVDTLYSKAYLRHLFHAQELLAMQIASIHNLAFYLWLAGEARKHIIAGDFSTWKPMMVKRVSTRL

SEQ ID NO: 52394 - protein, 376 aa, Bacteroides ovatus
  REGION 1..376: note = tr|A0A413EKI9|A0A413EKI9_BACOV Queuine tRNA-ribosyltransferase OS=Bacteroides ovatus OX=28116; GN = tgt PE=3 SV=1
MTFELQYTDTKSNARAGLITTDHGQIQTPIFMPVGTLGTVKGVHLTELKEDIQAQIILGNTYHLYLRPGLDVIEKAGGLHRFNGFDRPMLTDSGGFQVFSLAGIRKLREEGAEFRSHIDGSKHIFTPEKVMDIERTIGADIMMAFDECPPGDSDYEYAKKSLGLTHRWLDRCIQRFNETEPKYGYNQSLFPIVQGCVYPDLRKQSAEFVASKGADGNAIGGLAVGEPVDKMYEMIEIVNEILPKDKPRYLMGVGTPVNILEGVERGVDMFDCVMPTRNGRNGMLFTKDGIINMRNKKWETDFSPIEADGASCVDTLYSKAYLRHLFHAQELLAMQIASIHNLAFYLWLAGEARKHIIAGDFSTWKPMMVKRVSTRL

SEQ ID NO: 52395 - protein, 383 aa, unidentified
  source 1..383: note = [Bacteroides] pectinophilus
  REGION 1..383: note = tr|B7AQ83|B7AQ83_9FIRM Queuine tRNA-ribosyltransferase OS=[Bacteroides] pectinophilus ATCC 43243 OX=483218 GN=tgt PE=3 SV=1
MSEYRLLKTDGAAKRGEFHTVHGVIQTPVFMNVGTAAAIKGAVATTDLQEIGTQVELSNTYHLHVRPGDEIVKKMGGLHKFMNWDKPILTDSGGFQVFSLAGLRKIKEEGVTFNSHIDGRKIFMGPEESMQIQSNLGSTIAMAFDECAPSKSSRQYMQDSVDRTTRWLKRCVKEMDRLNSLPDTINKEQILFGINQGATYADIRIEHAKRIADLDLAGYAIGGLAVGETHEEMYDIIEHVVPYLPQNKPTYLMGVGTPANILEAVERGVDFFDCVYPSRNGRHGHVYTKFGKINLFNAKYECDAEPIEEGCRCPACRNYSRSYIRHLLKAKEMLGMRLCVLHNLYFYNHLMEDIRGAIDEGRYSEFKKERIELLKTYDNLNGN

SEQ ID NO: 52396 - protein, 383 aa, Bacteroides pectinophilus; identical to SEQ ID NO: 52395
  REGION 1..383: note = tr|R7A461|R7A461_9BACE Queuine tRNA-ribosyltransferase OS=Bacteroides pectinophilus CAG:437 OX=1263051 GN=tgt PE=3 SV=1

SEQ ID NO: 52397 - protein, 376 aa, Bacteroides plebeius
  REGION 1..376: note = tr|R5W2B1|R5W2B1_9BACE Queuine tRNA-ribosyltransferase OS=Bacteroides plebeius CAG:211; OX = 1263052 GN=tgt PE=3 SV=1
MKFELQYTDPKSNARAGLITTDHGQIETPIFMPVGTLGTVKGVHLHELKNDIKAQIILGNTYHLYLRPGLDIIEGAGGLHKFNGFDRPMLTDSGGFQVFSLSGIRKLREEGVEFRSHIDGSKHLFTPERVMDIERTIGADIMMAFDECAPGTSDYNYAKKSMELTHRWLDRCCARFNETEPKYGYNQSLFPIVQGCVYPDLRRQSAEYIASKNADGNAIGGLAVGEPTEKMYEMIEVVNEILPKDKPRYLMGVGTPVNILEGIERGVDMFDCVMPTRNGRNGMLFTKDGIMNMRNKKWENDYSPIEADGASYVDTMYSRAYLRHLFHAQELLAMQIASIHNLAFYLWLVGEARKHIIAGDFSTWKPAMVKRLSTRL

SEQ ID NO: 52398 - protein, 376 aa, Bacteroides plebeius
  REGION 1..376: note = tr|A0A415T5D9|A0A415T5D9_9BACE Queuine tRNA-ribosyltransferase OS=Bacteroides plebeius OX=310297; GN = tgt PE=3 SV=1
MKFELQYTDPKSNARAGLITTDHGQIETPIFMPVGTLGTVKGVHLHELKNDIKAQIILGNTYHLYLRPGLDIIEGAGGLHKFNGFDRPMLTDSGGFQVFSLSGIRKLREEGVEFRSHIDGSKHLFTPERVMDIERTIGADIMMAFDECAPGTSDYNYAKKSMELTHRWLDRCCARFNETEPKYGYNQSLFPIVQGCVYPDLRRQSAEYIASKNADGNAIGGLAVGEPTEKMYEMIEVVNEILPKDKPRYLMGVGTPVNILEGIERGVDMFDCVMPTRNGRNGMLFTKDGIMNMCNKKWENDYSPIEADGASYVDTMYSRAYLRHLFHAQELLAMQIASIHNLAFYLWLVGEARKHIIAGDFSTWKPAMVKRLSTRL

SEQ ID NO: 52399 - protein, 376 aa, Bacteroides pyogenes
  REGION 1..376: note = tr|A0A5D3EER4|A0A5D3EER4_9BACE Queuine tRNA-ribosyltransferase OS=Bacteroides pyogenes OX=310300; GN = tgt PE=3 SV=1
MTFELQHTDAKSNARAGLITTDHGQIQTPIFMPVGTLGSVKGVHLTELKEDIKAQIILGNTYHLYLRPGLDVIEKAGGLHRFNGFDRPMLTDSGGFQVFSLAGIRKLREEGAEFRSHIDGSKHVFTPEKVMDIERTIGADIMMAFDECPPGDSDYEYAKKSLGLTHRWLDRCIQRFNETEPKYGYRQSLFPIVQGCVYPDLRKQSAEFIASKEADGNAIGGLAVGEPVDKMYEMIELVNGILPKDKPRYLMGVGTPVNILEGIERGVDMFDCVMPTRNGRNGMLFTKDGIINMRNKKWETDFSPIEADGASVVDTLYSKAYLRHLFHAQELLAMQIASIHNLAFYLWLAGEARKHIIAGDFSTWKPMMVNKVSTRL

SEQ ID NO: 52400 - protein, 376 aa, Bacteroides pyogenes
  REGION 1..376: note = tr|A0A5D3FHT9|A0A5D3FHT9_9BACE Queuine tRNA-ribosyltransferase OS=Bacteroides pyogenes OX=310300; GN = tgt PE=3 SV=1
MTFELQHTDAKSNARAGLITTDHGQIQTPIFMPVGTLGSVKGVHLTELKEDIKAQIILGNTYHLYLRPGLDVIEKAGGLHRFNGFDRPMLTDSGGFQVFSLAGIRKLREEGAEFRSHIDGSKHVFTPEKVMDIERTIGADIMMAFDECPPGDSDYEYAKKSLGLTHRWLDRCIQRFNETEPKYGYRQSLFPIVQGCVYPDLRKQSAEFIASKEADGNAIGGLAVGEPVDKMYEMIELVNGILPKDKPRYLMGVGTPVNILEGIERGVDMFDCVMPTRNGRNGMLFTKDGIINMRNKKWETDFSPIEADGASVVDTLYSKAYLRHLFHAQELLAMQIASIHNLAFYLWLAGEARKHIIAGDFSTWKSIMVNKVSTRL

SEQ ID NO: 52401 - protein, 376 aa, unidentified
  source 1..376: note = Bacteroides reticulotermitis
  REGION 1..376: note = tr|W4UUW5|W4UUW5_9BACE Queuine tRNA-ribosyltransferase OS=Bacteroides reticulotermitis JCM 10512 OX=1445607 GN=tgt PE=3 SV=1
MTFELQHTDTKSNARAGLITTDHGQIETPIFMPVGTLGSVKGVHLTELKEDIQAQIILGNTYHLYLRPGLEVIEKAGGLHKFNGFDRPMLTDSGGFQVFSLAGIRKLSEEGAEFRSHIDGSKHLFTPEKVMDIERTIGADIMMAFDECPPGDSDYAYAKKSLGLTHRWLDRCIQRFNETEPKYGYKQSLFPIVQGCIYPDLRKESAEFIASKNADGNAIGGLAVGEPVEQMYEMIELVNEILPKEKPRYLMGVGTPVNLLEGIERGVDMFDCVMPTRNGRNGMLFTKDGIMNMRNKKWEMDYSPIEADGASYVDTMYSKAYLRHLFHAQELLAMQIASIHNLAFYLWLVGEARKHIIAGDFSTWKPRMVKQVSTRL

SEQ ID NO: 52402 - protein, 376 aa, Bacteroides salanitronis
  REGION 1..376: note = tr|F0QZZ4|F0QZZ4_BACSH Queuine tRNA-ribosyltransferase OS=Bacteroides salanitronis (strain DSM 18170 / JCM 13567 / BL78) OX=667015 GN=tgt; PE = 3 SV=1
MKFELQHTDPKSNARAGLITTDHGQIETPIFMPVGTLGSVKAVHLHELKEDIKAQIILGNTYHLYLRPGLEVLEAAGGLHKFNGFDRPMLTDSGGFQVFSLSGIRKLKEEGVEFRSHIDGSKHLFTPERVMDIERTIGADIIMAFDECTPGTAEYDYAKKSMELTHRWLDRCMARFNETEPKYGYNQSLFPIVQGCVYPDLRKRSAEYIASKNADGNAIGGLAVGEPTEKMYEMIEVVNEILPADKPRYLMGVGTPVNILEGIERGVDMFDCVMPTRNGRNGMLFTKDGIMNMRNKKWEKDYSPIEADGASYVDTMYSRAYLRHLFHAQELLALQIASIHNLAFYLWLVGEARKHIIAGDFTTWKPAMVKRISTRL

SEQ ID NO: 52403 - protein, 376 aa, Bacteroides salyersiae
  REGION 1..376: note = tr|I9HM37|I9HM37_9BACE Queuine tRNA-ribosyltransferase OS=Bacteroides salyersiae CL02T12C01 OX=997887 GN=tgt PE=3 SV=1
MTFELQYTDAKSNARAGLITTDHGQIQTPIFMPVGTLGTVKGVHLTELKEDIQAQIILGNTYHLYLRPGLDVIERAGGLHKFNGFDRPMLTDSGGFQVFSLAGIRKLREEGAEFRSHIDGSKHIFTPEKVMDIERTIGADIMMAFDECPPGDSDYAYAKKSLGLTHRWLDRCIQRFNETEPKYGYNQSLFPIVQGCVYTDLRKQSAEFVASKNADGNAIGGLAVGEPVDKMYEMIEVVNDILPKDKPRYLMGVGTPVNILEGIERGVDMFDCVMPTRNGRNGMLFTKDGIMNMRNKKWETDFSPIEADGASCVDTLYSKAYLRHLFHAQELLAMQIASIHNLAFYLWLVGEARKHIIAGDFSTWKPMMVKRVSTRL

SEQ ID NO: 52404 - protein, 376 aa, Bacteroides salyersiae; identical to SEQ ID NO: 52403
  REGION 1..376: note = tr|A0A4Q5FKV7|A0A4Q5FKV7_9BACE Queuine tRNA-ribosyltransferase OS=Bacteroides salyersiae; OX = 291644 GN=tgt PE=3 SV=1

SEQ ID NO: 52405 - protein, 376 aa, Bacteroides sartorii
  REGION 1..376: note = tr|R9I875|R9I875_9BACE Queuine tRNA-ribosyltransferase OS=Bacteroides sartorii OX=671267; GN = tgt PE=3 SV=1
MTFDLQYTDPKSNARAGLITTDHGQIETPIFMPVGTLGTVKGVHLHELKEDIKAQIILGNTYHLYLRPGLDIIERAGGLHKFNGFDRPMLTDSGGFQVFSLSGIRKMREEGVEFRSHIDGSKHLFTPERVMDIERTIGADIMMAFDECTPGTADYEYAKKSMQLTHRWLDRCIKHFNETDPKYGYQQSLFPIVQGCVYPDLRKQSAEYIASKGADGNAIGGLAVGEPTEKMYEMIEVVNEILPKDKPRYLMGVGTPVNILEGIERGVDMFDCVMPTRNGRNGMLFTKDGIMNMRNKKWEDDYAPIEAEGASYVDTMYSRAYLRHLFHAQELLAMQIASIHNLAFYLWLAGEARKHIIEGDFSTWKPMMVKRLSTRL

SEQ ID NO: 52406 - protein, 376 aa, Bacteroides sartorii
  REGION 1..376: note = tr|A0A4S2FIC5|A0A4S2FIC5_9BACE Queuine tRNA-ribosyltransferase OS=Bacteroides sartorii OX=671267; GN = tgt PE=3 SV=1
MTFDLQYTDPKSNARAGLITTDHGQIETPIFMPVGTLGTVKGVHLHELKEDIKAQIILGNTYHLYLRPGLDIIERAGGLHKFNGFDRPMLTDSGGFQVFSLSGIRKMREEGVEFRSHIDGSKHLFTPERVMDIERTIGADIMMAFDECTPGTADYEYAKKSMQLTHRWLDRCIKHFNETDPKYGYQQSLFPIVQGCVYPDLRKQSAEYIASKGADGNAIGGLAVGEPTEKMYEMIEVVNEILPKDKPRYLMGVGTPVNILEGIERGVDMFDCVMPTRNGRNGMLFTKDGIMNMRNKKWEDDYAPIEAEGASYVDTMYSRAYLRHLFHAQELLAMQIASIHNLAFYLWLAGEARKHIIEGDFSTWKQMMVKRLSTRL

SEQ ID NO: 52407 - protein, 376 aa, Bacteroides sp.
  REGION 1..376: note = tr|A0A285TCY7|A0A285TCY7_9BACE Queuine tRNA-ribosyltransferase OS=Bacteroides sp. AR29 OX=93975; GN = tgt PE=3 SV=1
MTFELQYTDSKTNARAGLITTDHGQIETPIFMPVGTVGTVKGVHLPELKEDIKAQIILGNTYHLYLRPGLEVIEKAGGLHKFNGFDRPMLTDSGGFQVFSLSGIRKLREEGAEFRSHIDGSKHIFTPEKVMDIERTIGADIMMAFDECPPGDSDYEYAKKSLGLTHRWLDRCIKRFNETEPKYGYQQSLFPIVQGCVYRDLREQSAEFVASKGADGNAIGGLAVGEPVDKMYEMIELVNGILPKDKPRYLMGVGTPVNILEGIERGVDMFDCVMPTRNGRNGMLFTKDGIMNMRNKKWEMDFSPIEADGASYVDTMYSKAYLRHLFHAQELLAMQIASIHNLAFYLWLAGEARKHIIAGDFATWKPMMVKRVSTRL

SEQ ID NO: 52408 - protein, 376 aa, Bacteroides sp.
  REGION 1..376: note = tr|A0A4P6RLK2|A0A4P6RLK2_9BACE Queuine tRNA-ribosyltransferase OS=Bacteroides sp. A1C1 OX=2528203; GN = tgt PE=3 SV=1
MTFELQYTDSKTNARAGLITTDHGQIETPIFMPVGTVGTVKGVHLPELKEDIKAQIILGNTYHLYLRPGLEVIEKAGGLHKFNGFDRPMLTDSGGFQVFSLSGIRKLREEGAEFRSHIDGSKHIFTPEKVMDIERTIGADIMMAFDECPPGNSDYEYAKKSLGLTHRWLDRCIKRFNETEPKYGYQQSLFPIVQGCVYRDLREQSAEFVASKGADGNAIGGLAVGEPVDKMYEMIELVNGILPKDKPRYLMGVGTPVNILEGIERGVDMFDCVMPTRNGRNGMLFTKDGIMNMRNKKWEMDFSPIEADGASYVDTMYSKAYLRHLFHAQELLAMQIASIHNLAFYLWLAGEARKHIIAGDFATWKPMMVKRVSTRL

SEQ ID NO: 52409 - protein, 376 aa, Bacteroides stercorirosoris; identical to SEQ ID NO: 52392
  REGION 1..376: note = tr|A0A1M6FXG5|A0A1M6FXG5_9BACE Queuine tRNA-ribosyltransferase OS=Bacteroides stercorirosoris; OX = 871324 GN=tgt PE=3 SV=1

SEQ ID NO: 52410 - protein, 376 aa, Bacteroides stercoris
  REGION 1..376: note = tr|A0A413B9V5|A0A413B9V5_BACSE Queuine tRNA-ribosyltransferase OS=Bacteroides stercoris OX=46506; GN = tgt PE=3 SV=1
MTFELQYTDSKTNARAGLITTDHGQIETPIFMPVGTLGTVKGVHLTELKEDIKAQIILGNTYHLYLRPGLDVIEKAGGLHKFNGFDRPMLTDSGGFQVFSLAGIRKLREEGAEFRSHIDGSKHIFTPERVMDIERTIGADIMMAFDECTPGDAEYAYAKKSMEMTHRWLDRCITRFNETEPKYGYHQALFPIVQGCVYSDLRKRSAEFIASKGAEGNAIGGLAVGEPTEKMYEMIELVNEILPKDKPRYLMGVGTPVNILEGIERGVDMFDCVMPTRNGRNGMLFTKDGIINMRNKKWETDFSPIEADGASYVDTLYSKAYLRHLFHAQELLAMQIASIHNLAFYLWLAGEARKHIIAGDFSTWKPMMVQRVSTRL

SEQ ID NO: 52411 - protein, 376 aa, Bacteroides stercoris
  REGION 1..376: note = tr|B0NPL2|B0NPL2_BACSE Queuine tRNA-ribosyltransferase OS=Bacteroides stercoris ATCC 43183 OX=449673 GN=tgt PE=3 SV=1
MTFELQYTDSKTNARAGLITTDHGQIETPIFMPVGTLGTVKGVHLTELKEDIKAQIILGNTYHLYLRPGLDVIEKAGGLHKFNDFDRPMLTDSGGFQVFSLAGIRKLREEGAEFRSHIDGSKHIFTPERVMDIERTIGADIMMAFDECTPGDAEYAYAKKSMEMTHRWLDRCITRFNETEPKYGYHQALFPIVQGCVYPDLRKRSAEFIASKGAEGNAIGGLAVGEPTEKMYEMIELVNEILPKDKPRYLMGVGTPVNILEGIERGVDMFDCVMPTRNGRNGMLFTKDGIINMRNKKWETDFSPIEADGASYVDTLYSKAYLRHLFHAQELLAMQIASIHNLAFYLWLAGEARKHIIAGDFSTWKPMMVQRVSTRL

SEQ ID NO: 52412 - protein, 376 aa, Bacteroides thetaiotaomicron
  REGION 1..376: note = tr|R9HDJ0|R9HDJ0_BACT4 Queuine tRNA-ribosyltransferase OS=Bacteroides thetaiotaomicron dnLKV9 OX=1235785 GN=tgt PE=3 SV=1
MTFELQYTDTKSNARAGLITTDHGQIQTPIFMPVGTLGTVKGVHVTELKEDIQAQIILGNTYHLYLRPGLDVIEKAGGLHRFNGFDRPMLTDSGGFQVFSLAGIRKLREEGAEFRSHIDGSKHIFTPEKVMDIERTIGADIMMAFDECPPGDSDYAYAKKSLGLTHRWLDRCIQRFNETEPKYGYNQSLFPIVQGCVYQDLRKQSAEFVASKGADGNAIGGLAVGEPVDKMYEMIEVVNEILPKDKPRYLMGVGTPVNILEGIERGVDMFDCVMPTRNGRNGMLFTKDGIINMRNKKWETDFSPIEADGASAVDTLYSKAYLRHLFHAQELLAMQIASIHNLAFYLWLVGEARKHIIAGDFSTWKPMMVKRVSTRL

SEQ ID NO: 52413 - protein, 376 aa, Bacteroides thetaiotaomicron; identical to SEQ ID NO: 52412
  REGION 1..376: note = tr|A0A0P0FNC9|A0A0P0FNC9_BACT4 Queuine tRNA-ribosyltransferase OS=Bacteroides thetaiotaomicron; OX = 818 GN=tgt PE=3 SV=1

SEQ ID NO: 52414 - protein, 376 aa, Bacteroides uniformis; identical to SEQ ID NO: 52407
  REGION 1..376: note = tr|A7UZB8|A7UZB8_BACUC Queuine tRNA-ribosyltransferase OS=Bacteroides uniformis (strain ATCC 8492 / DSM 6597 / CIP 103695 / JCM 5828 / NCTC 13054 / VPI 0061) OX=4114 79 GN=tgt PE=3 SV=1

SEQ ID NO: 52415 - protein, 376 aa, Bacteroides uniformis
  REGION 1..376: note = tr|A0A174N790|A0A174N790_BACUN Queuine tRNA-ribosyltransferase OS=Bacteroides uniformis OX=820; GN = tgt PE=3 SV=1
MTFELQYTDSKTNARAGLITTDHGQIETPIFMPVGTVGTVKGVHLPELREDIKAQIILGNTYHLYLRPGLEVIEKAGGLHKFNGFDRPMLTDSGGFQVFSLSGIRKLREEGAEFRSHIDGSKHIFTPEKVMDIERTIGADIMMAFDECPPGDSDYEYAKKSLGLTHRWLDRCIKRFNETEPKYGYQQSLFPIVQGCVYRDLREQSAEFVASKGADGNAIGGLAVGEPVDKMYEMIELVNGILPKDKPRYLMGVGTPVNILEGIERGVDMFDCVMPTRNGRNGMLFTKDGIMNMRNKKWEMDFSPIEADGASYVDTMYSKAYLRHLFHAQELLAMQIASIHNLAFYLWLAGEARKHIIAGDFATWKPMMVKRVSTRL

SEQ ID NO: 52416 - protein, 376 aa, Bacteroides vulgatus; identical to SEQ ID NO: 52369
  REGION 1..376: note = tr|A0A069SPZ2|A0A069SPZ2_BACVU Queuine tRNA-ribosyltransferase OS=Bacteroides vulgatus str. 3975 RP4 OX=1339352 GN=tgt PE=3 SV=1

SEQ ID NO: 52417 - protein, 376 aa, Bacteroides vulgatus; identical to SEQ ID NO: 52369
  REGION 1..376: note = tr|A0A174Q0G0|A0A174Q0G0_BACVU Queuine tRNA-ribosyltransferase OS=Bacteroides vulgatus OX=821; GN = tgt PE=3 SV=1

SEQ ID NO: 52418 - protein, 376 aa, Bacteroides xylanisolvens
  REGION 1..376: note = tr|D6D6Y4|D6D6Y4_9BACE Queuine tRNA-ribosyltransferase OS=Bacteroides xylanisolvens XB1A; OX = 657309 GN=tgt PE=3 SV=1
MTFELQYTDTKSNARAGLITTDHGQIQTPIFMPVGTLGTVKGVHLTELKEDIQAQIILGNTYHLYLRPGLDVIEKAGGLHRFNGFDRPMLTDSGGFQVFSLAGIRKLREEGAEFRSHIDGSKHVFTPEKVMDIERTIGADIMMAFDECPPGDSDYEYAKKSLGLTHRWLDRCIQRFNETEPKYGYNQALFPIVQGCVYPDLRKQSAEFIASKGADGNAIGGLAVGEPVDKMYEMIEIVNEILPKDKPRYLMGVGTPVNILEGIERGVDMFDCVMPTRNGRNGMLFTKDGIINMRNKKWETDFSPIEADGASSVDTLYSKAYLRHLFHAQELLAMQIASIHNLAFYLWLAGEARKHIIAGDFSTWKPMMVKRVSTRL

SEQ ID NO: 52419 - protein, 376 aa, Bacteroides xylanisolvens; identical to SEQ ID NO: 52418
  REGION 1..376: note = tr|I9AGJ4|I9AGJ4_9BACE Queuine tRNA-ribosyltransferase OS=Bacteroides xylanisolvens CL03T12C04 OX=997892 GN=tgt PE=3 SV=1

SEQ ID NO: 52420 - protein, 380 aa, Bacteroides xylanolyticus
  REGION 1..380: note = tr|A0A2S6HZJ4|A0A2S6HZJ4_9BACE Queuine tRNA-ribosyltransferase OS=Bacteroides xylanolyticus; OX = 384636 GN=tgt PE=3 SV=1
MNYKIIAKDGRAKRAEVTTVHGTIQTPVFMNVGTVAAIKGAVSTDDLREIKTQVELSNTYHLHVRTGDRLIKEFGGLHQFMNWDRPILTDSGGFQVFSLTGLRKIKEEGVYFQSHIDGHKIFMGPEESMQIQSNLASTIAMAFDECPPHPATREYMQNSVDRTTRWLERCRKEMARLNELPDTINKDQLLFGINQGGTFEDIRIAHAKTISAMDLDGYALGGLAVGESHSEMYRILDETVPYLPENKPTYLMGVGTPANILEGVDRGVDFFDCVYPSRNGRHGHVYTNHGKLNLFNSKFELDHKPIEEGCQCPACRSYSRAYIRHLLKAKEMLGMRLCVLHNLYFYNTMMEEIREAIENHRYGEYKERKLSGMMAGGSEA

SEQ ID NO: 52421 - protein, 376 aa, unidentified
  source 1..376: note = Bacteroides zoogleoformans
  REGION 1..376: note = tr|A0A562V628|A0A562V628_9BACE Queuine tRNA-ribosyltransferase OS=Bacteroides zoogleoformans; OX = 28119 GN=tgt PE=3 SV=1
MTFELQYTDSKTNARAGLLTTDHGQIATPIFMPVGTVGTVKGVHIPELKDDIKAQIILGNTYHLYLRPGLEVIEKAGGLHKFNGFDRPMLTDSGGFQVFSLSDIRKLREEGAEFRSHIDGSKHIFTPEKVMDIERTIGADIMMAFDECPPGNSDYEYAKRSLGLTHRWLDRCIKRFNETEPKYGYRQSLFPIVQGCVYRDLRTQSAEFVASKEADGNAIGGLAVGEPVDKMYEMIELVNGILPKDKPRYLMGVGTPVNILEGIERGVDMFDCVMPTRNGRNGMLFTKDGIINMRNKKWETDFSPIEADGASYVDALYSKAYLRHLFHAQELLAMQIASIHNLAFYLWLVGEARKHIIAGDFATWKPMMVKRVSTRL

SEQ ID NO: 52422 - protein, 376 aa, unidentified
  source 1..376: note = Bacteroidetes bacterium
  REGION 1..376: note = tr|A0A1F3NG29|A0A1F3NG29_9BACT Queuine tRNA-ribosyltransferase OS=Bacteroidetes bacterium RBG_13_43_22 OX=1797356 GN=tgt PE=3 SV=1
MMFRIYSRDKESKARAGILTTQHGEIPTPIFMPVGTGGTVKGILQRDLVGEIDAKIILGNTYHLYLRPGTAIIKAAGGLHKFMSWELPILTDSGGYQVFSLSGNRKLNDNGAVFKSHIDGSEHIFTPENTIDIQRIIGSDIMMVLDECAPFPCDHKYAKKSVALTHHWLDRAVESFRNTEPLWGFEQVLFPIVQGGIFDDLRKISAEKIAEAGMAGNAIGGLSVGEPPEEMYRTIEIVNDILPDDKPRYLMGVGTPVNILEAIERGVDMFDCVMPTRNGRNGMLFTSEGIINIKNNKWSDDFSPIDPAGPSSVSLEYSRAYLRHLIISGEILGSQISSIHNLAFYLSLVKEAREQIIKGNFRKWKETKIKILSERL

SEQ ID NO: 52423 - protein, 376 aa, unidentified
  source 1..376: note = Bacteroidetes bacterium
  REGION 1..376: note = tr|A0A1J5M009|A0A1J5M009_9BACT Queuine tRNA-ribosyltransferase OS=Bacteroidetes bacterium MedPE-SWsnd-G1 OX=1860094 GN=tgt PE=3 SV=1
MKFDLKGKDLQSKARAGVVTTDHGKIETPIFMPVGTVGTVKGVHQTELKEQINPDIILGNTYHLYLRPKTDILKQAGGLHKFMNWDRPILTDSGGYQVYSLSGRRKIKEEGVKFKSHIDGSYHFFSPEYAMDIQRDIGGDIIMAFDECTPYPCDYNYAKRSMHMTHRWLKRCISHLEKTPMTYDYNQTFFPIVQGSTYTDLRKQSAEFIASVEAEGNAIGGLSVGEPAEEMYEMTDVVCSILPEDKPRYLMGVGTPINILENIALGVDMFDCVMPTRNARNGMLFTAHGSINIKNKKWENDFSPIDEMGITEVDTYYSKAYLRHLFAAKELLGKQIATIHNLGFYMWLVREARKHILAGDFVVWKNKMVNQMSNRL

SEQ ID NO: 52424 - protein, 376 aa, unidentified
  source 1..376: note = Bacteroidetes oral
  REGION 1..376: note = tr|D7JDJ9|D7JDJ9_9BACT Queuine tRNA-ribosyltransferase OS=Bacteroidetes oral taxon 274 str. F0058 OX=575590 GN=tgt PE=3 SV=1
MIFDLEHKDTQTRARAGRITTEHGEIQTPIFMPVGTVGSVKAVHMQELRRDIDAQIILGNTYHLFMRPGLEIIEQAGGLHRFNGWDRPILTDSGGYQVFSLAGTRKIKEEGVTFQSHIDGSRHLFTPENVVDIQRTIGADIVMAFDECTPGNADYDYARLSMERTHRWLARGYGHFLETEPKYGYSQTFFPIVQGCVYEDLRRQSAEFVRGFDAEGYAIGGLAVGEPTEKMYEMVELVNGILPEDRPRYLMGVGTPANILENIARGVDMFDCVMPTRNGRNGMIFTEEGIINFKNRKWATDFSPIQEGTGCFVDEQYTKAYLRHLFVAGELLAMQIASIHNLAFYLRLVRQARQRIVDGTFGDWYKEMAVKTMRRL

SEQ ID NO: 52425 - protein, 376 aa, unidentified
  source 1..376: note = Bacteroidetes sp.
  REGION 1..376: note = tr|A0A3N0ZFW9|A0A3N0ZFW9_9BACT Queuine tRNA-ribosyltransferase OS=Bacteroidetes/Chlorobi group bacterium Naka2016 OX=2382229 GN=tgt PE=3 SV=1
MKTFFRVEKIADDCKARAGFLKLNGIEIPTPVFMPVGTYGTVKAMLPSSLYELDYKLILGNTYHLYLRPGLDVIKHFEGLHNFINWKNCILTDSGGYQVFSLQSFRKLSEEGVEFSSHIDGSKHFFTPESVVQHQRVLGSDIMMILDDCVEYPADYGRVEESVERTYNWAVRSLKEFANSEPLWGRKQFIFGIVQGGTFPDLRRRSLGGLLSLQFDGYAIGGLSVGEPEEKMYEITSLCTDLLPIDKPRYLMGVGTPQNILECIELGVDMFDCVLPTRNGRNGQIFTTRGKINIRNAKYKFSKEPIDPGLNNEISQNFTIGYLRHLFIADEILGLQLATYQNLAFYKWLVATAREKILSGLFRYWKNNLILNFKEN

SEQ ID NO: 52426 - protein, 377 aa, unidentified
  source 1..377: note = Bacteroidetes sp.
  REGION 1..377: note = tr|A0A3N0ZPE2|A0A3N0ZPE2_9BACT Queuine tRNA-ribosyltransferase OS=Bacteroidetes/Chlorobi group bacterium MS-B_bin-24 OX=2382228 GN=tgt PE=3 SV=1
MTEAFFKVVGTSSECKARAGVLNLNGIEIPTPVFMPVGTYGTVKALMHITVSELGYNLILGNTYHLYLRPGTEVIEHFGGLHSFIHWNKGILTDSGGYQIFSLQSFRKFTDEGVEFRSHLDGSKHFFTPEKVIEIQRIFGSDIVMVLDDCTEYPVEYSQAEESLNRTIQWAKRSKESFESTSPRWNRMQYLFGIIQGATFPELRRKSIEELISLQFDGYAIGGLSVGEPENLMYEITDFCTNLLPTEKPRYLMGVGTPSNILNCIELGIDMFDCVLPTRNARNGQIFTTRGKINIRNAKYRFSKESIDPGLDNEISKEFSLGYLRHLFIAEEILGLTLATYQNLAFYKWLVSTAREKILSDDFRQGKNKLILNFEKE

SEQ ID NO: 52427 - protein, 376 aa, unidentified
  source 1..376: note = Bacteroidia bacterium
  REGION 1..376: note = tr|A0A1Q3QHC0|A0A1Q3QHC0_9BACT Queuine tRNA-ribosyltransferase OS=Bacteroidia bacterium 43-41; OX = 1895720 GN=tgt PE=3 SV=1
MKFELQHTDSSSSARAGLITTDHGQIETPVFMPVGTVGSVKAVQMTELKDDIKAQIILGNTYHLYLRPGLEIMQLAGGLHKFNSWDRPILTDSGGFQVFSLAENRKLNEEGAEFRSHIDGSKHFFTPEKAVDIQRIIGADIMMAFDECTPGDADYGYAEKSLDLTERWLKRCIGRFNETECPYGYKQTLFPIVQGCVYPDLRRRAAEYVASFEADGNAIGGLAVGEPTEKMYEMVELVNEILPKDKPRYLMGVGTPANLLEAIERGVDMFDCIMPTRNGRNGQIFTKNGILNMRNERWKDDFSPIEEEGASYVDTLYSKAYLRHLINMNEILGLQIASVHNLAFYTWLMREARKHIIEGDFTAWKRIMAERTMQRL

SEQ ID NO: 52428 - protein, 356 aa, unidentified
  source 1..356: note = Bacteroidia bacterium
  REGION 1..356: note = tr|A0A524NSQ5|A0A524NSQ5_9BACT Queuine tRNA-ribosyltransferase (Fragment) OS=Bacteroidia bacterium OX=2044936 GN=tgt PE=3 SV=1
TDHSEIPTPVFMPVGTAGSVKGVHQRELLSDIEAPIILGNTYHLYLRPGLEVLQGAGGLHKFMNWDRSILTDSGGYQVFSLAANRKLKPEGAHFSSHIDGSKHLFTPENIVDIQRIIGADIMMAFDECTPWPCDHKYAKDSLKLTHDWFERGLKQFHATEPLYGHSQAFFPIVQGSVYKDLRRESAEFVAERNAEGNAIGGLSVGEPAEEMYAMLEVVNGVLPADKPRYLMGVGTPVNILEAISRGVDMFDCVMPTRNGRNGMLFTAEGIINMRNRKWMEDYSPIDPAAYCFVDTQYSRAYLRHLIISGEMLGAQIASLHNLAFYLWLVRKAFEEIKSGTFTAWKEKMIPVLSTRL

SEQ ID NO: 52429 - protein, 399 aa, unidentified
  source 1..399: note = Baekduia soli
  REGION 1..399: note = tr|A0A5B8U4L0|A0A5B8U4L0_9ACTN Queuine tRNA-ribosyltransferase OS=Baekduia soli OX=496014 GN=tgt; PE = 3 SV=1
MPAPLQILARDPGSRARAGILSTGHGDVRTPAFVPLATKATVKGLVPAEVRDLGYDMVLGNTYHLFLDPGHDRIERFGGLHEFMRWDQPIITDSGGFQVFSMGHGTVADEIKGRAAHGGQRHGKTLEITEDGVRFRSHIDGSQRFLAPETSMEIQASLRSDIALVFDECTPFNVTRDYTARSTERTHRWLQRCLDWHGRHGPEGQLVYGIVQGGVHEDLRKASAETIAASGADGIAIGGSLGADKPQMYEVVDWATSVLGGAAETAPRHLLGIGDIDDLIRGVELGIDTFDCAMPTRLGRHGVALIPAPDRRWRVDLTASRWRDSDEPIFDGCPCPTCAAGNTRGYLRYLVANRELTGLRLLVVHNLAFVRRLMTRLRDAVLEGRLAEEAAALRGGAAP

SEQ ID NO: 52430 - protein, 378 aa, unidentified
  source 1..378: note = Baia soyae
  REGION 1..378: note = tr|A0A4R2S064|A0A4R2S064_9BACL Queuine tRNA-ribosyltransferase OS=Baia soyae OX=1544746 GN=tgt; PE = 3 SV=1
MAVRYELLKQCKQSGARLGRLHTPHGVIETPIFMPVGTLATVKTMSPEELKEMDAQIILSNTYHLFIRPGHEIVKEAGGLHKFMNWDRPILTDSGGFQVFSLGDLRKITEEGVQFRSHLSGEKLFLSPEKAMEIQNALGADIIMAFDECPPYPAEYEYVKNSTERTYRWLKRCKEAHGRPEDQALFGIVQGGEYRELREESARQLVDLDLPGYAVGGLSVGEPHEMMFEILGYTTPLLPKDKPRYLMGVGSPEALIQGAILGIDMFDCVLPTRIARNGTTMTSEGRLVVRNAKFTRDFGPLDPNCDCYTCRNYSRAYLRHLIKADETFGLRLTTYHNLYFLLNLMHQVRQAIMEDRLLDFRDEFMMKYYGTLNPVQKF

SEQ ID NO: 52431 - protein, 372 aa, Balnearium lithotrophicum
  REGION 1..372: note = tr|A0A521DY41|A0A521DY41_9BACT Queuine tRNA-ribosyltransferase OS=Balnearium lithotrophicum; OX = 223788 GN=tgt PE=3 SV=1
MEFSVVREDGRARFGILKGTHGVTETPCFMPVGTLGAVKGVTWEDIKRMGYHLVLSNVYHLYLRPGLEIIKEAGGIHKFTGWNELILTDSGGFQVFSLGKLMKLTEEGVFFKSHIDGSEHFFTPEFVVKFEEEIGVDIGMVLDECTPYPATYEYAEHSMERTVRWAERSINSRTTDKTALFGIVQGGVYDDLRLRCVEKLVKLPFDGYAIGGLSVGEPKEEMYRITKLVAPQLPKDKPRYLMGVGTPLDILEAVESGVDMFDCVMPTRNARNGTLFTSYGKVNIKKAKYKNDFTPLDPECDCYTCKNFTKAYLRHLYVTGNVNSVILNTIHNLHFYEKLMEKIRDSIKEEKFSEFKVDFLRKFKGDKSQISR

SEQ ID NO: 52432 - protein, 376 aa, Balneola sp.
  REGION 1..376: note = tr|A0A2D7AEX9|A0A2D7AEX9_9BACT Queuine tRNA-ribosyltransferase OS=Balneola sp. OX=2024824 GN=tgt; PE = 3 SV=1
  VARIANT 136: note = Xaa can be any naturally occurring amino acid
  VARIANT 141: note = Xaa can be any naturally occurring amino acid
  VARIANT 322: note = Xaa can be any naturally occurring amino acid
MLFQLHTTCSTSKARLGSLTTDHGVIETPIFMPVGTLGTVKGVSQDRLKDPIQAQIILGNTYHLYLRPGTEVIQASGGLHGFMNWDRPILTDSGGYQIFSLSDIRTLDEEGAHFKSHLDGSKHLFTPENVVDIQRXLGSDXMMILDECPPYPSDYAYAKNSMELTHRWAKRGRKQFLETQALYGHRQFQFGIVQGGTYKDLRIASAEFMAEQNFEGIAIGGLSVGEPIPLLYEMTDVNTDVMPKEKARYLMGVGTPANLLESIARGVDMFDCVMPTRNARNGTIFTREGKVNLRNSKWKNHHSPLDPDFPSDLCQKYHMSYXHHLLKSNELFGMTLASEHNLQFYLWLMKEVREHIKNDTFASWYPHMVTQLESKI

SEQ ID NO: 52433 - protein, 375 aa, Balneola sp.
  REGION 1..375: note = tr|A0A2D9FQN4|A0A2D9FQN4_9BACT Queuine tRNA-ribosyltransferase OS=Balneola sp. OX=2024824 GN=tgt; PE = 3 SV=1
MYSLKSTASTTKARLGELQTDHGKIETPIFMPVGTLATVKAVSQDVLKQQVKAQIILGNTYHLYLRPGLDIMKGAGGLHEFMKWDRPILTDSGGYQIFSLSDIRELDEEGAHFRSHIDGSKHTFTPENVVDIQRILGSDIMMLLDECPPYPSSYEYAKNSMELTHRWAKRGRKAFLETEPLYGHKQAQFGIVQGGTYKDLRIESTKFMADQDFEGIAIGGLSVGEPIEMMYEFTDLNTDYLPKDKARYLMGVGTPANLLEGVARGVDMFDCVMPTRNARNGTIFTRNGRVNIKNAQWKDHHDFLDADFSSDLCSKYTMAYVHHLFRNDELFGLELASIHNLTFYLWLMEEVRARIANDTFGEWYPGMVKQLEQRI

SEQ ID NO: 52434 - protein, 375 aa, unidentified; identical to SEQ ID NO: 52433
  source 1..375: note = Balneolaceae bacterium
  REGION 1..375: note = tr|A0A356X267|A0A356X267_9BACT Queuine tRNA-ribosyltransferase OS=Balneolaceae bacterium; OX = 2053516 GN=tgt PE=3 SV=1

SEQ ID NO: 52435 - protein, 108 aa, unidentified
  source 1..108: note = Balneolaceae bacterium
  REGION 1..108: note = tr|A0A3D1GBH2|A0A3D1GBH2_9BACT tRNA guanosine(34) transglycosylase Tgt (Fragment) OS=Balneolaceae bacterium; OX = 2053516 GN=tgt PE=4 SV=1
MFDCVMPTRNARNGMIFTRHGKVNIRNAKWKDHHEVLDADFPSDLANTYTMSYVHHLIKANEIFGLTLASLHNLTFYLWLMEQIRKHIKNDTFAEWYPKMVKQVDQKI

SEQ ID NO: 52436 - protein, 376 aa, Barnesiella intestinihominis
  REGION 1..376: note = tr|K0X403|K0X403_9BACT Queuine tRNA-ribosyltransferase OS=Barnesiella intestinihominis YIT 11860 OX=742726 GN=tgt PE=3 SV=1
MDFELVHTDECTHARAGVITTDHGKIQTPIFMPVGTVASVKAVHQRELRDDIKAQIILGNTYHLYLRPGLDILRQAGGLHRFNGWERPILTDSGGFQVFSLSDRRKLTEEGAHFRSHIDGSKHLFTPENVVDTQRIIGADIMMALDECTPGDADYDYAKKSLALTRRWLDRGWKHFCETEGLYGYKQTFFPIVQGCVYPDLRIEAAKHVADLGADGNAIGGLAVGEPTEKMYEMIEVVNEVLPQDKPRYLMGVGTPANILEGIERGVDMFDCVMPTRNGRNGMLFTRNGIMNMRNKKWADDFSPLDPEGTSYVDTCYSKAYLRHLFISEEILAMQIASIHNLAFYVWLTQEARRQILAGTFKSWKDEMICRVTTRL

SEQ ID NO: 52437 - protein, 376 aa, Barnesiella sp.
  REGION 1..376: note = tr|A0A1Y4GUV7|A0A1Y4GUV7_9BACT Queuine tRNA-ribosyltransferase OS=Barnesiella sp. An22 OX=1965590; GN = tgt PE=3 SV=1
MDFELIHTDERSSARAGVITTDHGTILTPIFMPVGTVASVKAVHQRELRDDIKAQIILGNTYHLYLRPGLDILHKAGGLHKFNGWERPILTDSGGFQVFSLSDRRKLTEEGAHFRSHIDGSKHLFTPENVVDTQRIIGSDIMMALDECTPGDADYDYAKKSLALTRRWLDRGWKHFCETEGLYGYRQTFFPIVQGCVYRDLRTEAAKHVADLGADGNAIGGLAVGEPTEKMYEMIEVVNDILPQDKPRYLMGVGTPANILEGIERGVDMFDCVMPTRNGRNGMLFTRNGIMNMRNKKWADDFSPIDPEGTSFVDTCYSKAYLRHLFISEEILAMQIASIHNLAFYVWLTQEARRQILAGTFKPWKDEMVRRVTTRL

SEQ ID NO: 52438 - protein, 376 aa, Barnesiella sp.
  REGION 1..376: note = tr|A0A4Y9J4C8|A0A4Y9J4C8_9BACT Queuine tRNA-ribosyltransferase OS=Barnesiella sp. WM24 OX=2558278; GN = tgt PE=3 SV=1
MDFKLIATDKASNARAGLITTDHGEIETPIFMPVGTAGTVKAVHQRELADDIHAQIILGNTYHLYLRPGTDIIHKAGGLHKFNGWNKPILTDSGGFQVFSLSSNRKLKEEGAWFRSHIDGSKHLFTPENVVDIQRIIGSDIMMALDECPPGTSDYDYAKKSLGLTLRWLKRGWDRYKSTEGLYGHSQAYFPIVQGCTYPDLRRESAKFVADLGADGNAIGGLAVGEPAEVMYDMIEVVNEILPSDKPRYLMGVGTPANILEAIDRGVDMMDCVMPTRNGRNGMLFTAHGIMNMRNKKWADDFSPLQEDGPSYVDRFYTKAYVRHLFVADEILAMQIASIHNLAFYLWLVGEARRHIIAGDFKSWKTEMVERVTRRL

SEQ ID NO: 52439 - protein, 376 aa, Barnesiella viscericola
  REGION 1..376: note = tr|W0ERC6|W0ERC6_9BACT Queuine tRNA-ribosyltransferase OS=Barnesiella viscericola DSM 18177 OX=880074 GN=tgt PE=3 SV=1
MNFELIHTDERSHARAGVITTDHGTILTPIFMPVGTVASVKAVHQRELRDDIKAQIILGNTYHLYLRPGLDILHKAGGLHKFNGWERPILTDSGGFQVFSLSDRRKLTEEGAHFRSHIDGSKHLFTPENVVDTQRIIGSDIMMALDECTPGDADYDYAKKSLALTRRWLDRGWKHFCETEGLYGYRQTFFPIVQGCVYRDLRTEAAKHVADLGADGNAIGGLAVGEPTEKMYEMIEVVNDILPQDKPRYLMGVGTPANILEGIERGVDMFDCVMPTRNGRNGMLFTRNGIMNMRNKKWADDFSPIDPEGTSYVDTCYSKAYLRHLFISEEILAMQIASIHNLAFYVWLTQEARRQILAGTFKPWKDEMVRRVTTRL

SEQ ID NO: 52440 - protein, 372 aa, Bartonella alsatica
  REGION 1..372: note = tr|J1IX53|J1IX53_9RHIZ Queuine tRNA-ribosyltransferase OS=Bartonella alsatica IBS 382; OX = 1094551 GN=tgt PE=3 SV=1
MIKTFHYRKIAQDGYARRGEIITGRGCIRTPAFMPVGTAGTVKAMYMDQLRALGADIILGNTYHLMLRPGAERVARLGGLHEFSRWPGPILTDSGGFQVMSLAGIRKITEQGVIFRSYINGTYYEMSPERSIEIQGLLNSDIQMQLDQCIALPASEKEIESAMELSLRWAQRCKTAFGKQPDKALFGIVQGGDNMKLRERSAQALKEMDLKGYAIGGLAVGEPQSVMIAVLDATCPMLPEDKPRYLMGVGTPDDILKSVARGIDMFDCVMPTRAGRHGLAFTRFGRVNLRNARYAEDRHPLDPQSLCPAAYDYSCAYLHHLIKSGESLGGMLLTWNNLFYYQQLMQEIRDAIEEGCYADFCAETRALWTQGR

SEQ ID NO: 52441 - protein, 377 aa, unidentified
  source 1..377: note = Bartonella ancashensis
  REGION 1..377: note = tr|A0A0M5KSN7|A0A0M5KSN7_9RHIZ Queuine tRNA-ribosyltransferase OS=Bartonella ancashensis; OX = 1318743 GN=tgt PE=3 SV=1
MTKVFHYKKIAQDGNARLGEIITGRGRIRTPAFMPVGTAGSVKAMYMDQLRDLGTDVILGNTYHLMLRPGAERVARLGGLHEFARWPEPILTDSGGFQVMSLSGICKITEKGAIFRSYISGAYYEMSPERSIEIQGLLDSDIQMQLDQCIALPAKEKEIEAAMELSLRWAQRCKTAFGNQAEKAMFGIVQGGDNIRLREYSAQALKEMNLKGYAIGGLAVGEPQNVMIDVLDATCPILPQDKPRYLMGVGTPDDILKSVARGIDMFDCVMPTRAGRHGLAFTRFGKINLRNARYAEDSRPLDIQSSCPATRDYSRAYLHHLIKSGESLGGMLLTWNNLAYYQQLMQDIRAAIEAKYYASFCDQTTFLWKHGCEVSTQ

SEQ ID NO: 52442 - protein, 375 aa, unidentified
  source 1..375: note = Bartonella apis
  REGION 1..375: note = tr|A0A1U9MC15|A0A1U9MC15_9RHIZ Queuine tRNA-ribosyltransferase OS=Bartonella apis OX=1686310; GN = tgt PE=3 SV=1
MSETFTFKKITEDGHARRGEITMPRGKVRTPAFMPVGTAGSVKAMYMEQVEELGADIILGNTYHLMLRPGAERIARLGGLHVFARWPKPILTDSGGFQVMSLAGLRKLTEKGVTFQSHIDGARYELTPERSIEIQCLLDSDIQMQLDQCVALPASFKEMEKAMELSLRWAERCKTAFGDQPGKAMFGIVQGGDNASLRERSAHALKDLDLKGYSIGGLAVGEPQNVMMDMLDVTCSILPQDKPRYLMGVGTPDDILKSVAHGVDMFDCVMPTRAGRHGLAFTRFGKINLRNAKHAEDPRPLDPQSSCPAARDYSRAYLHHLVKAGEPLAGMVITWNNLAFYQQLMQGIRDAIEAHRYADFVAEVTEEWNRGDRAD

SEQ ID NO: 52443 - protein, 375 aa, unidentified
  source 1..375: note = Bartonella apis
  REGION 1..375: note = tr|A0A1R0F6T2|A0A1R0F6T2_9RHIZ Queuine tRNA-ribosyltransferase OS=Bartonella apis OX=1686310; GN = tgt PE=3 SV=1
MSETFTFKKITEDGHARRGEITMPRGKVRTPAFMPVGTAGSVKAMYMEQVEELGADIILGNTYHLMLRPGAERIARLGGLHVFARWPKPILTDSGGFQVMSLAGLRKLTEKGVTFQSHIDGARYELTPERSIEIQCLLDSDIQMQLDQCVALPASFKEMEKAMELSLRWAERCKTAFGNQPGKAMFGIVQGGDNASLRERSANALKDLDLKGYSIGGLAVGEPQNVMMDMLDVTCSILPEDKPRYLMGVGTPDDILKSVAHGVDMFDCVMPTRAGRHGLAFTRFGKINLRNAKHAEDPRPLDPQSPCPAARDYSRAYLHHLVKAGEPLAGMVITWNNLAFYQQLMQGIRDAIEAHRYADFVAEFTEEWNRGDSAD

SEQ ID NO: 52444 - protein, 373 aa, unidentified
  source 1..373: note = Bartonella australis
  REGION 1..373: note = tr|M1NYU8|M1NYU8_BARAA Queuine tRNA-ribosyltransferase OS=Bartonella australis (strain Aust/NH1) OX=1094489 GN=tgt PE=3 SV=1
MMIKTFHYNKISQDGCARRGEIITARGCIRTPAFMPVGTAGTVKAMYMDQLSTLGADIILGNTYHLMLRPGAERVARLGGLHEFIRWPGPILTDSGGFQVMSLAGICKITEKSVIFRSYINGAYYEMSPERSIEIQGLLDSDIQMQLDQCIALPASEREMEMAMELSLSWAQRCKTAFGDQPNKAMFGIVQGGDNMKLRERSAQALKEMDLKGYAIGGLAVGEPQNIMINVLDVVCSILPEDKPRYLMGVGTPDDILKSVARGIDMFDCVMPTRAGRHGLAFTRFGRINLRNARYAEDPLPLDLQSLCPAARDYSCAYLHHLIKSGESLGGMLLTWNNLFYYQQLMQGIRASIEAECYADFCAETSALWAQGR

SEQ ID NO: 52445 - protein, 378 aa, Bartonella bacilliformis
  REGION 1..378: note = tr|A0A072R1J2|A0A072R1J2_BARBA Queuine tRNA-ribosyltransferase OS=Bartonella bacilliformis Ver097; OX = 1293911 GN=tgt PE=3 SV=1
MMIKTFNYKKIAQDGCARRGEIITGRGCIRTPAFMPVGTAATVKAMYMDQLRDLGTDIILGNTYHLMLRPGAERVARLGGLHEFAHWPEPILTDSGGFQVMSLAGICKVTEQGVIFRSYLNGAQYEMSPERSIEIQGLLDSDIQMQLDQCIALPAKEREIEAAMELSLRWAQRCKTAFGHQPEKAMFGIVQGGDNMKLRERSVLALKEMDLKGYAIGGLAVGEPQDVMITVLDATCPLLPEDKPRYLMGVGTPDDILKSVARGIDMFDCVMPTRAGRHGLAFTRFGRINLRNARYAEDLRPLDPQSPCPAARDYSCAYLHHLIKSGESLGGMLLTWNNLSYYQQLMQGIRDAIEAGCYADFCAETTSAWMQGDKILTN

SEQ ID NO: 52446 - protein, 377 aa, Bartonella bacilliformis
  REGION 1..377: note = tr|A1UST6|A1UST6_BARBK Queuine tRNA-ribosyltransferase OS=Bartonella bacilliformis (strain ATCC 35685 / NCTC 12138 / KC583) OX=360095 GN=tgt; PE = 3 SV=1
MIKTFHYRKIAQDGCARRGEIITGRGRIRTPAFMPVGTAATVKAMYMDQLRDLGTDIILGNTYHLMLRPGAERVARLGGLHEFARWPEPILTDSGGFQVMSLAGICKVTEQSVIFRSYLNGAQYEMSPERSIEIQGLLDSDIQMQLDQCIALPAKEREIEAAMELSLRWAQRCKTAFGHQPEKAMFGIVQGGDNMKLRERSALALKEMDLKGYAIGGLAVGEPQDVMITVLDATCPLLPEDKPRYLMGVGTPDDILKSVARGIDMFDCVMPTRAGRHGLAFTRFGRINLRNARYAEDSCPLDPQSPCPAARDYSCAYLHHLIKSGESLGGMLLTWNNLSYYQQLMQGIRDAIEAGCYADFCAETTSAWMQGDKILEN

SEQ ID NO: 52447 - protein, 372 aa, Bartonella birtlesii
  REGION 1..372: note = tr|J0YS38|J0YS38_9RHIZ Queuine tRNA-ribosyltransferase OS=Bartonella birtlesii LL-WM9; OX = 1094552 GN=tgt PE=3 SV=1
MIKTFHYRKIAQDGYARRGEIITGRGCVRTPAFMPVGTAGTVKAMYMDQIRSLGADIILGNTYHLMLRPGAERVARLGGLHEFSRWSGPILTDSGGFQVMSLAGIRKITEKSVLFRSYINGAYYEMSPERSIEIQGLLNADIQMQLDQCIALPASEKEIEAAMERSLRWAKRCKIAFGNQPEKALFGIVQGGDNIKLRERSAQALKEMDLKGYAIGGLAVGEPQNVMTTVLDATCPILPEDKPRYLMGVGTPDDILQSVARGIDMFDCVMPTRAGRHGLAFTRFGRINLRNARYAEDRYPLDSQSLCPAANDYSCAYLHHLIKSDESLGGMLLTWNNLFYYQQLMQGIRDAIEERRYADFCTETRALWAQGR

SEQ ID NO: 52448 - protein, 374 aa, Bartonella bovis
  REGION 1..374: note = tr|N6VRM7|N6VRM7_9RHIZ Queuine tRNA-ribosyltransferase OS=Bartonella bovis m02 OX=1094492; GN = tgt PE=3 SV=1
MIKTFHYNKIAQNGQARLGEIITGRGRIRTPAFMPVGTAGTVKAMYMDQLRSIGADVILGNTYHLMLRPGAERVARLGGLHEFSCWPEPILTDSGGFQVMSLSGICKITEKCVIFRSHINGAYYEMSPERSIEIQGLLDSDIQMQLDQCIALPASEKEIEAAMELSLRWAQRCKTAFGNQPDKAMFGIVQGGDNMKLRERSVQALKEMDLKGYAIGGLAVGESQDVMVAVLDTTCSILPENKPRYLMGVGTPDDILKSVARGIDMFDCVLPTRAGRHGLAFTRFGRVNLRNSCYAEDSRPLDPQSPCPAARDYSRAYLHHLVKSNEALGGMLLTWNNLSYYQQLMQGIRASIKTGCYADFCAETSALWKKSKKH

SEQ ID NO: 52449 - protein, 377 aa, Bartonella bovis
  REGION 1..377: note = tr|N6UIZ7|N6UIZ7_9RHIZ Queuine tRNA-ribosyltransferase OS=Bartonella bovis 91-4; OX = 1094491 GN=tgt PE=3 SV=1
MIKMFHYNKIAQDGQARLGEIITGRGRIRTPAFMPVGTAGTVKAMYMDQLRSIGADVILGNTYHLMLRPGAERVARLGGLHEFARWPEPILTDSGGFQVMSLSGICKITEKCVIFRSHINGAYYEMSPERSIEIQGLLDSDIQMQLDQCIALPASEKKIEAAMELSLRWAQRCKTAFGNQPDKAMFGIVQGGDNMRLRERSVQALKEMDLKGYAIGGLAVGESQDIMMAVLDTTCSILPENKPRYLMGVGTPDDILKSVARGIDMFDCVLPTRAGRHGLAFTRFGRVNLRNARYAEDSRPLDPQSPCPAARDYSRAYLHHLVKSNEALGGMLLTWNNLSYYQQLMQGIRASIKTGCYADFCAETSALWKQSKKALAH

SEQ ID NO: 52450 - protein, 372 aa, Bartonella clarridgeiae
  REGION 1..372: note = tr|E6YHK4|E6YHK4_BARC7 Queuine tRNA-ribosyltransferase OS=Bartonella clarridgeiae (strain CIP 104772 / 73) OX=696125 GN=tgt PE=3 SV=1
MIKAFHYKKISQDGYARQGEIITGRGRIRTPAFMPVGTAGTIKAMYMDQLRALGTDIILGNTYHLMLRPGAERVARLGGLHEFARWPEPILTDSGGFQVMSLSGICKITEQGVIFRSHINGAHYEMSPERSIEIQGLLDSDIQMQLDQCIALPTSEREMEAAMELSLRWAQRCKKVFGDQPEKAMFGIVQGGDNMKLRERSAQALKEMDLKGYAIGGLAVGEPQDVMTTVLDVTCSILPQDKPRYLMGVGTPDDILKSVARGVDMFDCVMPTRAGRHGLAFTRFGKINLRNARYAEDPNPLDPQSPCSAARDYSCAYLHHLVKSGESLGGMLLTWNNLFYYQQLMQGVRDAIKAGRYADFCADVATLWMQGR

SEQ ID NO: 52451 - protein, 372 aa, Bartonella doshiae
  REGION 1..372: note = tr|A0A380ZEZ1|A0A380ZEZ1_BARDO Queuine tRNA-ribosyltransferase OS=Bartonella doshiae OX=33044; GN = tgt PE=3 SV=1
MIKTFHYKKIAQDKYARRGEIITGRGSIRTPAFMPVGTAGTVKAMYMDQLRDLGADIILGNTYHLMLRPGAERVARLGGLHEFIRWSRPILTDSGGFQVMSLAGIRKITEKGVIFRSYINGAYYDMSPERSIEIQGLLNSDIQMQLDQCIALPASEKETEAAMELSLRWAERCKKAFGDQPEKALFGIVQGGDNMKLRERSAQALKEMDLKGYAIGGLAVGEPQSVMTAVLDATCPILPEDKPRYLMGVGTPDDILKSVARGIDMFDCVMPTRAGRHGLAFTRFGKINLRNARYAEDPYPLDPQSLCPAASDYSCAYLHHLIKSRESLGGMLLTWNNLFYYQQLMQGIRDSIEAGCYSDFCSETCALWMQGR

SEQ ID NO: 52452 - protein, 372 aa, Bartonella elizabethae
  REGION 1..372: note = tr|J1K9T2|J1K9T2_BAREL Queuine tRNA-ribosyltransferase OS=Bartonella elizabethae F9251 = ATCC 49927 OX=1094555 GN=tgt PE=3 SV=1
MIKTFHYRKIAQDGWARRGEIITGRGCVRTPAFMPVGTAGTIKAMYMDQIRDLGADIILGNTYHLMLRPGAERVARLGGLHEFSRWNGPILTDSGGFQVMSLASIRKINEQGVIFRSYINGAYYEMSPERSIEIQGLLDADIQMQLDQCIALPATEKEMEEAMELSLRWAQRCKTAFGEQPDKALFGIVQGGDNMKLRERSAQALKEMDLKGYAIGGLAVGEPQSVMTAVLDTTCPILPEDKPRYLMGVGTPDDILQSVARGIDMFDCVMPTRAGRHGLAFTRFGRINLRNARYAEDPHPLDPQSLCPAANDYSCAYLHHLIKSGESLGGMLLTWNNLFYYQQLMQGIRDAIEEGCYADFCAETRALWAQGR

SEQ ID NO: 52453 - protein, 372 aa, Bartonella grahamii
  REGION 1..372: note = tr|C6AE67|C6AE67_BARGA Queuine tRNA-ribosyltransferase OS=Bartonella grahamii (strain as4aup) OX=634504 GN=tgt PE=3 SV=1
MIKTFHYRKIAQDGYARRGEIITGRGCVRTPAFMPVGTAGTVKAMYMDQIRDLGADIILGNTYHLMLRPGAERVARLGGLHEFSRWSGPILTDSGGFQVMSLAGIRKITEQGVIFRSYINGSYYEMSPERSIEIQELLGADIQMQLDQCIALPATEKEMEEAMELSLRWAQRCKTAFGDQPDKALFGIVQGGDNMKLRERSAQALKEMDLKGYAIGGLAVGEPQSVMTAVLDTTCPILPEDKPRYLMGVGTPDDILQSVARGVDMFDCVMPTRAGRHGLAFTRFGRINLRNARYAEDPHPLDPQSLCPAAHDYSCAYLHHLIKSGESLGGMLLTWNNLFYYQQLMQGIRDAIEEGCYADFCAETRALWAQGR

SEQ ID NO: 52454 - protein, 372 aa, Bartonella grahamii; identical to SEQ ID NO: 52453
  REGION 1..372: note = tr|A0A336N9A5|A0A336N9A5_BARGR Queuine tRNA-ribosyltransferase OS=Bartonella grahamii OX=33045; GN = tgt PE=3 SV=1

SEQ ID NO: 52455 - protein, 372 aa, Bartonella henselae
  REGION 1..372: note = tr|X5LN02|X5LN02_BARHN Queuine tRNA-ribosyltransferase OS=Bartonella henselae OX=38323; GN = tgt PE=3 SV=1
MIKTFHYRKIAQDGSARRGEIITGRGCIRTPAFMPVGTAGTVKAMYMDQIRALGADIILGNTYHLMLRPGAECVARLGGLHHFSRWHGPILTDSGGFQVMSLAGIRKITEQSVIFRSYINGAYYEMSPERSIEIQGLLNSDIQMQLDQCIALPASEKEVESAMELSLRWAQRCKTAFGDQPDKALFGIVQGGDNMKMRERSAQALKEMGLKGYAIGGLAVGEPQNVMTAVLDVTCPILPEDKPRYLMGVGTPDDILQSVARGIDMFDCVMPTRAGRHGLAFTRFGRINLRNARYAEDPHPLDPQSLCPAANDYSCAYLHHLIRSGESLGGMLLTWNNLFYYQQLMQGIRDAIEEGCYADFCAETRALWTKGR

SEQ ID NO: 52456 - protein, 372 aa, Bartonella henselae; identical to SEQ ID NO: 52455
  REGION 1..372: note = tr|A0A0R4J8M4|A0A0R4J8M4_BARHE Queuine tRNA-ribosyltransferase OS=Bartonella henselae (strain ATCC 49882 / DSM 28221 / Houston 1) OX=283166 GN=tgt PE=3; SV = 1

SEQ ID NO: 52457 - protein, 375 aa, Bartonella koehlerae
  REGION 1..375: note = tr|A0A067W6S0|A0A067W6S0_9RHIZ Queuine tRNA-ribosyltransferase OS=Bartonella koehlerae C-29; OX = 1134510 GN=tgt PE=3 SV=1
MRVLIKIFHYRKIAQDGCARRGEIITGRGCIRTPAFMPVGTTGTVKAMYMDQIRALGADVILGNTYHLMLRPGAECVARLGGLHHFSRWHGPILTDSGGFQVMSLAGIRKITEQSVIFRSYINGAYYEMSPERSIEIQGLLNSDIQMQLDQCIALPASEKEIESAMELSLRWAQRCKTAFGDQPGKALFGIVQGGDNMKMREQSAQALKEMDLKGYAIGGLAVGEPQSVMTAVLDATCPILPEDKPRYLMGVGTPDDILQSVARGIDMFDCVMPTRAGRHGLAFTRFGRINLRNARYAEDSHPLDSQSLCPAANDYSCAYLHHLVKSGESLGGMLLTWNNLFYYQQLMHGIRDAIGKGCYADFCAETRALWKKGR

SEQ ID NO: 52458 - protein, 375 aa, unidentified
  source 1..375: note = Bartonella melophagi
  REGION 1..375: note = tr|J0R3C0|J0R3C0_9RHIZ Queuine tRNA-ribosyltransferase OS=Bartonella melophagi K-2C; OX = 1094557 GN=tgt PE=3 SV=1
MMIKTFHYNKIAQDGQARLGEIITGRGRIRTPAFMPVGTAGTVKAMYMDQLRALGVDVILGNTYHLMLRPGAERIARLGGLHKFARWPEPILTDSGGFQVMSLSGICKITEKCVIFRSHINGAYYEMSPERSIEIQGLIDSDIQMQLDQCIALPASEKEIEAAMELSLRWAQRCKTAFGNQPDKAMFGIVQGGDNMKLRERSVQALKEMDLKGYAIGGLAVGESQDVMMAVLDATCCILPENKPRYLMGVGTPDDILKSVARGIDMFDCVLPTRAGRHGLAFTRFGKMNLHNARYAEDSRPLDPQSPCPAARDYSRAYLHHLVKSNEALGGMLLTWNNLSYYQQLMQDIRTSIKAGCYADFCAETSALWKQGNKR

SEQ ID NO: 52459 - protein, 372 aa, unidentified
  source 1..372: note = Bartonella rattimassiliensis
  REGION 1..372: note = tr|J0QKG8|J0QKG8_9RHIZ Queuine tRNA-ribosyltransferase OS=Bartonella rattimassiliensis 15908 OX=1094556 GN=tgt PE=3 SV=1
MKKTFHYRKIAQDGYARRGEIITGRGCVRTPAFMPVGTAGTVKAMYMEQMRDLGADIILGNTYHLMLRPGAERVARLGGLHKFSRWSGPILTDSGGFQVMSLAGIRKITEQGVIFRSYINGAYYEMSPERSIEIQGLLGADIQMQLDQCIALPATEKEMEEAMELSLRWAQRCKTAFGDQSDKALFGIVQGGDNIKLRERSAQALKEMDLKGYAIGGLAVGEPQSVMIAMLDAICPILPEDKPRYLMGVGTPDDILQSVACGIDMFDCVMPTRAGRHGLAFTRFGRINLRNAHYAEDPHPLDPQSLCPAANDYSCAYLHHLIKSGESLGGMLLTWNNLFYYQQLMQGIRDAIEEGCYADFCAETRALWEQGR

SEQ ID NO: 52460 - protein, 372 aa, Bartonella rochalimae
  REGION 1..372: note = tr|E6YLH8|E6YLH8_9RHIZ Queuine tRNA-ribosyltransferase OS=Bartonella rochalimae ATCC BAA-1498 OX=685782 GN=tgt PE=3 SV=1
MIKAFHYEKKSQDGYARQGEIITGRGRIRTPAFMPVGTVGTVKAMYMDQLHALGADIILGNTYHLMLRPGAERVARLGGLHKFIRWSGPILTDSGGFQVMSLSGICKITEQGVIFRSHINGAYYDMSPERSIEIQGLLDSDIQMQLDQCIALPASEREIEAAMELSLRWAQRCKKVFGDQPEKAMFGIVQGGDNMKLRERSAQALKEMDLKGYAIGGLAVGEPQDVMTAVLDVTCSILPEDKPRYLMGVGTPDDILKSVARGVDMFDCVMPTRAGRHGLAFTRFGRINLRNARYAEDPNPLDPQSPCSAARDYSCAYLHHLIKSGESLGGMLLTWNNLFYYQQLMQGIRDAIQAGRYADFCSDTVALWMQGR

SEQ ID NO: 52461 - protein, 373 aa, Bartonella rochalimae
  REGION 1..373: note = tr|A0A067WEE0|A0A067WEE0_9RHIZ Queuine tRNA-ribosyltransferase OS=Bartonella rochalimae ATCC BAA-1498 OX=685782 GN=tgt PE=3 SV=1
MMIKAFHYEKKSQDGYARQGEIITGRGRIRTPAFMPVGTVGTVKAMYMDQLHALGADIILGNTYHLMLRPGAERVARLGGLHKFIRWSGPILTDSGGFQVMSLSGICKITEQGVIFRSHINGAYYDMSPERSIEIQGLLDSDIQMQLDQCIALPASEREIEAAMELSLRWAQRCKKVFGDQPEKAMFGIVQGGDNMKLRERSAQALKEMDLKGYAIGGLAVGEPQDVMTAVLDVTCSILPEDKPRYLMGVGTPDDILKSVARGVDMFDCVMPTRAGRHGLAFTRFGRINLRNARYAEDPNPLDPQSPCSAARDYSCAYLHHLIKSGESLGGMLLTWNNLFYYQQLMQGIRDAIQAGRYADFCSDTVALWMQGR

SEQ ID NO: 52462 - protein, 378 aa, Bartonella schoenbuchensis
  REGION 1..378: note = tr|A0A1S6XQN1|A0A1S6XQN1_BARSR Queuine tRNA-ribosyltransferase OS=Bartonella schoenbuchensis (strain DSM 13525 / NCTC 13165 / R1) OX=687861 GN=tgt PE=3; SV = 1
MMIKTFHYNKIAQDGQARLGEIITRRGRIRTPAFMPVGTVGTVKAMYMDQIRDLGADVILGNTYHLMLRPGAERVARLGGLHEFARWPEPILTDSGGFQVMSLSGICKITEKCVIFRSHINGAYYEMSPERSIEIQGLLDSDIQMQLDQCIALPASEKEIEAAMELSLRWAQRCKTAFGDQPDKAMFGIVQGGDNMKLRERSVQALKEMDLKGYAIGGLAVGETQDIMMAVLDATCSLLPENKPRYLMGVGTPDDILKSVARGIDMFDCVLPTRAGRHGLAFTRFGRINLRNARYAEDSRPLDPQSPCPAARDYSRAYLHHLVKSNEALGGMLLTWNNLSYYQQLMQGIRTSIKAGCYADFCAETSALWEQSNKALAH

SEQ ID NO: 52463 - protein, 378 aa, Bartonella schoenbuchensis; identical to SEQ ID NO: 52462
  REGION 1..378: note = tr|A0A024LR50|A0A024LR50_9RHIZ Queuine tRNA-ribosyltransferase OS=Bartonella schoenbuchensis; OX = 165694 GN=tgt PE=3 SV=1

SEQ ID NO: 52464 - protein, 372 aa, Bartonella sp.
  REGION 1..372: note = tr|A0A5B9CWL2|A0A5B9CWL2_9RHIZ Queuine tRNA-ribosyltransferase OS=Bartonella sp. 'Tel Aviv'; OX = 2133959 GN=tgt PE=3 SV=1
MIKTFHYRKIAQDGWARRGEIITGRGCVRTPAFMPVGTAGTIKAMYMDQIRDLGADIILGNTYHLMLRPGAERVARLGGLHEFSRWNGPILTDSGGFQVMSLASIRKINEQGVIFRSYINGAYYEMSPERSIEIQGLLDADIQMQLDQCIALPATEKEMEEAMELSLRWAQRCKTAFGEQPDKALFGIVQGGDNMKLRERSAQALKEMDLKGYAIGGLAVGEPQSVMIAVLDTTCPILPEGKPRYLMGVGTPDDILQSVARGIDMFDCVMPTRAGRHGLAFTRFGRINLRNARYAEDPYPLDPQSLCPAANDYSCAYLHHLIKSGESLGGMLLTWNNLFYYQQLMQGIRDAIEEGCYADFCAETRALWAQGR

SEQ ID NO: 52465 - protein, 229 aa, Bartonella sp.
  REGION 1..229: note = tr|A0A1S6WUD1|A0A1S6WUD1_9RHIZ Queuine tRNA-ribosyltransferase OS=Bartonella sp. WD16.2; OX = 1933904 GN=BWD162_008000 PE=4 SV=1
MGEIITGRGRIRTPAFMPVGTVGTVKAMYMDQLRDLGADVILGNTYHLMLRPGAERIARLGGLHEFARWPEPILTDSGGFQVMSLSGICKITEKCVIFRSHINGAYYEMSPERSIEIQGLLDSDIQMQLDQCIALPASEKEIEAAMELSLRWAQRCKTAFGNQSDKAMFGIVQGGDNMKLRERSVQTLKEMDLKGYAIGGLAVGETQDVMMAVLDATCSILPENKHAIS

SEQ ID NO: 52466 - protein, 375 aa, unidentified
  source 1..375: note = Bartonella tamiae
  REGION 1..375: note = tr|J1JVG8|J1JVG8_9RHIZ Queuine tRNA-ribosyltransferase OS=Bartonella tamiae Th239; OX = 1094558 GN=tgt PE=3 SV=1
MIKDFQFKKIAQDGQARRGEITMPRGKIRTPAFMPVGTAGTVKAMYMDQLESLGADIILGNTYHLMLRPGAERVARLGGLHEFTRWQKPILTDSGGFQVMSLGGLVKLNEKNVTFQSHIDGAYYEMSPERSIEIQGLLDSDIQMQLDQCIALPASENAMENAMQLSLRWAERCKNAFGEQRGKALFGIVQGGDNIRLREQSAKALTDMDLKGYAIGGLAVGEPQDVMLAMLEVTCPLLPIEKPRYLMGVGTPDDILKSVARGIDMFDCVMPTRAGRHGLAYTRFGKINLRNACHAEDTRPLDPQSECPAAREYSRAYLHHLIKSGEPLGGMLLTWNNLAYYQYLMQSIREAIEAQKFNDFCIETMRVWEKGDVSL

SEQ ID NO: 52467 - protein, 372 aa, Bartonella taylorii
  REGION 1..372: note = tr|J1A356|J1A356_BARTA Queuine tRNA-ribosyltransferase OS=Bartonella taylorii 8TBB; OX = 1094560 GN=tgt PE=3 SV=1
MIKTFHYRKIAQDGCARRGEIITDRGCIRTPAFMPVGTAGTVKAMYMDQIRALGADIILGNTYHLMLRPGAERVARLGGLHEFSRWSGPILTDSGGFQVMSLAGIRKITEQGVIFRSYVNGAYYEMSPERSIEIQELLNADIQMQLDQCIALPASEKEIEAAMELSLRWAQRCKTAFGDHPGKALFGIVQGGDNMKLRERSAQALKEMDLKGYAIGGLAVGEPQSVMTSVLDATCPILPEDKPRYLMGVGTPDDILQSVARGIDMFDCVMPTRAGRHGLAFTRFGRINLRNARYTEDPYPLDSQSLCPAANDYSCAYLHHLIKSGESLGGMLLTWNNLFYYQQLMQGIRDAIEEGCYADFCAETRALWMQGR

SEQ ID NO: 52468 - protein, 372 aa, Bartonella tribocorum
  REGION 1..372: note = tr|A9IVS9|A9IVS9_BART1 Queuine tRNA-ribosyltransferase OS=Bartonella tribocorum (strain CIP 105476 / IBS 506) OX=382640 GN=tgt PE=3 SV=1
MIKTFHYRKIAQDGYARRGEIITGRGCVRTPAFMPVGTAGTVKAMYMDQIRELGADIILGNTYHLMLRPGAERVARLGGLHEFSRWNGPILTDSGGFQVMSLAGIRKITEQGVIFRSYINGAYYEMSPERSIEIQGLLDADVQMQLDQCIALPATEKEIEEAMELSLRWAQRCKTAFGNQPDKALFGIVQGGDNMKLRERSAQALKEMNLKGYAIGGLAVGEPQSVMTAVLDVTCPILPEDKPRYLMGVGTPDDILQSVARGVDMFDCVMPTRAGRHGLAFTRFGRINLRNARYAEDPHPLDPQSLCPAANDYSCAYLHHLIKSDESLGGMLLTWNNLFYYQQLMQGIRDAIEEGCYADFCAETRALWAQGR

SEQ ID NO: 52469 - protein, 372 aa, Bartonella tribocorum
  REGION 1..372: note = tr|A0A2M6UT79|A0A2M6UT79_9RHIZ Queuine tRNA-ribosyltransferase OS=Bartonella tribocorum OX=85701; GN = tgt PE=3 SV=1
MIKTFHYRKIAQDGYARRGEIITGRGCVRTPAFMPVGTAGTVKAMYMDQIRDLGADIILGNTYHLMLRPGAERVARLGGLHEFSRWNGPILTDSGGFQVMSLAGIRKITEKGVIFRSYINGAYYEMSPERSIEIQGLLNADIQMQLDQCIALPATEKEMEEAMELSLRWAQRCKKAFGDQPDKALFGIVQGGDNMKLRERSAQALREMDLKGYAIGGLAVGEPQSVMTAVLDATCPILPEDKPRYLMGVGTPDDILQSVARGVDMFDCVMPTRAGRHGLAFTRFGRINLRNARYAEDPHPLDPQSLCPAANDYSCAYLHHLIKSGESLGGMLLTWNNLFYYQQLMQGIRDAIEEGCYADFCAETRALWAQGR

SEQ ID NO: 52470 - protein, 372 aa, Bartonella vinsonii
  REGION 1..372: note = tr|J0QXT6|J0QXT6_BARVI Queuine tRNA-ribosyltransferase OS=Bartonella vinsonii subsp. arupensis OK-94-513 OX=1094562 GN=tgt PE=3 SV=1
MIKTFHYRKIAQDGCARRGEIITGRGCVRTPAFMPVGTAGTVKAMYMDQIRALGADIILGNTYHLMLRPGAERVARLGGLHEFSRWSGPILTDSGGFQVMSLAGIRKITEQGVIFRSYINGAYYEMSPERSIEIQGLLNADIQMQLDQCIALPASEKEMEAAMELSLRWAQRCKKAFGDQPDKALFGIVQGGDNMKLRERSAHALKEMDLKGYAIGGLAVGEPQSVMTAVLDATCPILPEDKPRYLMGVGTPDDILQSVARGIDMFDCVMPTRAGRHGLAFTRFGRINLRNARYAEDPYPLDPQSLCPATCDYSCAYLHHLIRSGESLGGMLLTWNNLYYYQQLMQGIRDAIEEGCYADFCAETRALWKQGR

SEQ ID NO: 52471 - protein, 372 aa, Bartonella vinsonii
  REGION 1..372: note = tr|A0A3S5AV24|A0A3S5AV24_BARVI Queuine tRNA-ribosyltransferase OS=Bartonella vinsonii OX=33047; GN = tgt PE=3 SV=1
MIKTFHYRKIAQDGYARRGEIITGRGCVRTPAFMPVGTAGTVKAMYMDQIRALGADIILGNTYHLMLRPGAERVARLGGLHEFSRWSGPILTDSGGFQVMSLAGIRKITEQGVIFRSYINGAYYEMSPERSIEIQGLLNADIQMQLDQCIALPASEKEIEAAMELSLRWAQRCKTAFGDQPDKALFGIVQGGDNMKLRERSAHALKEMDLKGYAIGGLAVGEPQSVMTAVLDTTCPILPEDKPRYLMGVGTPDDILQSVARGIDMFDCVMPTRAGRHGLAFTRFGRINLRNARYAEDPHPLDPQSLCPAACDYSCAYLHHLIRSGESLGGMLLTWNNLYYYQQLMQGIRDAIEEGCYTDFCAETRALWNQGR

SEQ ID NO: 52472 - protein, 380 aa, unidentified
  source 1..380: note = Bartonella washoeensis
  REGION 1..380: note = tr|J0PWR3|J0PWR3_9RHIZ Queuine tRNA-ribosyltransferase OS=Bartonella washoeensis Sb944nv; OX = 1094563 GN=tgt PE=3 SV=1
MESKKTRVMIKTFHYRKIAQDGCARCGEIITVRGCVRTPAFMPVGTAGTVKAMYMDQIRALGADIILGNTYHLMLRPGAERVARLGGLHEFSRWSGPILTDSGGFQVMSLAGIRKITEQGVIFRSYLNGAYYEMSPERSIEIQGLLNADIQMQLDQCIALPASEKEMEAAMELSLRWAQRCKTAFGDQPDKALFGIVQGGDNMKLRERSAQVLKEMDLKGYAIGGLAVGEPQSVMTAVLDATCPILPEDKPRYLMGVGTPDDILKSVARGIDMFDCVMPTRAGRHGLAFTRFGRINLRNARYAEDPHPLDPQSLCPAASDYSCAYLHHLIKSGESLGGMLLTWNNLFYYQYLMQGIRDAIKEGCYADFCAETRALWLQGR

SEQ ID NO: 52473 - protein, 372 aa, unidentified
  source 1..372: note = Bartonella washoeensis
  REGION 1..372: note = tr|J0QLH1|J0QLH1_9RHIZ Queuine tRNA-ribosyltransferase OS=Bartonella washoeensis 085-0475; OX = 1094564 GN=tgt PE=3 SV=1
MIKTFHYRKIAQDGCARCGEIITVRGCVRTPAFMPVGTAGTVKAMYMDQIRALGADIILGNTYHLMLRPGAERVARLGGLHEFSRWSGPILTDSGGFQVMSLAGIRQITEQGVIFRSYLNGAYYEMSPERSIEIQGLLNADIQMQLDQCIALPASEKEMEAAMELSLRWAQRCKTAFGDQPDKALFGIVQGGDNMKLRERSAQVLKEMDLKGYAIGGLAVGEPQSVMTAVLDATCPILPEDKPRYLMGVGTPDDILKSVACGIDMFDCVMPTRAGRHGLAFTRFGRINLRNARYAEDPHPLDPQSLCPAASDYSCAYLHHLIKSGESLGGMLLTWNNLFYYQYLMQGIRDAIKEGCYADFCAETRALWLQGR

SEQ ID NO: 52474 - protein, 380 aa, unidentified
  source 1..380: note = Basilea psittacipulmonis
  REGION 1..380: note = tr|A0A077DGK6|A0A077DGK6_9BURK Queuine tRNA-ribosyltransferase OS=Basilea psittacipulmonis DSM 24701 OX=1072685 GN=tgt PE=3 SV=1
MDKKFKFEVLKTSGKARRASLTLNHGTVQTPMFMPVGTYGSVKAMLPHELKEIGSQVILGNTFHLWLRPGTEVIKKHGGLHGFMQYDGPILTDSGGFQVFSLSAIRSKIKEEGVRFSSPIDGAKLFLTPEESMRIQTDLNSDIVMVFDECTPYEINGQPATHEQAAQSMRMSLRWAKRSRDTFDALDNPNALFGIVQGGMYEDLRMESLEGLKNIGFDGYAIGGLSVGEPKEDMIRILDQIAYRLPENAPRYLMGVGTPEDLVDGVSRGIDMFDCVMPSRNARNGTLFTRFGDVKLRNARYKDDTRPLDPTCHCHTCQHFSRAYLHHLQKANEITGARLNTLHNLAFYLQIMKEMREALENDRFEEWKAQFRKDRATGVA

SEQ ID NO: 52475 - protein, 367 aa, unidentified
  source 1..367: note = Bathymodiolus azoricus
  REGION 1..367: note = tr|A0A1H6J6M4|A0A1H6J6M4_9GAMM Queuine tRNA-ribosyltransferase OS=Bathymodiolus azoricus thioautotrophic gill symbiont OX=235205 GN=tgt PE=3 SV=1
MKFKLKNTNDKARRGTMIFARGTVETPAFMPVGTYGTVKAMTPEEVEGIGAQIILGNTFHLSITPGTDVIKAHGDLHDFMHWQGPILTDSGGFQVFSLGDMRKISEAGVDFRSPKDGAKIFMGPEESIKIQSDLGSDIVMIFDECTPYPADKVTAEQSMQLSLRWAQRSKDAHQALGNENALFGIVQGGMYEDLRQQSAKKLIEIDFDGYAIGGLSVGEPKEEMMKVLDFLPEQLPDDKPRYLMGVGTPSDLVEAVERGIDMFDCVMPTRNARNGYLFTSSGIVKIRNAQYKLDTKPLDKRCGCYTCQNYSRSYLHHLQRKNEILGARLNTIHNLYYYQDLMKGMREAIEKGVFAEFKQLFYKMQNE

SEQ ID NO: 52476 - protein, 382 aa, unidentified
  source 1..382: note = Bathymodiolus azoricus
  REGION 1..382: note = tr|A0A1H6M2F3|A0A1H6M2F3_9GAMM Queuine tRNA-ribosyltransferase OS=Bathymodiolus azoricus thioautotrophic gill symbiont OX=235205 GN=tgt PE=3 SV=1
MEYTRNFGRYNQRMQMKFKLKNTNDKARRGTMIFARGTVETPAFMPVGTYGTVKAMTPEEVEGIGAQIILGNTFHLSITPGTDVIKAHGDLHDFMHWQGPILTDSGGFQVFSLGDMRKISEAGVDFRSPKDGAKIFMGPEESIKIQSDLGSDIVMIFDECTPYPADKVTAEQSMQLSLRWAQRSKDAHQALGNENALFGIVQGGMYEDLRQQSAKKLIEIDFDGYAIGGLSVGEPKEEMMKVLDFLPEQLPDDKPRYLMGVGTPSDLVEAVERGIDMFDCVMPTRNARNGYLFTSSGIVKIRNAQYKLDTKPLDKRCGCYTCQNYSRSYLHHLQRKNEILGARLNTIHNLYYYQDLMKGMREAIEKGVFAEFKQLFYKMQNE

SEQ ID NO: 52477 - protein, 367 aa, unidentified
  source 1..367: note = Bathymodiolus brooksi
  REGION 1..367: note = tr|A0A482YTZ8|A0A482YTZ8_9BACT Queuine tRNA-ribosyltransferase OS=Bathymodiolus brooksi thiotrophic gill symbiont OX=1052209 GN=tgt PE=3 SV=1
MKFKLKNTDQKARRGTLTFERGAVETPAFMPVGTYGTVKAMTPEEVEEIGAQIILGNTFHLAITPGTDVIKAHGDLHDFMHWQGPILTDSGGFQVFSLGDMRKISEAGVDFRSPKDGAKIFMGPEESIKIQFDLGADIVMIFDECTPYPADKATADQSMQLSLRWAQRSKDAHQALGNKNALFGIVQGGMYEDLRCESASALINIDFDGFAIGGLSVGEPKEEMIKVLDYLPEQLPSDKPRYLMGVGTPSDLVEAVERGIDMFDCVMPTRNARNGYLFTSNGIVKIRNAQYKLDIKPLDERCDCYTCQNYSRSYLHHLQRKNEILGARLNTIHNLHYYQDLMQQMRAAIENNAFVEFKQSFYTMQNA

SEQ ID NO: 52478 - protein, 367 aa, unidentified
  source 1..367: note = Bathymodiolus heckerae
  REGION 1..367: note = tr|A0A483A2A7|A0A483A2A7_9BACT Queuine tRNA-ribosyltransferase OS=Bathymodiolus heckerae thiotrophic gill symbiont OX=1052212 GN=tgt PE=3 SV=1
MKFELKNTNQKARRGTLIFERGVVETPAFMPVGTYGTVKAMTPEEVEETGAQILLGNTFHLSITPGTEVIKAHGDLHDFMHWQGPILTDSGGFQVFSLGEMRKISEAGVDFRSPKDGAKIFMGPEESIKIQSDLGSDIVMIFDECTPYPADKITADQSMQLSLRWAQRSKNTHQEVNNKSALFGIVQGGMHEDLRHQSAAALINIGFDGYAIGGLSVGEPKEEMIKVLDYLPAQLPDDKPRYLMGVGTPSDLVEAVERGIDMFDCVMPTRNARNGYLFTSSGVVKIRNAQYKLDIKSVDARCGCYTCQNYSRSYLHHLQRKNEILGARLNTLHNLYYYQDLMQQMRTAIENNTFLAFKQSFYEMQDA

SEQ ID NO: 52479 - protein, 374 aa, unidentified
  source 1..374: note = Bathymodiolus heckerae
  REGION 1..374: note = tr|A0A482YQD5|A0A482YQD5_9BACT Queuine tRNA-ribosyltransferase OS=Bathymodiolus heckerae thiotrophic gill symbiont OX=1052212 GN=tgt PE=3 SV=1
MKFELKNTDNKARCGTMVFERGEVQTPAFMPVGTYGTVKAMTPEEVIDLGAQIILGNTFHLAITPGTDVIEAHGDLHNFMHWQGPILTDSGGFQVFSLGAMRKISEEGVEFRSPKNGDKIFMGPEESLQIQYKLGSDIVMIFDECTPYPADKSTADQSMRLSLRWAKRSKSEHTKLNNPNALFGIVQGGMFKELRQESAKALIEIGFDGYAIGGLSVGEPKEEMIKVLDYLPSQLPADKPRYLMGVGTPSDLVEAVERGVDMFDCVMPTRNARNGYLFTSAGIVKIRNAQYKLDVSKLDDRCGCYTCQNYTKSYLYHLQRKNEILSARLNTTHNLYYYQDLMSQMRAAIENNRFAEFKQQFYLVHKGKTYKLGL

SEQ ID NO: 52480 - protein, 370 aa, unidentified
  source 1..370: note = Bathymodiolus platifrons
  REGION 1..370: note = tr|A0A1Z5H8M2|A0A1Z5H8M2_9GAMM Queuine tRNA-ribosyltransferase OS=Bathymodiolus platifrons methanotrophic gill symbiont OX=113268 GN=tgt PE=3 SV=1
MQFDLLNNDGYARRGRLTFDRGVIETPIFMPVGTYGTVKSLTPDELTGIGAQIILGNTFHLMLRPTTEVIKAHGDLHDFMNWHGPILTDSGGFQVFSLGELRKITEAGVTFKSPIDGRKIFMGPEESMQVQRDLGSDIVMIFDECTPYPATVQEAADSMRLSLRWAERSKKAHGDNASALFGIVQGGMYEHLRHESIAGLIDIGFDGYAIGGLSVGEPKDEMMATLDVVHSKLPVDKPRYLMGVGTPEDLIEAVRRGIDMFDCVMPTRNARNGHIFTSTGVIKIRNSQYQLDTRPLDESCACYTCQNYSRSYLRHLDKCHEILGARLNTIHNLYYYLKLMQDVREAIEGKVFEEYVKSFYELRGKAVPAT

SEQ ID NO: 52481 - protein, 367 aa, unidentified
  source 1..367: note = Bathymodiolus thermophilus
  REGION 1..367: note = tr|A0A3G3IK54|A0A3G3IK54_9GAMM Queuine tRNA-ribosyltransferase OS=Bathymodiolus thermophilus thioautotrophic gill symbiont OX=2360 GN=tgt PE=3 SV=1
MKFKLKNTDQKARRGTLIFERGTVETPAFMPVGTYGTVKAMTPEEVKEVGAQIILGNTFHLAITPGTDVIKAHGDLHDFMHWQGPILTDSGGFQVFSLGDMRKISEAGVDFRSPKDGAKIFMGPEESIKIQFDLGADIVMIFDECTPYPADKATADQSMQLSLRWAQRSKDAHQALGNKNALFGIVQGGMYEDLRCESASALIDIDFDGFAIGGLSVGEPKEEMIKVLDYLPEQLPNDKPRYLMGVGTPSDLVEAVERGIDMFDCVMPTRNARNGYLFTSNGIVKIRNAQYKLDIKPLDERCGCYTCQNYSRSYLHHLQRKNEILGARLNTIHNLHYYQDLMQQMRTAIENNTFAEFKQSFYAMQNA

SEQ ID NO: 52482 - protein, 367 aa, unidentified
  source 1..367: note = Bathymodiolus thermophilus
  REGION 1..367: note = tr|A0A1J5U602|A0A1J5U602_9GAMM Queuine tRNA-ribosyltransferase OS=Bathymodiolus thermophilus thioautotrophic gill symbiont OX=2360 GN=tgt PE=3 SV=1
MKFKLKNTDQKARRGALIFERGTVETPAFMPVGTYGTVKAMTPEEVKEVGAQIILGNTFHLAITPGTDVIKAHGDLHDFMHWQGPILTDSGGFQVFSLGDMRKISEAGVDFRSPKDGAKIFMGPEESIKIQFDLGADIVMIFDECTPYPADKATADQSMQLSLRWAQRSKDAHQALGNKNALFGIVQGGMYEDLRCESASALIDIDFDGFAIGGLSVGEPKEEMIKVLDYLPEQLPNDKPRYLMGVGTPSDLVEAVERGIDMFDCVMPTRNARNGYLFTSNGIVKIRNAQYKLDIKPLDERCGCYTCQNYSRSYLHHLQRKNEILGARLNTIHNLHYYQDLMQQMRTAIENNTFAEFKQSFYAMQNA

SEQ ID NO: 52483 - protein, 375 aa, Bauldia litoralis
  REGION 1..375: note = tr|A0A1G6B595|A0A1G6B595_9RHIZ Queuine tRNA-ribosyltransferase OS=Bauldia litoralis OX=665467; GN = tgt PE=3 SV=1
MTDFGMTIAATDGAARTGELTTARGVIRTPAFMPVGTAGTVKGMYPEQVRGLGADIILGNTYHLMLRPGAERVAGLGGLHVFSNWPYPILTDSGGFQVMSLSGLRKLDEEGVTFQSHLDGSTHRLTPERSLEIQGLLDSDIRMQLDECVRLPAPRQEVERAMRMSLRWAERSKAAFGATKERALFGIVQGGDQPDLRIASAEALADIGFHGYAIGGLAVGEPQDVMLAMLDTTVPALPLDHPRYLMGVGQPDDIVEAVRRGVDMFDCVLPTRAGRHGVAYTRFGRINMKNARHADDRRPIDETMDWVPARDYSRAYLHHLIKSGELLGAMLLTWNNLAYYQHLMAGVRAAIAAGRFDDFVAETKDGWARGDLPPA

SEQ ID NO: 52484 - protein, 370 aa, unidentified
  source 1..370: note = Baumannia cicadellinicola
  REGION 1..370: note = sp|Q1LSP0|TGT_BAUCH Queuine tRNA-ribosyltransferase; OS = Baumannia cicadellinicola subsp. Homalodisca coagulata; OX = 374463 GN=tgt PE=3 SV=1
MKYQLLKNCAGARRGRIQFDRGVVETPAFMPVGTYGTVKSLTTEEVKDTGTQMILCNAFHLWLRSEQEIIKLHGDLHHFMHWYGPIITDSGGFQIFSISNLNKITEAGVYFRHPINGSAIFLSPEKSMEIQYDLGSDIVMVLDECTPYPVQWDEAKKSMVMSLRWSERSHKRFHELKNNNALFGIIQGGMYKDLRDLSVKKLIEIGFDGYAIGGLSVGEPKENMHHILAHICPQLPEDKPRYLMGVGKPEDLIEGWRRGIDMFDCVIPTRNARNGHLFVTNGVVKIRNAKYKYDITSLDIYCDCYTCCNYSRAYLHHLSRCNEILGARLNTIHNLRYYQRLMADLRDAIDTGTSQYFIEEFYNKTRNSYY

SEQ ID NO: 52485 - protein, 381 aa, Bavariicoccus seileri
  REGION 1..381: note = tr|A0A3D4S2U6|A0A3D4S2U6_9ENTE Queuine tRNA-ribosyltransferase OS=Bavariicoccus seileri OX=549685; GN = tgt PE=3 SV=1
MSNKPISYTLTKTDKQTGARLGELHTPHGTFQTPMFMPVGTQATVKAVSPEELKQMGAGVILSNTYHLWLRPGPDIVAEAGGLHRFMNWDQGILTDSGGYQVFSLSDNRHIVEEGVHFRNHLNGSKMFLSPEKAIEIQTKLGADIIMSLDECPPFDETHDYMAKSIARTTRWAERGLIAHGDNPKQGLFGILQGGGYKDLRIQHAHDMLSLDFSGYSIGGLSVGEPKEKMYEVLNYLTPLMPSHKPRYLMGVGSPDALIEGVINGIDMFDCVLPTRIARNGTCMTSSGRLVVKNAKYERDFAPIDAECDCYTCKNYSRAYVRHLFKADETFGLRLTTIHNLHFLLHLMEQIREAIKNDCLLDFKEEFYEKYGLNAENAKNF

SEQ ID NO: 52486 - protein, 383 aa, Bdellovibrio bacteriovorus
  REGION 1..383: note = tr|Q6MKZ0|Q6MKZ0_BDEBA Queuine tRNA-ribosyltransferase OS=Bdellovibrio bacteriovorus (strain ATCC 15356 / DSM 50701 / NCIB 9529 / HD100); OX = 264462 GN=tgt PE=3 SV=1
MDGHNSTATDATMKLGEFKVHATDGHARRATLMTAHGPVQTPVFMAVGTKATVKAMTPEELKDCGTQVVLGNTYHLHLRPGEKTIARMGGLHKFMNWHGPILTDSGGFQVFSLSQLRNMTEEGVEFRSHLDGAKHFISPEKSMEIQMDLGSDIIMAFDECLKYPATDEEIEKSMALTYRWLLRSQAAMTRKESLLFGIVQGGLSLKHRLKSMEQICSVDLPGYALGGFSVGEPMHLMHALLPDVAPRMPANKPRYLMGVGTPTDLIIAIDSGVDMFDCVMPTRVARNGTIYTWNGKVSIKRSEYKEDPSALDPECDCYTCKNYSKSYLRHMFMSGEILGSRLNTIHNIHFYMKVMEKAREAIAQGRWAEYRDFCLTRFAKKDS

SEQ ID NO: 52487 - protein, 371 aa, Bdellovibrio bacteriovorus
  REGION 1..371: note = tr|A0A162GAL8|A0A162GAL8_BDEBC Queuine tRNA-ribosyltransferase OS=Bdellovibrio bacteriovorus; OX = 959 GN=tgt PE=3 SV=1
MTLGEFKVHQTAGNARRATLMTAHGPVQTPVFMAVGTKATVKAMTPEELKECGTQVVLGNTYHLHLRPGEKTIAKMGGLHKFMNWHGPILTDSGGFQVFSLSQLRNMSEEGVEFRSHLDGAKHFISPEKSMEIQMDLGSDIIMAFDECLQYPATEEEIDKSMALTYRWLLRSRDAMVRKESLLFGIVQGGLSLNHRLKSMEQICSVDLPGYALGGFSVGEPIHLMHELLPDVAPKMPANKPRYLMGVGTPTDLIIAIDSGIDMFDCVMPTRVARNGTIFTWRGKVSIKRSEYREDSSPLDPECDCYTCRNYTKAYLRHLFLSGEILGSRLNTIHNIYFYMKLMERARKAIEEGRWEEFRNDCLTRFAKKDS

SEQ ID NO: 52488 - protein, 380 aa, unidentified
  source 1..380: note = Bdellovibrio exovorus
  REGION 1..380: note = tr|M4VR40|M4VR40_9PROT Queuine tRNA-ribosyltransferase OS=Bdellovibrio exovorus JSS; OX = 1184267 GN=tgt PE=3 SV=1
MSTAQPVLKLGEFKLHKKSGKARRATFMTAHGSFETPTFMAVGTKATVKAMTPEELKDCGTQVVLGNTYHLHLRPGEKLIKKMGGLHKFMNWNGPILTDSGGFQVFSLSGLRKMSEEGVEFSSHLDGAKYFISPEKSMEIQMDLGSDIIMAFDECLQYPATNDEIKRSMDLTHRWLLRSHKAMTRDQSLLFGIVQGGLSLEHRKYSLQQVTSVDLPGYALGGFSVGEPIHLMHELLPDIAPLMPENKPRYLMGVGTPLDLIISIDAGVDMFDCVLPTRVARNGTLYTWQGRMSIKRQEYKEDAGPLDPECDCYTCKNYSRAYLRHLFLSGEILGSRLNTIHNLHFYMTVMAKARKALEEDRWESFRDDCLTRFVRSDKQS

SEQ ID NO: 52489 - protein, 377 aa, Bdellovibrio sp.
  REGION 1..377: note = tr|A0A514XNW5|A0A514XNW5_9PROT Queuine tRNA-ribosyltransferase OS=Bdellovibrio sp. ZAP7; OX = 2231053 GN=tgt PE=3 SV=1
MTETKNEMKLGEFTVHKTEGHARRATLMTAHGPVQTPVFMAVGTKATVKAMTPEELKECGTQVVLGNTYHLHLRPGEKTIQKMGGLHKFMNWHGPILTDSGGFQVFSLSKLRNMSEKGVEFRSHLDGAKHFISPEKSMEIQMDLGSDIIMAFDECLQYPATDEQIDKSMALTYRWLLRSKEAMTRKESLLFGIIQGGLSLEHRLKSLEQITSVDLPGYALGGFSVGEPIHLMHELLPHVAPKMPANKPRYLMGVGTPTDLIIAIDSGIDMFDCVMPTRVARNGTIFTWQGKVSIKRSEYKEDPSPLDPECDCYTCTNYSKAYLRHMFLSGEILGSRLNTIHNIHFYMKLMEKAREAIAEGRWAAFRDDCLTRFVKKA

SEQ ID NO: 52490 - protein, 375 aa, Bdellovibrio sp.
  REGION 1..375: note = tr|A0A317JLU8|A0A317JLU8_9PROT Queuine tRNA-ribosyltransferase OS=Bdellovibrio sp. OX=28201; GN = tgt PE=3 SV=1
MIEKASSAFPCGNFTLLAQEGEARRGRLITAHGPIETPVFMAVGTKATVKAMTTHELAELGTQVVLGNTYHLHLRPGEKIIQRQGGLHQFMRWPGPLLTDSGGFQVFSLNQLRRLTEEGVEFRSHLDGAKHFLSPETSMQIQMDLGSDIIMAFDECLEYPASDERIKESMDLTYRWLLRSQAAMTRTESLLFGIVQGGLSLDFRRYSLQQITSVDLPGYALGGFSVGEPMELMHALVKEVAPLMPAQKPRYLMGVGTPLDLILSIDSGIDMFDCVMPTRVARNGTLFTWQGKVSIKRNEYKEDSSPLDPECDCYTCTHYSKAYLRHLFLSGEILGSRLNTIHNLYFYMNLMAKSRAAIEKGKWREFRNFCLKRFL

SEQ ID NO: 52491 - protein, 382 aa, unidentified
  source 1..382: note = Bdellovibrionaceae bacterium
  REGION 1..382: note = tr|A0A2E7G8V7|A0A2E7G8V7_9PROT Queuine tRNA-ribosyltransferase OS=Bdellovibrionaceae bacterium; OX = 2026715 GN=tgt PE=3 SV=1
MQKPLHFELEKQTTEGPSQARVGKITLRGHLNQNHEITTPMFMPVGTQGTVKALTPEDLENLGAQIILGNTYHLYLRPGHERVERLGMLHQFMNWKGPILSDSGAFQVFSLAGLNQIDDDGVTFKSHIDGSSHRFTPEHSMEVQRALGTDIVMAFDQCPPYPTTDEDLRKAMDRTHAWAKRGLQVELKPHQARFGIVQGGMVEGYRKESAEILSSMDFDGYAIGGLSIGEPVELLHEMTQITAPLLPQTKPRYLMGVGRPEDLIEGVRSGIDIFDCVMPTRNARNGQLFTSTGKINIKNAQYAEDQRPLDESCQCETCRNYTRAYLHHLFRAGEALSARLNSIHNLSFYISLMNKMRSAIVENRFESWRKSFYTLYHHDKKK

SEQ ID NO: 52492 - protein, 368 aa, unidentified
  source 1..368: note = Bdellovibrionaceae bacterium
  REGION 1..368: note = tr|A0A2E1Q5W9|A0A2E1Q5W9_9PROT Queuine tRNA-ribosyltransferase OS=Bdellovibrionaceae bacterium; OX = 2026715 GN=tgt PE=3 SV=1
MIGKFSVDAKSGQARAGTLTTRRGDIQTPVFMPVGTKATVKSMLPEELKDLGAQIVLGNTYHLHLRPGEKTIKSLGGLHKFMNWDRPILTDSGGFQVFSLSQLSKITEEGVTFQSHLDGAKHFLSPETSMQIQMDLGSDIIMAFDECLKYPATKEENIKSMELTIRWLKRSKEAMTDKGALLFGIVQGGLDLELRKKSLEMTLDVDLPGYALGGFSVGEPIHLMHELVPQVAPLLPENKPRYLMGVGTPLDLILSVDAGIDMFDCVMPTRVARNGTLYTWQGKVSIKRAEYREDPSPLDPECGCYTCTNYSKAYLRHLFLSGEILSSRLNTIHNLYFYLDLMKKARRSLLEGRWEEFRDFCLTRFVKP

SEQ ID NO: 52493 - protein, 389 aa, unidentified
  source 1..389: note = Bdellovibrionales bacterium
  REGION 1..389: note = tr|A0A1F3SEA6|A0A1F3SEA6_9PROT Queuine tRNA-ribosyltransferase OS=Bdellovibrionales bacterium GWA2_49_15 OX=1797384 GN=tgt PE=3 SV=1
MSIENIQHQNRQHFKFELLHEDKNSRARAGIIHTPHGDIPTPVFMPVGTHAAIKALQPRELLDQDIRILLSNTYHLYLTPGPELIKKAGGLHKFMGWPRAILTDSGGFQVFSLQKKSIKEEGAEFKNLEGKTVLLSPEISILTQESLGSDIMMAFDECIPYPATPAYVEKSIARTHRWLDRCIKAWTRPDCSLFGIIQGGTYDEHRKRCVEEVCSKDLPGYAIGGVSVGEGPELMEKAVSFTAPLMPKDRPRYVMGVGHPQDLLMIWEHGIDMSDCIIPTKYARGGTLYTTRGRVRIRHRNYRRDFYPIDPSCNCYVCKNFSRAYLKHLFDSNEILGAILATTHNIAFYRTMAANARAAILADKFMEFKKDFLNHYGTENRGDEPADED

SEQ ID NO: 52494 - protein, 356 aa, unidentified
  source 1..356: note = Bdellovibrionales bacterium
  REGION 1..356: note = tr|A0A1F3WWJ3|A0A1F3WWJ3_9PROT Queuine tRNA-ribosyltransferase (Fragment) OS=Bdellovibrionales bacterium RIFOXYB2_FULL_36_6 OX=1797394 GN=A2328_07885; PE = 3 SV=1
ATIQTVHGSIHTPIFMPVGTRASVKTMGQHDLEEIGAEIILGNTYHLLLRPGPQLVEQSFGSLHGFMNWQRPILTDSGGFQVYSLSKLSKVTPDGVIFKSHLDGKEYKIGPIESMEIQRSLGADIIMNFDECPSLPATKEKLKQSMDLTLKWAQICRDMKIRDYQKLFGIIQGGLHLDLRGECMEKLINMGFDGLALGGLSVGEKNIEMQNFLTEFVHTMPEPMPRYLMGVGTPLDILNGIKSGIDMFDCVLPTRNARNGQFLTHGGKLSIKKARFIEDKLPPDPKCACKVCKRYSRAYIRHLYTVGEYLAGQLITYHNLYFYMNMVREVRMSILSNSFDEYYNNFYKSYQSCEWE

SEQ ID NO: 52495 - protein, 370 aa, Beggiatoa alba
  REGION 1..370: note = tr|I3CC06|I3CC06_9GAMM Queuine tRNA-ribosyltransferase OS=Beggiatoa alba B18LD OX=395493; GN = tgt PE=3 SV=1
MHFELLKTQGLARRARLHFARGVVDTPAFMPVGTYATVKAVTPEQVEATGAQIVLGNTFHLMLRPGTEIIKLHGDLHDFMHWRKPILTDSGGFQVFSLGQIRKITEAGVTFRSPIDGAKVFMGPEESMAVQRDLGSDIVMIFDECTPYPATESQARESMELSLRWAKRSKEAHGDNPSALFGIVQGGMYESLRLESLAGLTEIGFDGYALGGLSVGEPKEEMIRVLTAIAPRLPFDKPHYLMGVGLPVDIVNAVCQGIDMFDCVIPTRNARNGHLFTSKGAIKIRNSRHRHDTRPLDENCDCYTCQNYTRAYLHYLDKAREILGAHLNTIHNLHYYQKLMQGLRAAIEEQRLPAFVRDFYRDTQGNLEDN

SEQ ID NO: 52496 - protein, 370 aa, unidentified
  source 1..370: note = Beggiatoa leptomitoformis
  REGION 1..370: note = tr|A0A2N9YIT4|A0A2N9YIT4_9GAMM Queuine tRNA-ribosyltransferase OS=Beggiatoa leptomitoformis; OX = 288004 GN=tgt PE=3 SV=1
MQFELLATDGLARRARLHFSRGVVDTPAFMPVGTYATIKAVTTEQVEATGAQIVLGNTFHLMLRPGTEIINLHGDLHDFMHWRKPILTDSGGFQVFSLGKIRKITEAGVLFRSPIDGAKVFMGPEESMTVQRALGSDIVMIFDECTPYPATESQARTSMELSLRWAKRSKIAHGDNSSALFGIVQGGMYEALRVESLAGLTEIGFDGYALGGLSVGEPKEEMIRVLTEVAPKLPFNKPHYLMGVGLPVDIVNAVCQGIDMFDCVIPTRNARNGHLFTSKGAVKIRNSRHRRDTRPLDENCDCYTCRNYTRAYLHYLDKAREILSSHLNTIHNLHYYQKLMQGLRLAIEEHRLPAFVRDFYRETQGTLDDN

SEQ ID NO: 52497 - protein, 366 aa, Beggiatoa sp.
  REGION 1..366: note = tr|A7C2S2|A7C2S2_9GAMM Queuine tRNA-ribosyltransferase OS=Beggiatoa sp. PS OX=422289; GN = tgt PE=3 SV=1
MDFELLATDGLARRARLHFPRGTVETPAFMPVGTYGTVKAMTPEQVRATGADIILGNTFHLMLRPGTKIIAEHGDLHHFMHWDRPILTDSGGFQVFSLGETRTISEEGVTFRSPIDGDKVFLGPEESMAVQRALGADIVMIFDECTPYPATELQARESMELSLRWAARSKQAHSDNSAALFGIVQGGMYEHLRQASLAGLIDISFDGYAIGGLSVGEPKEEMQRILTFLSPQMPPNQPRYLMGVGTPADIVEAVRCGIDMFDCVMPTRNARNGFLFTHFGIVRIRNSQYRNDTNPLDSSCDCYTCQNYSRAYLHHLDKVKEILGSHLNTLHNLHYYQKLMQSLRQAIAEENLEEFVQHFYATQSPK

SEQ ID NO: 52498 - protein, 310 aa, Beggiatoa sp.
  REGION 1..310: note = tr|A0A1W9L2Z4|A0A1W9L2Z4_9GAMM Queuine tRNA-ribosyltransferase (Fragment) OS=Beggiatoa sp. IS2; OX = 1934247 GN=BWK79_14480 PE=3 SV=1
HTIGSDIVLSNTFHLLLRPGMTVIAAHGGLHQFMHWDKPILTDSGGFQVFSLGDRRIVTEQGVTFRSPIDGAKVFLSPEESMAVQRTLNSDIVMIFDECTPYPATEEQVRVSMELSLRWAERSKRAHSDNPSALFGIVQGGVYEQLRERSLRELLNIGFAGYALGGLSVGEPKADMLRILRHSVPQLPTDKPRYLMGVGTPADIVTAVRLGVDMFDCVLPTRNARNGYLFTSQGVVRIRNSQYRLDTTSLDPECDCYTCRNFSRAYLHHLDKAHELLGLHLHTLHNVRYYQRLMQKLREAISGQYLFLLN

SEQ ID NO: 52499 - protein, 386 aa, Beijerinckia indica
  REGION 1..386: note = tr|B2IHG3|B2IHG3_BEII9 Queuine tRNA-ribosyltransferase OS=Beijerinckia indica subsp. indica (strain ATCC 9039 / DSM 1715 / NCIB 8712) OX=395963; GN = tgt PE=3 SV=1
MSEPAESETAFRFKLLHQDGAARAGVISTPRGEIRTPAFMPVGTAATVKAMQPEAVRALGADIVLSNTYHLMLRPGAERIAALGGLHRFMNWPHPILTDSGGFQVMSLAKLRKLDENGVTFQSHIDGARHVLTPERSMEIQDLLGSDIVMQFDECVRLPCAPGEAERAMRLSLRWGERSKRALAPKSGRALFGIVQGGDDKALRRESATELVSMGFDGYALGGLAVGEPQAVMLDMIETVMPFLPVDKPHYLMGVGTPDDLLQSVKRGIDMFDCVMPTRAGRHGLVFTRHGRINLRNARHADDPAPIDEKSSCAAARIYSRAYLHHLVKASEILGMILMTTINLAYYQELMAGMRAAIAEGRFEDFAAETEALWREGESLSGRASA

SEQ ID NO: 52500 - protein, 376 aa, Beijerinckia sp.
  REGION 1..376: note = tr|A0A1H4QQT6|A0A1H4QQT6_9RHIZ Queuine tRNA-ribosyltransferase OS=Beijerinckia sp. 28-YEA-48; OX = 1882748 GN=tgt PE=3 SV=1
MSNGFSFVIAKTQGAARTGRIIMPRGEIRTPAFMPVGTAATVKAMYPQQVRELGADIVLGNVYHLMLRPGAERVAEFGGLHRFMNWPYPILTDSGGFQVMSLAKLRKLDENGVTFQSHIDGSRHLLTPERSMEIQHLLGSNIQMQFDECVKLPASDAETERAMRLSLRWAERSRKAFRGGDGHAAFGIVQGGANKPLRIESARALADMDFHGLAIGGLAVGEPQDVMLDMIETVEPHLPSAKPRYLMGVGTPDDLMKSVARGVDMFDCVMPTRAGRHGQAFTSFGKLNLRNAKYATDQRPLDENSPASAGRDYTRAYLHHLVKSEEILAMMLLTWNNLAYYQQLMAGMREAIATGNLADYCDGVREGWARGTDAEA

SEQ ID NO: 52501 - protein, 387 aa, unidentified
  source 1..387: note = Beijerinckiaceae bacterium
  REGION 1..387: note = tr|A0A4P7F2K7|A0A4P7F2K7_9RHIZ Queuine tRNA-ribosyltransferase OS=Beijerinckiaceae bacterium; OX = 1978229 GN=tgt PE=3 SV=1
MTEAFHFKATSQDGDARAGMITTPRGQIRTPAFMPVGTAATVKAMHPEAVKNLGADIVLANTYHLMLRPGAERIAVLGGLHKFMNWPWPILTDSGGFQVMSLAKLRKLDENGVTFQSHMDGARHVLTPERSMEIQDLLGSDIQMQFDECVKLPCEESEARRAMLLSLRWAERSKAAFVAKQGRALFGIVQGGAVEPLRVESAKALTEIGFDGYAVGGLAVGEPQAIMLAMLDCVLPWLPSAAPRYLMGVGTPDDLVESVRRGIDMFDCVMPTRAGRHGLAYTRSGRLNLRNACHAEDPAPVDPLSSCAAARTYSRAYLHHLVKSGEILAMMLLTEINLAYYQDLMADMRGAIAAGQFEPFCAKTKAAWQTEETAENAMRGIIGQAAD

SEQ ID NO: 52502 - protein, 379 aa, unidentified
  source 1..379: note = Beijerinckiaceae bacterium
  REGION 1..379: note = tr|A0A522GHE0|A0A522GHE0_9RHIZ Queuine tRNA-ribosyltransferase OS=Beijerinckiaceae bacterium; OX = 1978229 GN=tgt PE=3 SV=1
MTREFYFDIKATDGAARSGVISTPRGEIHTPAFMPVGTAATVKAMHPAAVHALGAEIVLSNTYHLMLRPGAERIAALGGLHSFMNWQHPILTDSGGFQVMSLSKLRKIDENGVVFQSHIDGSRHTLTPERAMEIQRLLGSDIQMQLDECVKLPADERDIERAMILSLRWAERSREAFGTQPGHAVFGIVQGGVSASLRATSAKALTDMDFHGYALGGLAVGEPQESMLATIEATVPYLPSTKPRYLMGVGSPDDLIEAAGRGIDMFDCVMPTRAGRHGLVYSRFGRINLRNAKHADDPRPIDPLAACEPARIYSRAYLHHLVKAGEILAMMLLTEINLSYYQSLMRETRQAIEAGRFADFAAATKAAWTQGETDWSVSQ

SEQ ID NO: 52503 - protein, 376 aa, Belliella baltica
  REGION 1..376: note = tr|I3Z1H1|I3Z1H1_BELBD Queuine tRNA-ribosyltransferase OS=Belliella baltica (strain DSM 15883 / CIP 108006 / LMG 21964 / BA134) OX=866536 GN=tgt; PE = 3 SV=1
MKFTLQHTDPQSKARAGVLKTDHGDIETPIFMPVGTAGSVKAVHQRELTYDIKAQIILGNTYHLYLRPGLGVLEKAGGLHKFNGWEKPILTDSGGYQVFSLAGTRKITEEGVVFKSHIDGSKHIFSPEGVMDIQRSIGADIIMAFDECTPYPCEFEYARKSMDMTHRWLKRCIERFDSTEGKYGYNQTLFPIVQGSVYKDLRKRSAEFIASCDREGNAIGGLSVGEPAEMMYEMTEMVTDILPEDKPRYLMGVGTPANILECIALGVDMFDCVMPTRNARNGMLFTSEGIINIRNEKWKEDFSPLDPVINSYVSSFYSKAYLRHLTISKEILAAQIASIHNLAFYLWLVGQAREKIKSGEFSSWKDQMVKKVSTRL

SEQ ID NO: 52504 - protein, 376 aa, unidentified
  source 1..376: note = Belliella buryatensis
  REGION 1..376: note = tr|A0A239B753|A0A239B753_9BACT Queuine tRNA-ribosyltransferase OS=Belliella buryatensis; OX = 1500549 GN=tgt PE=3 SV=1
MKFILEHTDPQSKARAGVVKTDHGDIETPIFMPVGTAGSVKAVHQRELTYDVKAQIILGNTYHLYLRPGLDVLEKAGGLHKFNGWSKPILTDSGGYQVFSLAGTRKITEEGVLFKSHIDGSKHIFSPEGVMDIQRTIGADIIMAFDECTPYPCEFGYARNSMEMTHRWLKRCIERFDSTEGKYGYSQTLFPIVQGSVYKDLRKQSAEFIASCEREGNAIGGLSVGEPAEMMYEMTEMVTDILPKDKPRYLMGVGTPANILECIALGVDMFDCVMPTRNARNGMLFTSEGIINIRNEKWKDDFSPIDLGINSYVSSFYSKAYLRHLTISKEILAAQIASIHNLAFYLWLVGQAREKIKSGEFAAWKDQMVKKVSTRL

SEQ ID NO: 52505 - protein, 376 aa, Belliella pelovolcani
  REGION 1..376: note = tr|A0A1N7M544|A0A1N7M544_9BACT Queuine tRNA-ribosyltransferase OS=Belliella pelovolcani OX=529505; GN = tgt PE=3 SV=1
MKFILEHTDPQSKARAGIVKTDHGDIETPIFMPVGTAGSVKAVHQRELTYDVKAQIILGNTYHLYLRPGLDVLEKAGGLHKFNGWSKPILTDSGGYQVFSLAGTRKITEEGVVFKSHIDGSKHVFSPEGVMDIQRTIGADIIMAFDECTPYPCEFGYARNSMEMTHRWLKRCIERFDSTEGKYGYSQTLFPIVQGSVFKDLRKQSAEFIASCDREGNAIGGLSVGEPAEMMYEMTDMVTDILPKDKPRYLMGVGTPANILEGIALGVDMFDCVMPTRNARNGMLFTSEGIINIRNEKWKDDFSSIDPGINSYVSSFYSKAYLRHLTIAKEILAAQIASIHNLAFYLWLVGQAREKIKTGEFAIWKDQMVKKVSTRL

SEQ ID NO: 52506 - protein, 363 aa, Bellilinea caldifistulae
  REGION 1..363: note = tr|A0A0P6XHK7|A0A0P6XHK7_9CHLR Queuine tRNA-ribosyltransferase OS=Bellilinea caldifistulae; OX = 360411 GN=AC812_11185 PE=3 SV=1
MKLQLPHGHLDFPAFLPDATLAVVRTVDSRDLRACGIPALMMNAFHLMQKPGSSVIQALGGLHRMSNWDRPIFTDSGGFQAYSLIRQNPRFGKMDERGITFQPEGGQRKFLLTPEKSVQLQIGYDSDVVICLDDCTHVEAPRSEQELSVQRTIAWAKRARREYDRLMEQKKLTGGQRPLIFAVIQGGGELDLRRQCADALLEIGFDGYGFGGWPLDSSGSLLSEILEYTRQLVPAQYPLHALGIGHPHNVVTGWQLGYSIFDCAMPTRDARHGRLYTFTNPPGQDGGLNGNWLEYLYINDERHMRSSRPISEWCDCPTCQQYSLGYLRHLFKINDSLFLRLATIHNLRFMTQLTERIRLNSHA

SEQ ID NO: 52507 - protein, 375 aa, Bellilinea caldifistulae
  REGION 1..375: note = tr|A0A0P6XYU6|A0A0P6XYU6_9CHLR Queuine tRNA-ribosyltransferase OS=Bellilinea caldifistulae; OX = 360411 GN=tgt PE=3 SV=1
MTTFNFQYDLVAKDHNARAGVFHTPHGDLLTPIFAPVGTQATVKAVTPAQLKEIGVTLVLANTYHLYLRPGADLVAEMGGLHHFMRWDSPILTDSGGFQVFSLAGMRKIDEDGVTFKSHIDGSIHRFTPEKAIQVQEQLGADIIMAFDECAPPYDRAYNQQAVARTHRWAERCLAAQTRPDQALFGIVQGGIFPDLREQSARFISSLGFPGHAIGGLSVGETKEEMHRTLELLNQILPEDKPRYLMGVGSPEDLINGIRRGVDIFDCVLPTRLARHQAAMTRQGRLNLMNAAHARDPRPIDEKCHCYTCTHFSRAYLRHLIVAKEMLAATLISIHNIATLVYLVQDARRAILEGTFEQFAEEFLAHYTLPEKAQA

SEQ ID NO: 52508 - protein, 379 aa, Belnapia rosea
  REGION 1..379: note = tr|A0A1G6KJC6|A0A1G6KJC6_9PROT Queuine tRNA-ribosyltransferase OS=Belnapia rosea OX=938405 GN=tgt; PE = 3 SV=1
MTLHWTSVARDGAARAGVLHTAHGMVETPVFMPVGTAGTVKAMTADAVRATGARMVLGNTYHLMLRPGAERLARLGGLHRFMDWHGPILTDSGGFQVMSLAGLRTMDEEGVTFRSHVDGARHRLTPERSIEIQHLLGADVTMCFDECTPFPATEEEAASSMRLSMRWAARSRAAFRPREGHGLFGIVQGGVHPVLRAESVAALTAIGFEGYAVGGLAVGEGQAAMFATLDCTTPLMPQEAPRYLMGVGTPGDILGAVRRGIDMFDCVIPTRSGRTGRAYTSGGMLNLRNARHAEDPSPLDPACGCPACARHSRAYLHHLIKAEEMLGPMLLTWHNIQYYQDLMRGIRHAICEGRLADHAAALEAGWAATPPPPAEEKDG

SEQ ID NO: 52509 - protein, 371 aa, Bergeriella denitrificans
  REGION 1..371: note = tr|A0A378UFM7|A0A378UFM7_BERDE Queuine tRNA-ribosyltransferase OS=Bergeriella denitrificans; OX = 494 GN=tgt PE=3 SV=1
MLKFTLHQTDGHARRGTLELNHGTIETPVFMPVGTYGSVKAMTPDNLHDIKAQIILGNTYHLWLRPGLEVIEQFGGLHGFIGWDKPILTDSGGFQVFSLSDMRKLTEEGCTFKSPINGDKLFLSPEISMKIQTVLNSDIVMQLDECTPGEASHEQAKKSLQMSLRWAERSKKVFEDLKNPNALFGIVQGAMYEDLREESLKGLEQFDFPGLAVGGLSVGEPKPEMYRMLRAVGPILPKHKPHYLMGVGTPEDLVYGVAHGIDMFDCVMPTRNARNGWLFTRFGDIKIKNAKHKHDTRPLDESCSCYACRNFSRAYLHHLHRAGEILGAQLNTIHNLHFYQVIMAEMREAIEQGKFADWQAQFHENRARGAD

SEQ ID NO: 52510 - protein, 377 aa, Bergeyella zoohelcum
  REGION 1..377: note = tr|A0A380ZS91|A0A380ZS91_9FLAO Queuine tRNA-ribosyltransferase OS=Bergeyella zoohelcum OX=1015; GN = tgt PE=3 SV=1
MKKIFNIDKATEGKARAGVITTDHGEIQTPIFMPVGTVASVKTVHQRELREDIKAQIILGNTYHLYLRPGMEVMEAAGGLHQFMNWQKPILTDSGGFQVFSLADSRKITEEGAKFKSHIDGSYHFISPEISMEIQRKIGADILMAFDECTPYPCEYHQAKKSMEMTHRWLKRCMDWCEENPPIYGHQQYLFPIVQGSTYSDLRKISAEVISEADCAGNAIGGLSVGEPEEEMYRITDEVTDILPKEKPRYLMGVGTPWNILESIGLGIDMMDCVMPTRNARNGMLFTWDGVINIRNEKWKKDFSPLDESGTAFVDFEYSKAYLRHLFVAKEYLGKQIASIHNLAFYLDLVTQARKHILAGDFYQWKNAVVPRLRQRR

SEQ ID NO: 52511 - protein, 377 aa, Bergeyella zoohelcum
  REGION 1..377: note = tr|K1M1G8|K1M1G8_9FLAO Queuine tRNA-ribosyltransferase OS=Bergeyella zoohelcum ATCC 43767; OX = 883096 GN=tgt PE=3 SV=1
MKKIFNIDKATEGKARAGVITTDHGEIQTPIFMPVGTVASVKTVHQRELREDIKAQIILGNTYHLYLRPGMEVMEAAGGLHQFMNWQKPILTDSGGFQVFSLADSRKITEEGAKFKSHIDGSYHFISPEISMEIQRKIGADILMAFDECTPYPCEYHQAKKSMEMTHRWLKRCMDWCEENPPIYGHQQYLFPIVQGSTYSDLRKISAEVISEADCAGNAIGGLSVGEPEEEMYRITDEVTDILPKEKPRYLMGVGTPWNILESIGLGIDMMDCVMPTRNARNGMLFTWDGVINIRNEKWKKDFSPLDESGTAFVDFEYSKAYLRHLFVAKEYLGKQIASIHNLAFYLDLVTQARKHILAGDFYEWKNTVVPRLRQRR

SEQ ID NO: 52512 - protein, 382 aa, unidentified
  source 1..382: note = Berkelbacteria bacterium
  REGION 1..382: note = tr|A0A0G0K3E5|A0A0G0K3E5_9BACT Queuine tRNA-ribosyltransferase OS=Berkelbacteria bacterium GW2011_GWB1_38_5 OX=1618336 GN=tgt PE=3 SV=1
MHMFKFKITKKSKKNLARSGVLILPHGKVETPVFMPCATRGSVKGISQAELKQLGYKIILSNTYHLYLRPGDEQIKNLGGLQKFINWKKPILTDSGGYQVFSLGKNFRSYSDEEKLSSLVNVKKDGAWFKSHLDGSKHFFSPEKVIDIQKNLGSDIMMVLDECTEFPASKKRAAESMEMTHLWAQKSIEYWQSFKNSYQALFGIIQGSTYKDLRKKSAEYISSLGFDGLAVGGVSVGEGKRHMYQVMKWIGPLLPADKPHYLMGVGEPEDIIEAVKWGFDMFDCVLPSRLGRHGTVWVTSDWPLDLARGKNKFTKIDLRKTQFRKDKKIIMKGCGCEACKQGYSRAYISHLIREKEMLGMRLASIHNLWIISTLMDKIRKSI

SEQ ID NO: 52513 - protein, 364 aa, unidentified
  source 1..364: note = Berkelbacteria bacterium
  REGION 1..364: note = tr|A0A0G0FG38|A0A0G0FG38_9BACT Queuine tRNA-ribosyltransferase OS=Berkelbacteria bacterium GW2011_GWA1_36_9 OX=1618331 GN=tgt PE=3 SV=1
MFKFKVTKQSKNSLARTGVLETSHGKIETPVFMPCATRGTVKGISFEELKNLGFKIILGNTYHLYLRPGDTLIKELGGLHKFMNWEESILTDSGGYQVFSLSKNLNLVKLKKEGVVFKSHLDGSKHLFTPEKVIEIQKNLGSDIMMVLDECTAFPATKKQAQESMESTHLWAKKASDYWQEKGNKKQALFGIIQGSVYKDLREESTKFISKLPFDGIAVGGVSVGEGKTHMYNVLKWVGPKLPKDKPHYLMGVGEPEDIIKAVSYGFDMFDCVLPTRLGRHGTIWQTENWKKFTKIDLRKSKYSHDQKIMMEGCKCPACSLGYSRAYISHLVREKEMLGMRLASLHNLFILQELTRKIREGLLF

SEQ ID NO: 52514 - protein, 372 aa, Bermanella marisrubri
  REGION 1..372: note = tr|Q1MY62|Q1MY62_9GAMM Queuine tRNA-ribosyltransferase OS=Bermanella marisrubri OX=207949; GN = tgt PE=3 SV=1
MKFDVKTTQGKARRGTLSFPRGDIQTPAFMPVGTYGSVKGMLPRDVKDTGAEIILGNTFHLWLRPGTEIIEQAGDLHDFMQWDKPILTDSGGFQVFSLGKMRKITEHGVTFRSPVNGNKVELTPEKSMEIQKSLGSDIVMIFDECTPYPATEKEAKDSMEMSLRWAKRSKDAHGDSPSALFGIIQGGMYENLRDESLAGLTDIGFDGYAIGGLSVGEPKEDMVRILDHLAHKMPEDKPRYLMGVGKPEDLVEGVRRGVDMFDCVMPTRNARNGHLFTSKGVLKLRNAANKTDHGPIDPECDCYTCQNFSRAYLHHLDKCKEIQGCTLNTIHNLHYYQTVMAGLRQALEEGKLDDFVNEFYAKQGKDVPPLSE

SEQ ID NO: 52515 - protein, 375 aa, Bermanella sp.
  REGION 1..375: note = tr|A0A1Y5DM88|A0A1Y5DM88_9GAMM Queuine tRNA-ribosyltransferase OS=Bermanella sp. 47_1433_sub80_T6; OX = 1856278 GN=tgt PE=3 SV=1
MSFMKFDLKLSDGKARRGTLSFPRGEIQTPAFMPVGTYGTVKGMLPRDVKELGAEIILGNTFHLWLRPGSDIIKDLGGLHKFMHWDKPILTDSGGFQVFSLGKMRKITEEGVTFRSPVNGDKVELTPEKSMEIQRNLGSDIVMIFDECTPYPATTKEAKDSMEMSLRWAKRSKDAHGESPSALFGIIQGGMYEDLRDVSLKGLTDIGFDGYAIGGLSVGEPKEDMVRILDHLAHKMPEDKPRYLMGVGKPEDLVEGVRRGIDMFDCVMPTRNARNGHLFIDTGVLKLRNAANKTDSGPADPTCDCHTCQNFSRAYLHHLDKCKEILGCTLNTIHNLHFYQTLMAGLRKALEEGTLSAFVEEFYAKRGLPVPPLAD

SEQ ID NO: 52516 - protein, 372 aa, Bermanella sp.
  REGION 1..372: note = tr|A0A2D4RZF0|A0A2D4RZF0_9GAMM Queuine tRNA-ribosyltransferase OS=Bermanella sp. OX=2024825; GN = tgt PE=3 SV=1
MKFDLKKTDGKARRGTLSFPRGEIQTPAFMPVGTYGSVKGMLPRDVKDTGAEIILGNTFHLWLRPGIDIIKGAGTLHNFMQWDKPILTDSGGFQVFSLGKMRKITEKGVTFRSPVNGDKVELTPEKSMEIQAALGSDIVMIFDECTPYPATHKEAKDSMEMSLRWAQRSKDAHGDSESALFGIIQGGMYEDLRDVSLAGLTDIEFDGYAIGGLSVGEPKEDMVRILDHLAHKMPEDKPRYLMGVGKPEDLVEGVRRGVDMFDCVMPTRNARNSHLFIDTGVLKLRNAANKTDHGPIDETCDCYTCQNFSRAYLHHLDKCKEIQGSTLNTIHNLHFYQTVMAGLRKALEEGTLSDFVEEFYAKRGKPVPEITD

SEQ ID NO: 52517 - protein, 376 aa, unidentified
  source 1..376: note = Bernardetia litoralis
  REGION 1..376: note = tr|I4AN58|I4AN58_BERLS Queuine tRNA-ribosyltransferase OS=Bernardetia litoralis (strain ATCC 23117 / DSM 6794 / NBRC 15988 / NCIMB 1366 / Sio-4); OX = 880071 GN=tgt PE= 3 SV=1
MKFELHTTDKNSSARAGTITTAHGQIQTPIFMPVGTLGTVKGVPPEALKDQVKAQIILGNTYHLYLRPNTEVLEAAGGLHKFMTWDRPILTDSGGYQVYSLGQMRKIKEEGVIFKSHIDGSKLNFTPEYVMDIQRTIGADIMMAFDECPPYPSDYDYAKKSMEMTHRWLKRCINRFDSTEGKYGYEQTLFPIVQGSTYKDLRRASAEFVAEQNREGNAIGGLSVGEPAEKMYEFTELVCDILPKDKPRYLMGVGTPANILEGIALGVDMFDCVMPTRNARNGMLFTTKGIINIKNKKWEKDFSVLDDGLDCHVSNTYSKSYLRHLNKANEILGAYIASTHNLAFYLHLVGEARKHILAGDFASWKKEQVEVLMQRL

SEQ ID NO: 52518 - protein, 375 aa, unidentified
  source 1..375: note = Unknown
  REGION 1..375: note = tr|A0A0N1ARS7|A0A0N1ARS7_9PROT Queuine tRNA-ribosyltransferase OS=beta proteobacterium AAP51; OX = 1523421 GN=tgt PE=3 SV=1
MLKFELHKTHGHARRGTLTLNHGTVETPVFMPVGTYGTVKGVLPRSLEEMGAQIILGNTFHLWMRPGLDVIQQFGGLHRFEGWSKPMLTDSGGFQVWSLGEMRKISEEGVKFASPVNGDKLFLTPEVSMQIQTVLNSDIVMQFDECTPYEVKGHLTTEAEARKSMELSLRWAQRSQAEFARLANPNALFGIVQGGMFEHLRQESLDALVAMDLPGYAVGGVSVGEPKEEMLRIMAHTPHRLPAHKPRYLMGVGTPEDLVEGVAQGVDMFDCVMPTRNARNGHLFTRFGDLKVRNARHRDSQAPVDETCTCYTCSNFSRAYLHHLDRCGEMLGPMLASIHNLHYYVNLMREVRQALDEDRFDSWRAQFQADRARGV

SEQ ID NO: 52519 - protein, 377 aa, unidentified
  source 1..377: note = Unknown
  REGION 1..377: note = tr|A0A2T0XRE6|A0A2T0XRE6_9PROT Queuine tRNA-ribosyltransferase OS=beta proteobacterium MWH-P2sevCIIIb OX=323426 GN=tgt PE=3 SV=1
MLKFELLATDGHARRAQMTLNHGVVQTPMFMPVGTYGSVKAMMPHELEEVGSQVILGNTFHLWLRPGTEVIAKHGGLHGFMQWPKPILTDSGGFQVFSLQGMRKITEEGVKFASPIDGSRLFLTPEESMKIQTALNSDIVMVFDECTPYMIKDKPATELEAAVSMRMSLRWAKRSRNAFDDLSNNNALFGIVQGGMFEDLRDESLSGLEEIGFDGYAIGGLSVGEPKEDMLRILTHVAPKLPEQRPRYLMGVGTPEDLVDGVARGIDMFDCVMPTRNARNGWLFTRFGDVKIRNAKYKDDTAPLDPSCGCHTCQHFSLAYLHHLQRANEITGARLNTLHNLHFYLTIMAEMREAIEQGRFKTWREQFDKDRTSKSVQ

SEQ ID NO: 52520 - protein, 252 aa, unidentified
  source 1..252: note = Betaproteobacteria bacterium
  REGION 1..252: note = tr|A0A1F4CG35|A0A1F4CG35_9PROT Queuine tRNA-ribosyltransferase (Fragment) OS=Betaproteobacteria bacterium RIFCSPLOWO2_12_61_14 OX=1797494 GN=A2W81_03660; PE = 3 SV=1
FLTPEESMRIQRVLNSDIAMIFDECTPYPASEREAADSMRLSLRWAERSKRAHEGNSNALFGIVQGGMYENLRDESLRELVNIGFDGYAIGGLSVGEPKEDMLRILAHTAPQLPQDKPRYLMGVGTPEDIVAAVAQGIDMFDCVMPTRNARNGMMFTRHGDIKIKNAQYRLDTRPLDEDCQCYTCRNFSRAYLHHLHRLGEILGARLNTIHNLHYYQQLMGEIRAAVEADAFDAFVARFRQLRSVKMPRASC

SEQ ID NO: 52521 - protein, 367 aa, unidentified
  source 1..367: note = Betaproteobacteria bacterium
  REGION 1..367: note = tr|A0A3N5N394|A0A3N5N394_9PROT Queuine tRNA-ribosyltransferase OS=Betaproteobacteria bacterium; OX = 1891241 GN=tgt PE=3 SV=1
MTFVVEATDGAARVGRLDLPHGRVDTPVFMPVGTYGAVKGMSPAALHALGAQIVLGNTFHLWLRPGLEVIERHRGLHRFMGWDRPILTDSGGFQVFSLGTLRSIAEEGVRFQSPINGDRLLLTPEESMRIQRVLNSDIAMIFDECTPYPMDRAGAAASMQLSLRWAERCARAHAGNPNLLFGIVQGGMYEELRDASLRALIGIGFDGYAIGGLSVGEPKSDMLRILAHTAPALPADKPRYLMGVGTPQDILAAVRAGVDMFDCVLPTRNARNGWLYTSRGILKLRNARYRDDLDALDPGCDCYTCRNFTRAYLHHLQRVNEMLGAQLNTLHNLHYYQSLMERIRMAIRGGTLAHLELPGEGAPNGPC

SEQ ID NO: 52522 - protein, 380 aa, unidentified
  source 1..380: note = Bhargavaea beijingensis
  REGION 1..380: note = tr|A0A1G7CK81|A0A1G7CK81_9BACL Queuine tRNA-ribosyltransferase OS=Bhargavaea beijingensis; OX = 426756 GN=tgt PE=3 SV=1
MTPAVTYELIKKDKQTGARLGIVHTPHGSFETPAFMPVGTQATVKTMSPEELKEMKAGIILSNTYHLWLRPGHEIIKEAGGLHKFMNWDRAILTDSGGFQVFSLSDMRKIEEEGVHFRHHLDGSKLFLSPEKAMEIQNALGSDIMMAFDECPPYPASHEYMKASVERTSRWAERCLEAHSRPEDQGLFGIVQGGEFEDLRRQSARDLISLDFPGYAVGGLSVGEPKEVMNQVLDFTTPLLPENKPRYLMGVGSPDALIDGSIRGIDMFDCVLPTRIARNGTLMTSEGRLVVRNAKFARDFRPLDENCDCYVCRNYSRAYIRHLIKAEESFGIRLTSYHNLYFLMDLMEQVRQAIREDRLGDFREEFFEKYGYNKPNAKNF

SEQ ID NO: 52523 - protein, 380 aa, Bhargavaea cecembensis
  REGION 1..380: note = tr|M7NF84|M7NF84_9BACL Queuine tRNA-ribosyltransferase OS=Bhargavaea cecembensis DSE10; OX = 1235279 GN=tgt PE=3 SV=1
MTPAITYELIKKDKQTGARLGIVHTPHGSFETPAFMPVGTQATVKTMSPEELKEMKAGIILSNTYHLWLRPGHDIIREAGGLHKFMNWDRAILTDSGGFQVFSLSDMRKIEEEGVHFRHHLDGSKLFLSPEKAMEIQNALGSDIMMAFDECPPYPASHEYMKASVERTSRWAERCLEAHARPEDQGLFGIVQGGEFEDLRRQSVQDLTSLDFPGYAVGGLSVGEPKDVMNRVLDFTTPLLPEEKPRYLMGVGSPDALIDGSIRGIDMFDCVLPTRIARNGTLMTSEGRLVVKNAKFARDFRPLDENCDCHVCRNYSRAYIRHLIKAEESFGIRLTSYHNLYFLMNLMEQVRQAIREDRLGDFREEFFEQYGYNKPNAKNF

SEQ ID NO: 52524 - protein, 380 aa, Bhargavaea cecembensis
  REGION 1..380: note = tr|A0A163GC93|A0A163GC93_9BACL Queuine tRNA-ribosyltransferase OS=Bhargavaea cecembensis; OX = 394098 GN=tgt PE=3 SV=1
MTPAITYELIKKDKQTGARLGIVHTPHGSFETPAFMPVGTQATVKTMSPEDLKEMKSGIILSNTYHLWLRPGHDIIREAGGLHKFMNWDRAILTDSGGFQVFSLSDMRKIEEEGVHFRHHLDGSKLFLSPEKAMEIQNALGSDIMMAFDECPPYPASHEYMKASVERTSRWAERCLEAHSRPGDQGLFGIVQGGEFEDLRRQSAQDLISLDFPGYAVGGLSVGEPKDVMNRVLDFTTPLLPEGKPRYLMGVGSPDALIDGSIRGIDMFDCVLPTRIARNGTLMTSEGRLVVKNAKFARDFRPLDENCDCYVCQNYSRAYIRHLIKAEESFGIRLTSYHNLYFLMNLMEQVRQAIREDRLGDFREEFFEQYGYNKPNAKNF

SEQ ID NO: 52525 - protein, 380 aa, unidentified
  source 1..380: note = Bhargavaea ginsengi
  REGION 1..380: note = tr|A0A1H6XGR0|A0A1H6XGR0_9BACL Queuine tRNA-ribosyltransferase OS=Bhargavaea ginsengi OX=426757; GN = tgt PE=3 SV=1
MTPAITYELIKKDKQTGARLGIVHTPHGSFETPAFMPVGTQATVKTMSPEELKEMKAGIILSNTYHLWLRPGHEIIREAGGLHKFMNWDRAILTDSGGFQVFSLSDMRKIEEEGVHFRHHLDGSKLFLSPEKAMEIQNALGSDIMMAFDECPPYPASHEYMKASVERTSRWAERCLEAHMRPEDQGLFGIVQGGEYEDLRRQSAQDLVSLDFPGYAVGGLSVGEPKDVMNRVLDFTTPLLPEEKPRYLMGVGSPDALIDGSIRGIDMFDCVLPTRIARNGTLMTSEGRLVVKNAKFARDFRPLDENCDCHVCRNYSRAYIRHLIKAEESFGIRLTSYHNLYFLMNLMEQVRQAIREDRLGDFREEFFEQYGYNKPNAKNF

SEQ ID NO: 52526 - protein, 383 aa, Bibersteinia trehalosi
  REGION 1..383: note = tr|A0A3R8SQ98|A0A3R8SQ98_BIBTR Queuine tRNA-ribosyltransferase OS=Bibersteinia trehalosi OX=47735; GN = tgt PE=3 SV=1
MKYELKKTSGNARRGRLTFSRPKGEFHVETPAFMPVGTYGTVKGMTPEEVAATGAQILLGNTFHLWLRPGQEVMKMHGDLHDFMQWHGPILTDSGGFQVFSLGKLRKIKEEGVHFQNPISGEKIFLSPEKSMEIQYDLGSDIVMIFDECTPYPATFDYAKQSMEMSLRWAKRSRDRFDELQNPNALFGIIQGGVYEELRKISVEKLVEIGFDGYAVGGLAVGEPKEDMHRILEYVCPQIPADKPRYLMGVGKPEDLVEGVRRGIDMFDCVMPTRNARNGHLFVTNGVVKIRNAKYKTDTTPLDPECDCYTCKNYTKAYLYHLDKCNEILGARLNTIHNLRYYQRLMAEIRQAIEDDRFDDFVVEFYQRMGKEVPPLQLGQDNA

SEQ ID NO: 52527 - protein, 383 aa, Bibersteinia trehalosi; identical to SEQ ID NO: 52526
  REGION 1..383: note = tr|A0A4V7IA63|A0A4V7IA63_BIBTR Queuine tRNA-ribosyltransferase OS=Bibersteinia trehalosi USDA-ARS-USMARC-188 OX=1263829 GN=tgt PE=3 SV=1

SEQ ID NO: 52528 - protein, 437 aa, unidentified
  source 1..437: note = Bifidobacteriaceae bacterium
  REGION 1..437: note = tr|A0A3E2BVL2|A0A3E2BVL2_9BIFI Queuine tRNA-ribosyltransferase OS=Bifidobacteriaceae bacterium GH022 OX=2021357 GN=tgt PE=3 SV=1
MTNLIEHPRGAEPGKPGDRSEFSFTTKTRLENAADGKGKDGARYGRTGVIRTPHGNICTPAFVPVATQGAMKAVLPESIKDLGGQCMLSNAFHLYERPGEDILDEAGGLAKFMNWDGPTFTDSGGFQVLSLGAGFKKTLAMDVTGMKSDDVIAAGKERMAFVDEDGVTFKSPLNGSIHRFSAEISMGIQHKLGADIMFAFDELTTLMNTRRYQEESVERTFRWAKRCVEEHKRLTQARLGKPYQALYGVVQGANYEDLRRRAAQQIASLDFDGVGIGGAIEKRIIGDTCAWICDAMPENRPRHVLGIAAVDDIFACVENGGDTFDCVAPARCGRNGAIFTRHGRYNVKRAEFKHDQGPLEAGCDCYTCTHYSRMYVSHLLRAKEMNGYTLATIHNERFFVKLLDDIRASIDGGYFEDFRDESLAHYYENGSRANRLA

SEQ ID NO: 52529 - protein, 433 aa, unidentified
  source 1..433: note = Bifidobacteriaceae bacterium
  REGION 1..433: note = tr|A0A3E2C959|A0A3E2C959_9BIFI Queuine tRNA-ribosyltransferase OS=Bifidobacteriaceae bacterium VN003 OX=2021358 GN=tgt PE=3 SV=1
MTSLLEHPRGAEPGKPGDRKEFSFTTKTRLSNTAEGKGRDGARYGRTGVIHTPHGDIQTPAFVPVATQAAMKAVLPESIKDLGAQCMLSNAFHLYERPGADVLDEAGGLGKFMNWDKPTFTDSGGFQVLSLGAGFKKTLAMDVTGMKSDDVIAAGKERMAFVDEDGVTFKSPLNGAKHRFSAEISMGIQHKLGADIMFAFDELTTLMNTRRYQEESVERTFRWAKRCVAEHQRLTQERVGKPYQALYGVVQGANYEDLRRHAAEEIASLDFDGVGIGGAIEKRIIGDTCAWICDAMPENRPRHVLGIAAVDDIFACVENGGDTFDCVAPARCGRNGAIFTRHGRYNVKRAEFKHDQRPLEEGCDCYTCTHYSRMYVDHLLRASEMNGFTLATIHNERFFVKLLDNIRASIDGGYFEEFRDETLAHYYEKGAKG

SEQ ID NO: 52530 - protein, 421 aa, Bifidobacterium actinocoloniiforme
  REGION 1..421: note = tr|A0A086YWF5|A0A086YWF5_9BIFI Queuine tRNA-ribosyltransferase OS=Bifidobacterium actinocoloniiforme DSM 22766 OX=1437605 GN=tgt PE=3 SV=1
MSYSSNPGTFGFETTQRLSPTADGLGRDGARYGRTGIIHTPHGDIRTPAFIPVATQAAMKGIPPEQMKDLGAQALLSNAFHLFERPGEDVLDEAGGLGRFMNWSGPTFTDSGGFQVLSLGAGFKKTLAMDVTGLKSDQVIADGKERRAFVDEDGVTFKSPLNGNLHRFSAEISMGIQHKIGADVMFSFDELTTLMNTRSYQEESVERTYRWAQRCVAEHERLTEVRADKPYQALFGVVQGANYEDLRRRAAGQIASLPFDGVGIGGAIEKRLLGQTCAWICDEMPEERPRHVLGIAAVDDIFAGVENGGDTFDCVSPARCGRNGAVFTRDGRWNIMRACMRHDFRPIESDCDCYTCTHYTRAYICHLLHAHELNGLTLASIHNERFFVRLLDEIRASIDGGYFDDYKRETLARFYAHGSKG

SEQ ID NO: 52531 - protein, 471 aa, Bifidobacterium adolescentis
  REGION 1..471: note = tr|A0A1X3A4X9|A0A1X3A4X9_BIFAD Queuine tRNA-ribosyltransferase OS=Bifidobacterium adolescentis; OX = 1680 GN=tgt PE=3 SV=1
MTSLNEPQTGAVAHETSAANAAAGATHDAAGNTTSAASTENLIKHPRGAEPGKPGRRDAFYFEQKTRLPDAADGKGRGGARYGRTGIIHTPHGDIHTPAFVPVATQAAMKAVLPETMKDLGAQCLLSNAFHLYERPGEQVLDEAGGLAKFMNWNGPTFTDSGGFQVLSLGAGFKKTLAMDVTGMKSDDVIAEGKERLAFVDEDGVTFKSPLNGSLHRFSAEISMGIQHKIGADIMFAFDELTTLMNTRGYQERSVERTYRWAQRCVAEHKRLTEERLGKPYQALYGVVQGANYEDLRRHAAEQIASLDFDGVGIGGAIEKRIIGDTCAWICDAMPESRPRHVLGIAAVDDIFACVENGGDTFDCVAPARCGRNGAIFTRHGRYNIKRAQFKHDFSPLEEGCDCYTCTHYTRAYVDHALRAREFNGFTLATIHNEHFFVKLLDDIRESIDGGYFNEFRDETLAKFYENGSKG

SEQ ID NO: 52532 - protein, 429 aa, Bifidobacterium adolescentis
  REGION 1..429: note = tr|A0A1E7Y357|A0A1E7Y357_BIFAD Queuine tRNA-ribosyltransferase OS=Bifidobacterium adolescentis; OX = 1680 GN=tgt PE=3 SV=1
MEHPRGAEPGKPGRRDAFYFEQKTRLPDAADGKGRGGARYGRTGIIHTPHGDIHTPAFVPVATQAAMKAVLPETMKDLGAQCLLSNAFHLYERPGEQVLDEAGGLARFMNWNGPTFTDSGGFQVLSLGAGFKKTLAMDVTGMKSDDVIAEGKERLAFVDEDGVTFKSPLNGSLHRFSAEISMGIQHKIGADIMFAFDELTTLMNTRGYQERSVERTYRWAQRCVAEHKRLTEERLGKPYQALYGVVQGANYEDLRRHAAEQIASLDFDGVGIGGAIEKRIIGDTCAWICDAMPESRPRHVLGIAAVDDIFACVENGGDTFDCVAPARCGRNGAIFTRHGRYNIKRAQFKHDFGPLEEGCDCYTCTHYSRAYVDHALRAREFNGFTLATIHNEHFFVKLLDDIRASIDGGYFNEFRDETLAKFYENGSKG

SEQ ID NO: 52533 - protein, 443 aa, unidentified
  source 1..443: note = Bifidobacterium aemilianum
  REGION 1..443: note = tr|A0A366K9G4|A0A366K9G4_9BIFI Queuine tRNA-ribosyltransferase OS=Bifidobacterium aemilianum; OX = 2493120 GN=tgt PE=3 SV=1
MSDSSSNTSKQTNLLDHPRGAQTGQPGDRRAFSFETRTRLADSADGKGRNGARWGRTGTIHTPHGDIQTPAFVPVATQAAMKGVLPETIKELGGQCMLSNAFHLFERPGEQVLDEAGGLGRFMNWDRPTFTDSGGFQVLSLGAGFKKTLAMDVTGMKSDQVIAEGKERRAFVDEDGVTFKSPLNGDEHRFSAEISMGIQHQIGADIMFAFDELTTLMNTRSYQEQSVERTYRWAQRCVAEHQRLTAERVGKPYQALYGVVQGANYEDLRRHAAQQIASLDFDGVGIGGAIEKRIIGNTCAWICDEMPEDRPRHVLGIAAVDDIFACVENGGDTFDCVAPARCGRNGAIFTRDGRYNVKRAEHKHDFGPLEEGCDCYTCTHYSRAYVDHLLRAREINGFTLATIHNERFFIKLLDDIRASIDGGYFEDFRDQTLARYYAHGSRG

SEQ ID NO: 52534 - protein, 433 aa, Bifidobacterium angulatum
  REGION 1..433: note = tr|C4FCZ4|C4FCZ4_9BIFI Queuine tRNA-ribosyltransferase OS=Bifidobacterium angulatum DSM 20098 = JCM 7096 OX=518635 GN=tgt PE=3 SV=1
MTDLVEHPLGAEPGKPGDRSAFSFETITRLPDAADGKGRGGARYGRTGIIHTPHGDIRTPAFVPVGTQAAMKAVLPEQMRDLGAQCLLANAFHLFERPGEDVLDAAGGLAKFMNWNGPTFTDSGGFQVMSLGVGFKKTLAMDVTGMKSDEVIAKGKERMAWVDEDGVTFKSPLNGDQHRFSAEISMGIQHKLGADIMFAFDELTTLMNTRGYQEQSVERTYRWAQRCVAEHKRLTEERLGKPYQALYGVVQGANYEDLRRHAAAQIASLDFDGVGIGGAIEKRIIGDTCAWICDEMPENRPRHVLGIAAVDDIFACVENGGDTFDCVAPARCGRNGAIFTRHGRYNIKRAQFKFDFGPLEEGCDCYTCTHYTRAHVTHLLRAREFNGFTLATIHNERFFVKLLDDIRASIDGGYFEEFRDETLAKFYENGSKG

SEQ ID NO: 52535 - protein, 433 aa, Bifidobacterium angulatum
  REGION 1..433: note = tr|A0A126STN6|A0A126STN6_9BIFI Queuine tRNA-ribosyltransferase OS=Bifidobacterium angulatum; OX = 1683 GN=tgt PE=3 SV=1
MTDLVEHPLGAEPGKPGDRSAFSFETITRLPDAADGKGRGGARYGRTGIIHTPHGDIRTPAFVPVGTQAAMKAVLPEQMRDLGAQCLLANAFHLFERPGEDVLDAAGGLAKFMNWNGPTFTDSGGFQVMSLGVGFKKTLAMDVTGMKSDEVIAKGKERMAWVDEDGVTFKSPLNGDQHRFSAEISMGIQHKLGADIMFAFDELTTLMNTRGYQEQSVERTYRWAQRCVAEHKRLTEERLGKPYQALYGVVQGANYEDLRRHAAAQIASLDFDGVGIGGAIEKRIIGDTCAWICDEMPENRPRHVLGIAAVDDIFACVENGGDTFDCVAPARCGRNGAIFTRHGRYNIKRAQFKFDFGPLEEGCDCYTCTHYTRAHVTHLLRAREFNGFTLATIHNERFFVKLLDDIRASIDGGYFEEFRDETLAKFYENGSRG

SEQ ID NO: 52536 - protein, 470 aa, Bifidobacterium animalis
  REGION 1..470: note = tr|A0A4V1WK92|A0A4V1WK92_BIFAN Queuine tRNA-ribosyltransferase OS=Bifidobacterium animalis subsp. lactis OX=302911 GN=tgt PE=3 SV=1
MRRAVASVGVRNLFTRTTARLRIAHMTANTESIVQAPAPQLVEHPRGAEPGKPGDRSAFRFEQTTRLPDSPNGKGKGGARYGRTGILHTPHGDIKTPAFVPVATQGAMKAVLPESMTQLGAQCLLSNAFHLYERPGEDVLDEAGGLAKFMNWNGPTFTDSGGFQVLSLGAGFKKTLAMDVKGMKSDDVIAEGKERMAFVDEDGVTFKSPLNGSLHRFSAEISMNIQHKLGADIMFAFDELTTLMNTRRYQENSVERTYRWAQRCVAEHERLTQSRLGKPYQALYGVVQGANYEDLRRHAASQIASLDFDGVGIGGAMEKRIIGDICAWICDEMPESRPRHVLGIAAVDDIFACVENGGDTFDCVAPARCGRNGAIFTRDGRYNIKRAQYKHDFGPLEEGCQCYTCTHYTRAYVDHLLRAHEMNGFTLATIHNECFFVHLLDDIRASIDGGYFDEFRDETLARFYANGSRG

SEQ ID NO: 52537 - protein, 445 aa, Bifidobacterium animalis
  REGION 1..445: note = tr|A0A1C7FU72|A0A1C7FU72_9BIFI Queuine tRNA-ribosyltransferase OS=Bifidobacterium animalis subsp. animalis OX=302912 GN=tgt PE=3 SV=1
MTANIESIVQAPAPQLVEHPRGAEPGKPGDRSAFRFEQTTRLPDSPNGKGKGGARYGRTGILHTPHGDIKTPAFVPVATQGAMKAVLPESMTQLGAQCLLSNAFHLYERPGEDVLDEAGGLAKFMNWNGPTFTDSGGFQVLSLGAGFKKTLAMDVKGMKSDDVIAEGKERMAFVDEDGVTFKSPLNGSLHRFSAEISMNIQHKLGADIMFAFDELTTLMNTRRYQENSVERTYRWAQRCVAEHERLTQSRLGKPYQALYGVVQGANYEDLRRHAASQIASLDFDGVGIGGAMEKRIIGDICAWICDEMPESRPRHVLGIAAVDDIFACVENGGDTFDCVAPARCGRNGAIFTRDGRYNIKRAQYKHDFGPLEEGCQCYTCTHYTRAYVDHLLRAHEMNGFTLATIHNEYFFVHLLDDIRASIDGGYFDEFRDETLARFYANGSRG

SEQ ID NO: 52538 - protein, 449 aa, unidentified
  source 1..449: note = Bifidobacterium anseris
  REGION 1..449: note = tr|A0A2N5IXG1|A0A2N5IXG1_9BIFI Queuine tRNA-ribosyltransferase OS=Bifidobacterium anseris; OX = 2020963 GN=tgt PE=3 SV=1
MTSTSIPADSTITSAPAPQLVEHPRGAEPGEPGDRSAFHFEQITRLPDAADGKGKGGARYGRTGILHTPHGDIRTPAFVPVATQGAMKAVLPESMVELGAQCLLSNAFHLYERPGEDVLDEAGGLAKFMNWNGPTFTDSGGFQVLSLGAGFKKTLAMDVKGMKSDDVIAAGKERMAFVDEDGVTFKSPLNGSLHRFSAEISMNIQHKIGADIMFAFDELTTLMNTRRYQENSVERTYRWAQRCVAEHERLTAQRVGKPYQALYGVVQGANYEDLRRHAAQQIASLDFDGVGIGGAMEKRIIGDICAWICDEMPQSRPRHVLGIAAVDDIFACVENGGDTFDCVAPARCGRNGAIFTRDGRYNIKRAQYKHDFGPLEEGCGCYTCTHYSRAYVDHLLRSHEMNGFTLATIHNEYFFVHLLDDIRASIDGGYFDEFRDETLARFYANGSRG

SEQ ID NO: 52539 - protein, 440 aa, unidentified
  source 1..440: note = Bifidobacterium aquikefiri
  REGION 1..440: note = tr|A0A261GAM2|A0A261GAM2_9BIFI Queuine tRNA-ribosyltransferase OS=Bifidobacterium aquikefiri; OX = 1653207 GN=tgt PE=3 SV=1
MLKDMVGLMTKMRKPLGAVEGKPGDRSAFSFETQKRLESRSDGFGKDGARYGRTGIIHTPHGDIQTPTFIPVATQGAMKAVLPEAMKELGAQCLLSNAFHLFERPGDEVLNEAGGLSTFMNWDGPTYTDSGGFQVLSLGAGFKKTLAMDVEGMKSDDIIAKGKERLAFVDEDGVTFKSPLNGEKKRFSAEISMRIQHNIGADMMFSFDELTTLMNTRRYQEQSVERTFRWAKRCVAEHQRLTEERLGKPYQALFGVVQGANYEDLRRLAASQIASLDFDGVGIGGAIEKRLLGQTCAWICDAMPESRPRHVLGIASVDDIFSAVENGGDTFDCVAPARCARNGAVFTHHGRWNIKRAQFKHDFRPIEDGCDCYACRNYSRAYIDHLLRAREMNGYTLATIHNEHFFITLLADIRKSIEGGYFDEFRQETVTRFYENGSRG

SEQ ID NO: 52540 - protein, 432 aa, Bifidobacterium asteroides
  REGION 1..432: note = tr|A0A556R7I0|A0A556R7I0_9BIFI Queuine tRNA-ribosyltransferase OS=Bifidobacterium asteroides; OX = 1684 GN=tgt PE=3 SV=1
MSLITNPLGATPGRPGDRAAFSFETLNRLPDSPDGLGHNGRRYGRTGIIRTPHGDIHTPAFIPVATQAAMKAVLPEQMRQLGAQVLLANAFHLFERPGPDILDQAGGLARFMNWDGPTYTDSGGFQVLSLGAGFKKTLAMDVTGMKSDQVIAEGKERLAFVDEDGVTFKSPLNGDRHRFSAEISMGIQHRIGADIMFSFDELTTLMNTRTYQEQSVERTFRWAKRCVDEHQRLTQARTGKPYQALFGVVQGANYEDLRRRAARQIASLDFDGVGIGGAIEKRLLGQTCAWICDEMPESRPRHVLGIAAVDDIFAGVENGGDTFDCVSPARCGRNGAVFTRDGRWNIKRAQFKTDFRPIEEDCDCYTCTHYSRAYIDHLLRAHELNGYTLATIHNERFFVRLLDEIRQSIDGGYFDEYKKETLARFYAHGSKG

SEQ ID NO: 52541 - protein, 432 aa, Bifidobacterium asteroides
  REGION 1..432: note = tr|A0A318MR29|A0A318MR29_9BIFI Queuine tRNA-ribosyltransferase OS=Bifidobacterium asteroides; OX = 1684 GN=tgt PE=3 SV=1
MSLITNPLGATPGRPGDRAAFSFETLNRLPDSPDGLGHNGRRYGRTGIIHTPHGDIHTPAFIPVATQAAMKAVLPEQMRQLGAQVLLANAFHLFERPGPDILDQAGGLARFMNWDGPTYTDSGGFQVLSLGAGFKKTLAMDVTGMKSDQVIAEGKERLAFVDEDGVTFKSPLNGDRHRFSAEISMGIQHRIGADIMFSFDELTTLMNTRTYQEQSVERTFRWAKRCVDEHHRLTQARTGKPYQALFGVVQGANYEDLRRRAARQIASLDFDGVGIGGAIEKRLLGQTCAWICDEMPESRPRHVLGIAAVDDIFAGVENGGDTFDCVSPARCGRNGAVFTRDGRWNIKRAQFKTDFRPIEEDCDCYTCTHYSRAYIDHLLRAHELNGYTLATIHNERFFVRLLDEIRQSIDSGYFDEYKKETLTRFYAHGSKG

SEQ ID NO: 52542 - protein, 433 aa, Bifidobacterium biavatii
  REGION 1..433: note = tr|A0A086ZWR5|A0A086ZWR5_9BIFI Queuine tRNA-ribosyltransferase OS=Bifidobacterium biavatii DSM 23969 OX=1437608 GN=tgt PE=3 SV=1
MTSLLDHPRGAEPGKPGDRSAFNFETITRLPDAADGKGRGGARYGRTGILHTPHGDIHTPAFVPVATQAAMKAVLPETMREAGAQCMLSNAFHLYERPGEDVLDAAGGLAKFMNWDGPTFTDSGGFQVLSLGAGFKKTLAMDVTGMKSDDVIADGKERLAFVDEDGVTFKSPLNGSLHRFSAEISMGIQHKIGADIMFAFDELTTLMNTRRYQEESVERTYRWAQRCVAEHQRLTEARLGKPYQALYGVVQGANYEDLRRHAAEQIASLDFDGVGIGGAIEKRIIGDTCAWICDAMPESRPRHVLGIAAVDDIFACVENGGDTFDCVAPARCGRNGAIFTRDGRYNVKRAEFKFDFGPLEEGCDCYTCTHYSRAYVDHLLRAREFNGFTLATIHNEHFFIKLLDDIRASIDGGYFDEFRDETLARFYARGSRG

SEQ ID NO: 52543 - protein, 433 aa, Bifidobacterium bifidum
  REGION 1..433: note = tr|E4V792|E4V792_BIFBI Queuine tRNA-ribosyltransferase OS=Bifidobacterium bifidum NCIMB 41171 OX=398513 GN=tgt PE=3 SV=1
MTSFLEHPRGAADGRPGDRSAFFFETLTQLPDSADGKGRGGRRYGRAGIIHTPHGDIRTPAFVPVATQAAMKAVLPETMRELGAQCLLSNAFHLFERPGQDVLDAAGGLARFMNWDGPTFTDSGGFQVLSLGAGFKKTLAMDVTGMKSDDVIAAGKERLAFVDEDGVTFKSPLNGDRHRFSAEISMGIQHKIGADIMFAFDELTTLMNTRSYQEASVERTYRWAQRCVAEHQRLTEERLGKPYQALYGVVQGANYEDLRRHAAEQIASLDFDGVGIGGAIEKRIIADTCAWICDAMPESRPRHVLGIASVDDIFACVENGGDTFDCVAPARCARNGAIFTRNGRYNVKRAQHKFDFGPLEEGCDCYTCQHYTRAYVDHLLRAREFNGFTLATIHNERFFVKLLDDIRASIDGGYFDEFRDESLARFYANGPRG

SEQ ID NO: 52544 - protein, 433 aa, Bifidobacterium bifidum
  REGION 1..433: note = tr|A0A0H3EAC1|A0A0H3EAC1_BIFBP Queuine tRNA-ribosyltransferase OS=Bifidobacterium bifidum (strain PRL2010) OX=702459 GN=tgt PE=3 SV=1
MTSFLEHPRGAADGRPGDRSAFFFETLTQLPDSADGKGRGGRRYGRTGIIHTPHGDIRTPAFVPVATQAAMKAVLPETMRELGAQCLLSNAFHLFERPGQDVLDAAGGLARFMNWDGPTFTDSGGFQVLSLGAGFKKTLAMDVTGMKSDDVIAAGKERLAFVDEDGVTFKSPLNGDRHRFSAEISMGIQHKIGADIMFAFDELTTLMNTRSYQEASVERTYRWAQRCVAEHQRLTEERLGKPYQALYGVVQGANYEDLRRHAAEQIASLDFDGVGIGGAIEKRIIADTCAWICDAMPESRPRHVLGIASVDDIFACVENGGDTFDCVAPARCARNGAIFTRDGRYNVKRAQHKFDFGPLEEGCDCYTCQHYTRAYVDHLLRAREFNGFTLATIHNERFFVKLLDDIRASIDGGYFDEFRDESLARFYANGPRG

SEQ ID NO: 52545 - protein, 504 aa, Bifidobacterium bohemicum
  REGION 1..504: note = tr|A0A086ZHH1|A0A086ZHH1_9BIFI Queuine tRNA-ribosyltransferase OS=Bifidobacterium bohemicum DSM 22767 OX=1437606 GN=tgt PE=3 SV=1
MSTFDIDRPAAGNDESPSALNEGNTHDVSRESKLSRNTDTVMRRGTPNVASEATLHAQTHSGTNSWNPAPSASGLLEHPLGAVKGKPADRSKFWFEQKTRLADSAKGLGRGGARYGRTGVLHTPHGDIRTPVFVPVATQAAMKGVLPEMMKDMGAQCLLSNAFHLFERPGENILDEAGGLARFENWDGPTFTDSGGFQVLSLGAGFKKTLAMDVTDMKSDDVIAPGRERKAFVDEDGVTFKSPLNGAEHRFSAEISMGIQHKIGADIMFAFDELTTLMNTRGYQEQSVERTFRWAKRCVTEHQRLTEARLGKPYQALYGVVQGANYEDLRRKAASQIASLDFDGVGIGGAIEKRIIGDICAWICDEMPESRPRHVLGIAAVDDIFACAENGGDTFDCVAPARCARNGAIYTRDGRYNIKRVANKRDFGPLEEGCDCYTCTHYSRAYVDHLLRAHEINGATLATIHNERFFIKLLDDIRDSIDGGYFDEFRDETLARYYAHGSKG

SEQ ID NO: 52546 - protein, 478 aa, Bifidobacterium bombi
  REGION 1..478: note = tr|A0A086BPI1|A0A086BPI1_9BIFI Queuine tRNA-ribosyltransferase OS=Bifidobacterium bombi DSM 19703; OX = 1341695 GN=tgt PE=3 SV=1
MNTTAATNADAAADARHLQTAAADHSGHPADNDSTIRTASHLAHSASGLLEHPRGARPGLPGDRSEFSFEQHSRLESCAQGKGHDGARYGRTGIIHTPHGDIRTPAFVPVATQSAMKGVLPETMKDLGAQCLLSNAFHLFERPGEEVLDEAGGLARFMNWDGPTFTDSGGFQVLSLGAGFKKTLAMDVTDMKNDDVIAEGKERLAFVDEDGVTFKSPLNGSRHRFSAEISMGIQHKLGADIMFAFDELTTLMNTRGYQEHSVERTFRWARRCVEEHRRLTHERVGKPYQALYGVVQGANYEDLRRRAAREIASLDFDGVGIGGAIEKRLIGDTCAWICDEMPENRPRHVLGIAEVDDIFACVENGGDTFDCVSPARCGRNGAIFTRHGRYNIKRAANKHDFNPLEEGCECYTCTHYTRAYVDHLLRAHEMNGATLATIHNEHFFVKLLDDIRASIDAGYFEELRDETLAHYYENGLMK

SEQ ID NO: 52547 - protein, 433 aa, Bifidobacterium boum
  REGION 1..433: note = tr|A0A086ZKV6|A0A086ZKV6_9BIFI Queuine tRNA-ribosyltransferase OS=Bifidobacterium boum OX=78343; GN = tgt PE=3 SV=1
MTSLLEHPRGAEPGKPGDRSAFWFETITRLPDAANGKGRGGARYGRTGIIHTPHGDIHTPAFVPVATQGAMKAVLPESMKQLGAQCLLSNAFHLFERPGEDVLDAAGGLAKFMNWDGPTFTDSGGFQVLSLGAGFKKTLAMDVTGMKSDDVIAEGKQRLAFVDEDGVTFKSPLNGAKHRFSAEISMGIQHKIGADIMFAFDELTTLMNTRGYQERSVERTFRWAKRCVAEHERLTRERLGKPYQALYGVVQGANYEDLRRHAAEEIASLDFDGVGIGGAIEKRIIGDTCAWICDAMPENRPRHVLGIAAVDDIFACVENGGDTFDCVAPARCGRNGAIFTRDGRYNIKRAANKFDFSPLEEGCDCYTCTHYSRAYVDHLLRAREFNGFTLATIHNEHFFVKLLDDIRASIDGGYFDEFRDETLARFYANGSRG

SEQ ID NO: 52548 - protein, 437 aa, Bifidobacterium breve
  REGION 1..437: note = tr|S3AJ70|S3AJ70_BIFBR Queuine tRNA-ribosyltransferase OS=Bifidobacterium breve HPH0326; OX = 1203540 GN=tgt PE=3 SV=1
MTSDVLNHPLGAQAGKPGDRSAFHFETITRLPSAANGLGRDGARYGRTGIIHTPHGDIRTPAFVPVGTQAAMKAVLPEQMKELGAQCLLANAFHLFERPGEDVLDAAGGLARFMNWDGPTFTDSGGFQVMSLGVGFKKTLAMDVTGMKSDDIIAKGKERMAWVDEDGVTFKSPLNGDAHRFSAEISMGIQHKIGADIMFAFDELTTLMNTRSYQEDSVERTFRWARRCVEEHQRLTAARLGKPYQALYGVVQGANYEDLRRRAASQIASLDFDGVGIGGAIEKRIIGDTCAWICDAMPESRPRHVLGIASVDDIFACVENGGDTFDCVAPARCARNGAIYTRAGRYNIKRAQHKFDFGPLEEGCDCYTCQHYSRAYVDHLLRAREFNGFTLATIHNEHFFVKLLDDIRASIDGGYFDEFRDEALAHFYGNGERKPGL

SEQ ID NO: 52549 - protein, 437 aa, Bifidobacterium breve; identical to SEQ ID NO: 52548
  REGION 1..437: note = tr|A0A0M4M3B3|A0A0M4M3B3_BIFBR Queuine tRNA-ribosyltransferase OS=Bifidobacterium breve OX=1685; GN = tgt PE=3 SV=1

SEQ ID NO: 52550 - protein, 441 aa, unidentified
  source 1..441: note = Bifidobacterium callitrichidarum
  REGION 1..441: note = tr|A0A2U2ND26|A0A2U2ND26_9BIFI Queuine tRNA-ribosyltransferase OS=Bifidobacterium callitrichidarum OX=2052941 GN=tgt PE=3 SV=1
MSEPTATGLLDHPRGAEAGKPGDRSAFHFETITRLPSSAEGLGRDGARYGRTGIIHTPHGDIKTPAFVPVGTQAAMKAVLPEQMKDLGAQCLLANAFHLFERPGEDVLDAAGGLARFMNWDGPTFTDSGGFQVMSLGVGFKKTLAMDVTGMKSDDIIAKGKERMAWVDEDGATFKSPLNGDEHRFSAEISMGIQHKLGADIMFAFDELTTLMNTRSYQEDSVERTFRWAKRCVAEHERLTAERLGKPYQALYGVVQGANYEDLRRHAAEQIASLDFDGVGIGGAIEKRIIGNTCAWICDAMPESRPRHVLGIASVDDIFACVENGGDTFDCVAPARCARNGAIYTRTGRYNIKRAQHKFDFGPLEEGCDCYTCQHYSRAYVDHLLRAREFNGFTLATIHNEHFFVKLLDDIRASIDGGYFDEFRDETLAHFYGNGERKPGL

SEQ ID NO: 52551 - protein, 428 aa, Bifidobacterium callitrichos
  REGION 1..428: note = tr|A0A2T3GDT3|A0A2T3GDT3_9BIFI Queuine tRNA-ribosyltransferase OS=Bifidobacterium callitrichos; OX = 762209 GN=tgt PE=3 SV=1
MDLNLHPIGAAEGRPGDRSAFRFETITRLSDSADGKGRNGARYGRTGIIHTPHGDIRTPAFVPVATQAAMKAVLPESMKDLGAQCLLSNAFHLFERPGEDVLDQAGGLARFMNWHGPTFTDSGGFQVMSLGVGFKKTLAMDVTGMKSDDVIAKGKERMAWVDEDGVTFKSPLNGDQHRFSAEISMGIQHKIGADIMFAFDELTTLMNTRSYQEESVERTFRWAKRCVAEHERLTAERLGKPYQALYGVVQGANYEDLRRHAAEQIASLDFDGVGIGGAIEKRIIGETCAWICDAMPENRPRHVLGIAEMDDIFACVENGGDTFDCVAPARCGRNGAIYTRHGRYNIKRAQHKFDFGPLEEGCDCYTCRNYSRAYVDHLLRAREFTGFTLATIHNERFFVKLLDDIRDSIDGGYFEEFRDESLAHFYGR

SEQ ID NO: 52552 - protein, 457 aa, Bifidobacterium callitrichos
  REGION 1..457: note = tr|A0A087A0R3|A0A087A0R3_9BIFI Queuine tRNA-ribosyltransferase OS=Bifidobacterium callitrichos DSM 23973 OX=1437609 GN=tgt PE=3 SV=1
MTDISTNITAAEANNGASSVSTTSNGTAAPDLNLHPLGAAPGKPGDRSAFHFETITRLSDAADGKGKGGARYGRTGIIHTPHGDIRTPAFVPVATQAAMKAVLPESMKDLGAQCLLSNAFHLFERPGEDVLDQAGGLGRFMNWHGPTFTDSGGFQVMSLGVGFKKTLAMDVTGMKSDDVIAKGKERMAWVDEDGVTFKSPLNGDQHRFSAEISMGIQHKIGADIMFAFDELTTLMNTRSYQEESVERTFRWAKRCVAEHERLTAERLGKPYQALYGVVQGANYEDLRRHAAEQIASLDFDGVGIGGAIEKRIIGETCAWICDAMPESRPRHVLGIAEMDDIFACVENGGDTFDCVAPARCGRNGAIYTRHGRYNIKRAQHKFDFGPLEEGCDCYTCRNYSRAYVDHLLRAREFTGFTLATIHNERFFVKLLDDIRDAIDGGYFEEFRDESLAHFYGK

SEQ ID NO: 52553 - protein, 455 aa, Bifidobacterium catenulatum
  REGION 1..455: note = tr|A0A1V8PT99|A0A1V8PT99_9BIFI Queuine tRNA-ribosyltransferase OS=Bifidobacterium catenulatum; OX = 1686 GN=tgt PE=3 SV=1
MTSLIESSTDMAQDTQNTATAVSENLIEHPRGAEPGKPGRRDAFYFEQKNRLPDAADGKGRGGARYGRTGTIHTPHGDIHTPAFVPVATQAAMKAVLPETMKDLGAQCLLSNAFHLYERPGEQVLDEAGGLAKFMNWNGPTFTDSGGFQVLSLGAGFKKTLAMDVTGMKSDDVIAEGKERLAFVDEDGVTFKSPLNGSLHRFSAEISMGIQHKIGADIMFAFDELTTLMNTRGYQERSVERTYRWAQRCVAEHKRLTEERVGKPYQALYGVVQGANYEDLRRHAAEQIASLDFDGVGIGGAIEKRIIGDTCAWICDAMPESRPRHVLGIAAVDDIFACVENGGDTFDCVAPARCGRNGAIFTRDGRYNIKRAQFKHDFGPLEEGCDCYTCTHYSRAYVDHALRAREFNGFTLATIHNEHFFVKLLDDIRASIDGGYFDEFRDEALARFYANGSRG

SEQ ID NO: 52554 - protein, 455 aa, Bifidobacterium catenulatum
  REGION 1..455: note = tr|A0A564VYN5|A0A564VYN5_9BIFI Queuine tRNA-ribosyltransferase OS=Bifidobacterium catenulatum; OX = 1686 GN=tgt PE=3 SV=1
MTSLTESSIDTAQDTQNAATAVSENLIEHPRGAEPGKPGRRDAFYFEQKTRLPDAADGKGRGGARYGRTGTIHTPHGDIHTPAFVPVATQAAMKAVLPETMKDLGAQCLLSNAFHLYERPGEQVLDEAGGLAKFMNWNGPTFTDSGGFQVLSLGAGFKKTLAMDVTGMKSDDVIAEGKERLAFVDEDGVTFKSPLNGSLHRFSAEISMGIQHKIGADIMFAFDELTTLMNTRGYQERSVERTYRWAQRCVAEHKRLTEERVGKPYQALYGVVQGANYEDLRRHAAEQIASLDFDGVGIGGAIEKRIIGDTCAWICDAMPESRPRHVLGIAAVDDIFACVENGGDTFDCVAPARCGRNGAIFTRDGRYNIKRAQFKHDFGPLEEGCDCYTCTHYSRAYVDHALRAREFNGFTLATIHNEHFFVKLLDDIRASIDGGYFDEFRDETLTRFYANGSRG

SEQ ID NO: 52555 - protein, 444 aa, unidentified
  source 1..444: note = Bifidobacterium catulorum
  REGION 1..444: note = tr|A0A2U2MU24|A0A2U2MU24_9BIFI Queuine tRNA-ribosyltransferase OS=Bifidobacterium catulorum; OX = 1630173 GN=tgt PE=3 SV=1
MTDVTDPTINTASDLVEHPRGTAPGKPGDRGAFGFEITRRLDPTADGLGRGGFRHGRSGVIHTPHGDIRTPAFVPVATQATMKAMLPEQLVDLGAQCTLANAFHLFERPGEDIVDAAGGLGKFMNWHGPTFTDSGGFQVMSLGVGFKKTLAMDVTGLKSDDIIAKGKERLAFVDEDGVTFKSPLNGDVHRFSAEISMGIQHKIGADIMFSFDELTTLMNTRSYQEQSVERTFRWAKRCVAEHRRLTAERLGKPYQALFGVVQGANYEDLRRHAARQIASLDFDGVGIGGAIEKNILGNICAWICDEMPELRPRHVLGIAAVDDIFAGVENGGDTFDCVAPARTARNGAIYTRDGRWNVLRAALKRDFRPLEEGCDCYTCTHYSRAYLHHLLKTREMSGCTLATIHNERFFVRLLDDIRASIDGGYFDEFRDATLARFYANGSRG

SEQ ID NO: 52556 - protein, 449 aa, Bifidobacterium choerinum
  REGION 1..449: note = tr|A0A2D3D4H2|A0A2D3D4H2_9BIFI Queuine tRNA-ribosyltransferase OS=Bifidobacterium choerinum; OX = 35760 GN=tgt PE=3 SV=1
MTSTSIPSDTTITSAPAPQLVEHPRGAEAGKPGDRSAFHFEQITRLPDSSDGKGKGGARYGRTGILHTPHGDIRTPAFVPVATQGAMKAVLPESMVQLGAQCLLSNAFHLYERPGEDVLDEAGGLAKFMNWNGPTFTDSGGFQVLSLGAGFKKTLAMDVKGMKSDDVIAEGKERMAFVDEDGVTFKSPLNGSLHRFSAEISMNIQHKIGADIMFAFDELTTLMNTRRYQENSVERTYRWAQRCVAEHERLTAERVGKPYQALYGVVQGANYEDLRRHAAQQIASLDFDGVGIGGAMEKRIIGNICAWICDEMPESRPRHVLGIAAVDDIFACVENGGDTFDCVAPARCGRNGAIFTRDGRYNIKRAQYKHDFGPLEEGCGCYTCTHYSRAYVDHLLRAHEMNGFTLATIHNEYFFVHLLDDIRASIDGGYFDEFRDETLARFYANGSRG

SEQ ID NO: 52557 - protein, 475 aa, Bifidobacterium choerinum
  REGION 1..475: note = tr|A0A087AH05|A0A087AH05_9BIFI Queuine tRNA-ribosyltransferase OS=Bifidobacterium choerinum; OX = 35760 GN=tgt PE=3 SV=1
MADDEPRQRQAHDPCRWTTAGPRIAHMTSTSIPSDTTITSAPAPQLVEHPRGAEAGKPGDRSAFHFEQITRLPDSSDGKGKGGARYGRTGILHTPHGDIRTPAFVPVATQGAMKAVLPESMVQLGAQCLLSNAFHLYERPGEDVLDEAGGLAKFMNWNGPTFTDSGGFQVLSLGAGFKKTLAMDVKGMKSDDVIAEGKERMAFVDEDGVTFKSPLNGSLHRFSAEISMNIQHKIGADIMFAFDELTTLMNTRRYQENSVERTYRWAQRCVAEHERLTAERVGKPYQALYGVVQGANYEDLRRHAAQQIASLDFDGVGIGGAMEKRIIGNICAWICDEMPESRPRHVLGIAAVDDIFACVENGGDTFDCVAPARCGRNGAIFTRDGRYNIKRAQYKHDFGPLEEGCGCYTCTHYSRAYVDHLLRAHEMNGFTLATIHNEYFFVHLLDDIRASIDGGYFDEFRDETLARFYANGSRG

SEQ ID NO: 52558 - protein, 483 aa, unidentified
  source 1..483: note = Bifidobacterium commune
  REGION 1..483: note = tr|A0A1C4H6G3|A0A1C4H6G3_9BIFI Queuine tRNA-ribosyltransferase OS=Bifidobacterium commune; OX = 1505727 GN=tgt PE=3 SV=1
MDISTDATTNTAKTGKHTTVRTRGSKETPSEATTHARQQSGSGVSQLAPSTSGLLERPRGSEPGKPGDRSQFYFEQHTRLSNTPEGKGRNGARYGRTGVIHTPHGDIHTPAFVPVATQAAMKGVLPETMKELNAQCLLSNAFHLFERPGEDIIDEAGGLARFENWDGPTFTDSGGFQVLSLGAGFKKTLAMDVTGMKSDDVIAKGRERKAFVDEDGVTFKSPLNGNKHRFSAEISMGIQHKIGADIMFAFDELTTLMNTRGYQEQSIERTFRWAKRCIAEHERLTQARLGKPYQALYGVVQGANYEDLRRRAAEQIASLDFDGVGIGGAIEKRLIGDTCAWICDAMPESRPRHVLGIAAVDDIFACVENGGDTFDCVAPARCARNGAIYTRDGRYNIRRAANKRDFGPLEEGCDCYTCTHYTRAYVDHLLRAGEMNGATLATIHNERFFIRLLDDIRASIDGGYFEKLRDETLARYYAHGSKG

SEQ ID NO: 52559 - protein, 432 aa, Bifidobacterium coryneforme
  REGION 1..432: note = tr|A0A076JBL8|A0A076JBL8_9BIFI Queuine tRNA-ribosyltransferase OS=Bifidobacterium coryneforme; OX = 1687 GN=tgt PE=3 SV=1
MTFLMNPLGAEPGRPGDRSAFSFEAITQLPSAADGLGREGRRYGRTGIIHTPHGDIHTPAFIPVATQAAMKAVLPEQMREMGAQVLLSNAFHLFERPGEDILDQAGGLARFMNWDGPTYTDSGGFQVLSLGAGFKKTLAMDVTGMQSDEVIAEGKERLAFVDEDGVTFKSPLNGDQHRFSAEISMGIQHKIGADVMFAFDELTTLMNTRSYQEKSVERTFRWAKRCVAEHERLTAERTGKPYQALFGVVQGANYEDLRRKAAGQIASLDFDGVGIGGAIEKRLLGQTCAWICDEMPESRPRHVLGIAAVDDIFAGVENGGDTFDCVAPARCGRNGAVFTRDGRWNIKRAQFKNDFRPIEEDCDCYACTNYSRAYINHLLRAREFNGFTLATIHNERFFVRLLDEIRASIDGGYFDDYKKETLARFYANGSRG

SEQ ID NO: 52560 - protein, 449 aa, unidentified
  source 1..449: note = Bifidobacterium criceti
  REGION 1..449: note = tr|A0A2A2EG71|A0A2A2EG71_9BIFI Queuine tRNA-ribosyltransferase OS=Bifidobacterium criceti; OX = 1960969 GN=tgt PE=3 SV=1
MTSTSTSADSTITSAPAPQLVERPRGAEPGKPGDRSAFHFEERTRLSDSADGKGKGGARYGRTGILHTPHGDIRTPAFVPVATQGAMKAVLPESMVDLGAQCLLSNAFHLYERPGEDVLDEAGGLAKFMNWNGPTFTDSGGFQVLSLGAGFKKTLAMDVEGMKSDDVIAEGKERMAFVDEDGVTFKSPLNGSLHRFSAEISMNIQHKIGADIMFAFDELTTLMNTRRYQENSVERTYRWAQRCVAEHERLTQTRVGKPYQALYGVVQGANYEDLRRHAAQQIASLDFDGVGIGGAMEKRIIGDICAWICDEMPQSRPRHVLGIAAVDDMFACVENGGDTFDCVAPARCGRNGAIFTRDGRYNIKRAANKRDFSPLEEGCGCYTCTHYTRAYVDHLLRAHEMNGLTLATIHNEYFFVHLLDDIRASIDGGYFDEFRDATLARFYANGSRG

SEQ ID NO: 52561 - protein, 433 aa, Bifidobacterium cuniculi
  REGION 1..433: note = tr|A0A087ATE4|A0A087ATE4_9BIFI Queuine tRNA-ribosyltransferase OS=Bifidobacterium cuniculi; OX = 1688 GN=tgt PE=3 SV=1
MTSLLEHPRGAAPGQPGDRSAFSFEQHVRLPDSPTGKGRGGARYGRTGIIHTPHGDIKTPAFVPVATQAAMKAVLPEQMTQLGAQCLLSNAFHLFERPGPDVLDKAGGLAKFMNWDGPTFTDSGGFQVMSLGVGFKKTLAMDVTGMKSDDVIAKGHDRLAFVDEDGVTFKSPLNGSLHRFSAEISMGIQHQLGADIMFAFDELTTLMNTRRYQEESVERTFRWAKRCVAEHQRLTAGRLGRPYQALYGVVQGANYEDLRRRASAQISSLDFDGVGIGGAMEKRIIGDICAWICDEMPEERPRHVLGIAAVDDIFACAENGGDTFDCVAPARCGRNGAIFTRDGRYNIKRAANKYDFGPLEEGCTCYTCTHYSRAYVDHLLRSHEMNGFTLATIHNEHFFVTLLDEIRASIDGGYFDEYRGETLARFYANGSRG

SEQ ID NO: 52562 - protein, 438 aa, Bifidobacterium dentium
  REGION 1..438: note = tr|D2Q702|D2Q702_BIFDB Queuine tRNA-ribosyltransferase OS=Bifidobacterium dentium (strain ATCC 27534 / DSM 20436 / JCM 1195 / Bd1) OX=401473 GN=tgt; PE = 3 SV=1
MTSLTESNLVEHPRGAEPGKPGDRRAFSFEQITRLPDTADGKGRGGARYGRTGIIHTPHGDIHTPAFVPVATQAAMKAVLPETMKDLGAQCLLSNAFHLYERPGEQVLDEAGGLAKFMNWNGPTFTDSGGFQVLSLGAGFKKTLAMDVTGMKSDEVIAEGKERLAFVDEDGVTFKSPLNGSLHRFSAEISMGIQHKIGADIMFAFDELTTLMNTRGYQERSVERTYRWAQRCVAEHQRLTEERLGKPYQALYGVVQGANYEDLRRHAAEQIASLDFDGVGIGGAIEKRIIGDTCAWICDAMPESRPRHVLGIAAVDDIFACVENGGDTFDCVAPARCGRNGAIFTRSGRYNIKRAQFKHDFGPLEEGCTCYTCTHYSRAYVDHALRAREFNGFTLATIHNEHFFVKLLDDIRASIDGGYFDEFRDETLARFYANGSRG

SEQ ID NO: 52563 - protein, 438 aa, Bifidobacterium dentium
  REGION 1..438: note = tr|A0A1V8Q7U5|A0A1V8Q7U5_9BIFI Queuine tRNA-ribosyltransferase OS=Bifidobacterium dentium OX=1689; GN = tgt PE=3 SV=1
MTSLTESNLVEHPRGAEPGKPGDRRAFSFEQITRLPDAADGKGRGGARYGRTGIIHTPHGDIHTPAFVPVATQAAMKAVLPETMKDLGAQCLLSNAFHLYERPGEQVLDEAGGLAKFMNWNGPTFTDSGGFQVLSLGAGFKKTLAMDVTGMKSDEVIAEGKERLAFVDEDGVTFKSPLNGSLHRFSAEISMGIQHKIGADIMFAFDELTTLMNTRGYQERSVERTYRWAQRCVAEHQRLTEERLGKPYQALYGVVQGANYEDLRRHAAEQIASLDFDGVGIGGAIEKRIIGDTCAWICDAMPESRPRHVLGIAAVDDIFACVENGGDTFDCVAPARCGRNGAIFTRSGRYNIKRAQFKHDFGPLEEGCTCYTCTHYSRAYVDHALRAREFNGFTLATIHNEHFFVKLLDDIRASIDGGYFDEFRDETLARFYANGSRG

SEQ ID NO: 52564 - protein, 429 aa, unidentified
  source 1..429: note = Bifidobacterium eulemuris
  REGION 1..429: note = tr|A0A261GFX4|A0A261GFX4_9BIFI Queuine tRNA-ribosyltransferase OS=Bifidobacterium eulemuris; OX = 1765219 GN=tgt PE=3 SV=1
MTDFLNHPIGAAAGQPGDRAAFSFETITRLPDAPEGKGRGGARYGRTGIIHTPHGDIRTPAFVPVATQAAMKAVLPETMRQLGAQCLLSNAFHLFERPGEDVLDAAGGLGRFMNWSGPTFTDSGGFQVLSLGSGFKKTLAMDVTGMKSDDVIAAGKERLAFVDEDGVTFKSPLNGDRHRFSAEISMGIQHKIGADIMFAFDELTTLMNTRGYQEESVERTYRWAKRCVAEHERLTAERLGKPYQALYGVVQGANYEDLRRRAAGQIASLDFDGVGIGGALEKRIIGDICAWICDSMPENRPRHVLGIASVDDIFACVENGGDTFDCVAPARCGRNGAIFTRHGRYNVKRAEFKTDFGPLEDGCECYTCRNYSKAYVDHLLRAREFNGFTLATIHNEYFFIKLLDDIRASIDGGYFEEFRDESLAHFYGE

SEQ ID NO: 52565 - protein, 436 aa, unidentified
  source 1..436: note = Bifidobacterium felsineum
  REGION 1..436: note = tr|A0A2M9HLD5|A0A2M9HLD5_9BIFI Queuine tRNA-ribosyltransferase OS=Bifidobacterium felsineum; OX = 2045440 GN=tgt PE=3 SV=1
MTSLLEYPRGAQPGQPGDRSAFSFETITRLSSTANGLGRDGARYGRTGIIHTPHGDIKTPAFVPVGTQAAMKAVLPEQMKDLGAQCLLANAFHLFERPGEDVLDAAGGLARFMNWDGPTFTDSGGFQVMSLGVGFKKTLAMDVTGMKSDDIIAKGKERMAWVDEDGVTFKSPLNGDSHRFSAEISMGIQHKLGADIMFAFDELTTLMNTRSYQEDSVERTFRWAKRCVAEHERLTAERLGKPYQALYGVVQGANYEDLRRHAAEQIASLDFDGVGIGGAIEKRIIGDTCAWICDAMPENRPRHVLGIASVDDIFACVENGGDTFDCVAPARCARNGAIFTRNGRYNIKRAQHKFDFGPLEEGCTCYTCQHYSRAYVDHLLRAREFNGFTLATIHNEHFFVKLLDDIRASIDGGYFEEFRDEALAHFYGNGERKPGL

SEQ ID NO: 52566 - protein, 433 aa, Bifidobacterium gallicum
  REGION 1..433: note = tr|D1NW53|D1NW53_9BIFI Queuine tRNA-ribosyltransferase OS=Bifidobacterium gallicum DSM 20093 = LMG 11596 OX=561180 GN=tgt PE=3 SV=1
MTNLIEHPRGAEPGKPGERSAFRFEQRTRLSDSADGLGRGGARYGRTGVIHTPHGDIQTPAFVPVATQAAMKGVLPEMMRATGAQCLLSNAFHLYERPGQDVLDEAGGLSKFMNWDGPTFTDSGGFQVLSLGAGFKKTLAMDVTGMKSDDVIAEGKERLAFVDEDGVTFKSPLNGSKHRFSAEISMGIQHQIGADIMFAFDELTTLMNTRGYQEKSIERTFRWAKRCVAEHEKLTQERLGKPYQALYGVVQGANYEDLRRRAASQIASLDFDGVGIGGAIEKRIIGNTCAWICDEMPESRPRHVLGIAAVDDIFACVENGGDTFDCVAPARCGRNGAIYTRRGRYNVKRAEFKHDFTPLEEGCDCYTCQHYTKAYVDHLLRARELNGFTLATIHNERFFIRLLDDIRASIDGGYFEEFRDETLAKYYENGSRG

SEQ ID NO: 52567 - protein, 433 aa, Bifidobacterium gallinarum
  REGION 1..433: note = tr|A0A4P6DUD2|A0A4P6DUD2_9BIFI Queuine tRNA-ribosyltransferase OS=Bifidobacterium gallinarum; OX = 78344 GN=tgt PE=3 SV=1
MISLLEHPRGAEPGKPGDRGAFSFETITRLPGSPDGKGRGGARYGRTGIIHTPHGDIRTPAFVPVATQAAMKAVLPETMKDLGAQCLLSNAFHLYERPGEDVLDAAGGLGRFMNWDGPTFTDSGGFQVLSLGAGFKKTLAMDVTGMKSDDVIAEGKERLAFVDEDGVTFKSPLNGSLHRFSAEISMGIQHKIGADIMFAFDELTTLMNTRGYQERSVERTFRWAQRCVSEHQRLTETRLGKPYQALYGVVQGANYEDLRRRAASQIASLDFDGVGIGGAMEKRIIGDICAWICDEMPENRPRHVLGIAAVDDIFACVENGGDTFDCVAPARCGRNGAIFTRDGRYNVKRAEFKTDFGPLEEGCDCYTCQHYSRAYVDHLLRAREFNGFTLATIHNERFFVKLLDDIRASIDGGYFDEFRDATLARFYANGSRG

SEQ ID NO: 52568 - protein, 433 aa, Bifidobacterium gallinarum
  REGION 1..433: note = tr|A0A087AM64|A0A087AM64_9BIFI Queuine tRNA-ribosyltransferase OS=Bifidobacterium gallinarum; OX = 78344 GN=tgt PE=3 SV=1
MTSLLDHPRGAEPGKPGDRGAFSFETITRLPDSPDGKGRGGARYGRTGIIHTPHGDIRTPAFVPVATQAAMKAVLPETMKDLGAQCLLSNAFHLYERPGEDVLDAAGGLGRFMNWDGPTFTDSGGFQVLSLGAGFKKTLAMDVTGMKSDDVIAEGKERLAFVDEDGVTFKSPLNGSLHRFSAEISMGIQHKIGADIMFAFDELTTLMNTRGYQERSVERTFRWAQRCVAEHQRLTESRLGKPYQALYGVVQGANYEDLRRRAASQIASLDFDGVGIGGAMEKRIIGDICAWICDEMPENRPRHVLGIAAVDDIFACVENGGDTFDCVAPARCGRNGAIFTRDGRYNVKRAEFKTDFGPLEEGCDCYTCQHYSRAYVDHLLRAREFNGFTLATIHNERFFVKLLDDIRASIDGGYFDEFRDATLTRFYANGSRG

SEQ ID NO: 52569 - protein, 433 aa, unidentified
  source 1..433: note = Bifidobacterium hapali
  REGION 1..433: note = tr|A0A261G0H5|A0A261G0H5_9BIFI Queuine tRNA-ribosyltransferase OS=Bifidobacterium hapali; OX = 1630172 GN=tgt PE=3 SV=1
MTNLVDHPRGAAPGQPGDRNAFSFETITRLPDAPDGKGRGGARYGRTGILHTPHGDIHTPAFVPVATQAAMKAVLPETMRSEGAQCLLSNAFHLYERPGEDVLDAAGGLAKFMNWDGPTFTDSGGFQVLSLGAGFKKTLAMDVTGMKSDDVIANGKERLAFVDEDGVTFKSPLNGARHRFSAEISMGIQHKIGADIMFAFDELTTLMNTRSYQEQSVERTYRWAQRCVAEHQRLTQVRLGKPYQALYGVVQGANYEDLRRHAAEQIASLDFDGVGIGGAIEKRIIGDTCAWICDAMPESRPRHVLGIAAVDDIFACVENGGDTFDCVAPARCGRNGAIFTRDGRYNVKRAEFKFDFGPLEKGCDCYTCTHYSRAYVDHLLRAREFNGFTLATIHNEHFFIKLLDDIRASIDGGYFNEFRDETLARFYAHGSRG

SEQ ID NO: 52570 - protein, 436 aa, unidentified
  source 1..436: note = Bifidobacterium imperatoris
  REGION 1..436: note = tr|A0A2N5IPQ6|A0A2N5IPQ6_9BIFI Queuine tRNA-ribosyltransferase OS=Bifidobacterium imperatoris; OX = 2020965 GN=tgt PE=3 SV=1
MTSLLEHPRGAQPGQPGDRSAFSFETITRLSSTANGLGRDGARYGRTGIIHTPHGDIKTPAFVPVGTQAAMKAVLPEQMKDLGAQCLLANAFHLFERPGEDVLDAAGGLARFMNWDGPTFTDSGGFQVMSLGVGFKKTLAMDVTGMKSDDIIAKGKERMAWVDEDGVTFKSPLNGDSHRFSAEISMGIQHKLGADIMFAFDELTTLMNTRSYQEDSVERTFRWAKRCVAEHERLTAERLGKPYQALYGVVQGANYEDLRRHAAEQIASLDFDGVGIGGAIEKRIIGDTCAWICDAMPESRPRHVLGIASVDDIFACVENGGDTFDCVAPARCARNGAIFTRNGRYNIKRAQHKFDFGPLEEGCTCYTCQHYSRAYVDHLLRAREFNGFTLATIHNEHFFVKLLDDIRASIDGGYFEEFRDEALAHFYGNGERKPGL

SEQ ID NO: 52571 - protein, 432 aa, Bifidobacterium indicum
  REGION 1..432: note = tr|A0A087VSM3|A0A087VSM3_9BIFI Queuine tRNA-ribosyltransferase OS=Bifidobacterium indicum LMG 11587 = DSM 20214 OX=1341694 GN=tgt PE=3 SV=1
MTFLMNPLGAEPGRPGDRSAFSFEAITQLPSAADGLGREGRRYGRTGIIHTPHGDIHTPAFIPVATQAAMKAVLPEQMREMGAQVLLSNAFHLFERPGEDILDQAGGLARFMNWDGPTYTDSGGFQVLSLGAGFKKTLAMDVTGMQSDEVIAEGKERLAFVDEDGVTFKSPLNGDQHRFSAEISMGIQHKIGADVMFAFDELTTLMNTRSYQEKSVERTFRWAKRCVAEHERLTAERTGKPYQALFGVVQGANYEDLRRKAAGHIASLDFDGVGIGGAIEKRLLGQTCAWICDEMPESRPRHVLGIAAVDDIFAGVENGGDTFDCVAPARCGRNGAVFTRDGRWNIKRAQFKNDFRPIEEDCDCYACTNYSRAYINHLLRAREFNGFTLATIHNERFFVRLLDEIRASIDGGYFDDYKKETLARFYANGSRG

SEQ ID NO: 52572 - protein, 432 aa, Bifidobacterium indicum
  REGION 1..432: note = tr|A0A318LZ49|A0A318LZ49_9BIFI Queuine tRNA-ribosyltransferase OS=Bifidobacterium indicum OX=1691; GN = tgt PE=3 SV=1
MTFLMNPLGAEPGRPGDRSAFSFEAITQLPSAADGLGREGRRYGRTGIIHTPHGDIHTPAFIPVATQAAMKAVLPEQMREMGAQVLLSNAFHLFERPGEDILDQAGGLARFMNWDGPTYTDSGGFQVLSLGAGFKKTLAMDVTGMQSDEVIAEGKERLAFVDEDGVTFKSPLNGDQHRFSAEISMGIQHKIGADVMFAFDELTTLMNTRSYQEKSVERTFRWAKRCVAEHERLTAERTGKPYQALFGVVQGANYEELRRKAAGHIASLDFDGVGIGGAIEKRLLGQTCAWICDEMPESRPRHVLGIAAVDDIFAGVENGGDTFDCVAPARCGRNGAVFTRDGRWNIKRAQFKNDFRPIEEDCDCYACTNYSRAYINHLLRAREFNGFTLATIHNERFFVRLLDEIRASIDGGYFDDYKKETLARFYANGSRG

SEQ ID NO: 52573 - protein, 449 aa, unidentified
  source 1..449: note = Bifidobacterium italicum
  REGION 1..449: note = tr|A0A2A2EL51|A0A2A2EL51_9BIFI Queuine tRNA-ribosyltransferase OS=Bifidobacterium italicum; OX = 1960968 GN=tgt PE=3 SV=1
MTSTSIPADSTITSAPAPQLVEHPRGAEPGEPGDRSAFHFEQITRLPDAADGKGKGGARYGRTGILHTPHGDIRTPAFVPVATQGAMKAVLPESMVELGAQCLLSNAFHLYERPGEDVLDEAGGLAKFMNWNGPTFTDSGGFQVLSLGAGFKKTLAMDVKGMKSDDVIAEGKERMAFVDEDGVTFKSPLNGSLHRFSAEISMNIQHKIGADIMFAFDELTTLMNTRRYQENSVERTYRWAQRCVAEHERLTTERVGKPYQALYGVVQGANYEDLRRHAAQQIASLDFDGVGIGGAMEKRIIGDICAWICDEMPQSRPRHVLGIAAVDDIFACVENGGDTFDCVAPARCGRNGAIFTRDGRYNIKRAQFKHDFGPLEEGCSCYTCTHYSRAYVDHLLRSHEMNGFTLATIHNEYFFVHLLDDIRASIDGGYFDEFRDETLARFYANGSRG

SEQ ID NO: 52574 - protein, 437 aa, Bifidobacterium kashiwanohense
  REGION 1..437: note = tr|A0A0A7I0A9|A0A0A7I0A9_9BIFI Queuine tRNA-ribosyltransferase OS=Bifidobacterium kashiwanohense PV20-2 OX=1447716 GN=tgt PE=3 SV=1
MATPVENLIEHPRGAEPDKPGRRDAFYFEQKTRLPDAADGKGRGGARYGRTGIIHTPHGDIHTPAFVPVATQAAMKAVLPETMKDLGAQCLLSNAFHLYERPGEQVLDEAGGLAKFMNWNGPTFTDSGGFQVLSLGAGFKKTLAMDVTGMKSDDVIAEGKERLAFVDEDGVTFKSPLNGSLHRFSAEISMGIQHKIGADIMFAFDELTTLMNTRGYQERSVERTYRWAQRCVAEHKRLTEERVGKPYQALYGVVQGANYEDLRRHAAEQIASLDFDGVGIGGAIEKRIIGDTCAWICDAMPESRPRHVLGIAAVDDIFACVENGGDTFDCVAPARCGRNGAIFTRHGRYNIKRAQFKHDFGPLEEDCGCYTCTHYSRAYVDHALRAREFNGFTLATIHNEHFFVKLLDDIRASIDGGYFNEFRDETLAKFYENGSKG

SEQ ID NO: 52575 - protein, 429 aa, unidentified
  source 1..429: note = Bifidobacterium lemurum
  REGION 1..429: note = tr|A0A261FQK5|A0A261FQK5_9BIFI Queuine tRNA-ribosyltransferase OS=Bifidobacterium lemurum; OX = 1603886 GN=tgt PE=3 SV=1
MTDFLNQPIGAAPGQPGDRTAFSFETITRLPGSPDGKGRGGTRYGRTGIIHTPHGDIRTPAFVPVATQAAMKAVLPETMRQLGAQCLLSNAFHLFERPGEDVLDAAGGLGRFMNWSGPTFTDSGGFQVLSLGSGFKKTLAMDVTGMKSDDVIAEGKERLAFVDEDGVTFKSPLNGDRHRFSAEISMGIQHKIGADIMFAFDELTTLMNTRGYQEQSVERTYRWAQRCVAEHERLTAERLGKPYQALYGVVQGANYEDLRRHAAEQIASLDFDGVGIGGALEKRIIGDICAWICDAMPENRPRHVLGIASVDDIFACVENGGDTFDCVAPARCGRNGAIFTRHGRYNVKRAEFKTDFGPLEDGCECYTCRNYSKAYVDHLLRAREFNGFTLATIHNEYFFIKLLDDIRASIDGGYFEEFRDESLAHFYGA

SEQ ID NO: 52576 - protein, 437 aa, Bifidobacterium longum
  REGION 1..437: note = tr|B7GSQ2|B7GSQ2_BIFLS Queuine tRNA-ribosyltransferase OS=Bifidobacterium longum subsp. infantis (strain ATCC 15697 / DSM 20088 / JCM 1222 / NCTC 11817 / S12) OX=391 904 GN=tgt PE=3 SV=1
MTISLLEHPLGAQPGQPGDRSAFHFETITRLPSTASGLGRDGARYGRTGIIHTPHGDIRTPAFVPVSTQAAMKAVLPEQMKELGAQCLLANAFHLFERPGEAVLDAAGGLANFMNWDGPTFTDSGGFQVMSLGVGFKKTLAMDVTGMKSDDIIAKGKERMAWVDEDGVTFKSPLNGDAHRFSAEISMGIQHKIGADIMFAFDELTTLMNTRSYQEDSVERTFRWARRCVDEHQRLTAERLGRPYQALYGVVQGANYEDLRRRAAAQIASLDFDGVGIGGAIEKRLIGDTCAWICDAMPENRPRHVLGIASVDDIFACVENGGDTFDCVAPARCARNGAIYTRSGRYNIKRAQHKFDFGPLEEGCDCYTCRHYSRAYVDHLLRAREFNGFTLATIHNEHFFVKLLDDIRAAIDGGYFDEFRDDAMAHFYGNGERKPGL

SEQ ID NO: 52577 - protein, 437 aa, Bifidobacterium longum
  REGION 1..437: note = tr|T2HYZ3|T2HYZ3_BIFLN Queuine tRNA-ribosyltransferase OS=Bifidobacterium longum subsp. longum CECT 7347 OX=1205679 GN=tgt PE=3 SV=1
MTISLLEHPLGAQPGQPGDRSAFHFETITRLPSTASGLGRDGARYGRTGIIHTPHGDIRTPAFVPVGTQAAMKAVLPEQMKDLGAQCLLANAFHLFERPGEDVLDAAGGLARFMNWDGPTFTDSGGFQVMSLGVGFKKTLAMDVTGMKSDDIIAKGKERMAWVDEDGVTFKSPLNGDAHRFSAEISMGIQHKIGADIMFAFDELTTLMNTRSYQEDSVERTFRWARRCVDEHQRLTADRVGKPYQALYGVVQGANYEDLRRRAASQIASLDFDGVGIGGAIEKRIIGDTCAWICDAMPENRPRHVLGIASVDDIFACVENGGDTFDCVAPARCARNGAIYTRAGRYNIKRAQHKFDFGPLEEGCDCYTCQHYSRAYVDHLLRAREFNGFTLATIHNEHFFVKLLDDIRASIDGGYFDEFRDEALAHFYGNGERRPGL

SEQ ID NO: 52578 - protein, 433 aa, Bifidobacterium magnum
  REGION 1..433: note = tr|A0A087BAQ3|A0A087BAQ3_9BIFI Queuine tRNA-ribosyltransferase OS=Bifidobacterium magnum OX=1692; GN = tgt PE=3 SV=1
MTSLLEHPRGAEPGKPGDRSAFYFEQHTRLSDSPNGLGKNGARYGRTGVIHTPHGDIQTPAFVPVATQAAMKAVLPESMKQLGAQCLLSNAFHLFERPGEDVLDAAGGLAKFMNWDGPTFTDSGGFQVLSLGAGFKKTLAMDVTGLKSDDVIADGKERRAFVDEDGVTFKSPLNGSLHRFSAEISMGIQHKIGADIMFSFDELTTLMNTRQYQEESIERTFRWAKRCVAEHKRLTEERLGKPYQALYGVVQGANYEDLRRRAAAQIASLDFDGVGIGGAIEKRIIGETCAWICDAMPENRPRHVLGIAAVDDIFACVENGGDTFDCVAPARCGRNGAIYTRHGRYNVKRAENKFAFTPLEEGCDCYTCTHYTRAYVDHCLRAREFDGFTLATIHNERFFVKLLDDIRASIDGGYFEEFRDETMAHYYENGSRG

SEQ ID NO: 52579 - protein, 469 aa, unidentified
  source 1..469: note = Bifidobacterium margollesii
  REGION 1..469: note = tr|A0A2N5J8Q7|A0A2N5J8Q7_9BIFI Queuine tRNA-ribosyltransferase OS=Bifidobacterium margollesii; OX = 2020964 GN=tgt PE=3 SV=1
MTDATNTTDTTSLVPATSPSLAPSLVSASVAAGSPEAAALVDHPRGAQNGLPGDRSAFGFEVVRRLDPTADGLGRDGFRHGRAGILHTPHGDIQTPAFVPVATQATMKAMLPEQLVDLGAQCTLANAFHLFERPGEDILDEAGGLAKFMNWNGPTFTDSGGFQVLSLGAGFKKTLAMDVTGLKSDDVIAEGKERRAFVDEDGVTFKSPLNGDVHRFSAEISMGIQHKLGADIMFAFDELTTLMNTRSYQEQSVERTYRWAKRCVAEHQRLTAARTGKPYQALFGVVQGANYEDLRRHAARQIASLDFDGVGIGGAIEKRLLGNTCAWICDEMPELRPRHVLGIAAVDDIFAGVENGGDTFDCVAPARTARNGAIYTRDGRWNVLRAALKRDFRPLEEGCDCYTCQHYSRAYLHHLLKAREMSGCTLATIHNERFFVKLIDDIRESIVGGYFDEFKRETLARFYANGSRG

SEQ ID NO: 52580 - protein, 425 aa, Bifidobacterium merycicum
  REGION 1..425: note = tr|A0A087BD65|A0A087BD65_9BIFI Queuine tRNA-ribosyltransferase OS=Bifidobacterium merycicum; OX = 78345 GN=tgt PE=3 SV=1
MGAEPGKPGDRSAFSFETITRLPNAADGKGRDGARYGRTGIIHTPHGDIRTPAFVPVGTQASMKAVLPEQMRDLGAQCLLANAFHLFERPGEDVLDAAGGLAKFMNWDGPTFTDSGGFQVMSLGVGFKKTLAMDISGMKSDDVIAKGKERMAWVDEEGVTFKSPLNGDQHRFSAEISMGIQHKLGADIMFAFDELTTLMNTRGYQEQSVERTYRWAQRCVAEHKRLTEERLGKPYQALYGVVQGANYEDLRRHAAAQIASLDFDGVGIGGAIEKRIIGDTCAWICDEMPENRPRHVLGIAAVDDIFACVENGGDTFDCVAPARCGRNGAIFTRHGRYNIKRAQFKFDFGPLEEGCDCYTCTHYTRAHVTHLLRAREFNGFTLATIHNERFFVKLLDDIRASIDGGYFEEFRDETLAKFYENGSKG

SEQ ID NO: 52581 - protein, 366 aa, Bifidobacterium minimum
  REGION 1..366: note = tr|A0A087BSM9|A0A087BSM9_9BIFI Queuine tRNA-ribosyltransferase OS=Bifidobacterium minimum OX=1693; GN = BMIN_1294 PE=3 SV=1
MKAVLPETMKELGAQCLLSNAFHLFERPGEGVIDAAGGLGRFMNWDGPTFTDSGGFQVLSLGAGFKKTLAMDVTGMKSDDVIAEGKERLAFVDEDGVTFKSPLNGSTHRFSAEISMGIQHRIGADIMFAFDELTTLMNTRGYQERSVERTFRWARRCVAEHRRLTEERSDKPYQALYGVVQGANYEDLRRHAAEQIASLDFDGVGIGGAIEKRLIGDTCAWIGDAMPESRPRHVLGIASVDDIFECVENGGDTFDCVAPARCARNGAIFTRDGRYNVKRSRFRTDFGPLEEGCDCHACTHYSRAYVAHLLHAREINGFTLATIHNERFFVRLLDDIRASIDAGRFEEFRDETLSRFYAHAGRAFVD

SEQ ID NO: 52582 - protein, 419 aa, Bifidobacterium mongoliense
  REGION 1..419: note = tr|A0A423UDN9|A0A423UDN9_9BIFI Queuine tRNA-ribosyltransferase OS=Bifidobacterium mongoliense; OX = 518643 GN=tgt PE=3 SV=1
MPGDRRAFSFETKTQLPPSAQGKGRDGTRYGRSGIIHTPHGDIRTPAFVPVATQAAIKGVLPEQMKELGAQCLLSNAFHLFERPGEAVIDEAGGLGRFMNWDGPTFTDSGGFQVLSLGAGFKKTLAMDVKGMKSDDVIAKGKERMAFVDEDGVTFKSPLNGSKHRFSAEISMGIQHKIGADIMFAFDELTTLMNTRAYQERSVERTFRWAQRCVAEHERLTAARVGKPYQALYGVVQGANYEDLRRHAAEQIASLDFDGVGIGGAIEKRVIGDTCAWIADAMPLSRPRHVLGIASVDDIFACVENGGDTFDCVAPARVGRNGAIYTHDGRYNIKRAGFKHDFGPLEEGCDCYTCTHYTRAYVDHLLRARELNGFTLATIHNEHFFITLLDDIRASIDGGYFDEFRDQTLAHFYANGSRG

SEQ ID NO: 52583 - protein, 419 aa, Bifidobacterium mongoliense
  REGION 1..419: note = tr|A0A087C228|A0A087C228_9BIFI Queuine tRNA-ribosyltransferase OS=Bifidobacterium mongoliense DSM 21395 OX=1437603 GN=tgt PE=3 SV=1
MPGDRRAFSFETTTQLPPSAQGKGRDGTRYGRSGIIHTPHGDIRTPAFVPVATQAAIKGVLPEQMKELGAQCLLSNAFHLFERPGEAVIDEAGGLGRFMNWDGPTFTDSGGFQVLSLGAGFKKTLAMDVKGMKSDDVIAKGKERMAFVDEDGVTFKSPLNGSKHRFSAEISMGIQHKIGADIMFAFDELTTLMNTRAYQERSVERTFRWAQRCVAEHERLTAARVGKPYQALYGVVQGANYEDLRRHAAEQIASLDFDGVGIGGAIEKRVIGDTCAWIADAMPLSRPRHVLGIASVDDIFACVENGGDTFDCVAPARVGRNGAIYTHDGRYNIKRAGFKHDFGPLEEGCDCYTCTHYTRAYVDHLLRARELNGFTLATIHNEHFFITLLDDIRASIDGGYFDEFRDQTLAHFYANGSRG

SEQ ID NO: 52584 - protein, 455 aa, unidentified
  source 1..455: note = Bifidobacterium moukalabense
  REGION 1..455: note = tr|W4N759|W4N759_9BIFI Queuine tRNA-ribosyltransferase OS=Bifidobacterium moukalabense DSM 27321 OX=1435051 GN=tgt PE=3 SV=1
MKFLHPAQSALSPKVKRMTSLTEPNLVEHPRGAEPGKPGDRRAFSFEQTTRLPDAADGKGRGGARYGRTGIIHTPHGDIHTPAFVPVATQAAMKAVLPETMKDLGAQCLLSNAFHLYERPGEQVLDEAGGLAKFMNWNGPTFTDSGGFQVLSLGAGFKKTLAMDVTGMKSDEVIAEGKERLAFVDEDGVTFKSPLNGSLHRFSAEISMGIQHKIGADIMFAFDELTTLMNTRGYQERSVERTYRWAQRCVAEHQRLTEERLGKPYQALYGVVQGANYEDLRRHAAEQIASLDFDGVGIGGAIEKRIIGDTCAWICDAMPESRPRHVLGIAAVDDIFACVENGGDTFDCVAPARCGRNGAIFTRSGRYNIKRAQFKHDFGPLEEGCTCYTCTHYSRAYVDHALRAREFNGFTLATIHNEHFFVKLLDDIRSSIDGGYFDEFRDETLAKFYANGSKG

SEQ ID NO: 52585 - protein, 440 aa, unidentified
  source 1..440: note = Bifidobacterium myosotis
  REGION 1..440: note = tr|A0A261FJB4|A0A261FJB4_9BIFI Queuine tRNA-ribosyltransferase OS=Bifidobacterium myosotis; OX = 1630166 GN=tgt PE=3 SV=1
MTTSQTSLLEHPLGAEPGKPGDRGAFHFETITRLPSTANGLGHDGARYGRTGIIHTPHGDIRTPAFVPVGTQAAMKAVLPESMKALGAQCLLANAFHLFERPGEDVLDAAGGLARFMHWDGPTFTDSGGFQVMSLGVGFKKTLAMDVTGMKSDDIIAKGKERMAWVDEDGVTFKSPLNGDSHRFSAEISMGIQHKLGADIMFAFDELTTLMNTRSYQEDSVERTFRWAKRCVAEHERLTAERVGKPYQALYGVVQGANYEDLRRKAAAQIASLDFDGVGIGGAIEKRIIGDTCAWICDAMPESRPRHVLGIASVDDIFACVENGGDTFDCVAPARCARNGAIFTRNGRYNIKRAENKFNFGPLEEGCDCYTCSNYSRAYVDHLLRAREFNGFTLATIHNEHFFVKLLDDIRASIDGGYFDEFRDETLAHFYGNGTRKPGL

SEQ ID NO: 52586 - protein, 462 aa, unidentified
  source 1..462: note = Bifidobacterium parmae
  REGION 1..462: note = tr|A0A2N5J4V3|A0A2N5J4V3_9BIFI Queuine tRNA-ribosyltransferase OS=Bifidobacterium parmae; OX = 361854 GN=tgt PE=3 SV=1
MTDNPTNTTVDAVPGGASTNAGTVATTGTPAPAAIDLNEHPRGAAPGKPGDRAAFSFETITRLPDAADGKGKGGARYGRTGIIHTPHGDIRTPAFVPVGTQAAMKAVLPESMRDLGAQCLLANAFHLFERPGEDVLDAAGGLAKFMNWHGPTFTDSGGFQVMSLGVGFKKTLAMDVTGMKSDDIIAEGKERLAWVDEDGVTFKSPLNGDEHRFSAEISMGIQHKIGADIMFAFDELTTLMNTRSYQEESVERTYRWAQRCVAEHQRLTEARLGKPYQALYGVVQGANYEDLRRHAAEQIASLDFDGVGIGGAIEKRIIGETCAWICDAMPENRPRHVLGIASVDDIFACVENGGDTFDCVAPARCARNGAIFTRHGRYNIKRAQHKFDFGPLEEGCDCYTCAHYSRAYVDHLLRAHEFTGFTLATIHNERFFVKLLDDIRASIDGGYFEEFRDESLAHFYGK

SEQ ID NO: 52587 - protein, 443 aa, unidentified
  source 1..443: note = Bifidobacterium primatium
  REGION 1..443: note = tr|A0A2M9HBJ1|A0A2M9HBJ1_9BIFI Queuine tRNA-ribosyltransferase OS=Bifidobacterium primatium; OX = 2045438 GN=tgt PE=3 SV=1
MTDVTDPTNTTIDLVEHPRGAAEGRPGDRSAFGFEITRRLDPTADGLGRGGFRHGRSGIIHTPHGDIKTPAFVPVATQATMKAMLPEQLVDLGAQCTLANAFHLFERPGEDIIDAAGGLGKFMNWHGPTFTDSGGFQVMSLGVGFKKTLAMDVTGLKSDDIIAKGKERLAFVDEDGVTFKSPLNGDIHRFSAEISMGIQHKIGADIMFSFDELTTLMNTRSYQEQSVERTFRWAKRCVAEHQRLTAERLGKPYQALFGVVQGANYEDLRRHAAQQIASLDFDGVGIGGAIEKNILGNICAWICDEMPELRPRHVLGIAAVDDIFAGVENGGDTFDCVAPARTARNGAIYTRDGRWNVLRTALKRDFRPLEEGCDCYTCTHYSRAYLHHLLKAREMSGCTLATIHNERFFVKLLDDIRASIDGGYFDEFKRETLARFYANGSRG

SEQ ID NO: 52588 - protein, 434 aa, Bifidobacterium pseudocatenulatum
  REGION 1..434: note = tr|A0A395ZNM4|A0A395ZNM4_9BIFI Queuine tRNA-ribosyltransferase OS=Bifidobacterium pseudocatenulatum OX=28026 GN=tgt PE=3 SV=1
MPENLIEHPRGAEPGKPGRRDAFYFEQKTRLPDAADGKGRGGARYGRTGTIHTPHGDIHTPAFVPVATQAAMKAVLPETMKDLGAQCLLSNAFHLYERPGEQVLDEAGGLAKFMNWNGPTFTDSGGFQVLSLGAGFKKTLAMDVTGMKSDDVIAEGKERLAFVDEDGVTFKSPLNGSLHRFSAEISMGIQHKIGADIMFAFDELTTLMNTRGYQERSVERTYRWAQRCVAEHKRLTEERVGKPYQALYGVVQGANYEDLRRHAAEQIASLDFDGVGIGGAIEKRIIGDTCAWICDAMPESRPRHVLGIAAVDDIFACVENGGDTFDCVAPARCGRNGAIFTRGGRYNIKRAQFKHDFGPLEEGCDCYTCTHYSRAYVDHALRAREFNGFTLATIHNEHFFVKLLDDIRASIDGGYFDEFRDETLARFYANGSRG

SEQ ID NO: 52589 - protein, 455 aa, Bifidobacterium pseudocatenulatum
  REGION 1..455: note = tr|A0A173WE78|A0A173WE78_9BIFI Queuine tRNA-ribosyltransferase OS=Bifidobacterium pseudocatenulatum OX=28026 GN=tgt PE=3 SV=1
MTSLTESSTDTAQDTQNAATAVSENLIEHPRGAEPGKPGRRDAFYFEQKNRLPDAADGKGRGGARYGRTGIIHTPHGDIHTPAFVPVATQAAMKAVLPETMKDLGAQCLLSNAFHLYERPGEQVLDEAGGLAKFMNWNGPTFTDSGGFQVLSLGAGFKKTLAMDVTGMKSDDVIAEGKERLAFVDEDGVTFKSPLNGSLHRFSAEISMGIQHKIGADIMFAFDELTTLMNTRGYQERSVERTYRWAQRCVAEHKRLTEERVGKPYQALYGVVQGANYEDLRRHAAEQIASLDFDGVGIGGAIEKRIIGDTCAWICDAMPESRPRHVLGIAAVDDIFACVENGGDTFDCVAPARCGRNGAIFTRGGRYNIKRAQFKHDFGPLEEGCDCYTCTHYSRAYVDHALRAREFNGFTLATIHNEHFFVKLLDDIRASIDGGYFDEFRDETLARFYANGSRG

SEQ ID NO: 52590 - protein, 433 aa, Bifidobacterium pseudolongum
  REGION 1..433: note = tr|A0A0A7I5T2|A0A0A7I5T2_9BIFI Queuine tRNA-ribosyltransferase OS=Bifidobacterium pseudolongum PV8-2 OX=1447715 GN=tgt PE=3 SV=1
MTSLLAHPRGAEPGQPGDRSAFSFEQHTRLTDSPTGKGRGGARYGRTGVIHTPHGDIRTPAFVPVATQAAMKAVLPESMVQLGAQCLLSNAFHLYERPGEDVLDEAGGLAKFMNWDGPTFTDSGGFQVLSLGAGFKKTLAMDTTDMKSDDVIAKGKERLAFVDEDGVTFKSPLNGSLHRFSAEISMNIQHKIGADIMFAFDELTTLMNTRRYQENSVERTFRWARRCVDEHKRLTESRVGKPYQALYGVVQGANYEDLRRRAAQQIASLDFDGVGIGGAMEKRIIGDICAWICDEMPQERPRHVLGIAAVDDIFACVENGGDTFDCVAPARCARNGAIFTRDGRYNIKRAQFKHDFGPLEEGCTCYTCTHYSRAYVDHLLRAREMNGFTLATIHNEYFFVHLLDDIRASIDGGYFDEFRDATLARFYANGSRG

SEQ ID NO: 52591 - protein, 447 aa, Bifidobacterium pseudolongum
  REGION 1..447: note = tr|A0A2N3QXL4|A0A2N3QXL4_9BIFI Queuine tRNA-ribosyltransferase OS=Bifidobacterium pseudolongum subsp. globosum OX=1690 GN=tgt PE=3 SV=1
MVDSIYTGPSTVVSMTSLLAHPRGAEPGQPGDRSAFSFEQHTRLTDSPTGKGRGGARYGRTGVIHTPHGDIRTPAFVPVATQAAMKAVLPESMVQLGAQCLLSNAFHLYERPGEDVLDEAGGLAKFMNWDGPTFTDSGGFQVLSLGAGFKKTLAMDTTDMKSDDVIAKGKERLAFVDEDGVTFKSPLNGSLHRFSAEISMNIQHKIGADIMFAFDELTTLMNTRRYQENSVERTFRWARRCVDEHKRLTESRVGKPYQALYGVVQGANYEDLRRRAAQQIASLDFDGVGIGGAMEKRIIGDICAWICDEMPQERPRHVLGIAAVDDIFACVENGGDTFDCVAPARCARNGAIFTRDGRYNIKRAQFKHDFGPLEEGCTCYTCTHYSRAYVDHLLRAREMNGFTLATIHNEYFFVHLLDDIRASIDGGYFDEFRDATLARFYANGSRG

SEQ ID NO: 52592 - protein, 432 aa, Bifidobacterium psychraerophilum
  REGION 1..432: note = tr|A0A087CHX7|A0A087CHX7_9BIFI Queuine tRNA-ribosyltransferase OS=Bifidobacterium psychraerophilum OX=218140 GN=tgt PE=3 SV=1
MTLTLNPLGCEEGKPADRSAFSFETTTRLPDSAAGLGRGGKRYGRTGIIHTPHGDIRTPAFVPVATQSAMKAVLPEQMKDLGAQCLLSNAFHLFERPGEDVLDEAGGLAQFMNWDGPTYTDSGGFQVLSLGAGFKKTLAMDVQGMKSDDVIADGKERMAFVDEDGVTFKSPLNGSLHRFSAEISMRIQHKLGADIMFAFDELTTLMNTRSYQEQSVERTFRWAKRCVAEHQQLTQTRLGKPYQALFGVVQGANYEDLRRLAASQIASLDFDGVGIGGAIEKQLLGQTCAWICDEMPESRPRHVLGIAAVNDIFDAVENGGDTFDCVAPARNGRNGAIFTRDGRWNVKRAEFKHDFRPLEEDCDCYTCRNYSRAYVDHLLRAREFNGFTLATIHNEHFFVKLLDDIRAAIDAGYFDEFKRETLARFYAHGSRG

SEQ ID NO: 52593 - protein, 433 aa, Bifidobacterium pullorum
  REGION 1..433: note = tr|A0A087CIG8|A0A087CIG8_9BIFI Queuine tRNA-ribosyltransferase OS=Bifidobacterium pullorum; OX = 78448 GN=tgt PE=3 SV=1
MTSLLDHPRGVEPGKPGDRGAFSFETITRLPDSPDGKGRGGARYGRTGIIHTPHGDIRTPAFVPVATQAAMKAVLPETMKDLGAQCLLSNAFHLYERPGEDVLDAAGGLGRFMNWDGPTFTDSGGFQVLSLGAGFKKTLAMDVTGMKSDDVIAEGKERLAFVDEDGVTFKSPLNGSLHRFSAEISMGIQHKIGADIMFAFDELTTLMNTRGYQERSVERTFRWAQRCVAEHQRLTESRLGKPYQALYGVVQGANYEDLRRRAASQIASLDFDGVGIGGAMEKRIIGDICAWICDEMPENRPRHVLGIAAVDDIFACVENGGDTFDCVAPARCGRNGAIFTRDGRYNVKRAEFKTDFGPLEEGCDCYTCQHYSRAYVDHLLRARELNGFTLATIHNERFFVKLLDDIRASIDGGYFNEFRDATLARFYANGSRG

SEQ ID NO: 52594 - protein, 436 aa, Bifidobacterium reuteri
  REGION 1..436: note = tr|A0A5J5E9C0|A0A5J5E9C0_9BIFI tRNA guanosine(34) transglycosylase Tgt OS=Bifidobacterium reuteri OX=983706; GN = EMO92_03800 PE=4 SV=1
MTSLLEHPLGAEPGQPGDRSAFSFETITRLPSTADGLGRDGARYGRTGIIHTPHGNIRTPAFVPVGTQAAMKAVLPEQMKELGAQCLLANAFHLFERPGEDVLDAAGGLARFMHWDGPTFTDSGGFQVMSLGVGFKKTLAMDVTGMKSDDIIAKGKERMAWVDEDGVTFKSPLNGSAHRFSAEISMGIQHKLGADIMFAFDELTTLMNTRSYQEDSVERTFRWAKRCVAEHERLTAERVGKPYQALYGVVQGANYEDLRRKAAAQIASLDFDGVGIGGAIEKRIIGDTCAWICDAMPENRPRHVLGIASVDDIFACVENGGDTFDCVAPARCARNGAIFTRNGRYNIKRAQHKLDFGPLEEGCDCYTCRNYSRAYVDHLLRAREFNGFTLATIHNEHFFVKLLDDIRASIDGGYFNEFRDEALAHFYGNGSRKPGL

SEQ ID NO: 52595 - protein, 463 aa, Bifidobacterium reuteri
  REGION 1..463: note = tr|A0A087CXR9|A0A087CXR9_9BIFI Queuine tRNA-ribosyltransferase OS=Bifidobacterium reuteri DSM 23975 OX=1437610 GN=tgt PE=3 SV=1
MLRTLPALTIGCQNFFSFPALLLKVNTMTSLLEHPLGAEPGQPGDRSAFSFETITRLPSTADGLGRNGARYGRTGIIHTPHGDIRTPAFVPVGTQAAMKAVLPEQMKELGAQCLLANAFHLFERPGEDVLDAAGGLARFMHWDGPTFTDSGGFQVMSLGVGFKKTLAMDVTGMKSDDIIAKGKERMAWVDEDGVTFKSPLNGSAHRFSAEISMGIQHKLGADIMFAFDELTTLMNTRSYQEDSVERTFRWAKRCVAEHERITAERVGKPYQALYGVVQGANYEDLRRKAAAQIASLDFDGVGIGGAIEKRIIGDTCAWICDAMPENRPRHVLGIASVDDIFACVENGGDTFDCVAPARCARNGAIFTRNGRYNIKRAQHKFDFGPLEEGCDCYTCRNYSRAYVDHLLRAREFNGFTLATIHNEHFFVKLLDDIRASIDGGYFNEFRDEALANFYGNGSRKPGL

SEQ ID NO: 52596 - protein, 462 aa, Bifidobacterium ruminantium
  REGION 1..462: note = tr|A0A087CQ54|A0A087CQ54_9BIFI Queuine tRNA-ribosyltransferase OS=Bifidobacterium ruminantium; OX = 78346 GN=tgt PE=3 SV=1
MTSLNEPQTSAAAHETAAAGKAAANMAAPAENLIEHPRGAEPGKPGRRDAFYFEQKTRLPDAADGKGRGGARYGRTGIIHTPHGDIHTPAFVPVATQAAMKAVLPETMRDLGAQCLLSNAFHLYERPGEQVLDEAGGLAKFMNWNGPTFTDSGGFQVLSLGAGFKKTLAMDVTGMKSDDVIAEGKERLAFVDEDGVTFKSPLNGSLHRFSAEISMGIQHKIGADIMFAFDELTTLMNTRGYQERSVERTYRWAQRCVAEHKRLTEERVGKPYQALYGVVQGANYEDLRRHAAEQIASLDFDGVGIGGAIEKRIIGDTCAWICDAMPESRPRHVLGIAAVDDIFACVENGGDTFDCVAPARCGRNGAIFTRSGRYNIKRAQFKHDFGPLEEGCDCYTCTHYSRAYVDHALRAREFNGFTLATIHNEHFFVKLLDDIRESIDGGYFNEFRDETLAKFYENGSRG

SEQ ID NO: 52597 - protein, 433 aa, Bifidobacterium saeculare
  REGION 1..433: note = tr|A0A087CQP3|A0A087CQP3_9BIFI Queuine tRNA-ribosyltransferase OS=Bifidobacterium saeculare DSM 6531 = LMG 14934 OX=1437611 GN=tgt PE=3 SV=1
MISLLEHPRGAEPGKPGDRGAFSFETITRLPGSPDGKGRGGARYGRTGIIHTPHGDIRTPAFVPVATQAAMKAVLPETMKDLGAQCLLSNAFHLYERPGEDVLDAAGGLGRFMNWDGPTFTDSGGFQVLSLGAGFKKTLAMDVTGMKSDDVIAEGKERLAFVDEDGVTFKSPLNGSLHRFSAEISMGIQHKIGADIMFAFDELTTLMNTRGYQERSVERTFRWAQRCVAEHRRLTESRLGKPYQALYGVVQGANYEDLRRRAASQIASLDFDGVGIGGAMEKRIIGDICAWICDEMPENRPRHVLGIAAVDDIFACVENGGDTFDCVAPARCGRNGAIFTRDGRYNVKRAEFKTDFGPLEEGCDCYTCQHYSRAYVDHLLRARELNGFTLATIHNERFFVKLLDDIRASIDGGYFDEFRDATLARFYANGSRG

SEQ ID NO: 52598 - protein, 436 aa, Bifidobacterium saguini
  REGION 1..436: note = tr|A0A087D815|A0A087D815_9BIFI Queuine tRNA-ribosyltransferase OS=Bifidobacterium saguini DSM 23967 OX=1437607 GN=tgt PE=3 SV=1
MTSLLEHPRGAQPGQPGDRSAFSFETITRLSSTANGLGRDGARYGRTGIIHTPHGDIKTPAFVPVGTQAAMKAVLPEQMKDLGAQCLLANAFHLFERPGEDVLDAAGGLARFMNWDGPTFTDSGGFQVMSLGVGFKKTLAMDVTGMKSDDIIAKGKERMAWVDEDGVTFKSPLNGDSHRFSAEISMGIQHKLGADIMFAFDELTTLMNTRSYQEDSVERTFRWAKRCVAEHERLTAERLGKPYQALYGVVQGANYEDLRRHAAEQIASLDFDGVGIGGAIEKRIIGDTCAWICDAMPENRPRHVLGIASVDDIFACVENGGDTFDCVAPARCARNGAIFTRNGRYNIKRAQHKFDFGPLEEGCTCYTCQHYSRAYVDHLLRAREFNGFTLATIHNEHFFVKLLDDIRASIDGGYFEEFRDEALAHFYGNGERKPGL

SEQ ID NO: 52599 - protein, 441 aa, unidentified
  source 1..441: note = Bifidobacterium scaligerum
  REGION 1..441: note = tr|A0A2M9HN45|A0A2M9HN45_9BIFI Queuine tRNA-ribosyltransferase OS=Bifidobacterium scaligerum; OX = 2052656 GN=tgt PE=3 SV=1
MSERTATGLLDHPRGAEPGKPGDRSAFSFETVTRLSSTADGLGRDGARYGRTGIIHTPHGDIKTPAFVPVGTQAAMKAVLPEQMKDLGAQCLLANAFHLFERPGEDVLDAAGGLARFMNWGGPTFTDSGGFQVMSLGVGFKKTLAMDVTGMKSDDIIAKGKERLAWVDEDGVTFKSPLNGSSHRFSAEISMGIQHKLGADIMFAFDELTTLMNTRSYQENSVERTFRWAKRCVAEHERLTAERLGKPYQALYGVVQGANYEDLRRHAAEQIASLDFDGVGIGGAIEKRIIGNTCAWICDAMPENRPRHVLGIASVDDIFACVENGGDTFDCVAPARCARNGAIYTRSGRYNIKRAENKFNFEPLEEGCDCYTCRNYSRAYVDHLLRAREFNGFTLATIHNEHFFVKLLDDIRASIDGGYFDEFRDETLAHFYGDGERRPGL

SEQ ID NO: 52600 - protein, 433 aa, Bifidobacterium scardovii
  REGION 1..433: note = tr|A0A087DDR6|A0A087DDR6_9BIFI Queuine tRNA-ribosyltransferase OS=Bifidobacterium scardovii; OX = 158787 GN=tgt PE=3 SV=1
MTSLLDHPRGARPGQPGDRSAFSFETVTRLPNTADGLGRGGARYGRTGIIHTPHGDIRTPAFVPVATQAAMKAVLPETMRDLGAQCLLSNAFHLYERPGEDVLDAAGGLGRFMNWDGPTFTDSGGFQVLSLGAGFKKTLAMDVTGMKSDDVIAEGKERLAFVDEDGVTFKSPLNGSLHRFSAEISMGIQHKIGADIMFAFDELTTLMNTRSYQEQSVERTYRWAQRCVAEHRRLTEERVGKPYQALYGVVQGANYEDLRRHAAEQIASLDFDGVGIGGAIEKRIIGNTCAWICDAMPENRPRHVLGIAAVDDIFACVENGGDTFDCVAPARCGRNGAIFTRDGRYNVKRAEFKADFGPLEEGCDCYTCTHYSRSYVDHALRAREFNGFTLATIHNERFFVKLLDDIRDSIDGGYFDEFRDATLARFYANGSRG

SEQ ID NO: 52601 - protein, 457 aa, unidentified
  source 1..457: note = Bifidobacterium simiarum
  REGION 1..457: note = tr|A0A2M9HGE4|A0A2M9HGE4_9BIFI Queuine tRNA-ribosyltransferase OS=Bifidobacterium simiarum; OX = 2045441 GN=tgt PE=3 SV=1
MTDVSNTPTSSTAPAALVSAGSPEAAALVAHPRGAQPDQPGDRSAFGFEVVRRLDPTADGLGRDGVRHGRAGILHTPHGDIQTPAFVPVATQATMKAMLPEQLVDLGAQCTLANAFHLFERPGEDILDEAGGLAKFMNWNGPTFTDSGGFQVMSLGVGFKKTLAMDVTGLKSDDIIAKGKERLAFVDEDGVTFKSPLNGDIHRFSAEISMGIQHKLGADIMFSFDELTTLMNTRSYQEESVERTYRWAKRCVAEHQRLTAERTGKPYQALFGVVQGANYEDLRRHAAQQIASLDFDGVGIGGAIEKRLLGNTCAWICDEMPELRPRHVLGIAAVDDIFAGVENGGDTFDCVAPARTARNGAIYTRDGRWNVLRTALKHDFRPLEEGCDCYTCTHYSRAYLHHLLKSREMSGCTLATIHNERFFVKLLDDIRASIVGGYFDEFRDETLTRFYANGSRG

SEQ ID NO: 52602 - protein, 442 aa, Bifidobacterium sp.
  REGION 1..442: note = tr|A0A430F9C3|A0A430F9C3_9BIFI Queuine tRNA-ribosyltransferase OS=Bifidobacterium sp. 2028B; OX = 2306973 GN=tgt PE=3 SV=1
MTDVDATQNPIDLVEHPRGAEPGKPGDRSAFSFEITRRLEPTADGLGRDGFRHGRSGVIHTPHGDIRTPAFVPVATQATMKAMLPEQLKELGAQCTLANAFHLFERPGEDILDEAGGLAKFMNWHGPTFTDSGGFQVLSLGAGFKKTLAMDVKGLKSDDVIAEGKERLAFVDEDGVTFKSPLNGDMHRFSAEISMGIQHKIGADIMFAFDELTTLMNTRRYQEESVERTYRWAQRCVAEHKRLTEARLGKPYQALFGVVQGANYEDLRRRAARQIASLDFDGVGIGGAIEKRLLGNTCAWICDEMPELRPRHVLGIAAVDDIFAGVENGGDTFDCVAPARTARNGAIYTRDGRWNVLRTALKHDFGPLEEGCDCYTCTHYSRAYLHHLLKAREMSGCTLATIHNERFFVRLLDEIRESITGGYFDEYKKETLARFYANGSRG

SEQ ID NO: 52603 - protein, 433 aa, Bifidobacterium sp.
  REGION 1..433: note = tr|A0A430FQW9|A0A430FQW9_9BIFI Queuine tRNA-ribosyltransferase OS=Bifidobacterium sp. 2036B; OX = 2306976 GN=tgt PE=3 SV=1
MTNLLEHPRGAEPGKPGDRSAFYFEQHTRLEDSADGKGRGGARYGRTGVIHTPHGDIQTPAFVPVGTQAAMKAVLPETMKATGAQCMLSNAFHLFERPGPDVVDEAGGLGKFMNWDGPTFTDSGGFQVLSLGAGFKKTLAMDVTGMKSDDVIAKGKERLAFVDEDGVTFKSPLNGAKHRFSAEISMGIQHQLGADIMFSFDELTTLMNTRGYQEQSVERTFRWAKRCVAEHKRLTEERVGKPYQALYGVVQGANYEDLRRHAAEQIASLDFDGVGIGGAIEKRIIGDTCAWICDAMPESRPRHVLGIAAVDDIFACVENGGDTFDCVAPARCGRNGAIYTRHGRYNIKRAQFKHDFTPLEEGCDCYTCTHYTKAYVDHLLRAREFNGFTLATIHNEHFFIRLLDDIRASIDGGYFEEFRDETLAKYYENGSRG

SEQ ID NO: 52604 - protein, 449 aa, Bifidobacterium stellenboschense
  REGION 1..449: note = tr|A0A087DJK9|A0A087DJK9_9BIFI Queuine tRNA-ribosyltransferase OS=Bifidobacterium stellenboschense OX=762211 GN=tgt PE=3 SV=1
MTDNPTNTTADATANTHAPAAADLNEHPRGAAPGKPGDRAAFSFETITRLPDAADGKGKGGARYGRTGIIHTPHGDIHTPAFVPVGTQAAMKAVLPESMRDLGAQCLLANAFHLFERPGEDVLDAAGGLAKFMNWHGPTFTDSGGFQVMSLGVGFKKTLAMDVTGMKSDDIIAEGKERLAWVDEDGVTFKSPLNGDEHRFSAEISMGIQHKIGADIMFAFDELTTLMNTRSYQEESVERTYRWAQRCVAEHQRLTEARLGKPYQALYGVVQGANYEDLRRHAAEQIASLDFDGVGIGGAIEKRIIGETCAWICDAMPENRPRHVLGIASVDDIFACVENGGDTFDCVAPARCARNGAIFTRQGRYNIKRAQHKFDFGPLEEGCDCYTCAHYSRAYVDHLLRAHEFTGFTLATIHNERFFVKLLDDIRASIDGGYFEEFRDESLAHFYGK

SEQ ID NO: 52605 - protein, 471 aa, Bifidobacterium stercoris
  REGION 1..471: note = tr|A0A087DL30|A0A087DL30_BIFAD Queuine tRNA-ribosyltransferase OS=Bifidobacterium stercoris JCM 15918 OX=1437612 GN=tgt PE=3 SV=1
MTSLNEPQTGAVAHETSAANAAADATHDAAGNTTSAASAENLIEHPRGAEPGKPGRRDAFYFEQKTRLPDAADGKGRGGARYGRTGIIHTPHGDIHTPAFVPVATQAAMKAVLPETMKDLGAQCLLSNAFHLYERPGEQVLDEAGGLAKFMNWNGPTFTDSGGFQVLSLGAGFKKTLAMDVTGMKSDDVIAEGKERLAFVDEDGVTFKSPLNGSLHRFSAEISMGIQHKIGADIMFAFDELTTLMNTRGYQERSVERTYRWAQRCVAEHKRLTEERLGKPYQALYGVVQGANYEDLRRHAAEQIASLDFDGVGIGGAIEKRIIGDTCAWICDAMPESRPRHVLGIAAVDDIFACVENGGDTFDCVAPARCGRNGAIFTRHGRYNIKRAQFKHDFSPLEEGCDCYTCTHYTRAYVDHALRAREFNGFTLATIHNEHFFVKLLDDIRASIDGGYFNEFRDETLAKFYENGSKG

SEQ ID NO: 52606 - protein, 455 aa, Bifidobacterium subtile
  REGION 1..455: note = tr|A0A087E7D2|A0A087E7D2_9BIFI Queuine tRNA-ribosyltransferase OS=Bifidobacterium subtile; OX = 77635 GN=tgt PE=3 SV=1
MPDSYRQGRCGMASPTVNDMTSLLEHPRTTRPEHPDQPGDRNTFSFETTTRLPDSADGKGRGGARYGRTGVIHTPHGDIKTPAFVPVATQAAMKAVLPEQMRELGAQCLLSNAFHLFERPGEDVLDEAGGLGRFMNWDGPTFTDSGGFQVLSLGAGFKKTLAMDVKGMKSDDVIAKGKERLAFVDEDGVTFKSPLNGSEHRFSAEISMGIQHKIGADIMFAFDELTTLMNTRGYQERSVERTFRWARRCVAEHQRLTQERIGKPYQALYGVVQGANYEDLRRHAAQQIASLDFDGVGIGGAIEKRVIGDTCAWICDEMPESRPRHVLGIAAVDDIFACVENGGDTFDCVAPARTGRNGAIYTRDGRYNIKRAAFKHDFGPLEEGCDCYACTHYSRAYIDHLLRAHELNGFTLATIHNERFFVKLLDDIRAAIDGGYFDEFRDESLARFYANGSRG

SEQ ID NO: 52607 - protein, 433 aa, Bifidobacterium thermacidophilum
  REGION 1..433: note = tr|A0A087E2B4|A0A087E2B4_9BIFI Queuine tRNA-ribosyltransferase OS=Bifidobacterium thermacidophilum subsp. thermacidophilum OX=79262 GN=tgt; PE = 3 SV=1
MTSLLEHPRGAEPGKPGDRSAFWFETITRLPDAANGKGRGGARYGRTGIIHTPHGDIHTPAFVPVATQGAMKAVLPESMKQLGAQCLLSNAFHLFERPGEDVLDAAGGLAKFMNWDGPTFTDSGGFQVLSLGAGFKKTLAMDVTGMKSDDVIAEGKERLAFVDEDGVTFKSPLNGAKHRFSAEISMGIQHKIGADIMFAFDELTTLMNTRGYQERSVERTFRWAKRCVAEHERLTRERLGKPYQALYGVVQGANYEDLRRHAAEEIASLDFDGVGIGGAIEKRIIGDTCAWICDAMPESRPRHVLGIAAVDDIFACVENGGDTFDCVAPARCGRNGAIFTRDGRYNIKRAANKFDFEPLEQGCDCYTCTHYSRAYVDHLLRAREFNGFTLATIHNEHFFVKLLDDIRASIDGGYFDEFRDETLARFYANGSRG

SEQ ID NO: 52608 - protein, 433 aa, Bifidobacterium thermacidophilum
  REGION 1..433: note = tr|A0A087DYR7|A0A087DYR7_9BIFI Queuine tRNA-ribosyltransferase OS=Bifidobacterium thermacidophilum subsp. porcinum OX=212365 GN=tgt PE=3 SV=1
MTSLLEHPRGAEPGKPGDRSAFWFETITRLPDAANGKGRGGARYGRTGIIHTPHGDIRTPAFVPVATQGAMKAVLPESMKQLGAQCLLSNAFHLFERPGEDVLDAAGGLAKFMNWDGPTFTDSGGFQVLSLGAGFKKTLAMDVTGMKSDDVIAEGKQRLAFVDEDGVTFKSPLNGAKHRFSAEISMGIQHKIGADIMFAFDELTTLMNTRGYQERSVERTFRWAKRCVAEHERLTRERLGKPYQALYGVVQGANYEDLRRHAAEEIASLDFDGVGIGGAIEKRIIGDTCAWICDAMPESRPRHVLGIAAVDDIFACVENGGDTFDCVAPARCGRNGAIFTRDGRYNIKRAANKFDFEPLEQGCDCYTCTHYSRAYVDHLLRAREFNGFTLATIHNEHFFVKLLDDIRASIDGGYFDEFRDETLARFYANGSRG

SEQ ID NO: 52609 - protein, 433 aa, Bifidobacterium thermophilum
  REGION 1..433: note = tr|A0A2N3QPS6|A0A2N3QPS6_9BIFI Queuine tRNA-ribosyltransferase OS=Bifidobacterium thermophilum; OX = 33905 GN=tgt PE=3 SV=1
MTSLLEHPRGAEPGKPGDRSAFWFETITRLPDAANGKGRGGARYGRTGIIHTPHGDIHTPAFVPVATQGAMKAVLPESMKQLGAQCLLSNAFHLFERPGEDVLDAAGGLAKFMNWDGPTFTDSGGFQVLSLGAGFKKTLAMDVTGMKSDDVIAEGKQRLAFVDEDGVTFKSPLNGAKHRFSAEISMGIQHKIGADIMFAFDELTTLMNTRGYQERSVERTFRWAKRCVAEHERLTRERLGKPYQALYGVVQGANYEDLRRHAAEEIASLDFDGVGIGGAIEKRIIGDTCAWICDAMPENRPRHVLGIAAVDDIFACVENGGDTFDCVAPARCGRNGAIFTRDGRYNIKRAANKFDFEPLEQGCDCYTCTHYSRAYVDHLLRARELNGFTLATIHNEHFFVKLLDDIRASIDGGYFDEFRDETLARFYANGSRG

SEQ ID NO: 52610 - protein, 433 aa, Bifidobacterium thermophilum; identical to SEQ ID NO: 52609
  REGION 1..433: note = tr|M4RDR8|M4RDR8_9BIFI Queuine tRNA-ribosyltransferase OS=Bifidobacterium thermophilum RBL67 OX=1254439 GN=tgt PE=3 SV=1

SEQ ID NO: 52611 - protein, 442 aa, unidentified
  source 1..442: note = Bifidobacterium tissieri
  REGION 1..442: note = tr|A0A261FE09|A0A261FE09_9BIFI Queuine tRNA-ribosyltransferase OS=Bifidobacterium tissieri; OX = 1630162 GN=tgt PE=3 SV=1
MTDVDVNQNPIDLVEHPRGAAPGKPGDRSEFSFEITRRLDPTPDGLGRNGFRHGRSGIIHTPHGDIQTPAFVPVATQATMKAMLPEQLKALGAQCTLANAFHLFERPGEDILDEAGGLAKFMNWHGPTFTDSGGFQVLSLGAGFKKTLAMDVKGLKSDDVIAEGKERLAFVDEDGVTFKSPLNGDRHRFSAEISMGIQHKIGADIMFSFDELTTLMNTRRYQVESVERTYRWAQRCVAEHQRLTETRLGKPYQALFGVVQGANYEDLRRHAAQQIASLDFDGVGIGGAIEKRLLGNTCAWICDEMPELRPRHVLGIAAVDDIFAGVENGGDTFDCVAPARTARNGAIYTRDGRWNVLRTALKHDFGPLEEGCDCYTCAHYSRAYLHHLLKAREMSGCTLATIHNERFFVRLLDEIRESITGGYFDEYKKETLARFYANGSRG

SEQ ID NO: 52612 - protein, 452 aa, Bifidobacterium tsurumiense
  REGION 1..452: note = tr|A0A087E9I4|A0A087E9I4_9BIFI Queuine tRNA-ribosyltransferase OS=Bifidobacterium tsurumiense; OX = 356829 GN=tgt PE=3 SV=1
MTSDSAETTGVQHAHIGTAPAGLIDHPRGAEPGKPGDRGAFSFETITRLPDSADGKGRGGARYGRTGILHTPHGDIRTPAFVPVATQGAMKAVLPETMREAGAQCLLSNAFHLYERPGEEVLNEAGGLAHFMNWDGPTFTDSGGFQVLSLGAGFKKTLAMDVSGMKSDDVIAEGKERMAFVDEDGVTFKSPLNGSLHRFSAEISMRIQHNIGADIMFAFDELTTLMNTRGYQEESVERTFRWAQRCVAEHKRLTEERIGKPYQALYGVVQGANYEDLRRHAAEQIASLDFDGVGIGGAMEKRIIGDICAWICDAMPESRPRHVLGIAAVDDIFACVENGGDTFDCVAPARCGRNGAIFTRDGRYNVKRAEFKHDFRPLEEGCECYTCKDYSRAYVDHLLRAREFNGFTLATIHNEHFFIKLLDDIRASIDGGYFDEFRDATLARFYANGSRG

SEQ ID NO: 52613 - protein, 442 aa, unidentified
  source 1..442: note = Bifidobacterium vansinderenii
  REGION 1..442: note = tr|A0A229W223|A0A229W223_9BIFI Queuine tRNA-ribosyltransferase OS=Bifidobacterium vansinderenii; OX = 1984871 GN=tgt PE=3 SV=1
MTDVDATQTPIDLVEHPRGAEPGKPGDRSAFSFEITRRLEPTADGLGRDGFRHGRSGVIHTPHGDIQTPAFVPVATQATMKAMLPEQLKELGAQCTLANAFHLFERPGEDILDEAGGLAKFMNWHGPTFTDSGGFQVLSLGAGFKKTLAMDVKGLKSDDVIAEGKERLAFVDEDGVTFKSPLNGDLHRFSAEISMGIQHKIGADIMFAFDELTTLMNTRRYQEESVERTYRWAQRCVAEHKRLTEARLGKPYQALFGVVQGANYEDLRRHAAQQIASLDFDGVGIGGAIEKRLLGNTCAWICDEMPELRPRHVLGIAAVDDIFAGVENGGDTFDCVAPARTARNGAIYTRDGRWNVLRTALKHDFGPLEEGCDCYTCTHYSRAYLHHLLKAREMSGCTLATIHNERFFVRLLDEIRESITGGYFDEYKKETLARFYANGSRG

SEQ ID NO: 52614 - protein, 433 aa, unidentified
  source 1..433: note = Bifidobacterium vespertilionis
  REGION 1..433: note = tr|A0A5J5DVF6|A0A5J5DVF6_9BIFI tRNA guanosine(34) transglycosylase Tgt OS=Bifidobacterium vespertilionis; OX = 2562524 GN=tgt PE=4 SV=1
MTSLLEHPRGAEPGKPGDRSAFSFETITRLPNTADGLGRDGARYGRTGIIHTPHGDIRTPAFVPVGTQAAMKGVLPEQMKELGAQCLLANAFHLFERPGEDTLDLAGGLARYMNWDGPTYTDSGGFQVLSLGAGFKKTLAMDVTGLKSDDVIAEGKQRLAFVDEDGVTFKSPLNGDEHRFSAEISMGIQHKLGADIMFAFDELTTLMNTRSYQEESVERTFRWARRCVAEHQRLTEARLGKPYQALFGVVQGANYEDLRRRAASQIASLDFDGVGIGGAIEKRILGQTCAWICDEMPEDRPRHVLGIAAVDDIFAAVENGGDTFDCVAPARCARNGAVFTRDGRWNIKRAQFKNDFSPIEADCDCYTCRHYSRSYVDHLLRAREYNGFTLATIHNERFFVRLLDEIRASIDGGYFDDYKRETLARFYANGSRG

SEQ ID NO: 52615 - protein, 421 aa, unidentified
  source 1..421: note = Bifidobacterium xylocopae
  REGION 1..421: note = tr|A0A366KEH3|A0A366KEH3_9BIFI Queuine tRNA-ribosyltransferase OS=Bifidobacterium xylocopae; OX = 2493119 GN=tgt PE=3 SV=1
MSDSINPGTFGFETRTRLPSTDDGLGRDGARYGRTGTIHTPHGDIHTPAFIPVATQAAMKAVLPEQVEDLGAQALLSNAFHLFERPGEDVLDEAGGLGRFMAWSGPTFTDSGGFQVLSLGAGFKKTLAMDVTGMKSDQVIAEGKERRAFVDEDGVTFKSPLNGNKHRFSAEISMGIQHKIGADIMFSFDELTTLMNTRSYQEESVERTYRWARRCIAKHEHLTQARSDKPYQALFGVVQGANYEDLRRRAAGQIASLPFDGVGIGGAIEKRLLGQTCAWICDEMPEERPRHVLGIAAVNDIFAGVENGGDTFDCVAPARCGRNGAVFTRDGRWNVMRTAMRRDFRPIEEDCDCYTCTHYTRAYICHLLHAHELNGFTLATIHNERFFVRLLDEIRASIDGGYFDEYKEQTLTRFYAHGSKG

SEQ ID NO: 52616 - protein, 371 aa, Bilophila sp.
  REGION 1..371: note = tr|G1V1T3|G1V1T3_9DELT Queuine tRNA-ribosyltransferase OS=Bilophila sp. 4_1_30 OX=693988; GN = tgt PE=3 SV=1
MNTPGTFQIHATDGAARTGVLQTAHGPVNTPIFMPVGTVGSVKAIAPDDLNAIGAEIILGNTYHLYLRPGDELVARRGGLHGFNAWDKPILTDSGGFQVFSLSTLRTIKEEGVTFRSHLDGSKHLFTPEKVVSIQRNLNSDIMMVLDECVPAGADHTYTARSLTMTTRWAKRCRDAYPKGTAGNLLFGIVQGGMFKDLRSESARQLIDLDFEGYAIGGLSVGESKDVMMEMLYHTAPILPSEKPRYLMGVGTPLDIIKGIDAGVDMFDCVLPTRNARNGTLYTSLGKLNIKRREFAEDDGPLDPACNCYTCRTFSRAYLRHLYVSQELLSFRLNSIHNLTYFLDTVRGARAAIREGRWAEYKRRYEELYEV

SEQ ID NO: 52617 - protein, 371 aa, Bilophila wadsworthia
  REGION 1..371: note = tr|E5Y7C6|E5Y7C6_BILWA Queuine tRNA-ribosyltransferase OS=Bilophila wadsworthia 3_1_6; OX = 563192 GN=tgt PE=3 SV=1
MNTPGTFQIHATDGAARTGVLQTAHGPVNTPIFMPVGTVGSVKAIAPDDLNAIGAEIILGNTYHLYLRPGDELVARRGGLHGFNAWDKPILTDSGGFQVFSLSTLRTIKEEGVTFRSHLDGSKHLFTPEKVVSIQRNLNSDIMMVLDECVPAGADHTYTARSLTMTTRWAKRCRDAYPKGTAGNLLFGIVQGGMFKDLRSESARQLIDLDFEGYAIGGLSVGESKDVMMEMLYHTAPILPSEKPRYLMGVGTPLDIIKGIDAGVDMFDCVLPTRNARNGTLYTSLGKLNIKRREFAEDDGPLDPACSCYTCRTFSRAYLRHLYVSQELLSFRLNSIHNLTYFLDTVRGARAAIREGRWAEYKRRYEELYDV

SEQ ID NO: 52618 - protein, 382 aa, Biostraticola sp.
  REGION 1..382: note = tr|A0A4U2UKM3|A0A4U2UKM3_9ENTR Queuine tRNA-ribosyltransferase OS=Biostraticola sp. BGMRC 2031; OX = 2575567 GN=tgt PE=3 SV=1
MKYQLIKTDGPARRGRLLFERGVVETPAFMPVGTYGTVKGMTPEEVAATGAQIILGNTFHLWLRPGQEVMRQHGDLHDFMQWHGPILTDSGGFQVFSLGDIRKITEDGVHFRNPINGDAIFLSPEKSMEIQYDLGSDIVMIFDECTPYPAEYDFARRSMEMSLRWAERSRRRFDELHNPNALFGIIQGSVYEDLRDVSVKRLVEIGFDGYAVGGLAVGEPKADMHRILEHVLPQIPADKPRYLMGVGKPEDLVEGVRRGIDMFDCVMPTRNARNGHLFVTGGVVKIRNAANRNDLSPLDEHCDCYTCRNYSRAYLHHLDRCNEILGARLNTIHNLRYYQRLMAGLRQAIDEGKLERFVEEFYGRAGKAVPPLVVEFNYNEGI

SEQ ID NO: 52619 - protein, 382 aa, Biostraticola tofi
  REGION 1..382: note = tr|A0A4R3YPX1|A0A4R3YPX1_9ENTR Queuine tRNA-ribosyltransferase OS=Biostraticola tofi OX=466109; GN = tgt PE=3 SV=1
MKYELLNTDGRARRGRLVFDRGVVETPAFMPVGTYGTVKGMTPEEVKDTGAQIILGNTFHLWLRPGQEIMKLHGDLHDFMQWHGPILTDSGGFQVFSLGDIRKIKEEGVHFRNPINGDSIFLSPEKSMEIQYDLGSDIVMIFDECTPYPADWDYAKRSMEMSLRWAARSRQRFDELGNKNALFGIIQGGVYEDLRDVSVKRLVEIGFDGYAVGGLAVGEPKEDMHRILEHVCPQIPADKPRYLMGVGKPEDLVEGVRRGIDMFDCVMPTRNARNGHLFVTDGVVKIRNARYKDDTSTLDDQCDCYTCRNYSRAYLHHLDRCNEILGARLNTIHNLRYYQRLMAGLRQAIDEGKLEHFVEEFYGRIGKPIPPLAVEFTNNEGI

SEQ ID NO: 52620 - protein, 396 aa, unidentified
  source 1..396: note = Bisgaard taxon
  REGION 1..396: note = tr|A0A3A1YAZ6|A0A3A1YAZ6_9PAST Queuine tRNA-ribosyltransferase OS=Bisgaard taxon 44 str. B96_4; OX = 2028576 GN=tgt PE=3 SV=1
MLSFKKFKQQGYARRGEITIHRADGSEFTIQTPAFMPVGTYGTVKSMTPEEVEQIGAEIILGNTFHLWLRPGMEIMRKAGGLHNFMQWNKPILTDSGGFQVFSLGDIRKIKEEGVYFRSPVDGSNVFLSPEISMDVQHALNSDIVMIFDECAPYPSTYDYTLNSMNLSLRWAKRCRDRFDELGNTNALFGIIQGGTYNDLRKASLAGLTDIGFDGYAIGGLAVGEPKEEMHKTLEFITPLIPDNKPRYLMGVGKPEDLVECVRRGVDMFDCVMPTRNARNGHLFTFTGNVRIRNAKYKEDFSPIEEGCDCYTCKNYTRAYLHHLDKCGEILGARLNTFHNLRFYQKLMQRMRDALDAGKFDEFVEKFYADLGQEVPALGEFSDNRYAFVDKADRIE

SEQ ID NO: 52621 - protein, 396 aa, unidentified
  source 1..396: note = Bisgaard taxon
  REGION 1..396: note = tr|A0A3A1YM72|A0A3A1YM72_9PAST Queuine tRNA-ribosyltransferase OS=Bisgaard taxon 44 str. 111; OX = 2028575 GN=tgt PE=3 SV=1
MLSFKKFKQQGYARRGEITITRADGSEHKIQTPAFMPVGTYGTVKSMTPEEVEQIGAEIILGNTFHLWLRPGTEIMNKAGGLHNFMQWHKPILTDSGGFQVFSLGDIRKIKEEGVYFRSPVDGSNVFLSPEISMDVQYSLNSDIVMIFDECAPYPSTYDYTLNSMNLSLRWAKRCRDRFNELGNPNALFGIIQGGVYNDLRKASLAGLTDIGFDGYAIGGLAVGEPKEEMHKTLEFITPLIPDNKPRYLMGVGKPEDLVECVRRGVDMFDCVMPTRNARNGHLFTFTGNVRIRNAKYKDDFSPIEEGCDCYTCKNYTRAYLHHLDKCGEILGARLNTFHNLRFYQRLMQRMRDALDQGTFDEFVAKFYADQGLEVPALGEFSDNRYAFVDKDDRVA

SEQ ID NO: 52622 - protein, 389 aa, Bisgaardia hudsonensis
  REGION 1..389: note = tr|A0A4R2N3J1|A0A4R2N3J1_9PAST Queuine tRNA-ribosyltransferase OS=Bisgaardia hudsonensis; OX = 109472 GN=tgt PE=3 SV=1
MTMKFTLHTTDGNARRGTMTFNRPQGEFKVETPAFMPVGTYGTVKGMTPEEVRATGAEILLGNTFHLWLRPGQEVMRKHGDLHDFMQWHRPILTDSGGFQVFSLGKIRKITEEGVKFQNPINGEHIFLSPEKSMEIQYDLGSDIVMIFDECAPYPSTFDYTKKSMEMSLRWAKRSRDRFDELGNKNALFGIVQGGTFEELRKISVEGLVNIGFDGYAVGGLAVGEPKEDMHRILESVCPQLPTDKPRYLMGVGKPEDLVEGVRRGIDMFDCVMPTRNARNGHLFVTDGIVKIRNAKYRDDITPLDPECDCYTCKNYTKAYLYHLDKCGEILGARLNTIHNLRYYQRLMAEIRTAIDEGKFEEFVETFYARIGKPIPPLQTEINSQDNSK

SEQ ID NO: 52623 - protein, 376 aa, Bizionia algoritergicola
  REGION 1..376: note = tr|A0A5D0QUM2|A0A5D0QUM2_9FLAO Queuine tRNA-ribosyltransferase OS=Bizionia algoritergicola; OX = 291187 GN=tgt PE=3 SV=1
MTFDLKATDPKTKARAGKLTTDHGVIETPIFMPVGTVGTVKGVHQRELKDEINPDIILGNTYHLYLRPQTDVLEKAGGIHKFMNWDRNILTDSGGYQVYSLSANRKIKEEGVKFKSHIDGSYHFFTPENVMEIQRTIGADIIMAFDECTPYPCDYRYAKRSMHMTHRWLDRCINHLEKTPLKYGYDQAFFPIVQGSTYKDLRQQSAEYIANAGAVGNAIGGLSVGEPAEEMYGMTEVVTAILPEDKPRYLMGVGTPINILENIALGVDMFDCVMPTRNARNGMLFTAHGSINIKNLKWREDFSPIDEMGITFVDTEYSKAYLRHLFTVNELLGKQIATIHNLGFYMWLVREARKHILAGDFATWKDKMVKQMDNRL

SEQ ID NO: 52624 - protein, 376 aa, Bizionia argentinensis
  REGION 1..376: note = tr|G2EGI8|G2EGI8_9FLAO Queuine tRNA-ribosyltransferase OS=Bizionia argentinensis JUB59; OX = 1046627 GN=tgt PE=3 SV=1
MTFDLKVTDSQTKARAGKITTDHGVIETPIFMPVGTVASVKGVHQRELKEEINPDVILGNTYHLYLRPQTDVLEKAGGLHKFMNWDRNILTDSGGYQVYSLSANRKIKEEGVKFKSHIDGSYHFFTPENVMEIQRTIGADIIMAFDECTPYPCDYRYAKRSMHMTHRWLDRCINHLEKTPLKYDYDQAFFPIVQGSTYKDLRQQSAEYIANAGAVGNAIGGLSVGEPAEEMYAMTEVVTAILPEDKPRYLMGVGTPINILENIALGVDMFDCVMPTRNARNGMLFTAHGTINIKNLKWREDFSPIDEMGITFVDTEYSKAYLRHLFTVNELLGKQIATIHNLGFYMWLVREARKHILAGDFSTWKDMMVKQMDNRL

SEQ ID NO: 52625 - protein, 376 aa, Bizionia echini
  REGION 1..376: note = tr|A0A1I5CE06|A0A1I5CE06_9FLAO Queuine tRNA-ribosyltransferase OS=Bizionia echini OX=649333; GN = tgt PE=3 SV=1
MTFDLKVTDPNSKARAGKLTTDHGVIETPIFMPVGTVATVKGVHQRDLKAEINPDIILGNTYHLYLRPQTDVLEKAGGIHKFMNWDRNILTDSGGYQVYSLSANRKIKEEGVKFKSHIDGSYHTFTPENVMEIQRSIGADIIMAFDECTPYPCDYRYAKRSMHMTHRWLDRCINHLEKTPLKYGYDQAFFPIVQGSTYKDLRQQSAEYIANAGAVGNAIGGLSVGEPAEEMYGMTEVVTAILPEDKPRYLMGVGTPINILENIALGVDMFDCVMPTRNARNGMLFTAHGSINIKNLKWREDFSPIDEMGITFVDTEYSKAYLRHLFSVNELLGKQIATIHNLGFYMWLVREARKHILAGDFTTWKNKMVKQMDNRL

SEQ ID NO: 52626 - protein, 376 aa, Bizionia myxarmorum
  REGION 1..376: note = tr|A0A5D0RDG3|A0A5D0RDG3_9FLAO Queuine tRNA-ribosyltransferase OS=Bizionia myxarmorum OX=291186; GN = tgt PE=3 SV=1
MTFDLKVTDSKTKARAGKLTTDHGVIETPIFMPVGTVATVKGVHQRELKDEINPDIILANTYHLYLRPQTDVLEKAGGLHKFMNWDRNILTDSGGYQVYSLSANRKIKEEGVRFKSHIDGSYHTFTPEGVMEIQRTIGADIIMAFDECTPYPCDYRYAKRSMHMTHRWLDRCINHLEKTPVKYGFDQAFFPIVQGSTYKDLRQQSAEYIANAGAVGNAIGGLSVGEPAEEMYAMTEVVTAILPEEKPRYLMGVGTPINILENIALGVDMFDCVMPTRNARNGMLFTAHGSINIKNLKWREDFSPIDEMGITFVDTEYSKAYLRHLFTVNELLGKQIATIHNLGFYMWLVREARKHILAGDFALWKDMMVKQMDNRL

SEQ ID NO: 52627 - protein, 376 aa, Bizionia paragorgiae
  REGION 1..376: note = tr|A0A1H4D9Y5|A0A1H4D9Y5_9FLAO Queuine tRNA-ribosyltransferase OS=Bizionia paragorgiae OX=283786; GN = tgt PE=3 SV=1
MTFDLKGKDIQSNARAGVVTTDHGVIETPIFMPVGTVGTVKGVHQRELKEEINPDIILGNTYHLYLRPQIDVLEKAGGLHKFMNWDRNILTDSGGYQVYSLSANRKIKEEGVKFKSHIDGSYHTFTPENVMEIQRSIGADIIMAFDECTPYPCDYNYAKRSMHMTHRWLDRCIKHLDKIPFKYDYSQAFFPIVQGSTYKDLRKQSAEYIANAGAVGNAIGGLSVGEPAEEMYAMTEVVTDILPEDKPRYLMGVGTPINILENIALGVDMFDCVMPTRNARNGMLFTANGTINIKNLKWREDFSPIDEMGITFVDTEYSKAYLRHLFSVNELLAKQIATIHNLGFYMWLVREARKHILAGDFRTWKDKMVKQMDTRL

SEQ ID NO: 52628 - protein, 376 aa, Bizionia saleffrena
  REGION 1..376: note = tr|A0A5D0QJW3|A0A5D0QJW3_9FLAO Queuine tRNA-ribosyltransferase OS=Bizionia saleffrena OX=291189; GN = tgt PE=3 SV=1
MTFDLKGKDTQSNARAGVLTTDHGIIETPIFMPVGTVGTVKGVHQRELKEEVNPDIILGNTYHLYLRPQIDVLEKAGGLHKFMNWDRNILTDSGGYQVYSLSANRKIKEEGVKFKSHIDGSYHFFTPENVMEIQRSIGADIIMAFDECTPYPCDYNYAKRSMHMTHRWLDRCISHLDKTPLKYDYSQAFFPIVQGSTYKDLRKQSAEYIANAGAVGNAIGGLSVGEPAEEMYAMTEVVTAILPEDKPRYLMGVGTPINILENIALGVDMFDCVMPTRNARNGMLFTAHGTINIKNLKWREDFSPIDEMGMTFVDTEYSKAYLRHLFSVNELLAKQIATIHNLGFYMWLVREARKHILAGGFRTWKDKMVKQMDKRL

SEQ ID NO: 52629 - protein, 397 aa, unidentified
  source 1..397: note = Blastocatellia bacterium
  REGION 1..397: note = tr|A0A3D0P5B8|A0A3D0P5B8_9BACT Queuine tRNA-ribosyltransferase OS=Blastocatellia bacterium; OX = 2052146 GN=tgt PE=3 SV=1
MTGNSEKAIDWKVDATDGRARAGTLRTRRSVIETPVFMPVGTQGSVKGVRFEWLEDEIDARIILGNTYHLFLRPGPEAIRQLGGLHKFTTWQRSLLTDSGGFQVFSLTDLRKLTEEGVEFRSHLDGSRQFISPEVSMEIQAALGSEIVMAFDECPPGDAGHEKTRESMELTLRWAERSKTRFFELQEAGMDTGRNVAEGLAGRQALFGIVQGAGHHDLRSESLERTVAIGFDGYAIGGLSVGEEKPVMYGVLDHIAHRMPENAPRYLMGVGTPEDLLEAVGHGVDMFDCVMPTRNGRTGGVFTSRGKINIRNAKFALDEAPLDDRCGCSVCRRYSRAYLRHLYQAGEMAAATLISHHNLSFYLDLMRGAREAIREGRYYEFKQEQLAGFAENASRDV

SEQ ID NO: 52630 - protein, 423 aa, unidentified
  source 1..423: note = Blastocatellia bacterium
  REGION 1..423: note = tr|A0A357F252|A0A357F252_9BACT Queuine tRNA-ribosyltransferase OS=Blastocatellia bacterium; OX = 2052146 GN=tgt PE=3 SV=1
MEKAIDWKITAQDGDARSGLLTTRRGIIETPVFMPVGTQGSVKGVRFEWLENELDARIILGNTYHLFLRPGIETIRKLGGLHGFTTWRRALLTDSGGFQVFSLSDLRKLTEEGVEFQSHIDGSRHFLSPEVSMEIQAGLGSEIVMVFDECPPGEASHEAARKSLELTSRWAKRSKRRFEELQHIGADTGFIKNPARISAGKSRQNTENDDEFSNIQIGETGESFELSGRQALFGIIQGAGHYDLREESLERTVETGFDGYAIGGLSVGEEKDVMYGVLEFLAPKMPLNAPRYLMGVGSPEDLIEAVSRGVDMFDCVMPTRNGRTGSAFTSRGKLNIRNARFALDELPLDPECSCSVCRRYSRAYLRHLYQAGEMAAATLISHHNLAFYLDMMSRVRQSIKSGVFSEFKREFLGKLGQNEYAAV

SEQ ID NO: 52631 - protein, 376 aa, Blastochloris sp.
  REGION 1..376: note = tr|A0A348G0W7|A0A348G0W7_9RHIZ Queuine tRNA-ribosyltransferase OS=Blastochloris sp. GI OX=2233851; GN = tgt PE=3 SV=1
MTAFSFRVRATDGTARLGEIATPRGVIRTPAFMPVGTQATVKAMYPEQVRALGADIILGNTYHLMLRPGAERVARLGGLHTFMDWPHPILTDSGGFQVMSLASLRKLDEDGVTFRSHLDGSEYRLTPERSIEIQGLLGADIQMQLDECLKLPAAREDIARAMELSLRWAERSRRAFEGQPEGRAIFGIVQGGDQPDLRVESAKALAGMDFHGLAVGGLAVGEPQEVMLAMIETVEPHLPAAKPRYLMGVGTPDDILEAASRGIDMFDCVMPTRAGRHATAFTRFGKINLRNARHAEDTRPLDPDSPSEPLRRWSRAYLHHLVRAEEMLAGMILTAVNIAYYQELMAGIRSAIAEGRLAAFREEVKAGWARGDLPAL

SEQ ID NO: 52632 - protein, 376 aa, Blastochloris viridis
  REGION 1..376: note = tr|A0A0H5BDY8|A0A0H5BDY8_BLAVI Queuine tRNA-ribosyltransferase OS=Blastochloris viridis OX=1079; GN = tgt PE=3 SV=1
MTAFSFRVHATCGTARLGEISTPRGRIRTPAFMPVGTQATVKAMYPEQVRALGADIILGNTYHLMLRPGAERVAKLGGLHAFMDWPHPILTDSGGFQVMSLASLRKLDEGGVTFRSHLDGSEHRLTPERSIEIQSLLGADIQMQLDECLKLPAPREDIARAMELSLRWAERSKKAFEGQPEGRALFGIVQGGDQPDLRVESARALAAMDFHGLAVGGLAVGEPQDVMLAMIETVEPHLPAAKPRYLMGVGTPDDILEAASRGIDMFDCVMPTRAGRHATAFTRFGRINLRNARHAEDTRPLDPDSPSEPLRRWSRAYLHHLVRAEEMLAGMILTAVNIAYYQELMAGIRAAIAEGRLAAFRDEVKAGWAAGDLPAL

SEQ ID NO: 52633 - protein, 380 aa, unidentified
  source 1..380: note = Blastomonas fulva
  REGION 1..380: note = tr|A0A222WX40|A0A222WX40_9SPHN Queuine tRNA-ribosyltransferase OS=Blastomonas fulva OX=1550728; GN = tgt PE=3 SV=1
MTQTAPRFAFSISARDGKARTGELAMQRGTIRTPAFMPVGTAATVKGMKPAEVRALGADIILGNTYHLMLRPGAERVARLGGLHRFMDWPHPILTDSGGYQVMSLSALTKTTEEGVAFRSHLDGSRHMLSPERSMEIQRLLGSDIVMAFDELVPTTATREVQAAAMERSMRWARRSREGFDSGTEHAGRAALFGIQQGSLDEGLRRQSADALRDIGFDGYAVGGLAVGEGQEAMFGVLDYAPGQLPDDRPRYLMGVGKPDDLVGAVERGVDMFDCVLPTRSGRNGQAFTWDGPVNIRNARHAEDQAPLDEACGCTACTRFSRAYLHHLVKSGEMLGAMLMTEHNLRFYQDLMAGMRLAISEGRMAAFGEAFRARYYAKGT

SEQ ID NO: 52634 - protein, 380 aa, Blastomonas natatoria
  REGION 1..380: note = tr|A0A2V3UTA9|A0A2V3UTA9_9SPHN Queuine tRNA-ribosyltransferase OS=Blastomonas natatoria OX=34015; GN = tgt PE=3 SV=1
MTETSPRFAFSVTARDGKARLGELAMKRGTIRTPAFMPVGTAATVKGMKPAEVRELGADIILGNTYHLMLRPGAERVARLGGLHKFMDWPRPILTDSGGYQVMSLSALTKVTEEGVAFRSHLDGSKHMLSPERSMEIQRLLGSDIVMAFDELVPATATRDVQAAAMERSMRWARRSREGFDSGGEHAQRAALFGIQQGSLDEQLRQQSADALREIGFDGYAIGGLAVGEGQEAMFGVLDYAPGQLPEDRPRYLMGVGKPDDLVGAVERGVDMFDCVLPTRSGRNGQAFTWDGPVNIRNARHAEDQGPLDEACGCTACTRFSRAYLHHLVKSGEMLGAMLMTEHNLRFYQDLMAAMRAAIGEGRMAQFGNDFRARYYARQG

SEQ ID NO: 52635 - protein, 380 aa, Blastomonas sp.
  REGION 1..380: note = tr|W9BZY5|W9BZY5_9SPHN Queuine tRNA-ribosyltransferase OS=Blastomonas sp. CACIA14H2; OX = 1419876 GN=tgt PE=3 SV=1
MTDSPPRFAFSITARDGKARLGELAMKRGTIRTPAFMPVGTAATVKGMKPAEVRELGADIILGNTYHLMLRPGAERVARLGGLHKFMDWPRPILTDSGGYQVMSLSALTKVTEEGVAFRSHLDGSRHMLSPERSMEIQRLLGSDIVMAFDELVPATATRDVQAAAMERSMRWARRSREGFDRGGEHAERAALFGIQQGSLDEQLRKQSADALRDIGFDGYAIGGLAVGEGQEAMFGVLDYAPGQLPDDRPRYLMGVGKPDDLVGAVERGVDMFDCVLPTRSGRNGQAFSWDGPINIRNARHAEDQGPLDEACGCTACTRFSRAYLHHLVKSGEMLGAMLMTEHNLRFYQDLMAAMRAAIGEGRMAQFGEDFRARYYAKGG

SEQ ID NO: 52636 - protein, 380 aa, Blastomonas sp.
  REGION 1..380: note = tr|A0A0N1BET1|A0A0N1BET1_9SPHN Queuine tRNA-ribosyltransferase OS=Blastomonas sp. AAP25; OX = 1523416 GN=tgt PE=3 SV=1
MTQTAPRFAFSISARDGKARTGELAMQRGTIRTPAFMPVGTAATVKGMKPAEVRALGADIILGNTYHLMLRPGAERVARLGGLHRFMDWPHPILTDSGGYQVMSLSALTKTTEEGVAFRSHLDGSRHMLSPERSMEIQRLLGSDIVMAFDELVPTTATREVQAAAMERSMRWARRSREGFDSCTEHAGRAALFGIQQGSLDEGLRRQSADALRDIGFDGYAIGGLAVGEGQEAMFGVLDYAPGQLPDDRPRYLMGVGKPDDLVGAVERGVDMFDCVLPTRSGRNGQAFTWDGPVNIRNARHAEDQAPLDEACGCTACTRFSRAYLHHLVKSGEMLGAMLMTEHNLRFYQDLMAGMRLAISEGRMAAFGEAFRARYYAKGT

SEQ ID NO: 52637 - protein, 387 aa, unidentified
  source 1..387: note = Blastopirellula cremea
  REGION 1..387: note = tr|A0A368KM83|A0A368KM83_9PLAN Queuine tRNA-ribosyltransferase OS=Blastopirellula cremea; OX = 1031537 GN=tgt PE=3 SV=1
MEHQDTLSDSTAKTAEADWFRYQLKQQDSTTAARRGEFVTPHGTVQTPAFMPVGTQGTVKGLEIGMVRQTGAEMILGNTYHLSLRPGDDVVAELGGLHKFMGWDGPILTDSGGFQIFSLAQMRKITEKEAIFQSHIDGRKIHLSPERSIEIQENLGSDIAMVLDHVVELPNEPQVIREAMDRSIRWAERCQAAATRKDQAQFAIVQGGLDENMRVECAERLGALNFPGYAMGGLSVGEPPPEMYRILDATCPALPADKPRYLMGVGRPEDLLEGIRRGVDLFDCVMPTRNGRNALAFTDEGTVRLRNAKYQRDPSPLDSKSAPQVAGLSRAYLRHLFMAKEMLGPILLSLHNVAYYQRLMREARQAIEEGRFVAFYEEKMKGWASGS

SEQ ID NO: 52638 - protein, 372 aa, Blastopirellula marina
  REGION 1..372: note = tr|A3ZPY0|A3ZPY0_9PLAN Queuine tRNA-ribosyltransferase OS=Blastopirellula marina DSM 3645; OX = 314230 GN=tgt PE=3 SV=1
MSERPFRYDLLQQSGQARRGVFHTPHGLVQTPAFMPVGTQGTVKGLEIGLVRETGAEMILGNTYHLSLRPGEQIVRELGGLHEFSGWRGPILTDSGGFQIFSLAQMAKITEEGAVFRSHIDGSKVSLSPERSIEIQEALGSDVAMVLDHVVALPNEADVIRQACDRSIRWAARCQQAATRDDQAQFAIVQGGLDEKLRIYCAEELGKLEFPGYAIGGLSVGEPPPEMYRILDVTCPVLPTDRPRYLMGVGRPEDLLEGVRRGVDLFDCVMPTRNGRNALAFTDEGTLRLRNAKYQTDKRPISPTSPERVRQHSRGYIRHLFMAKEMLGPILLTLQNLAYYQQLMAGARQAIEEDRFEAFYEQKMNSWRNGDE

SEQ ID NO: 52639 - protein, 375 aa, Blastopirellula marina
  REGION 1..375: note = tr|A0A2S8GG06|A0A2S8GG06_9PLAN Queuine tRNA-ribosyltransferase OS=Blastopirellula marina OX=124; GN = tgt PE=3 SV=1
MTSTTERPFRYEKLQQSGQARRGVFYTPHGPVQTPAFMPVGTQGTVKGLEIGLVRETGAEMILGNTYHLALRPGEQIVRELGGLHAFSGWQGPILTDSGGFQIFSLAQMAKITEEGAVFRSHIDGSKVALSPERSIEIQEALGSDVAMVLDHVVSLPNEEKVIRQACDRSIRWAARCQQAATRPDQAQFAIVQGGLDEKLRVYCAEELGKLEFPGYAIGGLSVGEPPPEMYRILDATCPVLPADRPRYLMGVGRPEDLLEGIRRGVDLFDCVMPTRNGRNALAFTDEGTLRLRNAKYQTDKRPISPTSPDRVRQHSRGYIRHLFMAKEMLGPILLTLQNLAYYQQLMAGARQAIEEDRFEEFYERKMNGWRNGDE

SEQ ID NO: 52640 - protein, 378 aa, Blastopirellula sp.
  REGION 1..378: note = tr|A0A2E0AXY4|A0A2E0AXY4_9PLAN Queuine tRNA-ribosyltransferase OS=Blastopirellula sp. OX=2024826; GN = tgt PE=3 SV=1
MNSPPFRFERLHQDAHCAARRSVFHTPHGSVQLPTFMPVGTLGTVKGLTIDSVRATGAEMILGNTYHLALRPGERVVAELGGLHEFSGWQGPILTDSGGFQLFSLAQLTKIREEGAEFRSHIDGSTLQLSPERAIEIQEALGSDVAMVLDHVIELPSDTDAIRDATERTIRWAARCLASATRPSQTQFGIVQGGLDPALRVACAERLSDMPFGGLAIGGLSVGETPAEMYQIIEVTAPVLPEDKPRYLMGVGRPQDLLEAIRRGIDMFDCVMPTRNGRNALAFTDQGPLRMRNQIHTHDKRPIDENCPCPACRHSRGYIRHLFRAEEMLGPILVSAHNLTYYARLMADARAAIEADHFTDFFHERMRGWGEIHSPSAN

SEQ ID NO: 52641 - protein, 374 aa, Blattabacterium cuenoti
  REGION 1..374: note = tr|M4ZTH1|M4ZTH1_9FLAO Queuine tRNA-ribosyltransferase OS=Blattabacterium cuenoti BPAA; OX = 1229512 GN=tgt PE=3 SV=1
MKFNLIKTDNYSKARIGILETDHGKIETPIFMPVASKGYVKSVPTHELYKMYKIILGNTYHLHFQPGVEVLHKAGGIHSFLNWKGSILTDSGGFQIFSLKKSNKITEDGVLFKSMINGSFHFFSPEKSMKIQRFIGGDIIMAFDDCPPFPCSHTEAKKSLKKTHRWLKKCSSYLEKNPEIYNYKQSFFPIIQGSIYPDLRKSFTEKIALLEAEGYAIGGLSLGEEKEQTHSITDLLTDILPKKKPRYLMGVGSPIDILEGISLGIDMFDCVLPTRNGRHGMLFTWKGIMNIKNKKWEKDYSCLDEFGNSFVDQLYSKSYVRHLFLSRDHLAKEIASIHNLSFYFHLIQEAKIRIMHNEFFYWKKSMIPLLQERL

SEQ ID NO: 52642 - protein, 374 aa, Blattabacterium cuenoti
  REGION 1..374: note = tr|A0A224ABE0|A0A224ABE0_9FLAO Queuine tRNA-ribosyltransferase OS=Blattabacterium cuenoti STAT; OX = 1457030 GN=tgt PE=3 SV=1
MKFNLIKTDNYSKARIGVLETDHSKIETPIFMPVASKGYVKSVPTHELYKMCEITIGNTYHLYFQPGIEVLHKAGGIHSFLNWKGSILTDSGGFQIFSLKKLNKNTEDGVLFKSMIDGSFHFFSPEKSMKIQRFIGGDIIMAFDDCPSFPCSYTVAKKSLKKTHFWLKKCYSYLQENPEIYNYKQSFFPILQGSIYPDLRRFSAEEISLLEAEGYAIGGLSLGEEKEETYNITDLLTDILPKKKPRYLMGVGYPADLLEGISLGIDMFDCVLPTRNGRHGMLFTWKGIMNIKNKKWEKDYSCLDEFGKTDVDQLYSKSYLRHLFLSKDSLAKEIASIHNLSFYFHLLQEAKIHIMHNKFFYWKKSIIPLLQKRL

SEQ ID NO: 52643 - protein, 374 aa, Blattabacterium sp.
  REGION 1..374: note = tr|D0JB65|D0JB65_BLASB Queuine tRNA-ribosyltransferase OS=Blattabacterium sp. subsp. Blattella germanica (strain Bge) OX=331104 GN=tgt PE=3 SV=1
MKFNLIKTDRFSKARAGILKTDHGKIETPIFMPVASKGYVKSVPIHEIHKISKIILGNTYHLYLKPGIEVFHKAGGIHSFMNWNESILTDSGGFQVFSMRKLNKITENGVVFKSIINGSYHFFSPEKSMEIQRFIGGDIIMAFDDCPPFPCSYQEAKKSIKKTHIWLKKCCSYLQNHPEIYNYKQSFFPILQGSIYPDLRKNSAKEISLLETEGYAIGGLSLGEEKEQTQNIIDLVTDILPKEKPRYLMGVGNPVDILEGISLGIDMFDCVIPTRNGRHGMLFTWKGIMNMKNKKWEKDFSCLDEFGNSYVDQSYSKSYVRHLFLSRDNLAKEIASIHNLSFYSDLIQQARVHIMNNQFFSWKESVIPLLKKRL

SEQ ID NO: 52644 - protein, 375 aa, Blattabacterium sp.
  REGION 1..375: note = tr|G7SR24|G7SR24_9FLAO Queuine tRNA-ribosyltransferase OS=Blattabacterium sp. (Mastotermes darwiniensis) str. MADAR OX=1074889 GN=tgt; PE = 3 SV=1
MKFSLIKTDRFSKARAGIIETDHGKIETPIFMPVASKGSVKSIPKHELYDIGSKIILGNTYHLYFRPGIEVLHHAGGIHSFMNWKESILTDSGGFQVYSMRKSNKKTEDGVIFKSFINGSSHFFSPEKSMEIQRFIGGDMIMAFDDFPPYPCSYKEAKDSLKITHFWLKRCCSYLKSHPEKYNYKQSFFPIVQGSIYTDLRRYSAEEISLLETEGNAIGGLSLGEDKEKTQYITDIVTDILPKDKPRYLMGVGNPVDILEGISLGIDMFDCVIPTRNGRHGTLFTWKGVLNIKNKKWEKDFSCLDELGNSYVDKNYSKSYVRHLFSSKEYLAKQIASIHNLSFYFNLIKVARNHLMKNTFYSWKKSTIPLLQERL

SEQ ID NO: 52645 - protein, 378 aa, Blautia coccoides
  REGION 1..378: note = tr|A0A4R2K2J2|A0A4R2K2J2_9FIRM Queuine tRNA-ribosyltransferase OS=Blautia coccoides OX=1532; GN = tgt PE=3 SV=1
MYKILKQEGMAKRAHFETVHGAVETPVFMNVGTVAAIKGAVATTDLHEIGTQIELSNTYHLHVRPGDQVIKKLGGLHKFMNWDRPILTDSGGFQVFSLSKLRKIKEEGVYFNSHIDGHKIFMGPEESMQIQSNLASTIAMAFDECPSSVADRKYVQDSVDRTTRWLARCKEEMARLNAKEDTINPQQMLFGINQGAVYDDIRIAHAKEIAKMDLDGYAVGGLAVGESHEEMYRILDSVVPYLPADKPTYLMGVGTPANILEGVSRGVDFFDCVYPSRNGRHGHVYTNFGKLNLFNAKYELDSRPIEEGCQCPACRSYSRAYIRHLLKAKEMLGMRLCVLHNLYFYNTMMTEIRQALDEGRYEDYKQQKLERMAAGPKA

SEQ ID NO: 52646 - protein, 385 aa, Blautia hansenii
  REGION 1..385: note = tr|C9L819|C9L819_BLAHA Queuine tRNA-ribosyltransferase OS=Blautia hansenii DSM 20583; OX = 537007 GN=tgt PE=3 SV=1
MEKEEKLMYKVLKQEGRAKRARMETVHGTIETPVFMNVGTAAAIKGAVSTMDLQEIKTQVELSNTYHLHVRPGDKVVKQLGGLHKFMNWDKPILTDSGGFQVFSLSKLRKIKEEGVYFNSHVDGRKIFMGPEESMQIQSNLGSTIAMAFDECPSSVASREYVQASVDRTTRWLQRCKDEMARLNSLEDTVNPHQLLFGINQGAIYDDIRIAHAETISKMDLDGYAVGGLAVGETHEEMYRILDSVVPHLPVDKPTYLMGVGTPANILEAVSRGVDFFDCVYPSRNGRHGHVYTNFGKINLFNAKYELDSRPIEEGCQCPACRHYSRAYIRHLLKAKEMLGMRLCVLHNLYFYNTMMEEIRNALDEGCYEEYKQKKLESMAAGPKD

SEQ ID NO: 52647 - protein, 376 aa, Blautia hydrogenotrophica
  REGION 1..376: note = tr|C0CIS1|C0CIS1_BLAHS Queuine tRNA-ribosyltransferase OS=Blautia hydrogenotrophica (strain DSM 10507 / JCM 14656 / S5a33) OX=476272 GN=tgt; PE = 3 SV=1
MYQILKTEGRAKRAKLTTVHGTIQTPVFMNVGTAAAIKGAVSTVDLHEIGTQVELSNTYHLHVRPGDQVIKKLGGLHKFMNWDRPILTDSGGFQVFSLAGLRKIKEEGVYFQSHVDGRKIFMGPEESMQIQSNLASTIAMAFDECPSSVATREYVQNSVERTTRWLRRCKEEMARLNSLEDTINPHQLLFGINQGAIYEDIRISHAQQISEMNLDGYAVGGLAVGESHEQMYRILDEVVPHLPKEKPTYLMGVGTPANILEAVSRGVDFFDCVYPSRNGRHGHVYTNQGRRNLFNAKYELDDRPIEEGCQCPACRNYSRAYIRHLLKAKEMLGMRLCVLHNLYFYNTMMTEIRDALDAGNFEEYKEKKLAGMEENT

SEQ ID NO: 52648 - protein, 376 aa, Blautia hydrogenotrophica
  REGION 1..376: note = tr|A0A173R4I8|A0A173R4I8_9FIRM Queuine tRNA-ribosyltransferase OS=Blautia hydrogenotrophica; OX = 53443 GN=tgt PE=3 SV=1
MYQILKTEGRAKRAKLTTVHGTIQTPVFMNVGTAAAIKGAVSTMDLHEIGTQVELSNTYHLHVRPGDQVIKKLGGLHKFMNWDRPILTDSGGFQVFSLAGLRKIKEEGVYFQSHVDGRKIFMGPEESMQIQSNLASTIAMAFDECPSSVATREYVQNSVERTTRWLRRCKEEMARLNSLEDTINPHQLLFGINQGAIYEDIRISHAQQISEMNLDGYAVGGLAVGESHEQMYRILDEVVPHLPKEKPTYLMGVGTPANILEAVSRGVDFFDCVYPSRNGRHGHVYTNQGRRNLFNAKYELDDRPIEEGCQCPACRNYSRAYIRHLLKAKEMLGMRLCVLHNLYFYNTMMTEIRDALDAGNFEEYKKKKLAGMEENT

SEQ ID NO: 52649 - protein, 383 aa, Blautia luti
  REGION 1..383: note = tr|A0A564VKI6|A0A564VKI6_9FIRM Queuine tRNA-ribosyltransferase OS=Blautia luti OX=89014 GN=tgt; PE = 3 SV=1
MAEYKLITTEGRAKRGEFKTVHGTIQTPVFMNVGTIAAIKGAVSTVDLHEIGTQVELSNTYHLHVRPGDKVVKQLGGLHEFMNWDRPILTDSGGFQVFSLAKLRKIKEEGVYFNSHIDGHKIFMGPEQSMQIQSNLASTIAMAFDECPSSVADRDYVQKSVARTTRWLKRCKDEMARLNSLPDTINKNQLLFGINQGAVYEDIRIEHAQAIAEMDLDGYAVGGLAVGESHEEMYRILDEVVPHLPQNKPTYLMGVGTPANILEGVERGIDFFDCVYPSRNGRHGHVYTNHGKMNLFNAKYELDSKPIDEECQCPTCRHYSRAYIRHLLKAKEMLGMRLCVLHNLYFYNHMMEEIRDALDAGNFAAYKKMRLEGFEEGRINGNR

SEQ ID NO: 52650 - protein, 380 aa, unidentified
  source 1..380: note = Blautia obeum
  REGION 1..380: note = tr|A0A414EH36|A0A414EH36_9FIRM Queuine tRNA-ribosyltransferase OS=Blautia obeum OX=40520 GN=tgt; PE = 3 SV=1
MAQYTLMKTEGRAKRAKFETVHGTIQTPVFMNVGTIGAIKGAVSTQDLYEIGTQVELSNTYHLHVRPGDKIVKQLGGLHKFMNWERPILTDSGGFQVFSLAKLRKIKEEGVHFQSHIDGHKIFMGPEESMQIQSNLGSTIAMAFDECPSSVADRDYVQKSVERTTRWLARCKKEMARLNSLPDTINKEQLLFGINQGAVYEDIRIEHAKEIAKMDLDGYAVGGLAVGETHEEMYRILDAVVPYLPQDKPTYLMGVGTPANILEGVDRGIDFFDCVYPSRNGRHGHVYTNHGKMNMFNAKYELDTRPIEDGCGCPACRHYSRAYIRHLLKAKEMLGMRLCVLHNLYFYNHMMEEIRDALDEGRFAEYKKMRLEGFAAGEQK

SEQ ID NO: 52651 - protein, 383 aa, unidentified
  source 1..383: note = Blautia obeum
  REGION 1..383: note = tr|A0A174DZT8|A0A174DZT8_9FIRM Queuine tRNA-ribosyltransferase OS=Blautia obeum OX=40520 GN=tgt; PE = 3 SV=1
MAEYKLLKTEGRAKRAEFHTVHGTIQTPVFMNVGTIGAIKGAVSTMDLQQIGTQVELSNTYHLHVRPGDKIVKQLGGLHKFMVWDKPILTDSGGFQVFSLAKLRKIKEEGVYFNSHIDGHKIFMGPEESMQIQSNLASTIAMAFDECPSSVADRDYVQKSVDRTTRWLARCKAEMARLNSLPDTINKEQLLFGINQGAVYEDIRIEHAKAISEMDLDGYAVGGLAVGETHEEMYRILDAVVPYLPQNKPTYLMGVGTPANILEGVERGIDFFDCVYPSRNGRHGHVYTNHGKMNLFNAKYELDTRPIEEGCQCPACQHYSRAYIRHLLKAKEMLGMRLCVLHNLYFYNHMMEEIRDALDAGNFAEYKKMRLEGFEEGKINSKR

SEQ ID NO: 52652 - protein, 378 aa, Blautia producta
  REGION 1..378: note = tr|A0A2S4GSB8|A0A2S4GSB8_9FIRM Queuine tRNA-ribosyltransferase OS=Blautia producta OX=33035; GN = tgt PE=3 SV=1
MYKILKQEGMAKRAHFETVHGSVETPVFMNVGTVAAIKGAVATTDLHEIGTQIELSNTYHLHVRPGDQVVKKLGGLHKFMNWDRPILTDSGGFQVFSLSKLRKIKEEGVYFNSHIDGHKIFMGPEESMQIQSNLASTIAMAFDECPSSVADRKYVQDSVDRTTRWLARCKDEMARLNAKEDTINPQQMLFGINQGAVYDDIRIAHAKEIAKMDLDGYAVGGLAVGESHEEMYRILDSVVPYLPADKPTYLMGVGTPANILEGVSRGVDFFDCVYPSRNGRHGHVYTNFGKLNLFNAKYELDSRPIEEGCQCPACRSYSRAYIRHLLKAKEMLGMRLCVLHNLYFYNTMMTEIRQALDEGHYEDYKQQKLERMAAGPKA

SEQ ID NO: 52653 - protein, 378 aa, Blautia producta; identical to SEQ ID NO: 52645
  REGION 1..378: note = tr|A0A4P6M6F8|A0A4P6M6F8_9FIRM Queuine tRNA-ribosyltransferase OS=Blautia producta OX=33035; GN = tgt PE=3 SV=1

SEQ ID NO: 52654 - protein, 379 aa, Blautia sp.
  REGION 1..379: note = tr|A0A417CF46|A0A417CF46_9FIRM Queuine tRNA-ribosyltransferase OS=Blautia sp. AM42-2 OX=2292976; GN = tgt PE=3 SV=1
MYKILKMEGRAKRAHMETVHGNIETPVFMNVGTAAAIKGAVSTEDLQQIGTQVELSNTYHLHVRPGDEVVKKMGGLHKFMVWDKPILTDSGGFQVFSLAGLRKIKEEGVYFHSHVDGRKIFMGPEESMQIQSNLASTIAMAFDECPSSVADRRYVQNSVDRTARWLQRCKDKMQELNQREDTINKHQLLFGINQGAIYEDIRIDHAKRISEMDLDGYAVGGLAVGETHEEMYHILDEVVPYLPKEKPTYLMGVGTPANILEGVERGVDFFDCVYPSRNGRHGHVYTNHGKMNLFNQKYELDPRPIEEGCQCPACRHYSRAYIRHLLKAKEMLGMRLCVLHNLYFYNNMMTEIRTALDEGNFASYKRAKLAGFEEYDKKE

SEQ ID NO: 52655 - protein, 380 aa, Blautia sp.
  REGION 1..380: note = tr|A0A417R7M3|A0A417R7M3_9FIRM Queuine tRNA-ribosyltransferase OS=Blautia sp. OM07-19 OX=2292985; GN = tgt PE=3 SV=1
MAKYTLMKTEGRAKRAQFETVHGTIQTPVFMNVGTIGAIKGAVSTQDLYEIGTQVELSNTYHLHVRPGDKIVKQLGGLHKFMNWERPILTDSGGFQVFSLAKLRKIKEEGVHFQSHIDGHKIFMGPEESMQIQSNLGSTIAMAFDECPSSVADRDYVQKSVERTTRWLARCKAEMARLNSLPDTINKEQLLFGINQGAVYEDIRIEHAKEIAKMDLDGYAVGGLAVGETHEEMYRILDEVVPYLPQDKPTYLMGVGTPANILESVERGIDFFDCVYPSRNGRHGHVYTNHGKMNMFNAKYELDTRPIEEGCGCPACRHYSRAYIRHLLKAKEMLGMRLCVLHNLYFYNHMMEEIRDALDEGRFADYKKMRLEGFAAGEQK

SEQ ID NO: 52656 - protein, 383 aa, Blautia wexlerae; identical to SEQ ID NO: 52651
  REGION 1..383: note = tr|A0A174G526|A0A174G526_9FIRM Queuine tRNA-ribosyltransferase OS=Blautia wexlerae OX=418240; GN = tgt PE=3 SV=1

SEQ ID NO: 52657 - protein, 370 aa, unidentified
  source 1..370: note = Blochmannia endosymbiont
  REGION 1..370: note = tr|A0A0E3Y740|A0A0E3Y740_9ENTR Queuine tRNA-ribosyltransferase OS=Blochmannia endosymbiont of Polyrhachis (Hedomyrma) turneri OX=1505596 GN=tgt PE=3 SV=1
MKFQLLKTDGFARLGRFMFSRGLIETPVFMPVGTYGAVRSLTSEEMVNSGVKMISSNAFHLWLRPGEEILRSYNNLHSFMHWPGPILTDSGGFQVFSLGKFCKIMEEGICFCNFINGNMLIFDVKTSMRVQYNLQSDIVMVFDHCISYPCSWDDVKCSMEISLHWALKSREYFDQFNNLNMLFGIIHGGVYTDLRDVSIKHLIEIGFDGYAIGGLAVGESNDIMYGIVDHVCKKIPDDKPRYLMGVGKPADIIECVARGIDMFDCVLPTRNARNGSLFINRSGGVLKIRNACYKYDMNPIDKECDCYTCQYYSRSYLHHLNRCNEVLGLRLNTIHNIYYYQQLMDKLRHAINIGCLKKFIREFYFKLNCV

SEQ ID NO: 52658 - protein, 378 aa, unidentified
  source 1..378: note = Blochmannia floridanus
  REGION 1..378: note = sp|Q7VQB1|TGT_BLOFL Queuine tRNA-ribosyltransferase; OS = Blochmannia floridanus OX=203907 GN=tgt PE=3 SV=1
MVFRVLQTDGDARVGKLTCHHGIIETPAFIPVGTYGVVKSVTSQEVAESGAQIILSNTFHLWLRPGLEIIKIHQNLHKFMNWMGPIITDSGGFQVFSLNKLRKITESGVYFKDPVNGSTIFLTPEKSMDIQYHLGSDIVLVFDECVSYPSTWEYIKNSVEISLNWAERSRLHFDKLHNSNMLFAIIQGGMYEELRNRSAQELINIKFDGYAIGGLSVGETPQERFRIVSYVCKIIPFDKPRYLMGVGKPQDLIEAVCLGVDMFDCVIPTRNARNGYLFTNNGVVRIRNAKYESDLDPIEEDCDCYTCQRYYSRSYLHYLDRCNESLGIRLNTIHNLRYYQRLMEEIRQSIRMKKLRKFVEAFNYKFNSVSTNNYLSNI

SEQ ID NO: 52659 - protein, 368 aa, unidentified
  source 1..368: note = Blochmannia pennsylvanicus
  REGION 1..368: note = sp|Q493H3|TGT_BLOPB Queuine tRNA-ribosyltransferase; OS = Blochmannia pennsylvanicus (strain BPEN) OX=291272; GN = tgt PE=3 SV=1
MPFQLLQTDGHARLGRLICNQGIVDTPAFMPVGTYGSIKTLTAKEVEASGTQIILSNTFHLWLRPGLDIIKLHGSLHKFMSWNGPIITDSGGFQVFSLSKTRTITRKGVGFKSPIDGHLVFLTPEKSIEIQHDLQSDIVMIFDECISYPNTWDYVKKSVNISLNWAERSRLRFDTLHNSNMLFAIIQGGMYENLRDMSAKELINIGFDGYAIGGLSVGEPKKEMYRILSHICKLIPTNKPRYLMGAGKPEDLLEAVQKGIDMFDCVIPTRNARNGYLFVSDGTIKIRNAQYKKDTSPLDGNCDCYTCQHYSRSYLHHLDCCKEILGVRLNTIHNLRYYQRLMEELRQAIKTKSLQNFIDIFYKRVNRI

SEQ ID NO: 52660 - protein, 368 aa, unidentified
  source 1..368: note = Blochmannia vafer
  REGION 1..368: note = tr|E8Q613|E8Q613_BLOVB Queuine tRNA-ribosyltransferase OS=Blochmannia vafer (strain BVAF); OX = 859654 GN=tgt PE=3 SV=1
MIFQLLQTDGSARFGKLICNHGIINTPTFIPVGTYGVIKTVTPQEIKESGAQIILSNTFHLWLRLGQNIIKIHNNLHNFMNWNGPIITDSGGFQVFSLRKLRKITTAGVHFKNPVNGLSVCLTPEKSIEVQTDLGSDIVLVLDECVSYPNTWNYIKNSINLSLNWAERSRLYFDKLHNSNMLFAIVQGGIYRKLREESAIKLTDMNFDGYAIGGLAVGEPRQKMYDLISHICQILPVNKPRYLMGVGKPKDLVEAVLRGIDMFDCVIPTRNARNGYLFVYGGVVRIRNAKYKTDTGPIEKNCDCYTCKYYSRSYLHYLDKCREVLGMRLNTIHNLRFFQRLMENLRQAIKNKELSKFVNLFYRQIDII

SEQ ID NO: 52661 - protein, 383 aa, unidentified
  source 1..383: note = Unknown
  REGION 1..383: note = tr|A0A1U9VJQ7|A0A1U9VJQ7_9RALS Queuine tRNA-ribosyltransferase OS=blood disease bacterium A2-HR MARDI OX=1944648 GN=tgt PE=3 SV=1
MLKFDLLTTDGLARRGRMTLNHGVVETPIFMPVGTYGAVKAMSPVELKDIGAQIILGNTFHLWLRPALEVIDAHKGLHGFVGWDKPMLTDSGGFQVFSLGDLRKITEEGVHFASPINGDRLFLSPEISMQIQRRLNSDIVMQFDECTPYQIDGRPATEAEAAASMRMSLRWAQRSRNEFERENNPNALFGIVQGGMFEPLRDESLAGLQAIDAGAGGQGFGGYAIGGLSVGEPKEDMMRVLQHVAPRLPANKPHYLMGVGTPEDLVAGVAAGIDMFDCVMPTRNARNGWLFTRFGDIKIKNAVHRNDPRPLDETCGCYTCRNFSRAYLHHLQRVGEILGARLNTIHNLHYYLELMADMRAAIESHSFAAFRARFAADRARGAL

SEQ ID NO: 52662 - protein, 383 aa, unidentified; identical to SEQ ID NO: 52661
  source 1..383: note = Unknown
  REGION 1..383: note = tr|G2ZRD2|G2ZRD2_9RALS Queuine tRNA-ribosyltransferase OS=blood disease bacterium R229; OX = 741978 GN=tgt PE=3 SV=1

SEQ ID NO: 52663 - protein, 382 aa, unidentified
  source 1..382: note = Bombella intestini
  REGION 1..382: note = tr|A0A1S8GQF5|A0A1S8GQF5_9PROT Queuine tRNA-ribosyltransferase OS=Bombella intestini OX=1539051; GN = tgt PE=3 SV=1
MHWQKDAQCGQARAGWLHTRHGSVPTPTFMPVGTVGTVKGITMDNVRATGAGIVLGNTYHLMLRPTAERVQRLGGLHRMMDWPGPILTDSGGFQVMSLGPLRKMDEDGVTFRSHIDGSSHRLTPESSTDIQYKLDATITMAFDECPALPATKDVLEASMERSMRWAARSREAFIARPGYGQFGIVQGGTEQDLRERSALALRKIGFEGYAIGGLAVGEGQELMFSTLDYTTPMLPEDQPRYLMGVGTPDDLLGAVMRGCDMFDCVMPSRAGRTARAYTERGTLNLRNARFAEDTRPISPEDDSPMAGRYSRAYLHHLFRANEMLGPMLLTLHNLAYYQRLMRQIRAAIVAGTLEQTAAELRQNWAKGDWSEDEWPMPRYQQG

SEQ ID NO: 52664 - protein, 447 aa, unidentified
  source 1..447: note = Bombiscardovia coagulans
  REGION 1..447: note = tr|A0A261EQC9|A0A261EQC9_9BIFI Queuine tRNA-ribosyltransferase OS=Bombiscardovia coagulans; OX = 686666 GN=tgt PE=3 SV=1
MGNYYDIAPELLYKAFAKVENMSAISTDKSNDPRTFSFESNTCLPSQASGLGRDGRRYGRTGTIHTPHGDIHTPAFIPVATQAAMKAVLPEQMKDLGAQALLSNAFHLFERPGEEVLDQAGGLGKFMGWRGPTFTDSGGFQVLSLGAGFKKTLAMDISGMKSDDVIAEGKERLAFVDEDGVTFKSPLNGSEHRFSAEISMGIQHKIGADIMFAFDELTTLMNTRGYQERSVERTFRWAKRCVIEHQRLTAERSNKPYQALYGVVQGANYEDLRRKAARQIASLDFDGVGIGGAIEKRLLGQTCAWICDEMPEDRPRHVLGIAAVDDIFAGVENGGDTFDCVSPARCGRNGAVFTRDGRWNIKRTQFRTDYRPIEEDCNCYACQHYSRAYICHLLHAHELNGYTLATIHNERFFVRLLDEIRAAIDADRFDEYKQETLKRFYANGSKG

SEQ ID NO: 52665 - protein, 378 aa, unidentified
  source 1..378: note = Bordetella ansorpii
  REGION 1..378: note = tr|A0A157LJY5|A0A157LJY5_9BORD Queuine tRNA-ribosyltransferase OS=Bordetella ansorpii OX=288768; GN = tgt PE=3 SV=1
MTGLRYELLATDGAARRGRITLNHGTVETPIFMPVGTYGSVKAMLPHELKEIGSQIVLGNTFHLWLRPGTEIMQKHGGLHGFMQWDKPILTDSGGFQVFSLQGMRKITEEGVKFASPIDGSRLFLTPEESMRIQRGLNSDIVMVFDECTPYEIDGRPATAEEAARSMRMSLRWARRSRDEFDKLENPNALFGIVQGGMYESLRDESLAGLRDIGFHGYAIGGLSVGEPKEDMLRILAHVAPRLPADAPRYLMGVGTPEDLVEGVANGVDMFDCVMPTRNARNGWLFTRFGDLKIRNARYRDDTRPLDPTCGCHTCQNFSRAYLHHLQRANEITGARLNTLHNLHFYLDLMRQMREAIAEGRFDAWRAQFAADRARGVE

SEQ ID NO: 52666 - protein, 378 aa, unidentified
  source 1..378: note = Bordetella ansorpii
  REGION 1..378: note = tr|A0A157S5L2|A0A157S5L2_9BORD Queuine tRNA-ribosyltransferase OS=Bordetella ansorpii OX=288768; GN = tgt PE=3 SV=1
MTGLRYELLATDGAARRGRITLNHGTVETPIFMPVGTYGSVKAMLPHELKEIGSQIVLGNTFHLWLRPGTGVMQKHGGLHGFMQWDKPILTDSGGFQVFSLQGMRKITEEGVKFASPIDGARLFLTPEESMRIQRGLNSDIVMVFDECTPYEIDGRPATAEEAARSMRMSLRWARRSRDEFDRLENPNALFGIVQGGMYESLRDESLAGLRDIGFHGYAIGGLSVGEPKEDMLRILAHVAPRLPADAPRYLMGVGTPEDLVEGVASGVDMFDCVMPTRNARNGWLFTRFGDLKIRNARYRDDTRPLDPTCGCHTCQHFSRAYLHHLQRANEITGARLNTLHNLHFYLDLMRQMREAVAEGRFDAWRAQFAADRARGID

SEQ ID NO: 52667 - protein, 378 aa, Bordetella avium
  REGION 1..378: note = tr|Q2KWC0|Q2KWC0_BORA1 Queuine tRNA-ribosyltransferase OS=Bordetella avium (strain 197N); OX = 360910 GN=tgt PE=3 SV=1
MTGLKYELLATDGGARRGRLTLNHGVVETPIFMPVGTYGSVKAMLPHELKEIGAQIVLGNTFHLWLRPGTAIMEKHGGLHGFMHWDKPILTDSGGFQVFSLQGMRKITEEGVKFASPIDGARLFLTPEESMRIQRSLNSDIVMVFDECTPYEIDGRPATQEEAARSMRMSLRWARRSREEFDRLGNPNALFGIVQGGMYENLRDESLAGLTDIGFHGYAIGGLSVGEPKADMMRILGHVAPRLPQHAPRYLMGVGTPEDLVEGVSRGVDMFDCVMPTRNARNGWLFTRFGDVKIRNAKYRDDTRPLDPSCACHTCGHFSRAYLHHLQRANEITGARLNTLHNLHFYLTIMAEMREAIAAGRFQTWRTQFAADRARGVD

SEQ ID NO: 52668 - protein, 378 aa, unidentified
  source 1..378: note = Bordetella bronchialis
  REGION 1..378: note = tr|A0A193FEU8|A0A193FEU8_9BORD Queuine tRNA-ribosyltransferase OS=Bordetella bronchialis; OX = 463025 GN=tgt PE=3 SV=1
MTGLDFQLLATDGAARRGRMTLNHGVVETPIFMPVGTYGSVKAMMPHELAEVGAQIVLGNTFHLWLRPGTDIMEKHGGLHGFMGWDKPILTDSGGFQVFSLQGMRKITEEGVRFASPIDGARLFLTPEESMRIQRALNSDIVMVFDECTPYEIEGRAATEEEAARSMRMSLRWARRSRDAFDQSGNPNALFGIVQGGMYERLRDESLAGLLDIGFHGYAIGGLSVGEPKEDMMRILAHVAPRLPAQAPRYLMGVGTPEDLVAGVAQGVDMFDCVMPTRNARNGWLFTRHGDVKIRNARYRDDTRPLDPTCACHTCRHFTRAYLHHLQRANEITGARLNTLHNLHFYLALMGEMREAIAAGRFEAWREEFAADRARGVD

SEQ ID NO: 52669 - protein, 378 aa, Bordetella bronchiseptica
  REGION 1..378: note = tr|A0A0H3LJJ6|A0A0H3LJJ6_BORBR Queuine tRNA-ribosyltransferase OS=Bordetella bronchiseptica (strain ATCC BAA-588 / NCTC 13252 / RB50) OX=257310 GN=tgt; PE = 3 SV=1
MTGLQFELLATDGGARRGRLTLNHGVVETPIFMPVGTYGSVKAMLPHELKEIGAQIVLGNTFHLWLRPGTAIMEKHGGLHGFMQWDKPILTDSGGFQVFSLQGMRKITEEGVKFASPIDGARLFLTPEESMRIQRSLNSDIVMVFDECTPYEIDGRPASVDEAARSMRMSLRWARRSRDEFDRLGNPNALFGIVQGGMYEALRDESLAGLAEIGFHGYAIGGLSVGEPKEDMMRILAHVTPRLPAQAPRYLMGVGTPEDLVEGVARGVDMFDCVMPTRNARNGWLFTRYGDVKIRNARYRDDTRPLDPSCACHTCGHFSRAYLHHLQRANEITGARLNTLHNLHFYLAIMEEMREAIAAGRFEAWRAQFAADRARGVD

SEQ ID NO: 52670 - protein, 378 aa, Bordetella bronchiseptica; identical to SEQ ID NO: 52669
  REGION 1..378: note = tr|A0A5A4MCL7|A0A5A4MCL7_BORBO Queuine tRNA-ribosyltransferase OS=Bordetella bronchiseptica; OX = 518 GN=tgt PE=3 SV=1

SEQ ID NO: 52671 - protein, 392 aa, unidentified
  source 1..392: note = Bordetella flabilis
  REGION 1..392: note = tr|A0A193GIF4|A0A193GIF4_9BORD Queuine tRNA-ribosyltransferase OS=Bordetella flabilis OX=463014; GN = tgt PE=3 SV=1
MTGLHFELLATDGAARRGRITLNHGVVETPIFMPVGTYGSVKAMLPHELDEVGAQIVLGNTFHLWLRPGTDIMEKHGGLHGFMGWNRPILTDSGGFQVFSLQGMRKITEEGVRFASPIDGARLFLTPEESMRIQRALNSDIVMVFDECTPYEIDGRAATEEEAARSMRMSLRWARRSRDAFDGLGNPNALFGIVQGGMYERLRDESLAGLQDIGFHGYAIGGLSVGEPKEDMMRILGHVAPRLPAQAPRYLMGVGTPEDLVAGVAQGIDMFDCVMPTRNARNGWLFTRYGDIKIRNARYRDDTRPLDGSCACHTCRLFTRAYLHHLQRANEITGARLNTLHNLHFYLALMAEMRDAIAAGRFEAWRARFAADRARGVDQGGAGRHGDNPGTP

SEQ ID NO: 52672 - protein, 378 aa, unidentified
  source 1..378: note = Bordetella genomosp.
  REGION 1..378: note = tr|A0A261S3N6|A0A261S3N6_9BORD Queuine tRNA-ribosyltransferase OS=Bordetella genomosp. 10; OX = 1416804 GN=tgt PE=3 SV=1
MNGLNFELLATDGAARRGRITLNHGVVETPIFMPVGTYGSVKAMLPHELKEVGAQIVLGNTFHLWLRPGNEIMRKHGGLHGFMGWDKPILTDSGGFQVFSLQGMRKITEEGVKFASPIDGARLFLTPEESMAIQRALNSDIAMVFDECTPYEIDGRAATQEEAAKSMRMSLRWARRSRDAFDKLENPNALFGIVQGGMYENLRDESLAGLADIGFHGYAIGGLSVGEPKEDMLRILTHVAPRLPVNAPRYLMGVGTPEDLVDGVARGIDMFDCVMPTRNARNGWLFTRYGDVKIRNARYRDDTRPLDPTCRCHTCGHFSRAYLHHLQRANEITGARLNTLHNLHFYLNLMDEMRGAIAAGTFQAWREQFAADRARGVD

SEQ ID NO: 52673 - protein, 378 aa, unidentified
  source 1..378: note = Bordetella genomosp.
  REGION 1..378: note = tr|A0A261TWP6|A0A261TWP6_9BORD Queuine tRNA-ribosyltransferase OS=Bordetella genomosp. 4; OX = 463044 GN=tgt PE=3 SV=1
MTGLNFELLATDGQARRGRVTLNHGVVETPIFMPVGTYGSVKAMLPHELKEIGAQIVLGNTFHLWLRPGTDILDRHGGLHGFMQWDKPILTDSGGFQVFSLQGMRKITEEGVKFASPIDGAKLFLTPEESMRIQRSLNSDIVMVFDECTPYQIDGRPATSEEAARSMRMSLRWARRSREEFDRLENPNALFGIVQGGMYESLREESLAGLTDIGFHGYAIGGLSVGEPKEDMMRILAHVTPRLPTQAPRYLMGVGTPEDLVEGVSRGVDMFDCVMPTRNARNGWLFTRYGDIKIRNAKYRDDTRPLDPSCACHTCAHFSRAYLHHLQRANEITGARLNTLHNLHFYLTIMGEMREAIAAGTFQAWRAKFAADRARGIE

SEQ ID NO: 52674 - protein, 378 aa, Bordetella hinzii
  REGION 1..378: note = tr|A0A0H4W211|A0A0H4W211_9BORD Queuine tRNA-ribosyltransferase OS=Bordetella hinzii OX=103855; GN = tgt PE=3 SV=1
MTGLSFELLATDGGARRGRVTLNHGVVETPIFMPVGTYGSVKAMLPHELKEIGSQIVLGNTFHLWLRPGTGIMEKHGGLHGFMQWDKPILTDSGGFQVFSLQGMRKITEEGVKFASPIDGARLFLTPEESMRIQRSLNSDIVMVFDECTPYEIDGRPATPEEAARSMRMSLRWARRSREEFDRLGNPNALFGIVQGGMYEHLRDESLAGLTDIGFHGYAIGGLSVGEPKEDMMRILGHVAPRLPQHAPRYLMGVGTPEDLVEGVARGVDMFDCVMPTRNARNGWLFTRFGDVKIRNAKYRDDTRPLDPSCACHTCRHFSRAYLHHLQRANEITGARLNTLHNLHFYLTIMGEMREAIAAGRFQAWRAQFAADRARGVD

SEQ ID NO: 52675 - protein, 378 aa, Bordetella holmesii
  REGION 1..378: note = tr|A0A158M1X3|A0A158M1X3_9BORD Queuine tRNA-ribosyltransferase OS=Bordetella holmesii CDC-H585-BH; OX = 1331206 GN=tgt PE=3 SV=1
MTGLSFELLATDGGARRGRMTLNHGVVETPIFMPVGTYGSVKAMLPHELKEIGSQIVLGNTFHLWLRPGTAIMEKHGGLHGFMQWDKPILTDSGGFQVFSLQGMRKITEEGVKFASPIDGSRLFLTPEESMRIQRSLNSDIVMVFDECTPYEIDGRPATQEEAARSMRMSLRWARRSRDEFDRLENPNALFGIVQGGMYENLRDESLAGLTDVGFHGYAIGGLSVGEPKEDMMRILGHVAPRLPQHAPRYLMGVGTPEDLVEGVSRGVDMFDCVMPTRNARNGWLFTRFGDVKIRNAKYRDDTRPLDPSCACHTCQTFSRAYLHHLQRANEITGARLNTLHNLHFYLTIMGEMREAIAAGRFQTWRAQFAADRARGVD

SEQ ID NO: 52676 - protein, 378 aa, Bordetella parapertussis
  REGION 1..378: note = tr|Q7WB61|Q7WB61_BORPA Queuine tRNA-ribosyltransferase OS=Bordetella parapertussis (strain 12822 / ATCC BAA-587 / NCTC 13253) OX=257311; GN = tgt PE=3 SV=1
MTGLQFELLATDGGARRGRLTLNHGVVETPIFMPVGTYGSVKAMLPHELKEIGAQIVLGNTFHLWLRPGTAIMEKHGGLHGFMQWDKPILTDSGGFQMFSLQGMRKITEEGVKFASPIDGARLFLTPEESMRIQRSLNSDIVMVFDECTPYEIDGRPASVDEAARSMRMSLRWARRSRDEFDRLGNPNALFGIVQGGMYEALRDESLAGLAEIGFHGYAIGGLSVGEPKEDMMRILAHVTPRLPAQAPRYLMGVGTPEDLVEGVARGVDMFDCVMPTRNARNGWLFTRYGDVKIRNARYRDDTRPLDPSCACHTCGHFSRAYLHHLQRANEITGARLNTLHNLHFYLAIMEEMREAIAAGRFEAWRAQFAADRARGVD

SEQ ID NO: 52677 - protein, 378 aa, Bordetella parapertussis; identical to SEQ ID NO: 52669
  REGION 1..378: note = tr|K0M9Z5|K0M9Z5_BORPB Queuine tRNA-ribosyltransferase OS=Bordetella parapertussis (strain Bpp5) OX=1208660 GN=tgt PE=3 SV=1

SEQ ID NO: 52678 - protein, 378 aa, Bordetella pertussis
  REGION 1..378: note = tr|A0A0N2ILD7|A0A0N2ILD7_BORPT Queuine tRNA-ribosyltransferase OS=Bordetella pertussis H921; OX = 1331266 GN=tgt PE=3 SV=1
MTGLQFELLATDGGARRGRLTLNHGVVETPIFMSVGTYGSVKAMLPHELEDIGAQIVLGNTFHLWLRPGTAIMEKHGGLHGFMQWDKPILTDSGGFQVFSLQGMRKITEEGVKFASPIDGARLFLTPEESMRIQRSLNSDIVMVFDECTPYEIDGRPASIDEDARSMRMSLRWARRSRDEFDRLGNPNALFGIVQGGMYEALRDESLAGLAEIGFHGYAIGGLSVGEPKEDMMRILAHVTPRLPAQAPRYLMGVGTPEDLVEGVARGVDMFDCVMPTRNARNGWLFTRYGDVKIRNARYRDDTRPLDPSCACHTCGHFSRAYLHHLQRANEITGARLNTLHNLHFYLAIMGEMREAIAAGRFEAWRAQFAADRARGVD

SEQ ID NO: 52679 - protein, 378 aa, Bordetella pertussis; identical to SEQ ID NO: 52678
  REGION 1..378: note = tr|A0A171JZ12|A0A171JZ12_BORPT Queuine tRNA-ribosyltransferase OS=Bordetella pertussis 2356847; OX = 1331248 GN=tgt PE=3 SV=1

SEQ ID NO: 52680 - protein, 378 aa, Bordetella petrii
  REGION 1..378: note = tr|A9HZX0|A9HZX0_BORPD Queuine tRNA-ribosyltransferase OS=Bordetella petrii (strain ATCC BAA-461 / DSM 12804 / CCUG 43448) OX=340100 GN=tgt PE=3; SV = 1
MTGLNFELLATDGAARRGRITLNHGVVETPIFMPVGTYGSVKAMLPHELKDIGAQIVLGNTFHLWLRPGTDILDRHGGLHGFMQWDKPILTDSGGFQVFSLQGMRKITEEGVKFASPIDGARLFLTPEESMRIQRSLNSDIVMVFDECTPYQIDGRPATAEEAARSMRMSLRWARRSREEFDRLGNPNALFGIVQGGMFEALRDESLAGLADIGFHGYAIGGLSVGEPKEDMMRILAHVAPRLPTHAPRYLMGVGTPEDLVEGVARGVDMFDCVMPTRNARNGWLFTRYGDLKIRNAKYRDDTRPLDPTCSCHTCAHFSRAYLHHLQRANEITGARLNTLHNLHFYLAIMGEMREAIAAGTFDAWRARFAADRQRGID

SEQ ID NO: 52681 - protein, 378 aa, unidentified
  source 1..378: note = Bordetella pseudohinzii
  REGION 1..378: note = tr|A0A0J6BZC6|A0A0J6BZC6_9BORD Queuine tRNA-ribosyltransferase OS=Bordetella pseudohinzii; OX = 1331258 GN=tgt PE=3 SV=1
MTGLSFELLATDGGARRGRMTLNHGVVETPIFMPVGTYGSVKAMLPHELKEIGSQIVLGNTFHLWLRPGTEIMEKHGGLHGFMQWDKPILTDSGGFQVFSLQGMRKITEEGVKFASPIDGARLFLTPEESMRIQRSLNSDIVMVFDECTPYEIDGRPATPEEAARSMRMSLRWARRSREEFDRLGNPNALFGIVQGGMYEHLRDESLAGLTDIGFHGYAIGGLSVGEPKEDMMRILGHVAPRLPQHAPRYLMGVGTPEDLVEGVARGVDMFDCVMPTRNARNGWLFTRFGDVKIRNAKYRDDTRPLDPSCACHTCRHFSRAYLHHLQRANEITGARLNTLHNLHFYLTIMGEMREAIAAGRFQAWRAQFAADRARGVD

SEQ ID NO: 52682 - protein, 377 aa, Bordetella sp.
  REGION 1..377: note = tr|A0A1E3ZA53|A0A1E3ZA53_9BORD Queuine tRNA-ribosyltransferase OS=Bordetella sp. SCN 67-23; OX = 1660091 GN=tgt PE=3 SV=1
MNGLKFELLATDGQARRGRVTLNHGVVETPIFMPVGTYGTVKAMAPYELDEVGAQIVLGNTFHLWLRPGTQIIDAHGGLHGFMQWHKPILTDSGGFQVFSLEGLRKITEEGVRFASPIDGARLMLTPEESMRIQRSLNSDIAMVFDECTPYAIDGRPATTEEAATSMRMSLRWARRSRDEFEALENPNALFGIVQGGMFESLRDESLAGLKDIGFHGYAIGGLSVGEPKEDMLRILAHVAPRLPQDAPRYLMGVGTPEDLVDGVAAGVDMFDCVMPTRNARNGWLFTRYGDVKIRNARYRDDTRPLDETCGCYTCQNFSRSYLHHLFRSNEILGARLNTIHNLHYYLQLMQEMRDAIAGGVFAAWRAEFAANRARGV

SEQ ID NO: 52683 - protein, 378 aa, Bordetella sp.
  REGION 1..378: note = tr|A0A3T0NHP1|A0A3T0NHP1_9BORD Queuine tRNA-ribosyltransferase OS=Bordetella sp. J329 OX=1977852; GN = tgt PE=3 SV=1
MTGLNFELLATDGLARRGRMTLNHGVVETPIFMPVGTYGSVKAMLPHELEEIGAQIVLGNTFHLWLRPGVEIMQKHGGLHGFMQWQRPILTDSGGFQVFSLQGMRKITEEGVRFASPIDGARLFLTPEESMRIQRGLNSDIAMVFDECTPYEIKGRPATVDEAATSMRMSLRWARRSRDAFDQLENPNALFGIVQGGMYESLRDESLAGLTDIGFHGYAIGGLSVGEPKAEMIRILQHVAPCMPQDKPRYLMGVGTPEDLVEGVANGVDMFDCVMPTRNARNGWLFTRHGDVKIRNARYRDDTRPLDMHCACHTCRQFSRAYLHHLQRANEITGARLNTLHNLHFYLQIMQEMRDAIAAGTFQSWREQFAADRARGVD

SEQ ID NO: 52684 - protein, 378 aa, Bordetella trematum
  REGION 1..378: note = tr|A0A157Q3B2|A0A157Q3B2_9BORD Queuine tRNA-ribosyltransferase OS=Bordetella trematum OX=123899; GN = tgt PE=3 SV=1
MTGLNFELLATDGAARRGRLTLNHGEVQTPIFMPVGTYGSVKAMLPQELKDIGAQIVLGNTFHLWLRPGTRIMEQHGGLHGFMQWDKPILTDSGGFQVFSLQGMRKITEEGVKFASPIDGARLFLTPEESMRIQRSLNSDIVMVFDECTPYEIDGRAATQEEAARSMRMSLRWARRSREEFDRLANPNALFGIVQGGMYENLRDESLAGLTDIGFHGYAIGGLSVGEPKEDMMRVLGHVAPRLPANAPRYLMGVGTPEDLVEGVARGVDMFDCVMPTRNARNGWLFTRFGDVKIRNAKYRDDTRPLDPSCRCHTCSTFSRAYLHHLQRANEITGARLNTLHNLHFYLTIMEEMREAIAAGRFDAWRAQFAADRQRGVD

SEQ ID NO: 52685 - protein, 375 aa, Borrelia afzelii
  REGION 1..375: note = tr|Q0SM42|Q0SM42_BORAP Queuine tRNA-ribosyltransferase OS=Borrelia afzelii (strain PKo); OX = 390236 GN=tgt PE=3 SV=1
MFSVIKNDKHSNARVGFLNLPHGRVDTPCFMPVGTLGAMKGLKHTVLEKLECNLMLANTYHLYLRPGIKTIEKYGGLHNFTTWNKNFLTDSGGFQVFSLSGLRKIDLKGVHFKSHLDGSHHYFTPEGVFAMQETFGSDIIMPLDICSSYGIDYNEANLYTNITTNWARSTFKAYKNKKEGYNGLLFLITQGNFFKDLRKRSINDILELDSPGIAIGGISVGEPREKYLEILEYSSLLIPREKPRYVMGIGTPHYILDAIYHGIDIFDCVNPARIARHGSLLTDNGIMRIGRKEYKDDTSRVEKDCGCTLCTRYSRGYLRHLIKSRELFGIILASEHNIYYMFRLISKIRTAILNDDFLNFRTSYLKKYEEGNFDE

SEQ ID NO: 52686 - protein, 405 aa, Borrelia anserina
  REGION 1..405: note = tr|W5SPE6|W5SPE6_BORAN Queuine tRNA-ribosyltransferase OS=Borrelia anserina BA2; OX = 1313293 GN=tgt PE=3 SV=1
MQVRYLLFCLLLLILSFIILYVSSGFFGSFMFNILRTDRSSAARVGILELPHGKVTTPCFMPVGTVGTMKALKHDVLDKLGCNLMLANTYHLYLRPGIDVIKEYGSLHSFTTWDKNFLTDSGGFQVFSLSNLRKIEIEGVNFKSHIDGSNHYFTPESVFKMQEIFESDIIMALDICSSYGIDYSEASLYTNITTSWARRTLRAYENRKEGYNGLLFLITQGNFFKDLRKMSTEAILELNSPGIAIGGISVGEPRDKYLEILEYNSSLIPKDKPRYVMGIGTPHYILDAIYYGIDIFDCVNPTRIARHGSLLTDNGILRIKRAEFNVDTCPVEKDCSCSLCTRYSRGYLRHLIKSGETLGVMLASEHNIHYMFRLIQKARDAIMNDNFTKFRKLYLNKYDEGNLNE

SEQ ID NO: 52687 - protein, 375 aa, Borrelia burgdorferi
  REGION 1..375: note = sp|O51749|TGT_BORBU Queuine tRNA-ribosyltransferase; OS = Borrelia burgdorferi (strain ATCC 35210 / B31 / CIP 102532 / DSM 4680) OX=224326 GN=tgt PE=3 SV=1
MFSVIKNDKHFNARVGFLNLPHGRVDIPCFMPVGTLGAMKGLKHAVLEKLECNLMLANTYHLYLRLGIKTVEKYVGLHNFTIWNKNFLTDSGGFRVFSFSDLRKIDLKGVHFKSHIDGSYHYFTSEGIFAMQEIFGSDIIMPLDICSSYGIDYNEANLYTNITTNWASSTFKSSKNRKEGYNGLLFLITQGNFFKDLRKRSINDILELDSPGIAIGGISVGEPREKYLEILEYSFLLIPKEKPRYVMGIGTPHYILNAIYYGIDIFDCFNPARITRHGSLLTDNGIMCIGRKEYKDDTSKVEKNCICTLCKRYSRGYLRHLIKSKELFGIVLASEHNIHYMFRLISKIRAAILNDDFLNFRTSYLKKYEEENFDE

SEQ ID NO: 52688 - protein, 375 aa, Borrelia burgdorferi
  REGION 1..375: note = sp|B7J0Q4|TGT_BORBZ Queuine tRNA-ribosyltransferase; OS = Borrelia burgdorferi (strain ZS7) OX=445985 GN=tgt PE=3; SV = 1
MFSVIKNDKHFNARVGFLNLPHGRVDIPCFMPVGTLGAMKGLKHAVLEKLECNLMLANTYHLYLRLGIKTVEKYVGLHNFTTWNKNFLTDSGGFRVFSFSDLRKIDLKGVHFKFHIDGSYHYFTSEGIFAMQEIFGSDIIMPLDICSSYGIDYNEANLYTNITTNWASSTFKSSKNRKEGYNGLLFLITQGNFFKDLRKRSINDILELDSPGIAIGGISVGEPREKYLEILEYSFLLIPKEKPRYVMGIGTPHYILNAIYYGIDIFDCFNPARITRHGSLLTDNGIMCIGRKEYKDDTSKVEKNCICTLCKRYSRGYLRHLIKSKELFGIVLASEHNIHYMFRLISKIRAAILNDDFLNFRTSYLKKYEEENFDE

SEQ ID NO: 52689 - protein, 375 aa, Borrelia coriaceae
  REGION 1..375: note = tr|W5SVQ2|W5SVQ2_9SPIR Queuine tRNA-ribosyltransferase OS=Borrelia coriaceae Co53; OX = 1313292 GN=tgt PE=3 SV=1
MFSIIKDDKDSNARLGILELPHGKVETPCFMPVGTLGAMKALNHDVLEKLGCNLMLANTYHLYLRPGIDVIKKYGGLHNFTTWNKNFLTDSGGFQVFSLSNFRKIETEGVDFKSHIDGSRHYFTPESVFKLQEIFESDIIMALDICSSYGIDYSEASLYTNITTSWARRTLRAYENRKEGYDGLLFLITQGNFFKDLRKRSTEAILEFNSPGIAIGGISVGEPKDKYLEILEYNSSLIPKSKPKYVMGIGTPHYILDAIYYGIDIFDCVNPMRIARHGSLLTDNGVLRIKRAEFNVDTCPVERNCSCTLCTRYTRGYLRHLIKSGETLGVMLASEHNIHYMFRLIQKSRDAIMNDDFIKFRKLYLRKYDEGNFYE

SEQ ID NO: 52690 - protein, 375 aa, Borrelia crocidurae
  REGION 1..375: note = tr|I0FDP7|I0FDP7_BORCA Queuine tRNA-ribosyltransferase OS=Borrelia crocidurae (strain Achema) OX=1155096 GN=tgt PE=3 SV=1
MFNIIKNDKNSNARLGILELPHGNVSTPCFMPVGTLGVMKALKHDVLEKLECNLMLANTYHLYLRPGIDVIKKYGNLHNFTTWNKNFLTDSGGFQVFSLSNFRKIEDEGVDFKSHIDGSRHYFTPESVFSMQETFESDIIMALDICSPYGIDYDEASLYTNITTSWARRTLCAYKNRKEGYEGLLFLITQGNFFKDLRKRSTESILELNSPGIAIGGISVGEPRDRYLEILEYNSSLIPKDKPKYVMGIGTPHYILDAIYNGIDIFDCVNPTRIARHGSLLTDNGILRINRAEFRFDTCSVERECSCTLCTRYSRGYLRHLFKSEEALGVMLASEHNIHYMFRLINKAKNAIMNDNFVKFRKLYLDKYDEGNLNE

SEQ ID NO: 52691 - protein, 375 aa, Borrelia crocidurae
  REGION 1..375: note = tr|W5SP74|W5SP74_9SPIR Queuine tRNA-ribosyltransferase OS=Borrelia crocidurae DOU; OX = 1293575 GN=tgt PE=3 SV=1
MFNIIKNDKNSNARLGILELPHGNVATPCFMPVGTLGVMKALKHDVLEKLECNLMLANTYHLYLRPGIDVIKKYGNLHNFTTWNKNFLTDSGGFQVFSLSNFRKIEDEGVDFKSHIDGSRHYFTPESVFSMQETFESDIIMALDICSPYGIDYDEASLYTNITTSWARRTLCAYKNRKEGYEGLLFLITQGNFFKDLRKRSTESILELNSPGIAIGGISVGEPRDRYLEILEYNSSLIPKDKPKYVMGIGTPHYILDAIYNGIDIFDCVNPTRIARHGSLLTDNGILRINRAEFRFDTCSVERECSCTLCTRYSRGYLRHLFKSEESLGVMLASEHNIHYMFRLINKAKNAIMNDNFVKFRKLYLDKYDEGNLNE

SEQ ID NO: 52692 - protein, 299 aa, Borrelia duttonii
  REGION 1..299: note = tr|W6TXC1|W6TXC1_9SPIR Queuine tRNA-ribosyltransferase OS=Borrelia duttonii CR2A; OX = 1432657 GN=BDCR2A_00995 PE=3 SV=1
MHNFTTWNKNFLTDSGGFQVFSLSNFRKIEDEGVDFKSHIDGSRHYFTPESVFSMQETFESDIIMALDICSPYGIDYDEASLYTNITTSWARRTLCAYKNRKEGYEGLLFLITQGNFFKDLRKRSTESILELNSPGIAIGGISVGEPRDRYLEILEYNSSLIPKDKPKYVMGIGTPHYILDAIYNGIDIFDCVNPTRIARHGSLLTDNGILRINRAEFRFDTCSVERECSCTLCMRYSRGYLRHLFKSEEALGVMLASEHNIHYMFRLINKAKNAIMNDNFVKFRKLYLDKYDEGNLNE

SEQ ID NO: 52693 - protein, 375 aa, Borrelia duttonii
  REGION 1..375: note = sp|B5RN03|TGT_BORDL Queuine tRNA-ribosyltransferase; OS = Borrelia duttonii (strain Ly) OX=412419 GN=tgt PE=3 SV=1
MFNIIKNDKNSNARLGILELPHGNVATPCFMPVGTLGVMKALKHDVLEKLGCDLMLANTYHLYLRPGIDVIKKYGNLHNFTTWNKNFLTDSGGFQVFSLSNFRKIEDEGVDFKSHIDGSRHYFTPESVFSMQETFESDIIMALDICSPYGIDYDEASLYTNITTSWARRTLCAYKNRKEGYEGLLFLITQGNFFKDLRKRSTESILELNSPGIAIGGISVGEPRDRYLEILEYNSSLIPKDKPKYVMGIGTPHYILDAIYNGIDIFDCVNPTRIARHGSLLTDNGILRINRAEFRFDTCSVERECSCTLCTRYSRGYLRHLFKSEEALGVMLASEHNIHYMFRLINKAKNAIMNDNFVKFRKLYLDKYDEGNLNE

SEQ ID NO: 52694 - protein, 375 aa, Borrelia hermsii
  REGION 1..375: note = tr|A0A0E1C2C9|A0A0E1C2C9_BORHE Queuine tRNA-ribosyltransferase OS=Borrelia hermsii MTW OX=1313291; GN = tgt PE=3 SV=1
MFNIIKNDKNSNARIGVLELPHGKVTTPCFMPVGTLGAMKALKHDVLDQLGCNLMLANTYHLYLRPGIDVIKEYGSLHNFTTWNKNFLTDSGGFQVFSLSNFRKIETEGVDFKSHIDGSRHYFTPESVFKMQEIFESDIIMALDICSSYGIDYSEASLYTNITTSWARRTLRAYENRKEGYDGLLFLITQGNFFKDLRRRSTEAILELNSPGIAIGGISVGEPRDKYLEILEYNSSLIPKDKPKYVMGIGTPHYILDAIYYGIDIFDCVNPTRIARHGSLLTDNGVLRIKRAEFNIDTSPVERDCFCTLCTRYSRAYLRHLIKSGETLGVMLASEHNIHYMFRLIQKARDAIMNDDFTQFRKLYLSKYDEGNFHE

SEQ ID NO: 52695 - protein, 375 aa, Borrelia hermsii
  REGION 1..375: note = sp|B2S1F3|TGT_BORHD Queuine tRNA-ribosyltransferase; OS = Borrelia hermsii (strain HS1 / DAH) OX=314723 GN=tgt; PE = 3 SV=1
MFNIIKNDKNSNARIGVLELPHGKVTTPCFMPVGTLGVMKALKHDVLEKLGCNLMLANTYHLYLRPGIDVIKEYGSLHNFTTWNKNFLTDSGGFQVFSLSNFRKIETEGVDFKSHIDGSRHYFTPESVFKMQEIFESDIIMALDICSSYGIDYSEASLYANITTSWARRTLRAYENRKEGYDGFLFLITQGNFFKDLRKRSTEAILELNSPGIAIGGISVGEPRDKYLEILEYNSSLIPKDKPKYVMGIGTPHYILDAIYYGIDIFDCVNPTRIARHGSLLTDNGILRIKRAGFNVDTSPIEQDCSCTLCTRYSRGYLRHLIKSGETLGVMLASEHNIHYMFRLIQKARNAIMNDDFTQFRKLYLSKYDEGNFNE

SEQ ID NO: 52696 - protein, 375 aa, unidentified
  source 1..375: note = Borrelia mayonii
  REGION 1..375: note = tr|A0A1L6VUD8|A0A1L6VUD8_9SPIR Queuine tRNA-ribosyltransferase OS=Borrelia mayonii OX=1674146; GN = tgt PE=3 SV=1
MFSVIKNDKHSNARVGFLNLPHGRVDTPCFMPVGTLGAMKGLKHTVLEKLECNLMLANTYHLYLRPGIKTIEKYGGLHNFTTWNKNFLTDSGGFQVFSLSGLRKIDLKGVHFKSHLDGSYHYFTPEGVFAMQEIFGSDIIMPLDICSSYGIDYNEANLYTNITTNWARSTFKSYRNRKEGCNGLLFLITQGNFFKDLRKRSINDILELDSPGIAIGGISVGEPREKYLEILEYSSLLIPKEKPRYVMGIGTPRYILDAIYYGIDIFDCVNPARIARHGSLLTDNGVMRIGRKEYKDDTFQVDKNCSCTLCTRYSRGYLRHLIKSKELFGIVLASEHNIHYMFRLISKIRTAILNDNFLNFRTSYLKKYEEGNFDE

SEQ ID NO: 52697 - protein, 375 aa, Borrelia miyamotoi
  REGION 1..375: note = tr|W5SCB8|W5SCB8_9SPIR Queuine tRNA-ribosyltransferase OS=Borrelia miyamotoi FR64b; OX = 1292392 GN=tgt PE=3 SV=1
MFNIIKTDKNSYARLGMLKLPHGKVRTPCFMPVGTLGAMKGLKHDVLDKLGCNLILANTYHLYLRPGVDVIKEYGNLHNFTAWNKNFLTDSGGFQVFSLSNLRKIEIDGIDFRSHIDGSRHYFTPESVFKMQEIFESDIIMALDICSSYGIDYSEANLYTNITTSWARRTLSAYENRKDGYDGLLFLITQGNFFKDLRKRSTEDILDLDSPGVAIGGISVGEPRDKYLEILEYNSSLIPKDKPKYVMGIGTPHYILDAIYYGVDIFDCVNPTRIARHGSLLTDNGILRIKRSEFAVDTSPVEQGCYCTLCTRYSRGYLRHLIKSGETFGVMLASEHNIHYMFRLIEKARNAIMNDDFIKFKKLYLSKYDEGNCNE

SEQ ID NO: 52698 - protein, 375 aa, Borrelia miyamotoi; identical to SEQ ID NO: 52697
  REGION 1..375: note = tr|A0A2D1Z7Z5|A0A2D1Z7Z5_9SPIR Queuine tRNA-ribosyltransferase OS=Borrelia miyamotoi OX=47466; GN = tgt PE=3 SV=1

SEQ ID NO: 52699 - protein, 375 aa, Borrelia parkeri
  REGION 1..375: note = tr|W5SR40|W5SR40_BORPR Queuine tRNA-ribosyltransferase OS=Borrelia parkeri SLO OX=1313294; GN = tgt PE=3 SV=1
MFSIIKNDKNSNARLGVLELPHGKVETPCFMPVGTLGAMKALNHDVLEKLGCNLMLANTYHLYLRPGIDVIKKYGSLHNFTAWNKNFLTDSGGFQVFSLANFRKIETEGVDFKSHIDGSRHYFTPESVFKMQEIFESDIIMALDICSSYGIDYSEASLYTNITTSWARRTLRAYENRKEGYDGLLFLITQGNFFKDLRKRSTEAILELDSPGIAIGGISVGEPRDKYLEILEYNSSLIPKVKPKYVMGIGTPHYILDAIYYGIDIFDCVNPTRIARHGSLLTDNGILRIKRAEFNFDTCPVERDCSCTLCTRYSRGYLRHLIKSEETFGVMLASEHNIHYMFRLIKKARNAIMNGDFTKFRKLYLSKYDEGNFNE

SEQ ID NO: 52700 - protein, 375 aa, Borrelia recurrentis
  REGION 1..375: note = sp|B5RQE7|TGT_BORRA Queuine tRNA-ribosyltransferase; OS = Borrelia recurrentis (strain A1) OX=412418 GN=tgt PE=3; SV = 1
MFNIIKNDKNSNARLGILELPHGNVATPCFMPVGTLGVMKALKHDVLEKLGCDLMLANTYHLYLRPGIDVIKKYGNLHNFTTWNKNFLTDSGGFQVFSLSNFRKIEDEGVDFKSHIDGSRHYFTPESVFSMQETFESDIIMALDICSPYGIDYDEASLYTNITTSWARRTLCAYKNRKEGYEGLLFLITQGNFFKDLRKRSTELILELNSPGIAIGGISVGEPRDRYLEILEYNSSLIPKDKPKYVMGIGTPHYILDAIYNGIDIFDCVNPTRIARHGSLLTDNGILRINRAEFCFDTCSVERECSCTLCTRYSRGYLRHLFKSEEALGVMLASEHNIHYMFRLINKTKNAIMNDNFVKFRKLYLDKYDEGNLNE

SEQ ID NO: 52701 - protein, 375 aa, Borrelia sp.
  REGION 1..375: note = tr|A0A5J6WDM1|A0A5J6WDM1_9SPIR tRNA guanosine(34) transglycosylase Tgt OS=Borrelia sp. CA690 OX=1476873; GN = tgt PE=4 SV=1
MFSIIKGDKHSNARVGFLNLPHGRVDTPCFMPVGTLGAMKGLKHTVLEKLECNLMLANTYHLYLRPGIKTIERYGGLHNFTTWNKNFLTDSGGFQVFSLSGLRKIDLEGVHFKSHLDGSYHHFTPEGVFAMQEIFGSDIIMSLDICSSYGIDYDEANLYTNITTNWARRTFNSYKNKKEGYSGLLFLITQGNFFKDLRKRSINDILELDSPGIAIGGISVGEPREKYLEILEYSSFLIPREKPRYVMGIGTPQYIFDAIYYGIDIFDCVNPARIARHGSLLTDNGIMRIGRKEYKDDTSKVEKNCSCTLCTRYSRGYLRHLIKSRELFGIILASEHNIHYMFRLISKIRTAILNDNFVNFRTEYLKKYEEGNFYE

SEQ ID NO: 52702 - protein, 375 aa, Borrelia turcica
  REGION 1..375: note = tr|A0A386PNH0|A0A386PNH0_9SPIR Queuine tRNA-ribosyltransferase OS=Borrelia turcica IST7; OX = 1104446 GN=tgt PE=3 SV=1
MFNIIKNDNSSNARLGVLELPHGRVNTPCFMPVGTLGAMKALKHDVLEKLGCNLMLANTYHLYLRPGIETIKKYGSLHKFTTWNKNFLTDSGGFQVFSLSKLRKIETEGVHFQSHIDGSRHYFTPESVFRMQETFESDIIMALDICSSYGIDYNEANLYTNITTLWARRICSAYENRKEGYDGLLFLITQGNFFKDLRKRSTEGILELNSPGIAIGGISVGEPRDKYLEILEYNSSLIPKDKPRYVMGIGTPHYILDAIYYGIDIFDCVNPARIARHGSLLTDNGILRIKRSEFSNDATPVEKNCICTLCTRYSRGYLRHLIKSEETLGIMLASEHNIHYMFRLIEKARDAIMNDDFTNFRKLYLKKYDEGNFHE

SEQ ID NO: 52703 - protein, 375 aa, Borrelia turicatae
  REGION 1..375: note = sp|A1R0N4|TGT_BORT9 Queuine tRNA-ribosyltransferase; OS = Borrelia turicatae (strain 91E135) OX=314724 GN=tgt; PE = 3 SV=1
MFSIIKNDKNSNARLGVLELPHGKVETPCFMPVGTLGAMKALKHDVLEKLGCDLMLANTYHLYLRPGIDVIKKYGSLHNFTAWDKNFLTDSGGFQVFSLANFRKIETEGVDFKSHIDGSRHYFTPESVFKMQEIFESDIIMALDICSSYGIDYSEASLYTNITTSWARRTLRAYENRKEGYDGLLFLITQGNFFKDLRKRSTEAILELDSPGIAIGGISVGEPRDKYLEILEYNSSLIPKVKPKYVMGIGTPHYILDAIYYGIDIFDCVNPTRIARHGSLLTDNGILRIKRAEFNFDTCPVERDCSCTLCTRYSRGYLRHLIKSEETLGVMLASEHNIHYMFRLIKKARNAIMNGDFTKFRKLYLSKYDEGNFDE

SEQ ID NO: 52704 - protein, 375 aa, Borrelia turicatae
  REGION 1..375: note = tr|A0A172XCJ6|A0A172XCJ6_BORTU Queuine tRNA-ribosyltransferase OS=Borrelia turicatae OX=142; GN = tgt PE=3 SV=1
MFSIIKNDKNSNARLGVLELPHGKVETPCFMPVGTLGAMKALKHDVLEKLGCDLMLANTYHLYLRPGIDVIKKYGSLHNFTAWDKNFLTDSGGFQVFSLANFRKIETEGVDFKSHIDGSRHYFTPESVFKMQEIFESDIIMALDICSSYGIDYSEASLYTNITTSWARRTLRAYENRKEGYDGLLFLITQGNFFKDLRKRSTEAILELNSPGIAIGGISVGEPRDKYLEILEYNSSLIPKVKPKYVMGIGTPHYILDAIYYGIDIFDCVNPTRIARHGSLLTDNGILRIKRAEFNFDTCPVERDCSCTLCTRYSRGYLRHLIKSEETLGVMLASEHNIHYMFRLIKKARNAIMNGDFTKFRKLYLSKYDEGNFDE

SEQ ID NO: 52705 - protein, 375 aa, unidentified
  source 1..375: note = Borreliella bavariensis
  REGION 1..375: note = sp|Q65ZW4|TGT_BORBP Queuine tRNA-ribosyltransferase; OS = Borreliella bavariensis (strain ATCC BAA-2496 / DSM 23469 / PBi) OX=290434 GN=tgt PE=3 SV=1
MFSVIKNDKHSNARVGFLNLPHGRVDTPCFMPVGTLGAMKGLKHSVLEKLKCNLMLANTYHLYLRPGIKTIEKYGGLHNFTTWNKNFLTDSGGFQVFSLSSLRKIDLKGVRFKSHLDGSYHYFTPEGVFAMQEIFGSDIIMPLDICSSYGIDYNEANLYTNITTNWARSTFKAYKNRKEGYNGLLFLITQGNFFKDLRKRSINDILELDSPGIAIGGISVGEPREKYLEILEYSSLLMPKEKPRYVMGIGTPHYILDAIYHGIDIFDCVNPARIARHGSLLTDNGIMRISRKEYKDDTSQVEKNCGCTLCTRYSRGYLRHLIKSKELFGIILASEHNIYYMFRLISKIRTAILNDNFLNFRTSYLKKYEEENFDE

SEQ ID NO: 52706 - protein, 375 aa, unidentified; identical to SEQ ID NO: 52705
  source 1..375: note = Borreliella bavariensis
  REGION 1..375: note = tr|A5JJQ9|A5JJQ9_BORBP Queuine tRNA-ribosyltransferase (Fragment) OS=Borreliella bavariensis (strain ATCC BAA-2496 / DSM 23469 / PBi); OX = 290434 GN=tgt PE=3 SV=1

SEQ ID NO: 52707 - protein, 375 aa, unidentified
  source 1..375: note = Borreliella bissettii
  REGION 1..375: note = tr|A0A1L8ZAP0|A0A1L8ZAP0_BORBI Queuine tRNA-ribosyltransferase OS=Borreliella bissettii OX=64897; GN = tgt PE=3 SV=1
MFSVIKNDKHSNARVGFLNLPHGRVDTPCFMPVGTLGAMKGLKHAILEKLECNLMLANTYHLYLRPGIKIIEKYGSLHNFTTWNKNFLTDSGGFQVFSLSGLRKIDLKGVHFKSHLDGSYHYFTPEGVFAMQEIFGSDIIMPLDICSSYGIDYNEANLYTNITTNWARSTFKSYKNRKEGYNGLLFLITQGNFFKDLRKRSINDILELDSPGIAIGGISVGEPREKYLEILEYSSLLIPKEKPRYVMGIGTPHYILDAIYYGIDIFDCVNPARIARHGSLLTDNGVMRIGRKEYKDDTSRVEKDCGCTLCTRYSRGYLRHLIKSKELFGIVLASEHNIHYMFRLIAKIRTAILNDNFLNFRTEYLKKYEEGNFDE

SEQ ID NO: 52708 - protein, 375 aa, unidentified
  source 1..375: note = Borreliella bissettii
  REGION 1..375: note = tr|G0AMP6|G0AMP6_BORBD Queuine tRNA-ribosyltransferase OS=Borreliella bissettii (strain DN127) OX=521010 GN=tgt PE=3 SV=1
MFSVIKNDKHSNARVGFLNLPHGRVDTPCFMPVGTLGAMKGLKHAILEKLECNLMLANTYHLYLRPGIKIIEKYGSLHNFTTWNKNFLTDSGGFQVFSLSGLRKIDLKGVHFKSHLDGSYHYFTPEGVFAMQEIFGSDIIMPLDICSSYGIDYNEANLYTNITTNWARSTFKSYKNRKEGYNGLLFLITQGNFFKDLRKRSINDVLELDSPGIAIGGISVGEPREKYLEILEYSSLLIPKEKPRYVMGIGTPHYILDAIYYGIDIFDCVNPARIARHGSLLTDNGVMRIGRKEYKDDTSRVEKDCGCTLCTRYSRGYLRHLIKSKELFGIVLASEHNIHYMFRLIAKIRTAILNDNFLNFRTEYLKKYEEGNFDE

SEQ ID NO: 52709 - protein, 375 aa, unidentified
  source 1..375: note = Borreliella burgdorferi
  REGION 1..375: note = tr|A0A0E1UFK1|A0A0E1UFK1_BORBG Queuine tRNA-ribosyltransferase OS=Borreliella burgdorferi 64b; OX = 498740 GN=tgt PE=3 SV=1
MFSVIKNDKHFNARVGFLNLPHGRVDIPCFMPVGTLGAMKGLKHAVLEKLECNLMLANTYHLYLRLGIKTVEKYVGLHNFTTWNKNFLTDSGGFRVFSFSDLRKIDLKGVHFKSHIDGSYHYFTSEGIFAMQEIFGSDIIMPLDICSSYGIDYNEANLYTNITTNWASSTFKSSKNRKEGYNGLLFLITQGNFFKDLRKRSINDILELDSPGIAIGGISVGEPREKYLEILEYSFLLIPKEKPRYVMGIGTPHYILNAIYYGIDIFDCFNPARITRHGSLLTDNGIMCIGRKEYKDDTSKVEKNCICTLCKRYSRGYLRHLIKSKELFGIVLASEHNIHYMFRLISKIRAAILNDDFLNFRTSYLKKYEEENFDE

SEQ ID NO: 52710 - protein, 360 aa, unidentified
  source 1..360: note = Borreliella burgdorferi
  REGION 1..360: note = tr|M9VNM6|M9VNM6_BORBG Queuine tRNA-ribosyltransferase (Fragment) OS=Borreliella burgdorferi 156a OX=445983 GN=tgt PE=3 SV=1
EKHFNARVGFLNLPYGRVDIPCFMPVGTLGAMKGLKHAVLEKLECNLMLANTYHLYLRLGIKTVEKYVGLHNFTTWNKNFLTDSGGFRVFSFSDLRKIDLKGVHFKSHIDGSYHYFTSEGIFAMQEIFGSDIIMPLDICSSYGIDYNEANLYTNITTNWASSTFKSSKNRKEGYNGLLFLITQGNFFKDLRKRSINDILELDSPGIAIGGISVGEPREKYLEILEYSFLLIPKEKPRYVMGIGTPHYILNAIYYGIDIFDCFNPARITRHGSLLTDNGIMCIGRKEYKDDTSKVEKNCICTLCKRYSRGYLRHLIKSKELFGIVLASEHNIHYMFRLISKIRAAILNDDFLNFRTSYLKK

SEQ ID NO: 52711 - protein, 375 aa, unidentified
  source 1..375: note = Borreliella chilensis
  REGION 1..375: note = tr|A0A0A7UX03|A0A0A7UX03_9SPIR Queuine tRNA-ribosyltransferase OS=Borreliella chilensis; OX = 1245910 GN=tgt PE=3 SV=1
MFSVIKNDKHSKARIGVLNLPHGKVDTPCFMPVGTLGAMKGLKHAVLEKLGCNLMLANTYHLYLRPGIKTIEKYGSLHNFTTWNKNFLTDSGGFQVFSLSSLRKIDLKGVHFKSHLDGSYHYFTPEGVFAMQEIFGSDIIMPLDICSSYGIDYNEANLYTNITTNWARSTVNSYKHKKEGYSGFLFLITQGNFFKDLRKRSINDILELDSPGIAIGGISVGEPREKYLEILEYSSLLIPKEKPRYVMGIGTPHYILDAIYYGIDIFDCVNPARIARHGSLLTDNGIMRIGKEEYKNDTSRVEKNCDCTLCTRYSRGYLRHLIKSKELFGIILASEHNINYMFRLISKIRTAILNDNFLNFRTAYLRKYEEGNLDE

SEQ ID NO: 52712 - protein, 375 aa, unidentified
  source 1..375: note = Borreliella finlandensis
  REGION 1..375: note = tr|C0AM55|C0AM55_9SPIR Queuine tRNA-ribosyltransferase OS=Borreliella finlandensis; OX = 498741 GN=tgt PE=3 SV=1
MFSVIKNDKHSNARVGFLNLPHGRVDTPCFMPVDTLEAMKGLKHAVLEKLECNLMLANTYHLYLRPGIKTIEKYGGLHNFTTWNKNFLTDSGRFQVFSLSDLRKIDLKGVHFKSYLDGSYHYFTPEGIFAMQEIFGSDIIMPPDICSSYGIDYNEANLYTNITTNWACSTFKSYKNRKEGYNGLLFLIAQGNFFKDLRKRSINDILELDSPGIVIGGISVGEPREKYLEILKYSSLLIPKEKPRYVMGIGTLHYILDAIYYGIDIFYCVNPARIARHGSLLTDNGIMRIGRKEYKDDTSQIEKNCICTLCTRYSKGYLRHLIKSKELFVIVLASEHNICYMFRLISKIRTAILNDDFLNFRTSYLKKYEEGNFDE

SEQ ID NO: 52713 - protein, 352 aa, unidentified
  source 1..352: note = Borreliella finlandensis
  REGION 1..352: note = tr|A5JJS5|A5JJS5_9SPIR Queuine tRNA-ribosyltransferase (Fragment) OS=Borreliella finlandensis OX=498741 GN=tgt PE=3 SV=1
FNARVGFLNLPHGRVDTPCFMPVDTLEAMKGLKHAVLEKLECNLMLANTYHLYLRPGIKTIEKYGGLHNFTTWNKNFLTDSGRFQVFSLSDLRKIDLKGVHFKSYLDGSYHYFTPEGIFAMQEIFGSDIIMPPDICSSYGIDYNEANLYTNITTNWACSTFKSYKNRKEGYNGLLFLIAQGNFFKDLRKRSINDILELDSPGIVIGGISVGEPREKYLEILKYSSLLIPKEKPRYVMGIGTLHYILDAIYYGIDIFYCVNPARIARHGSLLTDNGIMRIGRKEYKDDTSQIEKNCICTLCTRYSKGYLRHLIKSKELFVIVLASEHNICYMFRLISKIRTAILNDDFLNFRT

SEQ ID NO: 52714 - protein, 375 aa, unidentified
  source 1..375: note = Borreliella garinii
  REGION 1..375: note = tr|B7XTS2|B7XTS2_BORGR Queuine tRNA-ribosyltransferase OS=Borreliella garinii PBr; OX = 498743 GN=tgt PE=3 SV=1
MFSVIKNDKHSNARVGFLNLPHGRVDTPCFMPVGTLGAMKGLKHAVLEKLECNLMLANTYHLYLRPGIKTIEKYGGLHNFTTWNKNFLTDSGGFQVFSLSGLRKIDLKGVHFKSHLDGSYHYFTPEGVFAMQEIFGSDIIMPLDICSSYGIDYNEANLYTNITTNWASSTFKAYKNKKEGYNGLLFLITQGNFFKDLRKRSINDILELDSPGIAIGGISVGEPREKYLEILEYSSLLIPKEKPRYVMGIGTPHYILDAIYYGIDIFDCVNPARIARHGSLLTDNGIMRIGRKEYKDDTSPVEKNCGCTLCTRYSRGYLRHLIKSKELFGIILASEHNIHYMFRLISKIRTAILNDNFLNFRTSYLKKYEEGNFDE

SEQ ID NO: 52715 - protein, 375 aa, unidentified
  source 1..375: note = Borreliella japonica
  REGION 1..375: note = tr|A0A1G4P2C9|A0A1G4P2C9_BORJA Queuine tRNA-ribosyltransferase OS=Borreliella japonica OX=34095; GN = tgt PE=3 SV=1
MFSVIKNDKHSNARVGFLNLPHGRVDTPCFMPVGTLGAMKGLKHAVLEKLECNLMLANTYHLYLRPGIKTIEKYGGLHNFTTWNKNFLTDSGGFQVFSLSGLRKIDLKGVHFKSHLDGSYHYFTPEGVFAMQEIFGSDIIMPLDICSSYGIDYNEANLYTNITTNWARSTFKSYKNKKEGYNGLLFLITQGNFFKDLRKRSINDILELDSPGIAIGGISVGEPREKYLEILEYSSFLIPKEKPRYVMGIGTPHYILDAIYYGIDIFDCVNPARIARHGSLLTDNGIMRIGRKEYKDDTSQVEKNCGCTLCTRYSRGYLRHLIKSKELFGIILASEHNIYYMFRLISKIRNAILNDNFLNFRTSYLKKYEEENFDE

SEQ ID NO: 52716 - protein, 375 aa, unidentified
  source 1..375: note = Borreliella spielmanii
  REGION 1..375: note = tr|B9X7J5|B9X7J5_9SPIR Queuine tRNA-ribosyltransferase OS=Borreliella spielmanii A14S; OX = 498742 GN=tgt PE=3 SV=1
MFSVIKNDKHSNARVGFLNLPHGRVDTPCFMPVGTLGAMKGLKHTVLEKLECNLMLANTYHLYLRPGIKTIEKYGGLHNFTTWNKNFLTDSGGFQVFSLSSLRRIDLKGVHFKSHLDGSYHYFTPEGVFAMQEAFGSDIIMPLDICSSYGIDYNEANLYTNITTNWARSTFKAYKNKKEGYNGLLFLITQGNFFKDLRKRSINDILELDSPGIAIGGISVGEPREKYLEILEYSSLLIPREKPRYVMGIGTPHYILDAIYHGIDIFDCVNPARIARHGSLLTDNGIMRISRKEYKDDISPVEKNCSCTLCTRYSRGYLRHLIKSRELFGIILASEHNIYYMFRLISKIRAAILNDDFLNFKTSYLKKYEEGNFDE

SEQ ID NO: 52717 - protein, 375 aa, unidentified
  source 1..375: note = Borreliella valaisiana
  REGION 1..375: note = tr|D6RWF7|D6RWF7_BORVA Queuine tRNA-ribosyltransferase OS=Borreliella valaisiana VS116; OX = 445987 GN=tgt PE=3 SV=1
MFNVIKNDKHSSARVGFLNLPHGRVDTPCFMPVGTLGAMKGLKHAVLEKLECNLMLANTYHLYLRPGIKTIEKYGGLHNFTTWNKNFLTDSGGFQVFSLSGLRKIDLKGVHFKSHLDGSYHYFTPEGVFAMQEIFGSDIIMPLDICSSYGIDYNEANLYTNITTNWARSTFKSYKNKKEGYKGLLFLITQGNFFKDLRKRSINDILELDSPGIAIGGISVGEPREKYLEILEYSSLLIPKEKPRYVMGIGTPHYILDAIYYGIDIFDCVNPARIARHGTLLTDNGMMRIGRKEYKDDTSPVEKNCGCTLCTRYSRGYLRHLIKSRELFGIILASEHNIYYMFRLISKIRTAILNDNFLNFRTSYLKKYEEGNFDE

SEQ ID NO: 52718 - protein, 378 aa, unidentified
  source 1..378: note = Bosea lathyri
  REGION 1..378: note = tr|A0A1H5W484|A0A1H5W484_9BRAD Queuine tRNA-ribosyltransferase OS=Bosea lathyri OX=1036778 GN=tgt; PE = 3 SV=1
MTSSTTTEFGFHLLGRDGAARTGEIRMPRGVIRTPAFMPVGTAATVKGMYPEQVKALGADVVLGNTYHLMLRPGAERVAGLGGLHKFMNWPHPILTDSGGFQVMSLSQLRKLTEEGVTFQSHIDGSKHVLTPERSVEIQNLLGSDIVMQLDECVSLPCELAVAEKAMRLSLRWAERCKAAFGNPAGRALFGIVQGGEVPALRIESAKSLVAMDLKGYAIGGLAVGEPQDVMLAMIETVEPHLPQEKPRYLMGVGTPDDIVQAVARGIDMFDCVMPTRAGRHGQIFTRFGRMNLKNAKHADDSRPIDPQSTCPAANTYSRAYLHHLVKAEEMLGKMLLTWVNLAYYQDLMAGLRGAIAAGRLDDFIAETKEGWLKGEPV

SEQ ID NO: 52719 - protein, 374 aa, unidentified
  source 1..374: note = Bosea lupini
  REGION 1..374: note = tr|A0A1H7H2J5|A0A1H7H2J5_9BRAD Queuine tRNA-ribosyltransferase OS=Bosea lupini OX=1036779 GN=tgt; PE = 3 SV=1
MTTDFSFHLLGRDGAARTGEVRMPRGVIRTPAFMPVGTAATVKGMYPEQVKALGADVVLGNTYHLMLRPGAERVARLGGLHKFMNWPHPILTDSGGFQVMSLANLRKLTEEGVTFQSHIDGSKHVLSPERSVEIQNLLGSDIVMQLDECVSLPCEDKVAEKAMHLSLRWAERCRKAFGDPAGRALFGIVQGGAVPALRVESARELAAMDLKGYAIGGLAVGEPQDVMLAMIETVEPHLPSEKPRYLMGVGTPDDIVEAVRRGVDMFDCVMPTRAGRHGQIFTRFGRMNLKNAKHAEDGRPIDPQSSCPAANSYSRAYLHHLVKAEEMLGKMLLTWVNLAYYQELTAGLRAAIAAGRLEDFIAETKEGWAKGEPA

SEQ ID NO: 52720 - protein, 392 aa, Bosea sp.
  REGION 1..392: note = tr|A0A0N1BAB9|A0A0N1BAB9_9BRAD Queuine tRNA-ribosyltransferase OS=Bosea sp. AAP35 OX=1523417; GN = tgt PE=3 SV=1
MTDEPDLPQPAPPQPGPTDFTFRLHARDGAARTGEIAMPRGVIRTPAFMPVGTAATVKGMYPDQVRALGADVVLGNTYHLMLRPGAERVAGLGGLHRFMNWPHPILTDSGGFQVMSLANLRKLTEEGVAFRSHIDGSKHMLTPERSVEIQNLLGSDIVMQLDECVSLPCEDAVAEKAMRLSLRWAQRCKEAFGHHPGRALFGIVQGGSVPALRVESARELVAMDLKGYAIGGLAVGEPQDVMLAMIETVEPHLPVEKPRYLMGVGTPDDIVQAVCRGIDMFDCVMPTRAGRHGQIFTRFGRMNLKNAKHADDSRPVDEGSSCPAANGWSRAYLHHLVRCEEMLGKMLLTWINLAYYQELMAGLRAAIAAGRLADFVAETKEGWARGDTSGPA

SEQ ID NO: 52721 - protein, 374 aa, Bosea sp.
  REGION 1..374: note = tr|A0A4Q1TI85|A0A4Q1TI85_9BRAD Queuine tRNA-ribosyltransferase OS=Bosea sp. Tri-39 OX=1867714; GN = tgt PE=3 SV=1
MTTDFSFHLLGRDGAARTGEVRMPRGMIRTPAFMPVGTAATVKGMYPEQVKALGADVVLGNTYHLMLRPGAERVARLGGLHKFMNWPHPILTDSGGFQVMSLANLRKLTEEGVTFQSHIDGSKHVLTPERSVEIQNLLGSDIVMQLDECVSLPCEDKVAEKAMRLSLRWAERCKTAFGDPAGRALFGIVQGGAVPSLRVESARELAAMDLKGYAIGGLAVGEPQDIMLAMIETVEPHLPQEKPRYLMGVGTPDDIVEAVRRGVDMFDCVMPTRAGRHGQIFTRFGRMNLKNAKHAEDPRPVDPQSSCQAANTYSRAYLHHLVKAEEMLGKMLLTWVNLAYYQELTAGLRAAIAAGRLEDFIAETKEGWARGEPA

SEQ ID NO: 52722 - protein, 387 aa, Bosea thiooxidans
  REGION 1..387: note = tr|A0A1T5CTH6|A0A1T5CTH6_9BRAD Queuine tRNA-ribosyltransferase OS=Bosea thiooxidans OX=53254; GN = tgt PE=3 SV=1
MTVQPQLSQPETAATTDFTFHVAARDGAARTGAISMPRGVIRTPAFMPVGTAATVKGMYPEQVRALGADVVLGNTYHLMLRPGAERVARLGGLHKFMNWPHPILTDSGGFQVMSLSQLRKLTEEGVTFRSHIDGSKHVLSPERSVEIQNLLGSDIVMQLDECVALPCEDKVAEKAMRLSLRWAERCKTAFGNHPGRALFGIVQGGAVPHLRVESARELAAMDLKGYAVGGLAVGEPQEIMLAMIETVEPHLPQEKPRYLMGVGTPDDIIQSVARGIDMFDCVMPTRAGRHGQIFTRFGRMNLKNAKFAEDTRPVDEQSSCPAANGWSRAYLHHLVKAEEMLGKMLLTWVNLAYYQDLMAGLRAAIAQGRLADFIAETREGWERGEPA

SEQ ID NO: 52723 - protein, 387 aa, Bosea thiooxidans
  REGION 1..387: note = tr|A0A0Q3I1W5|A0A0Q3I1W5_9BRAD Queuine tRNA-ribosyltransferase OS=Bosea thiooxidans OX=53254; GN = tgt PE=3 SV=1
MTVQPQLSQPETAATTDFTFHVAARDGAARTGAISMPRGVIRTPAFMPVGTAATVKGMYPEQVRALGADVVLGNTYHLMLRPGAERVARLGGLHKFMNWPHPILTDSGGFQVMSLSQLRKLTEEGVTFRSHIDGSKHVLSPERSVEIQNLLGSDIVMQLDECVALPCEDKVAEKAMRLSLRWAERCKTAFGNHPGRALFGIVQGGAVPHLRVESARELAAMDLKGYAVGGLAVGEPQEIMLAMIETVEPHLPQEKPRYLMGVGTPDDIIQSVARGIDMFDCVMPTRAGRHGQIFTRFGRMNLKNAKFAEDTRPVDEQSSCPAANGWSRAYLHHLVKAEEMLGKMLLTSVNLAYYQDLMAGLRAAIAQGRLADFIAETREGWERGEPA

SEQ ID NO: 52724 - protein, 379 aa, unidentified
  source 1..379: note = Bosea vaviloviae
  REGION 1..379: note = tr|A0A0N1F4G3|A0A0N1F4G3_9BRAD Queuine tRNA-ribosyltransferase OS=Bosea vaviloviae OX=1526658; GN = tgt PE=3 SV=1
MGATDFSFHLHARDGAARTGEIRMPRGVIRTPAFMPVGTAATVKGMYPEQVRALGADVVLGNTYHLMLRPGAERVAKLGGLHRFMNWPHPILTDSGGFQVMSLANLRKLTEEGVTFQSHIDGSKHMLSPERSVEIQNLLGSDIVMQLDECVSLPCEDKVAEKAMRLSLRWAERCKAAFGDPAGRALFGIVQGGSVPALRVESARELVAMDLKGYAIGGLAVGEPQDVMLAMIETVEPHLPVEKPRYLMGVGTPDDIVQAVCRGIDMFDCVMPTRAGRHGQIFTRFGRMNLKNAKHADDPRPVDEASSCPATNGWSRAYLHHLVKSEEMLGKMLLTWVNLAYYQELMAGLRAAIAAGRLANFVAQTRDDWARGDSAGEPA

SEQ ID NO: 52725 - protein, 388 aa, unidentified
  source 1..388: note = Bosea vaviloviae
  REGION 1..388: note = tr|A0A1D7U5C8|A0A1D7U5C8_9BRAD Queuine tRNA-ribosyltransferase OS=Bosea vaviloviae OX=1526658; GN = tgt PE=3 SV=1
MTTDTITTDASRSDFSFHLAARDGAARTGEIRMPRGVIRTPAFMPVGTAATVKGMYPEQVKALGADVVLGNTYHLMLRPGAERVAKLGGLHKFMNWPHPILTDSGGFQVMSLSQLRKLTEEGVTFQSHIDGSKHVLTPERSVEIQNLLGSDIVMQLDECVSLPCEDKVAEKAMRLSLRWAERCKTAFGNPAGRALFGIVQGGVVPALRVESARELVAMDLKGYAIGGLAVGEPQDIMLAMIETVEPHLPVEKPRYLMGVGTPDDLVEAVSRGIDMFDCVMPTRAGRHGQIFTRFGRMNLKNAKHAEDPRPIDPQSSCQAANGYARAYLHHLVKAEEMLGKMLLTWVNLAYYQDLMAGLRAAIAQGRLQDFIAETKEGWARGEPAGEPA

SEQ ID NO: 52726 - protein, 438 aa, Bosea vestrisii
  REGION 1..438: note = tr|A0A543NYG2|A0A543NYG2_9BRAD Queuine tRNA-ribosyltransferase OS=Bosea vestrisii OX=151416; GN = tgt PE=3 SV=1
MKVPAWIPGLPAVTRDDDLIGIPGEGAWLIRRAGLFPKPARCSTSQAMTVQPQPMQPDIAATPEFTFKVAARDGAARTGAISMPRGVIRTPAFMPVGTAATVKGMYPEQVRALGADVVLGNTYHLMLRPGAERIARLGGLHKFMNWPHPILTDSGGFQVMSLSQLRKLTEEGVTFQSHIDGSKHVMTPERSVEIQNLLGSDIVMQLDECVALPCEDKVAEKAMRLSLRWAERCKTAFGTHPGRALFGIVQGGAVPSLRVESARELAAMDLKGYAVGGLAVGEPQEVMLAMIEAVEPHLPQEKPRYLMGVGTPDDIVEAVSRGIDMFDCVMPTRAGRHGQIFTRFGRMNLKNAKHAEDPRPIDEQSACPAANGWSRAYLHHLVKAEEMLGKMLLTWVNLAYYQELMAGLRAAIAAGRLADFIAETKEGWARGEPGSGPA

SEQ ID NO: 52727 - protein, 376 aa, unidentified
  source 1..376: note = Boseongicola aestuarii
  REGION 1..376: note = tr|A0A238IWG1|A0A238IWG1_9RHOB Queuine tRNA-ribosyltransferase OS=Boseongicola aestuarii; OX = 1470561 GN=tgt PE=3 SV=1
MTATFSFDLKATDGAARTGVISTPRGNIRTPAFMPVGTAATVKAMMPESVAATGADILLGNTYHLMLRPGAERIERLGGLHKFMNWERPILTDSGGFQVMSLADLRKLTEKGVTFKSHIDGSKHELTPERSMEIQRQLGSDIVMCFDECPALPSDRARIEDSMRLSMRWAARSREAFGDRPGHALFGIQQGGLEQDLRQESADALRGIGFDGYAVGGLAVGEGQEAMFAVLDYAPAQLPVDKPRYLMGVGKPDDIVGAVKRGIDMMDCVLPSRSGRTGQAFTRRGVVNIKNARHADDPRPLDEQCACPACSKYSRAYLHHVFRAGEMISGMLLTWHNLHYFQEIMSGMRAAIEEGAFEEWERGFHETRAKGDIDAL

SEQ ID NO: 52728 - protein, 376 aa, unidentified
  source 1..376: note = Boseongicola sp.
  REGION 1..376: note = tr|A0A5D0RKL3|A0A5D0RKL3_9RHOB Queuine tRNA-ribosyltransferase OS=Boseongicola sp. HY14; OX = 2603819 GN=tgt PE=3 SV=1
MSATFRFTLNATDGRARAGVISTPRGDIRTPAFMPVGTAATVKAMLPESVRATGADILLGNTYHLMLRPGAERIARLGGLHRFMNWDRPILTDSGGFQVMSLAELRKLTEEGVSFRSHIDGSRHMLSPETSMEIQRLLGSDIVMCFDECPALPADEARVAESMRLSMRWAARSREAFGDRPGHALFGIQQGGVTEELRGESAEALKAIGFDGYAIGGLAVGEGQEAMFGVLDYAPDMLPEDKPRYLMGVGKPDDIVGAVGRGVDMMDCVLPSRSGRTGQAFTRRGVVNIKNARHADDPRPLDEDCACPACRGYSRAYLHHVFRAGEIISSMLLTWHNLRYYQDLMDGMRTAIAAGDFARFEADFHAGRAGGDIDPI

SEQ ID NO: 52729 - protein, 372 aa, Bowmanella sp.
  REGION 1..372: note = tr|A0A4V2L005|A0A4V2L005_9ALTE Queuine tRNA-ribosyltransferase OS=Bowmanella sp. JS7-9 OX=1605368; GN = tgt PE=3 SV=1
MKFELINTDGKARRGRLIFDRGVVETPAFMPVGTYGTVKGMTPEELKDTGAHICLGNTFHLMLRPGTEIMKMHGDLHDFMHWDKPILTDSGGFQVFSLGDLRKISEEGVTFRSPINGEKILLTPEKSMEVQRDLGSDIVMIFDECTPYPATDEQARTSMELSLRWAQRSKDAHADNPSALFGIIQGGMYEDLRDVSLQGLVNIDFDGYAIGGLSVGEPKEDMIRILDHTAWKIPAHKPRYLMGVGKPEDIVEAVRRGIDMFDCVMPTRNARNGHLFVTEGVIKIRNAANKTDTRPLDEKCDCYTCKNYTRSYLHHLDKCNEILGARLNTIHNLRYYQRVMQGLRDAIEANKLDEFVAEFYAQKGMDVPPLAE

SEQ ID NO: 52730 - protein, 431 aa, Brachybacterium alimentarium
  REGION 1..431: note = tr|A0A2A3YH87|A0A2A3YH87_9MICO Queuine tRNA-ribosyltransferase OS=Brachybacterium alimentarium; OX = 47845 GN=tgt PE=3 SV=1
MPTAAGPFVPALSAHPGRAETGFEVTARHGDKARAGVITTPHGEIATPAFIPVGTKATVKAVLPESMSDLGTQALLANAYHLYLQPGHDLIDEAGGLGAFMNWPGPTYTDSGGFQVMSLGAGFKKVLSSEFSGGEKARTSSGEDDAVAEGKERLAHVDDDGVTFRSFINGDEHRFTPEISMQIQHGLGADIMFAFDELTTLMNSRRYQEQALERTRLWAIRCLAEHARLTADRTHRPYQQLWGVIQGAQYEDLRRQASRDLGAMEVEGWSFDGFGIGGALEKENLGTIVDWVTDELPEAKPRHLLGISEVDDLFVAIASGADTFDCVSPSRVARNSAVYTRTGRVNLTGSRYRRQFAPIDEACDCYTCTHYTAAYVHHLFRAKEMLSSTLCTIHNERFVVRLVDRIRAALHSGDFDALREETTGAYYGAPR

SEQ ID NO: 52731 - protein, 430 aa, unidentified
  source 1..430: note = Brachybacterium endophyticum
  REGION 1..430: note = tr|A0A2U2RKX7|A0A2U2RKX7_9MICO Queuine tRNA-ribosyltransferase OS=Brachybacterium endophyticum; OX = 2182385 GN=tgt PE=3 SV=1
MQDSPVHPDFTVPPDSSRRSGFEITARHGDKARAGVISTPHGPIATPSFVPVGTKATVKAVLPEAMADLGAQAVLANAYHLYLQPGHDLVDEAGGLGAFMNWPGPTYTDSGGFQVMSLGAGFKKVLSSEFSGGEKARTANGEDDAVAEGKERLAHVDDDGVTFRSFINGDVHRFTPEISMQIQHGLGADIMFAFDELTTLMNSRPYQEQALERTRLWAIRCLAEHARLTAEREGKPYQQLWGVIQGAQYEDLRRRASHDLGAMDVDGQRFDGFGIGGALEKENLGTIVGWVTDELPEDRPRHLLGISEVDDLFVAIAAGADTFDCVSPSRVARNSAVYTRTGRVNLTGSRYRRQFAPIDETCDCYTCTHYTAAYIHHLFRAKEILSATLCTIHNERFVVRLVDEIRAAIGSGDFEALREERTGAYYGEAR

SEQ ID NO: 52732 - protein, 427 aa, Brachybacterium faecium
  REGION 1..427: note = tr|C7MGZ2|C7MGZ2_BRAFD Queuine tRNA-ribosyltransferase OS=Brachybacterium faecium (strain ATCC 43885 / DSM 4810 / NCIB 9860) OX=446465 GN=tgt PE=3; SV = 1
MTDHRLETPRTPSPADGGFEILARHGEKARAGVISTPHGEIATPAFVPVGTKATVKAVLPESMSDLGAQALLANAYHLYLQPGHDLVDEAGGLGAFMNWPGPTYTDSGGFQVMSLGAGFKKVLSSEFSGGESARTSSGEDDDVAEGKERLAHVDDDGVTFRSFINGDVHRFTPEISMQIQHGLGADIMFAFDELTTLMNSRRYQEQALERTRLWAIRCLAEHARLTAERTHRPYQQLWGVIQGAQYEDLRRQAARDLGAMDVEGWSFDGFGIGGALEKENLGTIVGWVTDELPEARPRHLLGISEVDDLFVAIAAGADTFDCVSPSRVARNSAVYTRSGRVNLTGARYRRQFAPIDESCDCYTCTHYTAAYVHHLFRAKEMLSSTLCTIHNERFVVRLVDQIRASLHSGDFEALREETTGAYYGSPR

SEQ ID NO: 52733 - protein, 421 aa, Brachybacterium faecium
  REGION 1..421: note = tr|A0A2W5CFE1|A0A2W5CFE1_9MICO Queuine tRNA-ribosyltransferase OS=Brachybacterium faecium; OX = 43669 GN=tgt PE=3 SV=1
MESSPPSPADVGYEITARHGDKARAGVITTPHGQIATPAFIPVGTKATVKAVLPESMADAGAQALLANAYHLYLQPGHDLVDEAGGLGAFMNWPGPTYTDSGGFQVMSLGAGFKKVLSSEFAGGTTARTASGEDDAVAEGKERLAHVDDDGVTFRSFINGDVHRFTPEISMQIQHGLGADIMFAFDELTTLMNSRGYQEKALERTRLWAIRCLAEHQRLTAERTHRPYQQLWGVIQGAQFEDLRRKAARDLGAMDVDGQVFDGFGIGGALEKENLGTIVGWVTDELPELRPRHLLGISEVDDLFTAVAAGADTFDCVSPSRVARNSAVYTRTGRVNLTGARYRRQFAPIDETCDCYTCTHYTAAYVHHLFRAKEMLSSTLCTIHNERFVVRLVDEIRASLISGDFEALREQRTADYYGAPR

SEQ ID NO: 52734 - protein, 427 aa, unidentified
  source 1..427: note = Brachybacterium ginsengisoli
  REGION 1..427: note = tr|A0A291H263|A0A291H263_9MICO Queuine tRNA-ribosyltransferase OS=Brachybacterium ginsengisoli; OX = 1331682 GN=tgt PE=3 SV=1
MTELPPDPSRAPSSTDSGFEILARHGEKARAGVISTPHGEIATPAFVPVGTKATVKAVLPESMSELGAQALLANAYHLYLQPGHDLVDEAGGLGAFMNWPGPTYTDSGGFQVMSLGAGFQKVLSSEFSGGEKARTSNGEDDAVREGKERLAHVDDDGVTFRSFINGDEHRFTPEISMQIQHGLGADIMFAFDELTTLMNSRGYQEQALERTRLWALRCLAEHARLTEERTHRPYQQLWGVIQGAQYEDLRRQASRDLGTMDVAGQAFDGFGIGGALEKENLGTIVGWVTDELPDQKPRHLLGISEVDDLFVAIAAGADTFDCVSPSRVARNSAVYTATGRVNLTGARYRRQFSPIDETCDCYTCTHYTAAYVHHLFRAKEMLSSTLCTIHNERFVVRLVDRIRASLLDGDFDALREETTGAYYGSPR

SEQ ID NO: 52735 - protein, 444 aa, Brachybacterium muris
  REGION 1..444: note = tr|A0A022KU18|A0A022KU18_9MICO Queuine tRNA-ribosyltransferase OS=Brachybacterium muris UCD-AY4; OX = 1249481 GN=tgt PE=3 SV=1
MAVTELPAHTTDGTETARAADPVTPPSPPSPADVGYEITARHGDKARAGVITTPHGQIATPAFIPVGTKATVKAVLPESMADLGAQALLANAYHLYLQPGHDLVDEAGGLGAFMNWPGPTYTDSGGFQVMSLGAGFKKVLSSEFAGGATARTASGEDDAVAEGKERLALVDDDGVTFRSFINGDVHRFTPEISMQIQHGLGADIMFAFDELTTLMNSRGYQEKALERTRLWAIRCLAEHQRLTAERTHRPYQQLWGVIQGAQFEDLRRKAARDLGAMDVDGQVFDGFGIGGALEKENLGTIVGWVTDELPEDRPRHLLGISEVDDLFTAVAAGADTFDCVSPSRVARNSAVYTRTGRVNLTGARYRRQFAPIDETCDCYTCTHYTAAYVHHLFRAKEMLSSTLCTIHNERFVVRLVDEIRASLISGDFEALREQRTADYYGAPR

SEQ ID NO: 52736 - protein, 418 aa, Brachybacterium nesterenkovii
  REGION 1..418: note = tr|A0A1X6WVT0|A0A1X6WVT0_9MICO Queuine tRNA-ribosyltransferase OS=Brachybacterium nesterenkovii; OX = 47847 GN=tgt PE=3 SV=1
MAPRSAATGFAVTARDGAKARAGVITTPHGQIATPAFVPVGTKATVKAVLPESMTQLGAQALLANAYHLYLQPGHDLVDEAGGLGAFMNWPGPTYTDSGGFQVMSLGAGFKKVLSSEFSGGERARTASGEDDAVAEGKERLAHVDDDGVTFRSFINGDVHRFTPEISMRIQHGLGADIMFAFDELTTLMNSRGYQEQALERTRLWAQRCLAEHRRLTAERTHRPYQQLWGVIQGAQYEDLRRTAARDLGTMEVDGQAFDGFGIGGALEKENLGTIVGWVTDELPEDRPRHLLGISEVDDLFAAVAAGADTFDCVSPSRVARNSAVYTRTGRVNLTGSRYRRQFAPIDDSCDCYTCEHYTAAYIHHLFRAKEMLSSTLCTIHNERFVVRLVDRIRAAIGAGELDALREETTGAYYGSPR

SEQ ID NO: 52737 - protein, 434 aa, Brachybacterium paraconglomeratum
  REGION 1..434: note = tr|A0A3R8QU00|A0A3R8QU00_9MICO Queuine tRNA-ribosyltransferase OS=Brachybacterium paraconglomeratum OX=173362 GN=tgt PE=3 SV=1
MTTPPPPAPSAAETPAAAPSPADVGFEITARHGEKARAGVITTPHGDIATPAFVPVGTKATVKSVLPESMAELGAQALLANAYHLYLQPGHDLVDEAGGLGAFMNWPGPTYTDSGGFQVMSLGAGFQKVLSSEFSGGEKARTANGEDDAVREGKERLAHVDDDGVTFRSFINGDEHRFTPEISMQIQHGLGADIMFAFDELTTLMNSRGYQEQALERTRLWALRCLAEHARLTHERTHRPYQQLWGVIQGAQYEDLRRQAAHDLGGMEVEGWSFDGFGIGGALEKENLGTIVGWVTDELPEDKPRHLLGISEVDDLFVAIAAGADTFDCVSPSRVARNSAVYTRTGRVNLTGSRYRRQFAPIDETCDCYTCTHYTAAYVHHLFRAKEMLSSTLCTIHNERFVVRLVDRIRASLQDGTFDALREETTGAYYGEPR

SEQ ID NO: 52738 - protein, 469 aa, Brachybacterium phenoliresistens
  REGION 1..469: note = tr|Z9JNL3|Z9JNL3_9MICO Queuine tRNA-ribosyltransferase OS=Brachybacterium phenoliresistens OX=396014 GN=tgt PE=3 SV=1
MTSAPSASDPRDTASAASRGTDPGRRATGSDASSGVRPAGADLAAGVPSAGAHPGRAESGFEVTARHGEKARAGVITTPHGPIATPAFIPVGTKATVKAVLPESMTDLGAQALLANAYHLYLQPGHDLVDEAGGLGAFMNWPGPTYTDSGGFQVMSLGAGFKKVLSSEFSGGQKARTASGEDDDVAAGKERLAHVDDDGVTFRSFINGDVHRFTPEISMQIQHGLGADIMFAFDELTTLMNSRGYQESALERTRLWALRCLAEHARLSADRTHRPYQMLWGVIQGAQYEDLRRKASRDLGGMDVEGWSFDGFGIGGALEKENLGTIVGWVTDELPEEKPRHLLGISEVDDLFTAVAAGADTFDCVSPSRVARNSAVYTRTGRVNLTGSRYRRQFAPIDETCDCYTCTHYTAAYIHHLFRAKEMLSSTLCTLHNERFVVRLVDEIRESIGRGDFEALREERTGAYYGAPR

SEQ ID NO: 52739 - protein, 426 aa, Brachybacterium saurashtrense
  REGION 1..426: note = tr|A0A345YTK2|A0A345YTK2_9MICO Queuine tRNA-ribosyltransferase OS=Brachybacterium saurashtrense; OX = 556288 GN=tgt PE=3 SV=1
MPAVPAPTAYPRRAGTGFAVTARHGEKARAGVITTPHGEIATPAFVPVGTKATVKAVLPESMSQLGAQALLANAYHLYLQPGHELVDEAGGLGAFMNWPGPTYTDSGGFQVMSLGAGFRKVLSSEFSGGEKARTATGEDDAVAEGKERLAHVDDDGVTFRSFINGDVHRFTPEISMQIQHGLGADIMFAFDELTTLMNSRGYQEQALERTRLWALRCLAEHARLTAERTHRPYQQLWGVIQGAQYEDLRRQAARDLGAMEVAGWGFDGFGIGGALEKENLGTIVGWVTDELPEQRPRHLLGISEVDDLFVAIAAGADTFDCVSPSRVARNSAVYTRTGRVNLTGSRYRRQFAPIDETCDCYTCTHYTAAYIHHLFRAKEMLSSTLCTIHNERFVVRLVDRIRASLGAGEFEALREETTGAYYGAPR

SEQ ID NO: 52740 - protein, 395 aa, Brachybacterium sp.
  REGION 1..395: note = tr|A0A0M8KL80|A0A0M8KL80_9MICO Queuine tRNA-ribosyltransferase OS=Brachybacterium sp. SW0106-09; OX = 1704590 GN=Y09_0498 PE=3 SV=1
MITTPHGDIATPAFVPVGTKATVKSVLPESMAELGAQALLANAYHLYLQPGHDLVDEAGGLGAFMNWPGPTYTDSGGFQVMSLGAGFQKVLSSEFSGGEKARTANGEDDAVREGKERLAHVDDDGVTFRSFINGDEHRFTPEISMQIQHGLGADIMFAFDELTTLMNSRGYQEQALERTRLWALRCLAEHARLTHERTHRPYQQLWGVIQGAQYEDLRRQAAHDLGGMEVEGWSFDGFGIGGALEKENLGTIVGWVTGELPEDKPRHLLGISEVDDLFVAIAAGADTFDCVSPSRVARNSAVYTRTGRVNLTGSRYRRQFAPIDETCDCYTCTHYTAAYVHHLFRAKEMLSSTLCTIHNERFVVRLVDRIRASLQDGTFDALREETTGAYYGEPR

SEQ ID NO: 52741 - protein, 430 aa, Brachybacterium sp.
  REGION 1..430: note = tr|A0A291GSE2|A0A291GSE2_9MICO Queuine tRNA-ribosyltransferase OS=Brachybacterium sp. VM2412; OX = 2017484 GN=tgt PE=3 SV=1
MSPDPVVAPPSALAPPATGTGFEVLARHGEKARAGVITTPHGQIATPAFVPVGTKATVKAVLPESMSDLGAQALLANAYHLYLQPGHDLIDEAGGLGAFMNWPGPTFTDSGGFQVMSLGAGFKKVLSSEFSGGEKARTSSGEDDDVAEGKERLAHVDDDGVTFRSFINGDVHRFTPEISMQIQHGLGADIMFAFDELTTLMNSRGYQEQALERTRLWALRCLAEHSRLTAERSHRPYQQLWGVIQGAQHEDLRRRAARELGAMDVGGQAFDGFGIGGALEKENLGTIVGWVTDELPQERPRHLLGISEVDDLFVAIAAGADTFDCVSPSRVARNSAVYTRTGRVNLTGARYRRRFAPIDEDCDCYTCTHFTAAYVHHLFRAKEMLSSTLCTIHNERFVVRLVDRIRDSLRSGDFDALREETTGAYYGAPR

SEQ ID NO: 52742 - protein, 391 aa, Brachymonas denitrificans
  REGION 1..391: note = tr|A0A1H8KDI6|A0A1H8KDI6_9BURK Queuine tRNA-ribosyltransferase OS=Brachymonas denitrificans DSM 15123 OX=1121117 GN=tgt PE=3 SV=1
MLQFDLLSTHGPEGKARRGRMTLNHGVVETPIFMPVGTYGTVKGVMPRSLHDMGAQIILGNTFHLWMRPGLDIMESFGGLHQFENWHKPILTDSGGFQVWSLGEMRKITEEGVKFASPVNGDKLFLTPEISMQIQTVLNSDIVMQLDECTPYETKGHITTEREARASMEMSLRWAQRCRTEFQRLENPNALFGIVQGGMYENLRQESLEQLVEMDFPGYAVGGVSVGEPKEDMLRLTAHTPHRLPAHKPRYLMGVGTPEDLVYGVQHGVDMFDCVMPTRNARNSHVFTRFGDLKIRNARHKTDQRPLDETCTCYACAGASGIPYAEGGRDGFSRAYLHHLDRCGEMLGPMLTTIHNLHYYLNLMQEMRDAMDANRFDAFVAQFHADRARGI

SEQ ID NO: 52743 - protein, 375 aa, Brachyspira aalborgi
  REGION 1..375: note = tr|A0A5C8GHX6|A0A5C8GHX6_9SPIR Queuine tRNA-ribosyltransferase OS=Brachyspira aalborgi OX=29522; GN = tgt PE=3 SV=1
MSFSFKVLKSSSSTLARLGKIEINGIEIDTPVFMPVGTKATVKALTPAMIEESESKIILANTYHLILKPSLEVIKKFGGVKKFMAWKGAMLTDSGGFQVFSLVKLRKINDNGVEFNSHIDGTKYFFTPKSVIEAEHIIGADFIMCLDECSKHDEGYKYVKEAMERTHKWAKECKEYHDNSQNSEWQYLGGIIQGGMFDDLRKISAETLTEMNFPFYAIGGLSVGETPEKMHEVLSKVMPYTNKEKPRYLMGVSEPRDILNSVMEGIDMFDCVMPTRNARNGEAFTMDGIIRIRNSKYRMDDAVLEKECDCYTCKNFSKAYLNHLDKTHEILFSILMTIHNIRFMQRFMHDLRLSIEKDNFSDYRNNMMKKFYKIN

SEQ ID NO: 52744 - protein, 375 aa, Brachyspira aalborgi
  REGION 1..375: note = tr|A0A5C8DZS2|A0A5C8DZS2_9SPIR Queuine tRNA-ribosyltransferase OS=Brachyspira aalborgi OX=29522; GN = tgt PE=3 SV=1
MSFSFKVLKSSSSTLARLGKIEINGIEIDTPVFMPVGTKATVKALTPAMIEESESKIILANTYHLILKPSLEVIKKFGGVKKFMAWKGAMLTDSGGFQVFSLAKLRKINDNGVEFNSHIDGTKYFFTPKSVIEAEHIIGADFIMCLDECSKHDEGYKYVKEAMERTHKWAKECKEYHDNSQNSEWQYLGGIIQGGMFDDLRKISAETLTEMNFPFYAIGGLSVGETPEKMHEVLSKVMPYTNKEKPRYLMGVSEPRDILNSVMEGIDMFDCVMPTRNARNGEAFTMDGIIRIRNSKYRMDDAVLEKECDCYTCKNFSKAYLNHLDKTHEILFSILMTIHNIRFMQRFMHDLRLSIEKDNFSDYRNNMMKKFYKIN

SEQ ID NO: 52745 - protein, 372 aa, unidentified
  source 1..372: note = Brachyspira hampsonii
  REGION 1..372: note = tr|A0A2U4EX29|A0A2U4EX29_9SPIR Queuine tRNA-ribosyltransferase OS=Brachyspira hampsonii 30446; OX = 1289135 GN=tgt PE=3 SV=1
MSFTFNVLKNSSQTSARLGKININGIEIDTPVFMPVGTKATVKALTPLMIEETESKIILSNTYHLVLKPGLEVLKKFGGVKKFMGWKGAMLTDSGGFQVFSLAKLRKINDNGVEFSSHIDGSKYLFTPRSVMEAEHIIGADFIMCLDECSRADADYNYAKEAMLRTHKWAKECKEYHDSTPNSEYQYLGGIIQGGMFDDLRKESAETLVNMDFPFYSIGGLSVGETPEKMHDVLSKVMLYTDKSKPRYLMGVSEPRDILNAVMEGIDMFDCVMPTRNARNGEAFTMNGIVRIRNSKYRMDDTVLEEECDCYTCKNFSKAYLNHLDKTHEILFSILMTIHNVRFMQRFMKDLRNSIENDVFSDYRKDMMKKFY

SEQ ID NO: 52746 - protein, 372 aa, unidentified
  source 1..372: note = Brachyspira hampsonii
  REGION 1..372: note = tr|A0A1E5NDE0|A0A1E5NDE0_9SPIR Queuine tRNA-ribosyltransferase OS=Brachyspira hampsonii; OX = 1287055 GN=tgt PE=3 SV=1
MSFTFNVLKNSCQTSARLGKININGIEIDTPVFMPVGTKATVKALTPLMIEETESKIILSNTYHLVLKPGLEVLKKFGGVKKFMGWKGAMLTDSGGFQVFSLAKLRKINDNGVEFSSHIDGSKYLFTPRSVMEAEHIIGADFIMCLDECSKYDASYEYAKEAMLRTHKWAKECKEYHDSTPNSEYQYLGGIIQGGMFDDLRKESAETLVNMDFPFYSIGGLSVGETPEKMHDVLSKVMLYTDKSKPRYLMGVSEPRDILNAVMEGIDMFDCVMPTRNARNGEAFTMNGIVRIRNSKYRMDDTVLEEECDCYTCKNFSKAYLNHLDKTHEILFSILMTIHNVRFMQRFMKDLRNSIENDVFSDYRKDMMKKFY

SEQ ID NO: 52747 - protein, 372 aa, Brachyspira hyodysenteriae
  REGION 1..372: note = sp|C0R0X6|TGT_BRAHW Queuine tRNA-ribosyltransferase; OS = Brachyspira hyodysenteriae (strain ATCC 49526 / WA1); OX = 565034 GN=tgt PE=3 SV=1
MSFTFNVLKNSSQTSARLGKININGIEIDTPVFMPVGTKATVKALTPLMIEETESKIILANTYHLVLKPGLEVLKKFGGVKKFMNWKGAMLTDSGGFQVFSLAKLRKINDDGVEFSSHIDGSKYFFTPRSVMEAEHIIGADFIMCLDECSKHDASYDYVKEAMFRTHKWAKECKEYHDSTPNSEYQYLGGIIQGGMFDDLRKESAETLVNMDFPFYSIGGLSVGETPEQMHEVLSKVMLYTNKQKPRYLMGVSEPRDILNAVMEGIDMFDCVMPTRNARNGEAFTMNGIVRIRNSKYRMDDTVLEEDCDCYTCKNFSKAYLNHLDKTHEILFPILMTIHNVRFMQRFMKDLRNSIENDVFSDYRKDMMNKFY

SEQ ID NO: 52748 - protein, 372 aa, Brachyspira hyodysenteriae; identical to SEQ ID NO: 52747
  REGION 1..372: note = tr|A0A3B6VZ91|A0A3B6VZ91_BRAHO Queuine tRNA-ribosyltransferase OS=Brachyspira hyodysenteriae ATCC 27164 OX=1266923 GN=tgt PE=3 SV=1

SEQ ID NO: 52749 - protein, 372 aa, Brachyspira intermedia
  REGION 1..372: note = tr|G0EJS7|G0EJS7_BRAIP Queuine tRNA-ribosyltransferase OS=Brachyspira intermedia (strain ATCC 51140 / PWS/A) OX=1045858 GN=tgt PE=3 SV=1
MSFTFNVLKNSSQTAARLGKININGIEIDTPVFMPVGTKATVKALTPLMIEETESKIILANTYHLVLKPGLEVLKKFGGVKKFMGWKGAMLTDSGGFQVFSLAKLRKINDDGVEFSSHIDGSKYFFTPRSVMEAEHIIGADFIMCLDECSKHDASYEYVKEAMFRTHKWAKECKEYHDSTPNSEYQYLGGIIQGGMFDDLRKESAETLVNMDFPFYSIGGLSVGETPEQMHEVLSKVMLYTNKQKPRYLMGVSEPRDILNGVMEGIDMFDCVMPTRNARNGEAFTMNGVVRIRNSKYRMDDEVLEEGCDCYTCKNFSKAYLNHLDKTHEILFSILMTIHNVRFMQRFMKDLRNSIENDVFSDYRKDMMNKFY

SEQ ID NO: 52750 - protein, 373 aa, Brachyspira murdochii
  REGION 1..373: note = tr|D5U8H5|D5U8H5_BRAM5 Queuine tRNA-ribosyltransferase OS=Brachyspira murdochii (strain ATCC 51284 / DSM 12563 / 56-150) OX=526224 GN=tgt PE=3 SV=1
MSFSFNVLKTSSQTSARLGKIEINGIEIDTPVFMPVGTKATVKALTPLMIEETESKIILANTYHLVLKPGLEVLKKFGGVKKFMAWKGAMLTDSGGFQVFSLAKLRNINNDGVEFSSHIDGSKYLFMPKSVMEAEHIIGADFIMCLDECSKADASYEYAKEAMLRTHKWAKECKDYHDSTPNSEYQYLGGIIQGGMFDDLRKESAETLVNMNFPFYSIGGLSVGETPEKMHDVLSKVMLYTDKSKPRYLMGVSEPRDILNAVMEGIDMFDCVMPTRNARNGEAFTMNGIVRIRNSKYRTDDTALEDKCDCYTCRNFSKAYLNHLDKVHEILFSTLMTIHNVRFMQRFMKDLRSSIENDRFADYRKDMMLKFYE

SEQ ID NO: 52751 - protein, 375 aa, Brachyspira pilosicoli
  REGION 1..375: note = tr|A0A3B6VZT9|A0A3B6VZT9_BRAPL Queuine tRNA-ribosyltransferase OS=Brachyspira pilosicoli P43/6/78; OX = 1042417 GN=tgt PE=3 SV=1
MSFSFEVLKNSSQTHARLGKIEVNGVVIDTPVFMPVGTKATVKALTPAMIEETESKIILANTYHLVLKPGLEVIKKFGGVKKFMNWKGAMLTDSGGFQVFSLAQLRKITDEGVEFRSHIDGSKYFFTPKSVMEAEHIIGADFIMSFDECCKADADYNYAKEAMLRTHKWAKECKEYHDSTPNSEYQYLGGIIQGGMFDDLRKESAETLVNMDFPFYSIGGLSVGETPEKMHEVLSKVMLYTNKQKPRYLMGVSEPRDILNAVMEGIDMFDCVMPTRNARNGEAFTMNGVVRIRNSKYRMDDTVLEEGCDCYTCKNFSKAYLNHLDKSHEILFSILMTIHNIRFMQRFMKDLRNSIENDNFSEYRNTMMRKFYDNE

SEQ ID NO: 52752 - protein, 375 aa, Brachyspira pilosicoli
  REGION 1..375: note = tr|A0A5C8EJW9|A0A5C8EJW9_BRAPL Queuine tRNA-ribosyltransferase OS=Brachyspira pilosicoli OX=52584; GN = tgt PE=3 SV=1
MSFSFEVLKNSSQTHARLGKIEVNGVVIDTPVFMPVGTKATVKALTPAMVEETESKIILANTYHLVLRPSLEVIKKFGGVKKFMNWKGAMLTDSGGFQVFSLAQLRKINDEGVEFRSHIDGTKYFFTPKSVMEAEHIIGADFIMSFDECCKADADYNYAKEAMLRTHKWARECKEYHDSTPNSEYQYLGGIIQGGMFDDLRKESAETLVNMDFPFYSIGGLSVGETPENMHEVLSKVMTYTNKQKPRYLMGVSEPRDILNAVMEGIDMFDCVMPTRNARNGEAFTMNGVIRIRNSKYRTDDTILEEGCDCYTCKNFSKAYLNHLDKSHEILFSILMTIHNMRFMQRFMKDLRNSIENDNFSEYRNTMMKRFYENE

SEQ ID NO: 52753 - protein, 373 aa, Brachyspira sp.
  REGION 1..373: note = tr|A0A2A4IPR1|A0A2A4IPR1_9SPIR Queuine tRNA-ribosyltransferase OS=Brachyspira sp. G79 OX=1358104; GN = tgt PE=3 SV=1
MSFSFNVLKTSSETSARLGKIEINGIEIDTPVFMPVGTKATVKALTPLMIEETESKIILANTYHLVLKPGLEVLKKFGGVKKFMAWKGAMLTDSGGFQVFSLAKLRNINNDGVEFSSHIDGSKYLFTPRSVMEAEHIIGADFIMCLDECSKYDASYEYAKEAMLRTHKWAKECKDYHDSTPNSEYQYLGGIIQGGMFDDLRKESAETLVNMDFPFYSIGGLSVGETPEKMHDVLSKVMLYTDKNKPRYLMGVSEPRDILNAVMEGIDMFDCVMPTRNARNGEAFTMNGIVRIRNSKYRTDDTALEDKCDCYTCRNFSKAYLNHLDKVHEILFSTLMTIHNVRFMQRFMKDLRSSIENNKFADYRKDMMLKFYE

SEQ ID NO: 52754 - protein, 374 aa, Brachyspira sp.
  REGION 1..374: note = tr|R5H4H6|R5H4H6_9SPIR Queuine tRNA-ribosyltransferase OS=Brachyspira sp. CAG:484; OX = 1262759 GN=tgt PE=3 SV=1
MRDNAHENFKYELVHTCKQTGARAGVFTTPHGVIKTPIFMPVGTNSAVKTLTSGQIADTEAQIILSNSYHLYLRAGTKRIKQFGGIHSWMNWHKPVLTDSGGFQVFSLAHLNKITEDGVEFRDPKDGKKHFISPEVSMEIQQDIGADIIMAFDQCAPYPCDYDTAKKAMERTHRWLERCFKAKTNPKQALFPIVQGAFFDDLRKESASVISSYDAVGYAIGGLSVGETKDLMNHFVEFTAPLLPAGKPRYLMGVGTPEDLLDGIKRGIDMFDCVLPTRNARHGSFFTWDGKRNIKNKQYSDDALPLVEGCNCYACKNHSRAYIRHLWRCQEATASTLLSIHNIKFLVDFSQKCRQAILDDKFGDFYNEHYSRLF

SEQ ID NO: 52755 - protein, 372 aa, unidentified
  source 1..372: note = Brachyspira suanatina
  REGION 1..372: note = tr|A0A0G4K8M9|A0A0G4K8M9_9SPIR Queuine tRNA-ribosyltransferase OS=Brachyspira suanatina OX=381802; GN = tgt PE=3 SV=1
MSFTFNVLKNSSQTAARLGKININGIEIDTPVFMPVGTKATVKALTPLMIEETESKIILANTYHLVLKPGLEVLKKFGGVKKFMGWKGAMLTDSGGFQVFSLAKLRKINDDGVEFSSHIDGSKYFFTPRSVMEAEHIIGADFIMCLDECSKHDASYEYVKEAMFRTHKWAKECKEYHDSTPNSEYQYLGGIIQGGMFDDLRKESAETLVNMDFPFYSIGGLSVGETPEQMHEVLSKVMLYTNKQKPRYLMGVSEPRDILNGVMEGIDMFDCVMPTRNARNGEAFTMNGVVRIRNSKYRMDDEVLEEGCDCYTCKNFSKAYLNHLDKTHEILFSTLMTIHNVRFMQRFMKDLRNSIENDVFSDYRKDMMNKFY

SEQ ID NO: 52756 - protein, 382 aa, unidentified
  source 1..382: note = Bradymonadaceae bacterium
  REGION 1..382: note = tr|A0A3D8MXV1|A0A3D8MXV1_9DELT Queuine tRNA-ribosyltransferase OS=Bradymonadaceae bacterium TMQ3; OX = 2283320 GN=tgt PE=3 SV=1
MTSISNTVRCETFSFREVARDGAARAGELKLTHGTVQTPIFMPVGTVGTVKAMRPDELATQVEAQIILGNTYHLYLRPGLDVVRAHGGLHTMMGWDRPILTDSGGYQVFSLKDLRKIREEGVEFQDHISGSYHLFTPEKVIEIQETLGSDIMMAFDECPPAGAEERYMRDSMARTTRWEKRCLEARTRHDCALFGIGQGGTSEQLRREHLEELAPLPFEGMAIGGLSVGEETQAMYDTVEFTTPMMPEEKPKYLMGVGKPEDLVECIARGVDMFDCVIPTRNARNGHCFTSRGVVVVRNAVHKEDLRPLDPDCDCYTCQNFSRSYLRHLLKSGEMLGPQLCTLHNLRYFLTLVGQAREAIVEGRFEAFRKRFHTLQAEGGSR

SEQ ID NO: 52757 - protein, 504 aa, unidentified
  source 1..504: note = Bradymonadaceae bacterium
  REGION 1..504: note = tr|A0A3D8N1P1|A0A3D8N1P1_9DELT Queuine tRNA-ribosyltransferase OS=Bradymonadaceae bacterium TMQ3; OX = 2283320 GN=tgt PE=3 SV=1
MTDTTQEGAPSQALSFELKCTDGRARRGKVTVTHGSFETPAFMPVGTRGTVKGMTPRDLRETGAEICLGNTYHLNIAPGGKIVKKLGGLHGMMGWDAPILTDSGGFQVFSLPKLEIEEEGVTFAFKKGGKAIQLTPERSMQIQEALGADIIMAFDHVVAHPAPYQLAEEAVYRTSRWLERCRKAHTRTDQALFGIVQGSTFPNLRRLSVELICSQDLPGYAIGGLSVGEGHQLMMDTIDQTEPFMPAEKPRYLMGVGYPEDLVEAVARGVDMFDCVLPSRLARSGIIFTRHGRYRVTKGRYKADKFPLDTNCNCYACRNFSRAYINHLINSKEILGSVLATLHNITFYQDLMRAMRQAIEEGRFESFRRAFLDEYLSDDRKEELDLEEVLGVSENEGDDLPWKTTHSVVPPTTVEENRRRSRRDVEVSVPEERMKEHKRDSKSDSGKGSHTKAKGQGNTRRTSSGRSQKSAKSSKSGAPKSGGKNSGKSSKFSKSSKSGAGKPK

SEQ ID NO: 52758 - protein, 385 aa, unidentified
  source 1..385: note = Bradymonadales bacterium
  REGION 1..385: note = tr|A0A5B8XKY8|A0A5B8XKY8_9DELT Queuine tRNA-ribosyltransferase OS=Bradymonadales bacterium V1718; OX = 2600177 GN=tgt PE=3 SV=1
MTKPLKFELLKTDHDARRGRVTTLHGSFETPAFMPVGTRGTVKGLMPRDLKETGSEICLGNTYHLHIAPGDKVVRKFGGLHEFMGWDKSILTDSGGFQVFSLPGVQVEEEGVTFKFEKSGKPVTLTPERSVQIQENLGADIFMAFDVCVEFPCDYRRAQEAVYRTDRWLKRCKEAQTTADTQSLFGIVQGSTYDDLRALSAQLTIEHDLPGYAIGGVSVGETHDLMMQAIEFAAPFLPKDKPRYLMGVGYPEDLVEGVARGIDMFDCVLPSRLGRSGVIFSRRGRYRVTKGKYRNDKYPLDTNCSCYACQNFSRGYINHLLNVKEILGSTLATLHNITFYQDLMRGMRDAIEQGRFEKFRENFLEEYLSEDRFEELVQSRDDNDE

SEQ ID NO: 52759 - protein, 434 aa, unidentified
  source 1..434: note = Bradymonadales bacterium
  REGION 1..434: note = tr|A0A5B8YAM1|A0A5B8YAM1_9DELT Queuine tRNA-ribosyltransferase OS=Bradymonadales bacterium YN101; OX = 2292766 GN=tgt PE=3 SV=1
MTDSPLQFELHTTDGRARRGKVTVPHGSFNTPAFMPVGTRATVKGLMPRDLRETGSEICLSNTYHLNISPGPKIVKKMGGLHHFMGWDAPILTDSGGYQVFSLPKAKLDEEGVTFKFEQKGGKKITLTPEKSMQIQEDLGADIIMAFDVCVPHPCEYQDAREAVYRTIRWLERCKEAHSRKDQALFGIIQGSTYADLRALSTQLTREIDLPGYAIGGLSVGEGHELMMSSIDQTEPGMIKEKPRYLMGVGYPEDIVEAVARGIDMFDCVIPSRYARSGVAFTRRGRFRVTNARYRSDKFPLDTNCNCYCCRNFSRAYLNHLINTNEILGSALMTLHNVTFYQDMMRAIRMAIEEGSFEKFRQAFLDEYLSDDKKEELGFDDLDGRYDQEDFGWDVKHSVVPPTDIAENLEKTEPVDEVAGPRRRIEKIKNLGDD

SEQ ID NO: 52760 - protein, 373 aa, unidentified
  source 1..373: note = Bradymonas sediminis
  REGION 1..373: note = tr|A0A2Z4FKZ7|A0A2Z4FKZ7_9DELT Queuine tRNA-ribosyltransferase OS=Bradymonas sediminis OX=1548548; GN = tgt PE=3 SV=1
MAIKCETFSFEVQAQDGTARAGRIETAHGSIETPIFMPVGTQGTVKSLTPEDLRDEIEAQIILGNTYHLYLRPGLDVIKKHGGLHQFMNWNHPILTDSGGYQVFSLKDLRKIKEEGVLFQDHIGGAKHLFTPEKVIEIQETLGSDIMMAFDECPELPCTEDYMQKSMARTTRWAKRCLEARTRPDCALFGIIQGGTSEKLRKLHADELCKLPFDGFAIGGLSVGEAKDKMYETVEFTTPMMPDDKPKYLMGVGKPDDLIECIARGVDMFDCVLPSRNARNGQCFTHSGVVNIRNAEYAEDMAPIDPDCDCYTCKNYTRSYIRHLYKAKEILSARLCTLHNLHYFLTLVGQAREAIIEGRFEQFRLDYYAAKED

SEQ ID NO: 52761 - protein, 408 aa, unidentified
  source 1..408: note = Bradymonas sediminis
  REGION 1..408: note = tr|A0A2Z4FJ77|A0A2Z4FJ77_9DELT Queuine tRNA-ribosyltransferase OS=Bradymonas sediminis OX=1548548; GN = tgt PE=3 SV=1
MASTTTGPLSFDLKGTDGRARRGRVTVPHGVIQTPAFMPVGTRATVKGLMPRDLKATGSEICLANTYHMDISPGPKIVKKMGGLHEFMGWDKPILTDSGGYQVFSLPKTQLDEEGVTFRFEKKGGKKVKLTPERSMQIQQDLGADIAMAFDVCVPYPCDYKNAQDAVYRTIRWLERCKEAHTRPDQALFGIVQGSSYADLRGLSAQLTMGIDLPGYAIGGLSVGEGHSIMMAMIDCTEPSMVKEKPRYLMGVGYPEDIVEAVARGVDMFDCVIPTRYARSGVAFARHGRFRVSNARYKTDKYPLDTNCSCYTCKNFTRAYLNHLINTNEILGSALMTLHNVTFYQDLMRTIRTAIEEKNFEKFRVSFLQEYLAEDKKEELGIEDIDGRYDQDDFSWDVEHSVIRPTDD

SEQ ID NO: 52762 - protein, 434 aa, unidentified; identical to SEQ ID NO: 52759
  source 1..434: note = Bradymonas sp.
  REGION 1..434: note = tr|A0A4Y6PZL5|A0A4Y6PZL5_9DELT Queuine tRNA-ribosyltransferase OS=Bradymonas sp. YN101 OX=2589075; GN = tgt PE=3 SV=1

SEQ ID NO: 52763 - protein, 374 aa, unidentified
  source 1..374: note = Bradymonas sp.
  REGION 1..374: note = tr|A0A4Y6Q1S3|A0A4Y6Q1S3_9DELT Queuine tRNA-ribosyltransferase OS=Bradymonas sp. YN101 OX=2589075; GN = tgt PE=3 SV=1
MTVQCETFSFEVHAEDGMARAGEVETAHGRFQTPIFMPVGTKGTVKAMTPEDLTDQIGAQIILGNTYHLYLRPGLDIIRKHGGLHEFMNWDGPILTDSGGYQVFSLEDLRKIKEDGVEFQDHIEGSYHFFTPEKVIEIQEVLGSDIMMAFDECPALPCSDEYMRESLARTTRWETRCLEARTRTDCALFGILQGGTSPEFRRAHIEELCELPFDGFAIGGLSVGEAKDKMYETVELSTPLMPHDKPKYLMGVGKPDDLVECIARGVDMFDCVIPTRNARNGQCFTSQGVVKIRNAVYAEDMRPLDPNCECYTCQNYTRSYLRHLYKAQEILSARLCTLHNLHYFLELTRTARQAIVEGRFEAFRKEYYARKEHA

SEQ ID NO: 52764 - protein, 377 aa, unidentified; identical to SEQ ID NO: 51316
  source 1..377: note = Bradyrhizobiaceae bacterium
  REGION 1..377: note = tr|F7QMS0|F7QMS0_9BRAD Queuine tRNA-ribosyltransferase OS=Bradyrhizobiaceae bacterium SG-6C OX=709797 GN=tgt PE=3 SV=1

SEQ ID NO: 52765 - protein, 381 aa, unidentified
  source 1..381: note = Bradyrhizobiaceae bacterium
  REGION 1..381: note = tr|A0A431RTF3|A0A431RTF3_9BRAD Queuine tRNA-ribosyltransferase OS=Bradyrhizobiaceae bacterium; OX = 2072420 GN=tgt PE=3 SV=1
MNPDNDLPNHFELLATDGAARTGRLTTPHGVVRTPAFMPVGTAGAMKGMHWREVRDAGADIVLGNTYHLMLRPTAERIAALGGLQKFTGWNGPMLTDSGGFQVMSLSDLRKVTENAVTFRSHIDGAKVELSPERSIEVQRLLGSDIAMQMDECVRLPAERADIERAMQLSLRWAERSKRAFASAPDGYMLFGIVQGGDIPELRHASARGLVAIGFHGYAIGGLAVGEPQAVMLAMIDETAPLLPKERPRYLMGVGTPDDILEAVKRGIDMFDCVMPTRNGRHGVAFTRFGQVNLRNARHADDPRPLDEESSWPSTRDCARAYLHHLVKAGETLGAMLLSEINVAYYQSLMQGIREAIAHGRFEQFYQRTREDWARGDIAPR

SEQ ID NO: 52766 - protein, 377 aa, unidentified
  source 1..377: note = Bradyrhizobium arachidis
  REGION 1..377: note = tr|A0A1I7ITC1|A0A1I7ITC1_9BRAD Queuine tRNA-ribosyltransferase OS=Bradyrhizobium arachidis; OX = 858423 GN=tgt PE=3 SV=1
MTLPNHFELLATDGAARTGRLTTPHGMVRTPAFMPVGTAGAMKGMHWREVREAGADIVLGNTYHLMLRPGAERIAALGGLQRFTGWNGPMLTDSGGFQVMSLADLRKVSEHAVTFRSHIDGAKVELSPERSIEVQRFLGSDIAMQMDECVRLPAERDDIERAMRLSLRWAERSKRAFESAPDGYMLFGIVQGGDIPQLRHASAQGLVEMGFHGYAIGGLAVGEPQAVMLAMIDETAPALPTDRPRYLMGVGTPDDILEAVKRGVDMFDCVMPTRNGRHGVAFTRFGQVNLRNARHADDPRPLDEASTWPSARNYARAYLHHLVKAGETLGAMLLSEINIAYYQFLMQGIRDAIAHGTFEEFYQRTRADWSRGDIAPR

SEQ ID NO: 52767 - protein, 387 aa, Bradyrhizobium betae
  REGION 1..387: note = tr|A0A4V1P617|A0A4V1P617_9BRAD Queuine tRNA-ribosyltransferase OS=Bradyrhizobium betae OX=244734; GN = tgt PE=3 SV=1
MNLPDTDLPNTGLPNHFELRATDGAARTGRLTTPHGVVRTPAFMPVGTAGAMKGMHWREVRDAGADIVLGNTYHLMLRPGAERIAALGGLQTFTGWNGPMLTDSGGFQVMSLADLRKVTEHAVTFRSHIDGAKVELSPERSIEVQRFLGSDIAMQMDECVRLPAERDDIERAMRLSLRWAERSKRAFESAPDGYMLFGIVQGGDIPQLRHASAEGLVEIGFHGYAIGGLAVGEPQTVMLAMIDETAPRLPKERPRYLMGVGTPDDILEAVKRGIDMFDCVMPTRNGRHGVAFTRFGQVNLRNARHADDPRPLDEESSWPSTRNYARAYLHHLVKAGETLGAMLLSEINIAYYQFLMQGIRDAIAHGKFEEFYQRTREDWARGDIAPR

SEQ ID NO: 52768 - protein, 377 aa, Bradyrhizobium canariense
  REGION 1..377: note = tr|A0A1H1Q1A2|A0A1H1Q1A2_9BRAD Queuine tRNA-ribosyltransferase OS=Bradyrhizobium canariense; OX = 255045 GN=tgt PE=3 SV=1
MSLPNHFDLVATDGAARTGRLTTPHGVVRTPVFMPVGTAGAMKGVHWREVRDAGADIVLGNTYHLMLRPGAERIAALGGLQVFTGWQGPMLTDSGGFQVMSLSELRKVSEAAVTFRSHIDGAKIELSPERSIEVQRLLGSDIAMQMDECVRLPAERDDIERAMQLSLRWAERSKRAFETAPPGYMLFGIAQGGDIPELRQASARGLVDIGFHGYAIGGLAVGEPQSVMLAMIEEVAPILPPDRPRYLMGVGTPDDLLEAVARGIDMFDCVMPTRNGRHGVAFTRFGQVNLRNARHADDPRPLDEESPWPSARNCSRAYLHHLVKSGETLGAMLLSEINIAYYQQLMHDIRSAVSEGRFADLREHIRAGWAKGDITAR

SEQ ID NO: 52769 - protein, 382 aa, Bradyrhizobium canariense
  REGION 1..382: note = tr|A0A1X3DXF3|A0A1X3DXF3_9BRAD Queuine tRNA-ribosyltransferase OS=Bradyrhizobium canariense; OX = 255045 GN=tgt PE=3 SV=1
MNRPDTALPNHFELLATDGAARTGRLTTPHGVVRTPAFMPVGTAGAMKGMHWREVREAGADIVLGNTYHLMLRPGAERIAALGGLQTFTGWNGPMLTDSGGFQVMSLADLRKVSEQAVTFRSHIDGAKVELSPERSIEVQRLLGSDIAMQMDECVRLPAERADIDRAMQLSLRWAERSKRAFESAPDGYMLFGIVQGGDIPQLRHASAQGLIEIGFHGYAIGGLAVGEPQAVMLAMIDETAPLLPKERPRYLMGVGTPDDILEAVKRGIDMFDCVMPTRNGRHGVAFTRFGQVNLRNARHADDPRPLDEESSWPSARSYARAYLHHLVKAGETLGAMLLSEINIAYYQFLMQGIRDAIAQGTFEEFYRRTREDWGRGDIAPR

SEQ ID NO: 52770 - protein, 377 aa, unidentified
  source 1..377: note = Bradyrhizobium centrolobii
  REGION 1..377: note = tr|A0A176Y731|A0A176Y731_9BRAD Queuine tRNA-ribosyltransferase OS=Bradyrhizobium centrolobii; OX = 1505087 GN=tgt PE=3 SV=1
MSLPNHFELLATDGAARTGRLTTPHGVVRTPAFMPVGTAGAMKGMHWREVRDAGADIVLGNTYHLMLRPGAERISALGGLQRFTGWNGPMLTDSGGFQVMSLSDLRKVSENAVTFRSHIDGAKVELSPERSIEVQRFLGSDIAMQMDECVRLPAERDDIERAMQLSLRWAERSKRAFESAPDGYMLFGIVQGGDVPQLRHASAEGLVETGFHGYAIGGLAVGEPQEVMLAMIDETAPALPRGRPRYLMGVGTPDDILEAVKRGIDMFDCVMPTRNGRHGVAFTRFGQVNLRNARHADDPRPLDEESSWPSTRSYARAYLHHLVKSGETLGAMLLSEINVAYYQFLMQGIRDAIAQGTFEEFYQRTREDWARGDIAPR

SEQ ID NO: 52771 - protein, 413 aa, unidentified
  source 1..413: note = Bradyrhizobium daqingense
  REGION 1..413: note = tr|A0A562KWP2|A0A562KWP2_9BRAD Queuine tRNA-ribosyltransferase OS=Bradyrhizobium daqingense; OX = 993502 GN=tgt PE=3 SV=1
MGPIVSQPEPLTGRGMAWGGLIGLVRHAISTAMNPDNDLPNHFELLATDGAARTGRLTTPHGVVRTPAFMPVGTAGAMKGMHWREVRDAGADIVLGNTYHLMLRPGAERIAALGGLQTFTGWNGPMLTDSGGFQVMSLADLRKVSEHAVTFRSHIDGAKVELSPERSIEVQRLLGSDIAMQMDECVRLPAERADIERAMQLSLRWAERSKRAFASAPDGYMLFGIVQGGDVPQLRHASAQGLVEIGFHGYAIGGLAVGEPQAVMLAMIDETGPLLPKQRPRYLMGVGTPDDILEAVKRGVDMFDCVMPTRNGRHGVAFTRFGQVNLRNARHADDPRPLDEESSWPSTRSCARAYLHHLVKAGETLGAMLLSEINVAYYQSLMQGIRDAIAQGKFEEFYRRTREDWARGDIAPR

SEQ ID NO: 52772 - protein, 405 aa, unidentified
  source 1..405: note = Bradyrhizobium diazoefficiens
  REGION 1..405: note = tr|Q89L65|Q89L65_BRADU Queuine tRNA-ribosyltransferase OS=Bradyrhizobium diazoefficiens (strain JCM 10833 / IAM 13628 / NBRC 14792 / USDA 110); OX = 224911 GN=tgt PE=3SV=1
MAEVRSRGLIGLLRHAISTAMNRPDAALPNHFELLATDGTARTGRLTTPHGVVRTPAFMPVGTAGAMKGMHWREVRDAGADIVLGNTYHLMLRPGAERIAALGGLQRFTGWSGPMLTDSGGFQVMSLADLRKVSEHAVTFRSHIDGAKVELSPERSIEVQRFLGSDIAMQMDECVRLPAEHADIERAMQLSLRWAERSKRAFESAPDGYMLFGIVQGGDVPQLRHASAEGLVAIGFHGYAIGGLAVGEPQAVMLAMIDETAPMLPKERPRYLMGVGTPDDILEAVKRGIDMFDCVMPTRNGRHGVAFTRFGQVNLRNARHADDPRPLDEESTWPSTRSYARAYLHHLVKAGETLGAMLLSEINIAYYQSLMQGIRDAIAHGTFDEFYQRTREDWARGDIAPRQGD

SEQ ID NO: 52773 - protein, 405 aa, unidentified; identical to SEQ ID NO: 52772
  source 1..405: note = Bradyrhizobium diazoefficiens
  REGION 1..405: note = tr|A0A2A6MRR4|A0A2A6MRR4_9BRAD Queuine tRNA-ribosyltransferase OS=Bradyrhizobium diazoefficiens; OX = 1355477 GN=tgt PE=3 SV=1

SEQ ID NO: 52774 - protein, 377 aa, Bradyrhizobium elkanii
  REGION 1..377: note = tr|A0A1E3EKI3|A0A1E3EKI3_BRAEL Queuine tRNA-ribosyltransferase OS=Bradyrhizobium elkanii OX=29448; GN = tgt PE=3 SV=1
MNLPNHFELLATDGAARTGRLTTAHGLVRTPAFMPVGTAGAMKGMHWREVRDAGADIVLGNTYHLMLRPGAERIAGLGGLQRFTGWGGPMLTDSGGFQVMSLSELRKVTEKAVTFRSHIDGTKVELSPERSIEVQRLLGSDIAMQMDECVRLPAERADIERAMQLSLRWAERSKRAFEAAPDGYMLFGIVQGGDVPDLRHASARGLTDIGFHGYAIGGLAVGEPQAVMLAMIEETAPALPVDRPRYLMGVGTPEDILEAVARGVDMFDCVMPTRNGRHGMAFTRFGQINLRNARHVDDPRPLDEESPWPAANGYSRAYLHHLVRSGETLGAMLLSEINVAYYQQLMQGIRDAVANGTFEDFRTKTRAGWARGDIAPR

SEQ ID NO: 52775 - protein, 377 aa, Bradyrhizobium elkanii
  REGION 1..377: note = tr|A0A4Q4K4F4|A0A4Q4K4F4_BRAEL Queuine tRNA-ribosyltransferase OS=Bradyrhizobium elkanii OX=29448; GN = tgt PE=3 SV=1
MNLPNHFELLATDGAARTGRLTTPHGLVRTPAFMPVGTAGAMKGMHWREVRDAGADIVLGNTYHLMLRPGAERIAGLGGLQRFTGWGGPMLTDSGGFQVMSLSELRKVTEKAVTFRSHIDGTKVELSPERSIEVQRLLGSDIAMQMDECVRLPAERADIERAMQLSLRWAERSKHAFEAAPDGYMLFGIVQGGDVPDLRHASARGLTDIGFHGYAIGGLAVGEPQAVMLAMIEETAPALPVDRPRYLMGVGTPEDILEAVARGVDMFDCVMPTRNGRHGMAFTRFGQINLRNARHVDDPRPLDDESPWPAANGYSRAYLHHLVRSGETLGAMLLSEINVAYYQQLMQGIRDAVANGTFEDFRTKTRAGWARGDIAPR

SEQ ID NO: 52776 - protein, 381 aa, unidentified
  source 1..381: note = Bradyrhizobium erythrophlei
  REGION 1..381: note = tr|A0A1N6KAD6|A0A1N6KAD6_9BRAD Queuine tRNA-ribosyltransferase OS=Bradyrhizobium erythrophlei; OX = 1437360 GN=tgt PE=3 SV=1
MSLPDHPANHFDLLATDGAARTGRLTTPHGLVRTPGFMPVGTAGAMKGMHWREVREAGADIVLGNTYHLMLRPGAERIAGLGGLQRFTGWGGPMLTDSGGFQVMSLSELRKVTENAVTFRSHIDGAKVELSPERSIEVQRLLGSDIAMQMDECVRLPAERGDIERAMQLSLRWAARSKRAFETAPEGYMLFGIVQGGDVPELRHASARGLVEIGFHGYAIGGLAVGEPQAVMLAMIEETAPRLPADRPRYLMGVGTPEDILEAVARGIDMFDCVMPTRNGRHGMAFTRFGQINLRNARHIDDPRPLDEASPWPSTRNYSRAYLHHLVRAGETLGAMLLSEINVAYYQELMQGIRDAIAGGTFEDFRKQTRADWARGDIAPR

SEQ ID NO: 52777 - protein, 377 aa, unidentified
  source 1..377: note = Bradyrhizobium erythrophlei
  REGION 1..377: note = tr|A0A1M5RSU5|A0A1M5RSU5_9BRAD Queuine tRNA-ribosyltransferase OS=Bradyrhizobium erythrophlei; OX = 1437360 GN=tgt PE=3 SV=1
MSLPNHFDLVATDGRARTGRLTTPHGVVRTPAFMPVGTAGAMKGMHWREVRDAGADIVLGNTYHLMLRPGAERIAALGGLQTFTGWNGPMLTDSGGFQVMSMSELRKVAEKAVTFRSHIDGAMVELSPERSIEVQRLLGSDIAMQMDECVRLPADPDDIERAMLLSLRWAERSKRAFETAPPGYMLFGIAQGGDVSQLRQASARGLVEIGFHGYAIGGLAVGEPQAVMLAMVEEVAAHLPDDRPRYLMGVGTPDDILEAVARGIDMFDCVMPTRNGRHGMAFTRFGQINLRNARHADDPRPLDEQSLWPSTRDYSRAYLHHLVKSGETLGAMLLSEINIAYYQRLMADIRDAISQGTFADFRERTRAGWAMGDIPPR

SEQ ID NO: 52778 - protein, 381 aa, unidentified
  source 1..381: note = Bradyrhizobium genosp.
  REGION 1..381: note = tr|A0A4Q7FP17|A0A4Q7FP17_9BRAD Queuine tRNA-ribosyltransferase OS=Bradyrhizobium genosp. SA-3; OX = 508868 GN=tgt PE=3 SV=1
MNPDNDLPNHFELLATDGAARTGRLTTPHGVVRTPAFMPVGTAGAMKGMHWREVRDAGADIVLGNTYHLMLRPGAERIAALGGLQTFTGWNGPMLTDSGGFQVMSLADLRKVSEHAVTFRSHIDGAKVELSPERSIEVQRFLGSDIAMQMDECVRLPAERDDIERAMRLSLRWAERSKRAFASASAGYMLFGIVQGGDVPQLRHASAQGLVEIGFHGYAIGGLAVGEPQAVMLAMIDETSPLLPRERPRYLMGVGTPDDILEAVKRGVDMFDCVMPTRNGRHGVAFTRFGQVNLRNARHANDPRPLDEESSWPSTRSCARAYLHHLVKAGETLGAMLLSEINVAYYQSLMQGIRDAVAQGRFEEFYQRTREDWTRGDIAPR

SEQ ID NO: 52779 - protein, 377 aa, unidentified
  source 1..377: note = Bradyrhizobium guangdongense
  REGION 1..377: note = tr|A0A410VGN5|A0A410VGN5_9BRAD Queuine tRNA-ribosyltransferase OS=Bradyrhizobium guangdongense; OX = 1325090 GN=tgt PE=3 SV=1
MNLPNHFELLATDGAARTARLTTPHGVVRTPAFMPVGTAGAMKGMHWREVREAGADIVLGNTYHLMLRPGAERINGLGGLQRFTGWNGPMLTDSGGFQVMSLSDLRKISEHAVTFRSHIDGAKIELSPERSIEVQRLLGSDIAMQMDECVRLPAERDDIDRAMRLSLRWAERSKRAFESAPDGYMLFGIVQGGDVPQLRHASAQGLVEIGFHGYAIGGLAVGEPQAVMLAMIDETAPALPTDRPRYLMGVGTPDDILEAVKRGVDMFDCVMPTRNGRHGVAFTRFGQVNLRNARHADDPRPLDEESSWPSACNYARAYLHHLVKAGETLGAMLLSEINIAYYQFLMQGIRNAIAHGTFEEFYQRTREDWARGDIAPR

SEQ ID NO: 52780 - protein, 382 aa, unidentified
  source 1..382: note = Bradyrhizobium guangzhouense
  REGION 1..382: note = tr|A0A4Q0RIQ6|A0A4Q0RIQ6_9BRAD Queuine tRNA-ribosyltransferase OS=Bradyrhizobium guangzhouense; OX = 1325095 GN=tgt PE=3 SV=1
MNPPATGLPNHFELLATDGAARTGRLTTPHGVVRTPAFMPVGTAGAMKGMHWREVRDAGADIVLGNTYHLMLRPGAERIAALGGLQRFTGWNGPMLTDSGGFQVMSLADLRKVSEHAVTFRSHIDGAKVELSPERSIEVQRFLGSDIAMQMDECVRLPAERDDIERAMRLSLRWAERSKRAFESAPDGYMLFGIVQGGDVPELRHASAQGLVEIGFHGYAIGGLAVGEPQAVMLAMIDETAPRLPADRPRYLMGVGTPDDILEAVKRGVDMFDCVMPTRNGRHGVAFTRFGQVNLRNARHADDPRPLDEESVWPSTRNCARAYLHHLVKAGETLGAMLLSEINIAYYQFLMQGIRDAIAHGTFDEFYQRTREDWARGDIAPR

SEQ ID NO: 52781 - protein, 382 aa, unidentified
  source 1..382: note = Bradyrhizobium huanghuaihaiense
  REGION 1..382: note = tr|A0A562RHU8|A0A562RHU8_9BRAD Queuine tRNA-ribosyltransferase OS=Bradyrhizobium huanghuaihaiense; OX = 990078 GN=tgt PE=3 SV=1
MNLPDTNLPNHFELLATDGAARTGRLTTPHGVVRTPAFMPVGTAGAMKGMHWREVREAGADIVLGNTYHLMLRPGAERIAALGGLQRFTGWNGPMLTDSGGFQVMSLADLRKVSEHAVTFRSHIDGAKVELSPERSIEVQRFLGSDIAMQMDECVRLPAERDDIDRAMRLSLRWAERSKRAFESAPDGYMLFGIVQGGDIPQLRHASAQGLVEIGFHGYAIGGLAVGEPQEVMLAMIDETAPMLPKERPRYLMGVGTPDDILEAVKRGIDMFDCVMPTRNGRHGVAFTRFGQVNLRNARHADDPRPLDEESSWPSTRNCARAYLHHLVKAGETLGAMLLSEINVAYYQSLMQGIRDAIAHGTFDEFYQRTREDWARGDIAPR

SEQ ID NO: 52782 - protein, 377 aa, unidentified
  source 1..377: note = Bradyrhizobium icense
  REGION 1..377: note = tr|A0A1B1UH17|A0A1B1UH17_9BRAD Queuine tRNA-ribosyltransferase OS=Bradyrhizobium icense; OX = 1274631 GN=tgt PE=3 SV=1
MNLPNHFELLATNGTARTGRLTTPHGVVQTPAFMPVGTAGAMKGMHWREVRDAGADIVLGNTYHLMLRPGAERIAALGGLQTFTGWNGPMLTDSGGFQVMSLSDLRKVSEKAVTFRSHIDGTKVELSPERSIEVQRLLGSDIAMQMDECVRLPAARDDIERAMRLSLRWAERSKRAFETAPDGYMLFGIVQGGDIPEMRHISARELVDIGFHGYAIGGLAVGEPQAVMLSMIEETAPALPADRPRYLMGVGTPEDLLEAVARGIDMFDCVMPTRNGRHGMAFTRFGQINLRNARHADDPRPLDEESEWPAARNISRAYLHHLVRSGETLGAMLLSEINVAYYQYLMQGMRDAITAGTFEAFQKQTRAGWARGDIAPR

SEQ ID NO: 52783 - protein, 382 aa, Bradyrhizobium japonicum
  REGION 1..382: note = tr|A0A1L3FEW8|A0A1L3FEW8_BRAJP Queuine tRNA-ribosyltransferase OS=Bradyrhizobium japonicum OX=375; GN = tgt PE=3 SV=1
MNLPDTGLPNHFELLATDGAARTGRLTTPHGVVRTPAFMPVGTAGAMKGMHWREVREAGADIVLGNTYHLMLRPGAERISALGGLQRFTGWNGPMLTDSGGFQVMSLSDLRKVTENAVTFRSHIDGAKVELSPERSIEVQRFLGSDIAMQMDECVRLPAERDDIERAMRLSLRWAERSKRAFESAPDGYMLFGIVQGGDVPQLRHASAEGLVAIGFHGYAIGGLAVGEPQAVMLAMIDETAPMLPRERPRYLMGVGTPDDILEAVKRGIDMFDCVMPTRNGRHGVAFTRFGQVNLRNARHADDPRPLDAESSWPSACNYARAYLHHLVKAGETLGAMLLSEINIAYYQFLMQGIRDAIAHGTFDEFYQRTRQDWARGDIAPR

SEQ ID NO: 52784 - protein, 382 aa, Bradyrhizobium japonicum
  REGION 1..382: note = tr|A0A1Y2JB77|A0A1Y2JB77_BRAJP Queuine tRNA-ribosyltransferase OS=Bradyrhizobium japonicum OX=375; GN = tgt PE=3 SV=1
MNLPDTGLPNHFELLATDGAARTGRLTTPHGVVRTPAFMPVGTAGAMKGMHWREVREAGADIVLGNTYHLMLRPGAERISALGGLQRFTGWNGPMLTDSGGFQVMSLSDLRKVTENAVTFRSHIDGAKVELSPERSIEVQRFLGSDIAMQMDECVRLPAERDDIERAMRLSLRWAERSKRAFESAPDGYMLFGIVQGGDVPQLRHASAEGLVAIGFHGYAIGGLAVGEPQAVMLAMIDETAPMLPRERPRYLMGVGTPDDILEAVKRGIDMFDCVMPTRNGRHGVAFTRFGQVNLRNARHADDPRPLDEASSWPSARNYARAYLHHLVKAGETLGAMLLSEINIAYYQFLMQGIRDAIAHGTFDEFYQRTRQDWARGDIAPR

SEQ ID NO: 52785 - protein, 377 aa, Bradyrhizobium jicamae
  REGION 1..377: note = tr|A0A0R3KCQ1|A0A0R3KCQ1_9BRAD Queuine tRNA-ribosyltransferase OS=Bradyrhizobium jicamae; OX = 280332 GN=tgt PE=3 SV=1
MSLPNHFELLATDSAARTGRLTTPHGVVQTPAFMPVGTAGAMKGMHWREVRDAGADIVLGNTYHLMLRPGAERIAALGGLQTFTGWNGPMLTDSGGFQVMSLSDLRKVTEKAVTFRSHIDGAKVELSPERSIEVQRLLGADIAMQMDECVRLPATRDDIERAMRLSLRWAERSKRAFESALDGYMLFGIVQGGDIPEMRHVSACELVEIGFHGYAIGGLAVGEPQVVMLAMVEETAPALPADRPRYLMGVGTPEDLLESVARGIDMFDCVMPTRNGRHGMAFTRFGQINLRNARHADDPRPLDEESEWPAARNYSRAYLHHLVRSGETLGAMLLSEINVAYYQHLMRGMREAIASGMFETFQNQTRAGWARGDIAPR

SEQ ID NO: 52786 - protein, 377 aa, Bradyrhizobium lablabi
  REGION 1..377: note = tr|A0A2H9VCE5|A0A2H9VCE5_9BRAD Queuine tRNA-ribosyltransferase OS=Bradyrhizobium lablabi; OX = 722472 GN=tgt PE=3 SV=1
MSLPNHFELIATDGTARTGRLTTPHGAVQTPAFMPVGTAGAMKGMHWREVRDAGTDIVLGNTYHLMLRPGAERIAALGGLQQFTGWGGPMLTDSGGFQVMSLSELRKVSEHAVTFRSHIDGAKVELSPERSIEVQRLLGSDIAMQMDECVRLPAERADIERAMQLSLRWAERSKRAFETAPTGTMLFGIVQGGDVPALRQTNARGLIDIGFHGYAIGGLAVGEPQAVMLDMIEETAPVLPQDRPRYLMGVGTPEDILEAVARGIDMFDCVMPTRNGRHGMAFTRFGQINLRNARHADDPRPLDEISSWPATQNYSRAYLHHLVRSGETLGAMLLSEINIAYYQQLMGDIRAAIAGGTFEDFKNQTRADWARGDIAVK

SEQ ID NO: 52787 - protein, 377 aa, Bradyrhizobium lablabi
  REGION 1..377: note = tr|A0A0R3ML45|A0A0R3ML45_9BRAD Queuine tRNA-ribosyltransferase OS=Bradyrhizobium lablabi; OX = 722472 GN=tgt PE=3 SV=1
MSLPNHFELLATNGAARTGRLTTPHGVVQTPAFMPVGTAGAMKGMHWREVRDAGADIVLGNTYHLMLRPGAERIAVLGGLQTFTGWNGPMLTDSGGFQVMSLSDLRKVSEKAVTFRSHIDGAKVELSPERSIEVQRLLGADIAMQMDECVRLPAGRDDIERAMRLSLRWAERSKRAFETAPDGYMLFGIVQGGDIPEMRHTSARELVEIGFHGYAIGGLAVGEPQAVMLAMIEETAPALPVDRPRYLMGVGTPEDLLEAVARGIDMFDCVMPTRNGRHGMAFTRFGQINLRNARHADDPRPLDEESEWPSTRNISRAYLHHLVRSGETLGAMLLSEINVAYYQHLMRGMREAISQGAFASFRERTRAGWAKGDIPPR

SEQ ID NO: 52788 - protein, 381 aa, Bradyrhizobium liaoningense
  REGION 1..381: note = tr|A0A151FJG7|A0A151FJG7_9BRAD Queuine tRNA-ribosyltransferase OS=Bradyrhizobium liaoningense; OX = 43992 GN=tgt PE=3 SV=1
MNPDNDLPNHFEVLAADGAARTGRLTTPHGVVRTPAFMPVGTAGAMKGMHWREVRDAGADIVLGNTYHLMLRPSAERIAVLGGLQRFTGWNGPMLTDSGGFQVMSLADLRKVSENAVTFRSHIDGAKVELSPERSIEVQRLLGSDIAMQMDECVRLPAERADIERAMQLSLRWAERSKRAFESAPDGYMLFGIVQGGDIPQLRHASAEGLVTIGFHGYAIGGLAVGEPQAVMLAMIDETAPLLPRERPRYLMGVGTPDDILEAVKRGIDMFDCVMPTRNGRHGVAFTRFGQVNLRNARHADDPRPLDEESSWPAARNYARAYLHHLVKAGETLGAMLLSEINIAYYQFLMQGIRGAIAQGQFDEFYQRTREDWARGDIAPR

SEQ ID NO: 52789 - protein, 376 aa, unidentified
  source 1..376: note = Bradyrhizobium lupini
  REGION 1..376: note = tr|K5D0G1|K5D0G1_RHILU Queuine tRNA-ribosyltransferase OS=Bradyrhizobium lupini HPC(L); OX = 1229491 GN=tgt PE=3 SV=1
MHDKFTFTLKATSGGARLGEVAMPRGVIRTPAFMPVGTVGTVKAMYLDQVRELGADIILGNTYHLMLRPGPERVARLGGLHELIRWPHPILTDSGGFQVMSLSGLRKLDEKGVTFKSHVDGSLHHMSPERSIEIQGLLDSDIQMQLDECIALPAERKEIERAMEMSLRWAERCRVAFGDQPGKAMFGIVQGGDQPDLRIRSAEGLKQLDLKGYAVGGLAVGEPQDVMLGMLDITLPVLPTEKPRYLMGVGTPDDILKSVARGIDMFDCVMPTRSGRHGLAFTRRGKVNIRNARHAEDMRPLDEQSNCPASRDYSRAYLHHLVRANEALGGMLLSWHNLAYYQELMQGIRKSIEEGRFADFYAETIEMWARGDIDPV

SEQ ID NO: 52790 - protein, 377 aa, unidentified
  source 1..377: note = Bradyrhizobium macuxiense
  REGION 1..377: note = tr|A0A560MHG9|A0A560MHG9_9BRAD Queuine tRNA-ribosyltransferase OS=Bradyrhizobium macuxiense; OX = 1755647 GN=tgt PE=3 SV=1
MNLPNHFELLATDGAARTGRLTTPHGLVRTPAFMPVGTAGAMKGMHWREVRDAGADIVLGNTYHLMLRPGAERIARLGGLQRFTGWGGPMLTDSGGFQVMSLSELRKVTEKAVTFRSHIDGAKVELSPERSIEVQRLLGSDIAMQMDECVRLPAERADIERAMQLSLRWAERSKRAFESASDGYMLFGIVQGGDIPDLRHASARSLTDIGFHGYAIGGLAVGEPQAVMLSMIEETAPALPVDRPRYLMGVGTPEDILEAVARGVDMFDCVMPTRNGRHGMAFTRFGQINLRNARHIDDPRPLDEESLWPAARDYSRAYLHHLVRAGETLGAMLLSEINVAYYQELMQGIRAAVASGTFEDFRTKTRAGWARGDIAPM

SEQ ID NO: 52791 - protein, 377 aa, unidentified
  source 1..377: note = Bradyrhizobium macuxiense
  REGION 1..377: note = tr|A0A109JYG3|A0A109JYG3_9BRAD Queuine tRNA-ribosyltransferase OS=Bradyrhizobium macuxiense; OX = 1755647 GN=tgt PE=3 SV=1
MNLPNHFELLATDGAARTGRLTTPHGVVRTPTFMPVGTAGAMKGMHWREVREAGADIVLGNTYHLMLRPGAERVAGLGGLQRFTGWGGPMLTDSGGFQVMSLSELRKVTEKAVTFRSHIDGAKVELSPERSIEVQRLLGSDIAMQMDECVRLPAERADIERAMQLSLRWAERSKRAFEAAPDGYMLFGIAQGGDVPALRQVSARGLTDIGFHGYAIGGLAVGEPQAVMLSMIEETAPALPADRPRYLMGVGTPEDMLEAVARGIDMFDCVMPTRNGRHGMAFTRFGQINLRNARHVDDPRPLDEESPWPAARSYSRAYLHHLVRSGETLGAMLLSEINVAYYQELMQGIRGAIANGTFESFRNQTRAGWARGDITQR

SEQ ID NO: 52792 - protein, 381 aa, unidentified
  source 1..381: note = Bradyrhizobium nanningense
  REGION 1..381: note = tr|A0A4Q0S2M7|A0A4Q0S2M7_9BRAD Queuine tRNA-ribosyltransferase OS=Bradyrhizobium nanningense; OX = 1325118 GN=tgt PE=3 SV=1
MNPDNDLPNHFELLATDGAARTGRLTTPHGVVRTPAFMPVGTAGAMKGMHWREVRDAGADIVLGNTYHLMLRPSAERIAALGGLQKFTGWNGPMLTDSGGFQVMSLSDLRKVTENAVTFRSHIDGAKVELSPERSIEVQRLLGSDIAMQMDECVRLPAERADIERAMQLSLRWAERSKRAFESAPDGYMLFGIVQGGDIPQLRHASAEGLVAIGFHGYAIGGLAVGEPQAVMLAMIDETAPRLPKERPRYLMGVGTPDDILEAVKRGIDMFDCVMPTRNGRHGVAFTRFGQVNLRNARHADDPRPLDEESSWPSARNCARAYLHHLVKAGETLGAMLLSEINIAYYQFLMQGIRNAIAQGTFEEFYQRTREDWARGDIAPR

SEQ ID NO: 52793 - protein, 382 aa, unidentified
  source 1..382: note = Bradyrhizobium neotropicale
  REGION 1..382: note = tr|A0A176YWR0|A0A176YWR0_9BRAD Queuine tRNA-ribosyltransferase OS=Bradyrhizobium neotropicale; OX = 1497615 GN=tgt PE=3 SV=1
MSLPNNSLPNHFELLATDGAARTGRLTTPHGVVRTPAFMPVGTAGAMKGMHWREVRDAGADIVLGNTYHLMLRPGAERIAALGGLQRFTGWNGPMLTDSGGFQVMSLSDLRKVSENAVTFRSHIDGAKVELSPERSIEVQRFLGSDIAMQMDECVRLPAERDDIERAMQLSLRWAERSKRAFESAPDGYMLFGIVQGGDVPQLRHASAEGLVEIGFHGFAIGGLAVGEPQEVMLAMIGETAPALPSDRPRYLMGVGTPDDILEAVKRGIDMFDCVMPTRNGRHGVAFTRFGQVNLRNARHADDPRPLDEESSWPSARNYARAYLHHLVKAGETLGAMLLSEINIAYYQFLMQSIRDAIARGAFEEFYQRTREGWARGDIAPR

SEQ ID NO: 52794 - protein, 384 aa, unidentified
  source 1..384: note = Bradyrhizobium oligotrophicum
  REGION 1..384: note = tr|M4ZUL8|M4ZUL8_9BRAD Queuine tRNA-ribosyltransferase OS=Bradyrhizobium oligotrophicum S58 OX=1245469 GN=tgt PE=3 SV=1
MSSSEGDLPNHFELLGTDGAARTGRLTTPHGVVRTPAFMPVGTAGAMKGVHWRDVRDAGADIVLGNTYHLMLRPGAERIAALGGLQRFTGWGGPMLTDSGGFQVMSLSALRKVTEQAVTFRSHIDGARIELSPERAVEVQRLLNSDIAMQLDECVRLPAGPDDIERAMLLSLRWAERCRRAFETAPAGYMLFGIVQGGDVPDLRVASARALVDIGFHGYAIGGLAVGEPQAVMLQMIEATAPVLPANRPRYLMGVGTPDDLLESVKRGIDMFDCVLPTRNGRHGVAYTRFGPVNLRNARHVDDARPLDEESPWPPARSYARAYLHHLIKAGEALGATLLSEINIAYFQQLMAGMREAIAHGRFSEFYERTKADWARGDIAAHVS

SEQ ID NO: 52795 - protein, 381 aa, unidentified
  source 1..381: note = Bradyrhizobium ottawaense
  REGION 1..381: note = tr|A0A2U8PE45|A0A2U8PE45_9BRAD Queuine tRNA-ribosyltransferase OS=Bradyrhizobium ottawaense; OX = 931866 GN=tgt PE=3 SV=1
MNPDNDLPNHFELLGTDGAARTGRLTTPHGVVRTPAFMPVGTAGAMKGMHWREVRDAGADIVLGNTYHLMLRPSAERIAGLGGLQRFTGWNGPMLTDSGGFQVMSLSDLRKVTENAVTFRSHIDGAKVELSPERSIEVQRLLGSDIAMQMDECVRLPAERADIERAMQLSLRWAERSKRAFESAPDGYMLFGIVQGGDIPQLRHESARGLVATGFHGYAIGGLAVGEPQAVMLAMIDETAPLLPKERPRYLMGVGTPDDILEAVKRGIDMFDCVMPTRNGRHGVAFTRFGQVNLRNARHADDPRPLDEESSWPSARNCARAYLHHLVKAGETLGAMLLSEINIAYYQFLMQGIRDAIAQGRFDEFYQRTRADWARGDIAPR

SEQ ID NO: 52796 - protein, 377 aa, Bradyrhizobium pachyrhizi
  REGION 1..377: note = tr|A0A0R3CLA9|A0A0R3CLA9_9BRAD Queuine tRNA-ribosyltransferase OS=Bradyrhizobium pachyrhizi; OX = 280333 GN=tgt PE=3 SV=1
MTLPNHFELLATDGAARTGRLTTPHGLVRTPAFMPVGTAGAMKGMHWREVRDAGADIVLGNTYHLMLRPGAERIAGLGGLQRFTGWGGPMLTDSGGFQVMSLSELRKVTEKAVTFRSHIDGTKVELSPERSIEVQRLLGSDIAMQMDECVRLPAERADIERAMQLSLRWAERSKRAFEAAPDGYMLFAIVQGGDVPDLRHASARGLTDIGFHGYAIGGLAVGEPQAVMLAMIEETAPALPVDRPRYLMGVGTPEDILEAVARGVDMFDCVMPTRNGRHGMAFTRFGQINLRNARHVDDPRPLDEESPWPAASGYSRAYLHHLVRSGETLGAMLLSEINVAYYQQLMQGIRDAVANGTFEDFRTKTRAGWARGDIAPR

SEQ ID NO: 52797 - protein, 377 aa, unidentified
  source 1..377: note = Bradyrhizobium retamae
  REGION 1..377: note = tr|A0A0R3MY54|A0A0R3MY54_9BRAD Queuine tRNA-ribosyltransferase OS=Bradyrhizobium retamae; OX = 1300035 GN=tgt PE=3 SV=1
MSLPNHFELLATNGTARTGRLTTPHGVVQTPAFMPVGTAGAMKGMHWREVRDAGADIVLGNTYHLMLRPGAERIAALGGLQTFTGWNGPMLTDSGGFQVMSLSDLRKVSEKAVTFRSHIDGAKVELSPERSIEVQRLLGADIAMQMDECVRLPATRDDIERAMRLSLRWAERSKRAFESAPDGNMLFGIVQGGDIPEMRHINARELVDIGFHGYAIGGLAVGEPQAVMLAMIEETAPALPVDRPRYLMGVGTPEDLLEAVARGIDMFDCVLPTRNGRHGMAFTRFGQINLRNARHADDPRPLDEESEWPSARNISRAYLHHLVRSGETLGAMLLSEINVAYYQHLMQGMREAITAGTFETFQEQTRAGWAKGDIPPR

SEQ ID NO: 52798 - protein, 382 aa, unidentified
  source 1..382: note = Bradyrhizobium rifense
  REGION 1..382: note = tr|A0A5D3JYW7|A0A5D3JYW7_9BRAD Queuine tRNA-ribosyltransferase OS=Bradyrhizobium rifense; OX = 515499 GN=tgt PE=3 SV=1
MSLPDTDLPNHFELLATDGSARTGRLTTPHGVVRTPAFMPVGTAGAMKGMHWREVREAGADIVLGNTYHLMLRPGAERIAALGGLQRFTGWNGPMLTDSGGFQVMSLADLRKVTENAVTFRSHIDGAKVELSPERSIEVQRLLGSDIAMQMDECVRLPAERDDIERAMLLSLRWAERSKRAFESAPDGYMLFGIVQGGDIPQLRHASAQGLVEIGFHGYAIGGLAVGEPQAVMLAMIDETAPALPTDRPRYLMGVGTPDDILEAVKRGIDMFDCVMPTRNGRHGVAFTRFGQVNLRNARHADDPRPLDEESSWPSARNYARAYLHHLVKAGETLGAMLLSEINIAYYQFLMQGIRDAIAQGTFEEFYQRTREDWARGDIAPR

SEQ ID NO: 52799 - protein, 455 aa, unidentified
  source 1..455: note = Bradyrhizobium sacchari
  REGION 1..455: note = tr|A0A560KNF7|A0A560KNF7_9BRAD Queuine tRNA-ribosyltransferase OS=Bradyrhizobium sacchari; OX = 1399419 GN=tgt PE=3 SV=1
MKGKALSAAGGSHKYSRRHIHRGIPVQPRIKLHCVVLFGNPGGTHVRVKSVKPGALRGPSGLIGLARHAISTAMNRPDTDLPNHFELLATDGAARTGRLTTPHGVVRTPAFMPVGTAGAMKGMHWREVREAGADIVLGNTYHLMLRPGAERIAALGGLQRFTGWNGPMLTDSGGFQVMSLADLRKVTENAVTFRSHIDGAKVELSPERSIEVQRFLGSDIAMQMDECVRLPAERDDIDRAMRLSLRWAERSKRAFESAPDGYMLFGIVQGGDIPQLRHASAQGLVEIGFHGYAIGGLAVGEPQEVMLAMIDETAPMLPKERPRYLMGVGTPDDILEAVKRGIDMFDCVMPTRNGRHGVAFTRFGQVNLRNARHADDPRPLDEESSWPSTRNCARAYLHHLVKAGETLGAMLLSEINIAYYQSLMQGIRDAVAHGTFDEFYQRTREDWARGDIAPR

SEQ ID NO: 52800 - protein, 381 aa, unidentified
  source 1..381: note = Bradyrhizobium shewense
  REGION 1..381: note = tr|A0A1C3XFS6|A0A1C3XFS6_9BRAD Queuine tRNA-ribosyltransferase OS=Bradyrhizobium shewense; OX = 1761772 GN=tgt PE=3 SV=1
MNPDHDLPNHFELLGTDGAARTGRLTTPHGVVRTPAFMPVGTAGAMKGMHWREVRDAGADIVLGNTYHLMLRPSAERIAALGGLQKFTGWNGPMLTDSGGFQVMSLSDLRKVTENAVTFRSHIDGAKVELSPERSIEVQRLLGSDIAMQMDECVRLPAERADIERATQLSLRWAERSKRAFESAPDGNMLFGIVQGGDIPQLRHESAQGLVATGFHGYAIGGLAVGEPQAVMLAMIDETAPLLPKQRPRYLMGVGTPDDILEAVKRGIDMFDCVMPTRNGRHGVAFTRFGQVNLRNARHADDPRPLDEESSWPSARNCARAYLHHLVKAGETLGAMLLSEINIAYYQFLMQGIRDAIAHGKFDEFYQRTRADWARGDIAPR

SEQ ID NO: 52801 - protein, 382 aa, Bradyrhizobium sp.
  REGION 1..382: note = tr|A0A1Y6KHK2|A0A1Y6KHK2_9BRAD Queuine tRNA-ribosyltransferase OS=Bradyrhizobium sp. ORS 285; OX = 115808 GN=tgt PE=3 SV=1
MSSPANDLPNHFELLGTDGATRTGRLTTPHGVVRTPAFMPVGTAGAMKGIHWRDVREAGADIVLGNTYHLMLRPTAERIAALGGLQRFTGWGGPMLTDSGGFQVMSLSGLRKVTEQAVTFRSHIDGAKIELSPERAIEVQRLLNSDIAMQLDECVRLPAEPADIERAMRLSLRWAERCRRAFESAPAGYMLFGIVQGGDVPALRVASAQALVDIGFHGYAIGGLAVGEPQAVMLEMIEATVPALPADRPRYLMGVGTPDDLLESVKRGVDMFDCVLPTRNGRHGVAYTRFGPVNLRNARHADDARPLDEESPWPPARSYARAYLHHLIKAGEALGATLLSEINIAYFQQLMAGMREAIAQGRFTEFYERTKADWAHGDIAPL

SEQ ID NO: 52802 - protein, 377 aa, Bradyrhizobium sp.
  REGION 1..377: note = tr|A0A1B9YQA1|A0A1B9YQA1_9BRAD Queuine tRNA-ribosyltransferase OS=Bradyrhizobium sp. LMTR 3; OX = 189873 GN=tgt PE=3 SV=1
MSLPNHFELLATNGTARTGRLTTPHGVVQTPAFMPVGTAGAMKGMHWREVRDAGADIVLGNTYHLMLRPGAERIAALGGLQAFTGWNGPMLTDSGGFQVMSLSDLRKVSEKAVTFRSHIDGAKVELSPERSIEVQRLLGADIAMQMDECVRLPAERSDIERAMRLSLRWAERSKRAFESAPEGYMLFGIVQGGDIPEMRHINARELVDIGFHGYAIGGLAVGEPQAVMLAMIEETAPALPVDRPRYLMGVGTPEDLMEAVARGIDMFDCVMPTRNGRHGMAFTRFGQINLRNARHADDPRPLDEESEWPSARNISRAYLHHLVRSGETLGAMLLSEINVAYYQRLMQGMRDAITAGTFGTFQEQTRAGWAKGDIPPR

SEQ ID NO: 52803 - protein, 382 aa, unidentified
  source 1..382: note = Bradyrhizobium stylosanthis
  REGION 1..382: note = tr|A0A560DIP2|A0A560DIP2_9BRAD Queuine tRNA-ribosyltransferase OS=Bradyrhizobium stylosanthis; OX = 1803665 GN=tgt PE=3 SV=1
MNPSDTSLPSHFELLGTDGAARTGRLTTPHGVVRTPAFMPVGTAGAMKGMHWREVRDAGADIVLGNTYHLMLRPGAERIAALGGLQTFTGWNGPMLTDSGGFQVMSLADLRKVSEHAVTFRSHIDGAKVELSPERSIEVQRYLGSDIAMQMDECVRLPAERDDIDRAMRLSLRWAERSKRAFESAPDGYMLFGIVQGGDIPQLRHASAQGLVEIGFHGYAIGGLAVGEPQAVMLAMIDETAPLLPQERPRYLMGVGTPDDILEAVKRGIDMFDCVMPTRNGRHGVAFTRFGQVNLRNARHADDPRPLDAESPWPSTRNYARAYLHHLVKAGETLGAMLLSEINIAYYQFLMQGIRDAIAHGTFDEFYQRTREDWARGDIAPR

SEQ ID NO: 52804 - protein, 377 aa, unidentified
  source 1..377: note = Bradyrhizobium valentinum
  REGION 1..377: note = tr|A0A0R3KNI0|A0A0R3KNI0_9BRAD Queuine tRNA-ribosyltransferase OS=Bradyrhizobium valentinum; OX = 1518501 GN=tgt PE=3 SV=1
MNLPNHFELLATDGAARTGRLTTPHGVVHTPAFMPVGTAGAMKGMHWREVRDAGADIVLGNTYHLMLRPGAERIAALGGLQAFTGWNGPMLTDSGGFQVMSLSDLRKVSEKAVTFRSHIDGAKVELSPERSIEVQRLLGADIAMQMDECVRLPAGRDDIERAMRLSLRWAERSKRAFETAPDGYMLFGIVQGGDIPEMRHVSARELVEIGFHGYAIGGLAVGEPQAVMLSMIEETAPALPVDRPRYLMGVGTPEDLMEAVARGIDMFDCVLPTRNGRHGMAFTRFGQINLRNARHADDPRPLDEESEWPSARNISRAYLHHLVRSGETLGAMLLSEINVAYYQHLMRGMREAIAGGTFETFQKQTRAGWARGDIAPR

SEQ ID NO: 52805 - protein, 381 aa, unidentified
  source 1..381: note = Bradyrhizobium vignae
  REGION 1..381: note = tr|A0A4Q0R1J7|A0A4Q0R1J7_9BRAD Queuine tRNA-ribosyltransferase OS=Bradyrhizobium vignae; OX = 1549949 GN=tgt PE=3 SV=1
MNPDDDVPNHFELLATDGAARTGRLTTPHGVVRTPAFMPVGTAGAMKGMHWREVRDAGADIVLGNTYHLMLRPSAERIAALGGLQRFTGWNGPMLTDSGGFQVMSLSDLRKVSENAVTFRSHIDGAKVELSPERSIEVQRLLGSDIAMQMDECVRLPAEHADIERAMQLSLRWAERSKRAFESAPAGYMLFGIVQGGDVPQLRHASARGLVAVGFHGYAIGGLAVGEPQAVMLAMIDETAPLLPRERPRYLMGVGTPDDILEAVKRGIDMFDCVMPTRNGRHGVAFTRFGQVNLRNARHADDPRPLDEESSWPSTRNCARAYLHHLVKAGETLGAMLLSEINVAYYQSLMRGVRDAIAHGKFDEFYQRTREDWARGDIAPR

SEQ ID NO: 52806 - protein, 381 aa, Bradyrhizobium yuanmingense
  REGION 1..381: note = tr|A0A0R3C8I6|A0A0R3C8I6_9BRAD Queuine tRNA-ribosyltransferase OS=Bradyrhizobium yuanmingense; OX = 108015 GN=tgt PE=3 SV=1
MNPDNDLPNHFELLATDGAARTGRLTTPHGVVRTPAFMPVGTAGAMKGMHWREVRDAGADIVLGNTYHLMLRPSAERIAALGGLQTFTGWNGPMLTDSGGFQVMSLADLRKVSEHAVTFRSHIDGAKVELSPERSIEVQRLLGSDIAMQMDECVRLPAERADIERAMQLSLRWAERSKRAFASAPDGYMLFGIVQGGDVPELRHASAQSLVGIGFHGYAIGGLAVGEPQAVMLAMIDETAPLLPKQRPRYLMGVGTPDDILEAVKRGIDMFDCVMPTRNGRHGVAFTRYGQVNLRNARHADDPRPLDEESSWPSTRNCARAYLHHLVKAGETLGAMLLSEINVAYYQSLMQGIRDAIAQGNFEEFYQRTRADWARGDIAPR

SEQ ID NO: 52807 - protein, 381 aa, Bradyrhizobium yuanmingense
  REGION 1..381: note = tr|A0A1C3W527|A0A1C3W527_9BRAD Queuine tRNA-ribosyltransferase OS=Bradyrhizobium yuanmingense; OX = 108015 GN=tgt PE=3 SV=1
MNPDNDLPNHFELLATDGAARTGRLTTPHGVVRTPAFMPVGTAGAMKGMHWREVRDAGADIVLGNTYHLMLRPSAERIAALGGLQTFTGWNGPMLTDSGGFQVMSLADLRKVSEHAVTFRSHIDGAKVELSPERSIEVQRLLGSDIAMQMDECVRLPAERADIERAMQLSLRWAERSKRAFASAPDGYMLFGIVQGGDVPELRHASAQGLVGIGFHGYAIGGLAVGEPQAVMLAMIDETAPLLPKQRPRYLMGVGTPDDILEAVKRGIDMFDCVMPTRNGRHGVAFTRYGQVNLRNARHADDPRPLDEESSWPSTRNCARAYLHHLVKAGETLGAMLLSEINVAYYQSLMQGIRDAIAQGNFEEFYQRTRADWARGDIAPR

SEQ ID NO: 52808 - protein, 381 aa, unidentified
  source 1..381: note = Bradyrhizobium zhanjiangense
  REGION 1..381: note = tr|A0A4Q0QHJ8|A0A4Q0QHJ8_9BRAD Queuine tRNA-ribosyltransferase OS=Bradyrhizobium zhanjiangense; OX = 1325107 GN=tgt PE=3 SV=1
MNPDNDLPNHFELLATDGAARTGRLTTPHGVVRTPAFMPVGTAGAMKGMHWREVRDAGADIVLGNTYHLMLRPGAERIAALGGLQTFTGWNGPMLTDSGGFQVMSLADLRKVSEHAVTFRSHIDGAKVELSPERSIEVQRFLGSDIAMQMDECVRLPAERDDIERAMRLSLRWAERSKRAFTSAPAGYMLFGIVQGGDVPQLRHASAQGLVEIGFHGYAIGGLAVGEPQAVMLAMIDETAPLLPRERPRYLMGVGTPDDILEAVKRGIDMFDCVMPTRNGRHGVAFTRFGQVNLRNARHADDPRPLDEESSWPSTRSCARAYLHHLVKAGETLGAMLLSEINVAYYQSLMQGIRDAVAQGRFEEFYQRTREDWTRGDIAPR

SEQ ID NO: 52809 - protein, 381 aa, unidentified
  source 1..381: note = Bradyrhizobium zhanjiangense
  REGION 1..381: note = tr|A0A4Q0SCC7|A0A4Q0SCC7_9BRAD Queuine tRNA-ribosyltransferase OS=Bradyrhizobium zhanjiangense; OX = 1325107 GN=tgt PE=3 SV=1
MNPDNDLPNHFELLATDGAARTGRLTTPHGTVRTPTFMPVGTAGAMKGMHWREVRDAGADIVLGNTYHLMLRPGAERIAALGGLQTFTGWNGPMLTDSGGFQVMSLADLRKVSEHAVTFRSHIDGAKVELSPERSIEVQRFLGSDIAMQMDECVRLPAERDDIERAMRLSLRWAERSKRAFTSAPAGYMLFGIVQGGDVPQLRHASAQGLVEIGFHGYAIGGLAVGEPQAVMLAMIDETAPLLPRERPRYLMGVGTPDDILEAVKRGVDMFDCVMPTRNGRHGVAFTRFGQVNLRNARHADDPRPLDEESSWPSTRSCARAYLHHLVKAGETLGAMLLSEINVAYYQSLMQGIRDAVAQGRFEEFYQRTREDWTRGDIAPR

SEQ ID NO: 52810 - protein, 381 aa, Brenneria alni
  REGION 1..381: note = tr|A0A421DT74|A0A421DT74_9GAMM Queuine tRNA-ribosyltransferase OS=Brenneria alni OX=71656 GN=tgt; PE = 3 SV=1
MKYELQKTDGHARRGRLIFERGVVETPAFMPVGTYGTVKGMTPEEVKDTGAQILLGNTFHLWLRPGQEIMKLHGDLHDFMQWHGPILTDSGGFQVFSLGDIRKITEEGVHFRNPINGDAIFLSPEKSMEIQYDLGSDVVMIFDECTPYPADWDYAKRSMEMSLRWAKRCRQRFDELNNKNALFGIIQGSVYEDLRDVSVKGLVDIGFDGYAVGGLAVGEPKEDMHRILEHVCPQIPADKPRYLMGVGKPEDLVEGVRRGIDMFDCVMPTRNARNGHLFVTDGVVKIRNAKHKDDVNPLDEHCDCYTCRNYSRAYLHHLDRCNEILGARLNTIHNLRYYQRLMAGLRQAIEEGKLEHFVADFYQRIGKLVPSLAEKDIADSN

SEQ ID NO: 52811 - protein, 381 aa, unidentified
  source 1..381: note = Brenneria goodwinii
  REGION 1..381: note = tr|A0A0G4JPS8|A0A0G4JPS8_9GAMM Queuine tRNA-ribosyltransferase OS=Brenneria goodwinii OX=1109412; GN = tgt PE=3 SV=1
MKYELQKTDGRARRGRLIFERGVVETPAFMPVGTYGTVKGMTPEEVKDTGAQILLGNTFHLWLRPGQEIMKLHGDLHDFMQWHGPILTDSGGFQVFSLGDIRKITEEGVHFRNPINGDAIFLSPEKSMEIQYDLGSDVVMIFDECTPYPAEWDYAKRSMEMSLRWAKRCRQRFDELNNKNALFGIIQGSVYEDLRDVSVKELVDIGFDGYAVGGLAVGEPKEDMHRILEHVCPQIPADKPRYLMGVGKPEDLVEGVRRGIDMFDCVMPTRNARNGHLFVTDGVVKIRNAKHRDDVLPLDEHCDCYTCRNYSRAYLHHLDRCNEILGARLNTIHNLRYYQRLMAGLRQAIEEGKLDHFVVDFYQRMGKPVPPLAEKNVADSN

SEQ ID NO: 52812 - protein, 381 aa, unidentified
  source 1..381: note = Brenneria goodwinii
  REGION 1..381: note = tr|A0A250BFM9|A0A250BFM9_9GAMM Queuine tRNA-ribosyltransferase OS=Brenneria goodwinii OX=1109412; GN = tgt PE=3 SV=1
MKYELQKTDGRARRGRLIFERGVVETPAFMPVGTYGTVKGMTPEEVKDTGAQILLGNTFHLWLRPGQEIMKLHGDLHDFMQWHGPILTDSGGFQVFSLGDIRKITEEGVHFRNPINGDAIFLSPEKSMEIQYDLGSDVVMIFDECTPYPAEWDYAKRSMEMSLRWAKRCRQRFDELNNKNALFGIIQGSVYEDLRDVSVKELVDIGFDGYAVGGLAVGEPKEDMHRILEHVCPQIPADKPRYLMGVGKPEDLVEGVRRGIDMFDCVMPTRNARNGHLFVTDGVVKIRNAKHRDDVRPLDEHCDCYTCRNYSRAYLHHLDRCNEILGARLNTIHNLRYYQRLMAGLRQAIEEGKLDHFVVDFYQRMGKPVPPLAEKNVADSN

SEQ ID NO: 52813 - protein, 385 aa, Brenneria nigrifluens
  REGION 1..385: note = tr|A0A2U1UW18|A0A2U1UW18_9GAMM Queuine tRNA-ribosyltransferase OS=Brenneria nigrifluens DSM 30175 = ATCC 13028 OX=1121120 GN=tgt PE=3 SV=1
MKYELQTTDGRARRGRLIFERGVVETPAFMPVGTYGTVKGMTPEEVKESGAQILLGNTFHLWLRPGQEIMKLHGDLHGFMQWHGPILTDSGGFQVFSLGDIRKITEEGVHFRNPINGDAIFLSPEKSMEIQYDLGSDVVMIFDECTPYPADWDYAKRSMEMSLRWAKRSRQRFDELNNNNALFGIIQGGVYEDLRDVSVKGLVDIGFDGYAVGGLAVGEPKEDMHRILEHVCPQIPADKPRYLMGVGKPEDLVEGVRRGIDMFDCVMPTRNARNGHLFVTDGVVKIRNAQHKDDVSPLDEHCDCYTCRNYSRAYLHHLDRCNEILGARLNTIHNLRYYQRLMAGLRQAIEEGKLEHFVVDFYQRIGKPIPPLAEKTLLTVTDRQL

SEQ ID NO: 52814 - protein, 381 aa, unidentified
  source 1..381: note = Brenneria roseae
  REGION 1..381: note = tr|A0A2U1U007|A0A2U1U007_9GAMM Queuine tRNA-ribosyltransferase OS=Brenneria roseae subsp. americana OX=1508507 GN=tgt PE=3 SV=1
MKYELHKTDGRARRGRMIFERGVVETPAFMPVGTYGTVKGMTPEEVKETGAQILLGNTFHLWLRPGQEIMKLHGDLHDFMQWHGPILTDSGGFQVFSLGDIRKITEEGVHFRNPINGDSIFLSPEKSMEIQYDLGSDIVMIFDECTPYPADWDYAKRSMEMSLRWAKRSRQRFNELNNKNALFGIIQGSVYEDLRDVSVKGLVDIGFDGYAVGGLAVGEPKEDMHRILEHVCPQIPADKPRYLMGVGKPEDLVEGVRRGIDMFDCVMPTRNARNGHLFVTDGVVKIRNARHKDDVSPLDEHCDCYTCRNYSRAYLHHLDRCNEILGARLNTIHNLRYYQRLMAGLRQAIEEGKLEHFVMDFYQRIGKPIPPLAEKDVAQSN

SEQ ID NO: 52815 - protein, 381 aa, Brenneria rubrifaciens
  REGION 1..381: note = tr|A0A4P8QWU3|A0A4P8QWU3_9GAMM Queuine tRNA-ribosyltransferase OS=Brenneria rubrifaciens OX=55213; GN = tgt PE=3 SV=1
MKYELQKKDGRARRGRLIFERGVVETPAFMPVGTYGTVKGMTPEEVRDTGAQILLGNTFHLWLRPGQEIMKLHGDLHGFMQWHGPILTDSGGFQVFSLGDIRKITEEGVHFRNPINGDSIFLSPEKSMEIQYDLGSDIVMIFDECTPYPAERDYAKRSMEMSLRWAQRSRQRFNELNNKNALFGIVQGSVYEDLRDVSVKGLVDIGFDGYAVGGLAVGEPKEDMHRILEHVCPQIPEDKPRYLMGVGKPEDLVEGVRRGIDMFDCVMPTRNARNGHLFVTDGVVKIRNAKHKDDVSPLDEHCDCYTCRNYSRAYLHHLDRCNEILGARLNTIHNLRYYQRLMAGLRQAIEESKLERFVVDFYRRIGKPVPPLTEKGVAPSH

SEQ ID NO: 52816 - protein, 381 aa, Brenneria salicis
  REGION 1..381: note = tr|A0A366IE50|A0A366IE50_9GAMM Queuine tRNA-ribosyltransferase OS=Brenneria salicis ATCC 15712 = DSM 30166 OX=714314 GN=tgt PE=3 SV=1
MKFQLQTTDGRARRGKLTFERGVVETPAFMPVGTYGTVKGMTPEEVKDTGAQILLGNTFHLWLRPGQEIMKLHGDLHDFMQWHGPILTDSGGFQVFSLGDIRKITEEGVHFRNPINGDAIFLSPEKSMEIQYDLGSDIVMIFDECTPYPADWDYAKRSMEMSLRWARRSRQRFNALNNHNALFGIIQGGVYEDLRDVSVKGLVDIGFDGYAVGGLAVGEPKADMHRILEHVCPQIPEDKPRYLMGVGKPEDLVEGVRRGIDMFDCVMPTRNARNGHLFVTDGVVKIRNARHKDDVSPLDEHCDCYTCRSYSCAYLHHLDRCNEILGARLNTIHNLRYYQRLMAGLRQAIEEGKLEHFVVEFYQRIGKPIPPLAEKDVAQSN

SEQ ID NO: 52817 - protein, 381 aa, Brenneria sp.
  REGION 1..381: note = tr|A0A2U1UA12|A0A2U1UA12_9GAMM Queuine tRNA-ribosyltransferase OS=Brenneria sp. CFCC 11842; OX = 2173106 GN=tgt PE=3 SV=1
MKYELQTTDGRARRGRLIFERGVVETPAFMPVGTYGTVKGMTPEEVKETGAQILLGNTFHLWLRPGQEIMKLHGDLHDFMQWHGPILTDSGGFQVFSLGDIRKITEEGVHFRNPINGDAIFLSPEKSMEIQYDLGSDVVMIFDECTPYPADWDYAKRSMEMSLRWAKRSRQRFDELNNNNALFGIIQGGVYEDLRDVSVKGLVDIGFDGYAVGGLAVGEPKADMHRILEHVCPQIPADKPRYLMGVGKPEDLVEGVRRGIDMFDCVMPTRNARNGHLFVTDGVVKIRNAQHKDDVSPLDAHCDCYTCRNYSRAYLHHLDRCNEILGARLNTIHNLRYYQRLMAGLRQAIEEGKLEHFVVDFYQRIGKPIPPLADKNVADSN

SEQ ID NO: 52818 - protein, 384 aa, Brenneria sp.
  REGION 1..384: note = tr|A0A5J5G0K8|A0A5J5G0K8_9GAMM tRNA guanosine(34) transglycosylase Tgt OS=Brenneria sp. L3-3HA OX=2590031; GN = tgt PE=4 SV=1
MKFELQTTDGQARRGRLIFERGVVDTPAFMPVGTYGTVKGMTPEEVKDTGAQILLGNTFHLWLRPGQEIMKLHGDLHDFMQWHGPILTDSGGFQVFSLGDIRKITEEGVHFRNPINGDAIFLSPEKSMEIQHDLGSDVVMIFDECTPYPADWDYAKRSMEMSLRWAKRCRQRFDELGNRNALFGIIQGSVYEDLRDVSVKGLVDIGFDGYAVGGLAVGEPKADMHRILEHVCPQIPADKPRYLMGVGKPEDLVEGVRRGIDMFDCVMPTRNARNGHLFVTDGVVKIRNTRYKDDTGPLDEHCDCYTCRNYSRAYLHHLDRCNEILGARLNTIHNLRYYQRLMAALRQAIGEGKLDRFVADFYQRTGKPVPPLARTAVDDEVSPD

SEQ ID NO: 52819 - protein, 382 aa, Breoghania corrubedonensis
  REGION 1..382: note = tr|A0A2T5VB90|A0A2T5VB90_9RHIZ Queuine tRNA-ribosyltransferase OS=Breoghania corrubedonensis; OX = 665038 GN=tgt PE=3 SV=1
MTTEAFSFSLLATDGMARRGEVKTPHGLVRTPAFMPVGTQATVKAMYPEQVRELGADVVLGNTYHLMLRPTAERVARLGGLHTFMNWQHTILTDSGGFQVMSLAQIRKLSEKGVTFQSHIDGSRHEMTPERSIEIQGLLGSDIQMQLDECLRLPAERKEVERAMQLSLRWAERSRAQFEKMGGPGKGRGLYGIVQGGDVADLRVASAQALSQMPFEGYSIGGLAVGEPQDVMLRMLEITTPVLPTTKPRYLMGVGTPDDIVESVARGVDMFDCVMPTRAGRHGLAYTRFGKINLKNARHADDPRPLDEESSCPGARTYSRAYLHHLIRAGEGLGGMLLTWNNLAYYQSMMQGIRDAIEAGRFADFKAEVKEGWAKGDLPALG

SEQ ID NO: 52820 - protein, 386 aa, Breoghania sp.
  REGION 1..386: note = tr|A0A346R253|A0A346R253_9RHIZ Queuine tRNA-ribosyltransferase OS=Breoghania sp. L-A4 OX=2304600; GN = tgt PE=3 SV=1
MSVEPTPKPFGFKLITTDGMARRGTVSTPHGEVRTPAFMPVGTQATVKVMYPEQVRELGSDVVLGNTYHLMLRPTAERVARLGGLHRFMNWPHTILTDSGGFQVMSLAQLRKLDENGVTFQSHIDGSRHELTPERSIEIQGLLGSDIQMQFDECIRLPASREEVERAMQLSLRWAQRSRDKFEAMGGPAKGQGLFGIVQGGDVADLRIESAQKLSELPFEGYSVGGLAVGEPQDVMLKMLEITTPVLPAHKPRYLMGVGTPDDLIESVARGIDMFDCVMPTRAGRHGVAYTRRGRINLKNARHADDPRPLDETSTCQAANTYSRAYLHHLIKAGEGLGAMLLTWNNLHYYQSLMQGIRDAIEAKRFAEHRIEVKAEWERGDLAEVG

SEQ ID NO: 52821 - protein, 365 aa, unidentified
  source 1..365: note = Brevefilum fermentans
  REGION 1..365: note = tr|A0A1Y6K3D9|A0A1Y6K3D9_9CHLR tRNA-guanine transglycosylase, various specificities OS=Brevefilum fermentans OX=1986204 GN=CFX1CAM_1011 PE=4 SV=1
MQTPQKMQIRDKALTLPAFLPDATLGYVRAVDSRDLESVGIQGLVMNTFHLMQKPGSSTIQSFSGLHNFADWHKVIVTDSGGFQAYSLIHQSEQFGTLTDRGILFRPDGKGRKLLLSPEKSIQLQISYGSDVVICLDDCTHVDASRAQQEISVKRTLDWAKRCKQEYNLQLDQRKISDVDRPLIFSVIQGGGYADLRKMCADGLLEIGFDAFGYGGWPLNSQGQLLTDIVGLTRELVPSSYHMHALGIGHPLNLVKTFRLGYDLFDCALPTRDARHGRLMRYNLPPDQPLQGEDWLEYVYLQDKKHIKVDRPISDDCDCPVCQHYSLGYLHHLFKTGDWLYYRLATLHNLRFMTQLTERLQNDHG

SEQ ID NO: 52822 - protein, 374 aa, unidentified
  source 1..374: note = Brevefilum fermentans
  REGION 1..374: note = tr|A0A1Y6K7H7|A0A1Y6K7H7_9CHLR Queuine tRNA-ribosyltransferase OS=Brevefilum fermentans; OX = 1986204 GN=tgt PE=3 SV=1
MQKPEKPSDTFTFELLAQDGDARVGVFHTPHGSIPTPIFAPVGTQATVKSLTQRHLRELDAKLILANTYHLYLRPGDDLIAEMGGLHKFMSWSGPILTDSGGFQVFSLADTRRVDEEGVTFKSHIDGSTHRFTPELSVAIQENLGSDIIMAFDECAEPYDREYNQRAVERTHRWAERCLAAKKRTDQALFGIVQGGAFPDLREASARVIAGLDLPGNAIGGLSVGETKPEMHQMIRVVNAVLPVEKPRYLMGVGTPQDLVECVGLGVDLFDCVLPTRLARHNAAMTDSGQMNLMNTRYARDERPISETCTCYTCQTHSRAYIRHLIQAREMLSGTLLSIHNVHTLLNLVARLRAAISAGEYAHFARAYLSNLNS

SEQ ID NO: 52823 - protein, 376 aa, Brevibacillus agri
  REGION 1..376: note = tr|A0A3M8AUD8|A0A3M8AUD8_9BACL Queuine tRNA-ribosyltransferase OS=Brevibacillus agri OX=51101; GN = tgt PE=3 SV=1
MAVRYELIKTCKQTGARLGKLHTPHGTIDTPVFMPVGTQATVKTMSPEELKAIGAGIILSNTYHLFLRPGHEIVREAGGLHGFMNWDRAILTDSGGFQVFSLSNLRKITEEGVSFRSHLNGEKLFIGPEEATQIQNALGADIFMAFDECAPYPAEYDYVKKSMERTTRWAERCLKAHSRPNEQALFGIVQGGMFNDLREQSAKDLISMDFPGYAIGGLSVGEPFSLMYEVLEHTVPLLPAGKPRYLMGVGSPDALIDGAIRGIDMFDCVLPTRIARNGTCMTSQGRLVIRNAKYARDFTPLDPNCDCYTCKNYTRAYIRHLIKAEETFGIRLTTYHNLHFLVKLMEQVRQAIAEDRLQDFRDQFFAQYGLSEDRSF

SEQ ID NO: 52824 - protein, 376 aa, Brevibacillus borstelensis
  REGION 1..376: note = tr|M8E0E5|M8E0E5_9BACL Queuine tRNA-ribosyltransferase OS=Brevibacillus borstelensis AK1; OX = 1300222 GN=tgt PE=3 SV=1
MAVRYELIKTCKQTGARLGKLHTPHGTIDTPVFMPVGTQATVKTMSPEELKELGAGIILSNTYHLFLRPGHEIVREAGGLHGFMNWDRAILTDSGGFQVFSLSNLRKITEEGVSFRSHLNGEKLFIGPEEATQIQNALGADIFMAFDECAPYPAEYDYVKKSMERTSRWAERCLKAHTRPNEQALFGIVQGGMFKDLREISARDLVSMDFPGYAIGGLSVGEPFPLMYEILEHTVPLLPTGKARYLMGVGSPDALIEGAMRGIDMFDCVLPTRIARNGTCMTSQGRLVIRNAKYARDFGPLDPNCSCYTCKNYTRAYIRHLVKAEETFGIRLTTYHNLHFLVNLMKEVRQAIAEDRLGDFRDQFFAQYGLSEDRSF

SEQ ID NO: 52825 - protein, 376 aa, Brevibacillus brevis
  REGION 1..376: note = tr|C0ZAN9|C0ZAN9_BREBN Queuine tRNA-ribosyltransferase OS=Brevibacillus brevis (strain 47 / JCM 6285 / NBRC 100599) OX=358681 GN=tgt PE=3 SV=1
MAVRYELIKTCKQTGARLGKLHTPHGTIDTPVFMPVGTQATVKTMSPEELKAIGAGIILSNTYHLFLRPGHEIVREAGGLHGFMNWDRAILTDSGGFQVFSLSNLRKITEEGVSFRSHLNGEKLFIGPEEATQIQNALGADIFMAFDECAPYPAEYDYVKKSMERTTRWAERCLKAHTRPNEQALFGIVQGGMFNDLRAQSARDLVSMDFPGYAIGGLSVGEPFPLMYEVLEHTVPLLPTSKARYLMGVGSPDALIEGAIRGIDMFDCVLPTRIARNGTCMTSQGRLVIRNAKYARDFTPLDPNCDCYTCKNYTRAYIRHLVKSEETFGIRLTTYHNLHFLVKLMEQVRQAIAEDRLQDFRDQFFAQYGLGEDRSF

SEQ ID NO: 52826 - protein, 376 aa, Brevibacillus brevis; identical to SEQ ID NO: 52825
  REGION 1..376: note = tr|A0A0J6BLP8|A0A0J6BLP8_BREBE Queuine tRNA-ribosyltransferase OS=Brevibacillus brevis OX=1393; GN = tgt PE=3 SV=1

SEQ ID NO: 52827 - protein, 376 aa, Brevibacillus choshinensis
  REGION 1..376: note = tr|A0A0Q3T490|A0A0Q3T490_BRECH Queuine tRNA-ribosyltransferase OS=Brevibacillus choshinensis; OX = 54911 GN=tgt PE=3 SV=1
MAVRYELIKTCKQTGARLGKLHTPHGTIDTPVFMPVGTQATVKTMSPEELKAMGAGIILSNTYHLFLRPGHEIVREAGGLHGFMNWDRAILTDSGGFQVFSLSNLRKITEEGVSFRSHLNGEKLFLGPEEATQIQNALGADIFMAFDECAPYPAEYDYVQKSMERTTRWAERCLKAHTRPNEQALFGIVQGGMYHDLRAQSARDLVSMDFPGYAIGGLSVGEPFPLMYEVLESTVPLLPTNKPRYLMGVGSPDALIDGAIRGIDMFDCVLPTRIARNGTCMTSQGRLVIRNAKYARDFTPLDPNCDCYTCKNYTRAYIRHLVKSEETFGIRLTTYHNLHFLVKLMENVRQAIAEDRLQDFRDQFFAQYGLGEDRSF

SEQ ID NO: 52828 - protein, 376 aa, Brevibacillus fluminis
  REGION 1..376: note = tr|A0A3M8DR38|A0A3M8DR38_9BACL Queuine tRNA-ribosyltransferase OS=Brevibacillus fluminis; OX = 511487 GN=tgt PE=3 SV=1
MAVRYELIKTCKQTGARLGKLHTPHGTIDTPVFMPVGTQATVKTMSPEEISEMGAGILLSNTYHLFLRPGHEIVREAGGLHKFMNWPGAILTDSGGFQVFSLSKLRKITEEGVSFRSHLNGESLFIGPEEAMKIQNALGADIIMAFDECAPYPADYDYVKQSMERTTRWAERCLTAHERKADQALFGIVQGGMYHDLRAQSARDLVSLDFPGYAVGGLSVGEPFPLMYEVLESTVPLLPSNKPRYLMGVGSPDALVEGAIRGIDMFDCVLPTRIARNGTCMTSQGRLVIRNAKFARDFGPLDPECDCYTCRNYSRAYLRHLIKAEETFGIRLTTYHNLYFLIKLMERVRQAIAEDRLGDFRDQFFAQYGLGENRSF

SEQ ID NO: 52829 - protein, 376 aa, Brevibacillus formosus
  REGION 1..376: note = tr|A0A220MD38|A0A220MD38_9BACL Queuine tRNA-ribosyltransferase OS=Brevibacillus formosus OX=54913; GN = tgt PE=3 SV=1
MAVRYELIKTCKQTGARLGKLHTPHGTIDTPVFMPVGTQATVKTMSPEELKALGAGIILSNTYHLFLRPGHEIVREAGGLHGFMNWDRAILTDSGGFQVFSLSNLRKITEEGVSFRSHLNGEKLFIGPEEATQIQNALGADIFMAFDECAPYPAEYDYVKKSMERTTRWAERCLKAHTRPNEQALFGIVQGGMFNDLRAQSARDLVSMDFPGYAIGGLSVGEPFPLMYEVLEHTVPLLPTSKARYLMGVGSPDALIEGAIRGIDMFDCVLPTRIARNGTCMTSQGRLVIRNAKYARDFTPLDPNCDCYTCKNFTRAYIRHLVKSEETFGIRLTTYHNLHFLVKLMEQVRQAIAEDRLQDFRDQFFAQYGLGEDRSF

SEQ ID NO: 52830 - protein, 376 aa, Brevibacillus formosus
  REGION 1..376: note = tr|A0A4Y4HZ37|A0A4Y4HZ37_9BACL Queuine tRNA-ribosyltransferase OS=Brevibacillus formosus OX=54913; GN = tgt PE=3 SV=1
MAVRYELIKTCKQTGARLGKLHTPHGTIDTPVFMPVGTQATVKTMSPEELKTIGAGIILSNTYHLFLRPGHEIVREAGGLHGFMNWDRAILTDSGGFQVFSLSNLRKITEEGVSFRSHLNGEKLFIGPEEATQIQNALGADIFMAFDECAPYPAEYDYVKKSMERTTRWAERCLKAHTRPNEQALFGIVQGGMFNDLRAQSARDLVSMDFPGYAIGGLSVGEPFPLMYEVLEHTVPLLPTSKARYLMGVGSPDALIEGAIRGVDMFDCVLPTRIARNGTCMTSQGRLVIRNAKYARDFTPLDPNCDCYTCKNYTRAYIRHLVKSEETFGIRLTTYHNLHFLVKLMEQVRQAIAEDRLQDFRDQFFAQYGLGEDRSF

SEQ ID NO: 52831 - protein, 376 aa, unidentified
  source 1..376: note = Brevibacillus gelatini
  REGION 1..376: note = tr|A0A3M8ATI1|A0A3M8ATI1_9BACL Queuine tRNA-ribosyltransferase OS=Brevibacillus gelatini; OX = 1655277 GN=tgt PE=3 SV=1
MAVRYELIKTCKQTGARLGKLHTPHGTIDTPVFMPVGTQATVKTMSPEELKAIGAGIILSNTYHLFLRPGHEIVREAGGLHGFMNWDRAILTDSGGFQVFSLSNLRKITEEGVSFRSHLNGEKLFIGPEEATQIQNALGADIFMAFDECAPYPAEYDYVKKSMERTTRWAERCLKAHARPNEQALFGIVQGGMFKDLREQSAKDLISMDFPGYAIGGLSVGEPFSLMYEVLEHTVPLLPTNKPRYLMGVGSPDALIDGAIRGIDMFDCVLPTRIARNGTCMTSQGRLVIRNAKYARDFTPLDPNCDCYTCKNYTRAYIRHLIKAEETFGIRLTTYHNLHFLVKLMEQVRQAIAEDRLQDFRDQFFAQYGLSEDRSF

SEQ ID NO: 52832 - protein, 376 aa, Brevibacillus invocatus
  REGION 1..376: note = tr|A0A3M8CN01|A0A3M8CN01_9BACL Queuine tRNA-ribosyltransferase OS=Brevibacillus invocatus; OX = 173959 GN=tgt PE=3 SV=1
MAVRYELIKTCKQTGARLGKLHTPHGTIDTPVFMPVGTQATVKTMSPEELKEMGAGIILSNTYHLFLRPGHEIVREAGGLHGFMNWDRAILTDSGGFQVFSLSNLRKITEEGVSFRSHLNGEKLFIGPEEATQIQNALGADIFMAFDECAPYPAEYDYVKQSMERTTRWAERCLKAHTRPEDQALFGIVQGGMFNDLRAISARDLVSLDFPGYAIGGLSVGEPFPLMYEVLENTVPLLPTGKPRYLMGVGSPDALIEGAIRGIDMFDCVLPTRIARNGTCMTSQGRLVIRNAKFARDFTPLDPNCDCYTCKNYSRAYIRHLVKSEETFGIRLTTYHNLYFLVKLMEQVRQAIAEDRLQDFRDQFFAQYGLGGDRSF

SEQ ID NO: 52833 - protein, 376 aa, Brevibacillus laterosporus
  REGION 1..376: note = tr|A0A075R7R3|A0A075R7R3_BRELA Queuine tRNA-ribosyltransferase OS=Brevibacillus laterosporus LMG 15441 OX=1042163 GN=tgt PE=3 SV=1
MAVRYELIKTCKQTGARLGRVHTPHGTFETPAFMPVGTQATVKTMSPEEISGMGANIILSNTYHLFLRPGHQIVKEAGGLHKFMNWNGAILTDSGGFQVFSLSNLRKITEEGVSFRSHLNGEKLFIGPEEAMQIQNALGADIMMAFDECAPYPAEYDYVKKSMERTTRWAERCLRAHERKEDQALFGIVQGGMYQDLREQSARDLVQMDFPGYAIGGLSVGEPFPLMYEVLDYTVPLLPDNKPRYLMGVGSPDALIEGALRGIDMFDCVLPTRIARNGTCMTSQGRLVVRNAKFARDFTPLDPNCDCYTCKNYTRAYIRHLIKAEETFGIRLTTHHNLHFLIKLMEKVRQAIREDRLKDFRDQFFAQYGLGENRSF

SEQ ID NO: 52834 - protein, 376 aa, Brevibacillus laterosporus; identical to SEQ ID NO: 52833
  REGION 1..376: note = tr|H0UGH4|H0UGH4_BRELA Queuine tRNA-ribosyltransferase OS=Brevibacillus laterosporus GI-9; OX = 1118154 GN=tgt PE=3 SV=1

SEQ ID NO: 52835 - protein, 376 aa, unidentified
  source 1..376: note = Brevibacillus nitrificans
  REGION 1..376: note = tr|A0A3M8D9N2|A0A3M8D9N2_9BACL Queuine tRNA-ribosyltransferase OS=Brevibacillus nitrificans; OX = 651560 GN=tgt PE=3 SV=1
MAVRYELIKTCKQTGARLGKLHTPHGTIDTPVFMPVGTQATVKTMSPEELKAMGAGIILSNTYHLFLRPGHEIVREAGGLHGFMNWDRAILTDSGGFQVFSLSNLRKITEEGVSFRSHLNGEKLFIGPEEATHIQNALGADIFMAFDECAPYPAEYDYVQKSMERTTRWAERCLKAHTRPNEQALFGIVQGGMYHDLRAQSARDLVSMDFPGYAIGGLSVGEPFSLMYEVLESTVPLLPTNKPRYLMGVGSPDALIDGAIRGIDMFDCVLPTRIARNGTCMTSQGRLVIRNAKYARDFTPLDPNCDCYTCKNYTRAYIRHLVKSEETFGIRLTTYHNLHFLVKLMENVRKAIAEDRLQDFRDQFFAQYGLGEDRSF

SEQ ID NO: 52836 - protein, 376 aa, Brevibacillus panacihumi
  REGION 1..376: note = tr|A0A3M8DGE5|A0A3M8DGE5_9BACL Queuine tRNA-ribosyltransferase OS=Brevibacillus panacihumi; OX = 497735 GN=tgt PE=3 SV=1
MAVRYELIKTCKQTGARLGKLHTPHGTIDTPVFMPVGTQATVKTMSPEELKEMGAGIILSNTYHLFLRPGHEIVREAGGLHSFMNWDRAILTDSGGFQVFSLSNLRKITEEGVSFRSHLNGEKLFIGPEEATQIQNALGADIFMAFDECAPYPAEYDYVKQSMERTTRWAERCLKAHERPDSQALFGIVQGGMYNDLRAISARDLVSLDFPGYAIGGLSVGEPFSLMYEVLEHTVPLLPSGKPRYLMGVGSPDALIEGAIRGIDMFDCVLPTRIARNGTCMTSQGRLVIRNAKFARDFTPLDPNCDCYTCKNYTRAYIRHLVKSEETFGIRLTTYHNLYFLVKLMEKVRQAIAEDRLQDFRDQFFAQYGLGGDRSF

SEQ ID NO: 52837 - protein, 376 aa, Brevibacillus panacihumi
  REGION 1..376: note = tr|V6MDE6|V6MDE6_9BACL Queuine tRNA-ribosyltransferase OS=Brevibacillus panacihumi W25; OX = 1408254 GN=tgt PE=3 SV=1
MAVRYELIKTCKQTGARLGKLHTPHGTIDTPVFMPVGTQATVKTMSPEELKEMGAGIILSNTYHLFLRPGHEIVREAGGLHSFMNWDRAILTDSGGFQVFSLSNLRKITEEGVSFRSHLNGEKLFIGPEEATQIQNALGADIFMAFDECAPYPAEYDYVKQSMERTTRWAERCLKAHERPDAQALFGIVQGGMYNDLRAISARDLVSLDFPGYAIGGLSVGEPFSLMYEVLENTVPLLPSGKPRYLMGVGSPDALIEGAIRGIDMFDCVLPTRIARNGTCMTSQGRLVIRNAKFARDFTPLDPNCDCYTCKNYTRAYIRHLVKSEETFGIRLTTYHNLYFLVKLMEKVRQAIAEDRLQDFRDQFFAQYGLGGDRSF

SEQ ID NO: 52838 - protein, 376 aa, Brevibacillus parabrevis
  REGION 1..376: note = tr|A0A4Y3PE87|A0A4Y3PE87_BREPA Queuine tRNA-ribosyltransferase OS=Brevibacillus parabrevis; OX = 54914 GN=tgt PE=3 SV=1
MAVRYELIKTCKQTGARLGKLHTPHGTIDTPVFMPVGTQATVKTMSPEELKAIGAGIILSNTYHLFLRPGHEIVREAGGLHGFMNWDRAILTDSGGFQVFSLSNLRKITEEGVSFRSHLNGEKLFIGPEEATQIQNALGADIFMAFDECAPYPAEYDYVKKSMERTTRWAERCLKAHARPNDQALFGIVQGGMFNDLREQSAKDLISMDFPGYAIGGLSVGEPFPLMYEVLEHTVPLLPANKPRYLMGVGSPDALIDGAIRGIDMFDCVLPTRIARNGTCMTSQGRLVIRNAKFARDFTPLDPNCDCYTCKNYTRAYIRHLIKAEETFGIRLTTYHNLHFLVKLMEQVRQAIAEDRLQDFRDQFFAQYGLGEDRSF

SEQ ID NO: 52839 - protein, 376 aa, Brevibacillus reuszeri
  REGION 1..376: note = tr|A0A0K9YZ50|A0A0K9YZ50_9BACL Queuine tRNA-ribosyltransferase OS=Brevibacillus reuszeri OX=54915; GN = tgt PE=3 SV=1
MAVRYELIKTCKQTGARLGKLHTPHGTIDTPVFMPVGTQATVKTMSPEELKSIGAGIILSNTYHLFLRPGHEIVREAGGLHGFMNWDRAILTDSGGFQVFSLSNLRKITEEGVSFRSHLNGEKLFIGPEEATQIQNALGADIFMAFDECAPYPAEYDYVKKSMERTTRWAERCLKAHSRPDEQALFGIVQGGMYNDLRAQSARDLVSMDFPGYAIGGLSVGEPFSLMYEVLEHTVPLLPTNKPRYLMGVGSPDALLDGAIRGIDMFDCVLPTRIARNGTCMTSQGRLVIRNAKYARDFTPLDPNCDCYTCKNYTRAYIRHLVKSEETFGIRLTTYHNLYFLVKLMEQVRQAIAEDRLQDFRDQFFAQYGLGEDRSF

SEQ ID NO: 52840 - protein, 376 aa, Brevibacillus sp.
  REGION 1..376: note = tr|A0A553KNT4|A0A553KNT4_9BACL Queuine tRNA-ribosyltransferase OS=Brevibacillus sp. LEMMJ03; OX = 2595056 GN=tgt PE=3 SV=1
MAVRYELIKTCKQTGARLGKLHTPHGTIDTPVFMPVGTQATVKAMSPEELKEIGAGIILSNTYHLFLRPGHEIVREAGGLHGFMNWDRAILTDSGGFQVFSLSNLRKITEEGVFFRSHLNGEKLFIGPEEATQIQNALGADIFMAFDECAPYPAEYDYVKQSMERTTRWAERCLKAHTRPEDQALFGIVQGGMYKDLREQSARDLVSLDFPGYAIGGLSVGEPFSLMYEVLEHTVPLLPSGKPRYLMGVGSPDALIEGAIRGIDMFDCVLPTRIARNGTCMTSQGRLVIRNAKYARDFTPLDPNCDCYTCKNYTRAYIRHLIKADEIFGVRLTTYHNLYFLVKLMEQVRQAIAEDRLRDFRDQFFAQYGLSEDRSF

SEQ ID NO: 52841 - protein, 376 aa, Brevibacillus sp.
  REGION 1..376: note = tr|A0A2P7V783|A0A2P7V783_9BACL Queuine tRNA-ribosyltransferase OS=Brevibacillus sp. NRRL NRS-1210; OX = 2126352 GN=tgt PE=3 SV=1
MAVRYELIKTCKQTGARLGKLHTPHGTIDTPVFMPVGTQATVKTMSPEELKAIGAGIILSNTYHLFLRPGHEIVREAGGLHGFMNWDRAILTDSGGFQVFSLSNLRKITEEGVSFRSHLNGEKLFIGPEEATQIQNALGADIFMAFDECAPYPAEYDYVKKSMERTTRWAERCLKAHTRPNEQALFGIVQGGMFNDLRAQSARDLVSMDFPGYAIGGLSVGEPFPLMYEVLEHTVPLLPTSKARYLMGVGSPDALIDGAIRGIDMFDCVLPTRIARNGTCMTSQGRLVIRNAKYARDFTPLDPNCDCYTCKNYTRAYIRHLVKSEETFGIRLTTYHNLHFLVKLMEQVRQAIAEDRLQDFRDQFFAQYGLGEDRSF

SEQ ID NO: 52842 - protein, 419 aa, Brevibacterium antiquum
  REGION 1..419: note = tr|A0A2H1IWD3|A0A2H1IWD3_9MICO Queuine tRNA-ribosyltransferase OS=Brevibacterium antiquum CNRZ 918 OX=1255637 GN=tgt PE=3 SV=1
MTRIESSAESETAPINDRSRFGFEVGTRLDQGGRTGVIHTPHGDIATPAFIPVGTKATVKAVRPDEVAELGGQAVLANAYHLYLQPGSDLIDEAGGLGKFMNWPGPTFTDSGGFQVMSLGSGFKKVISMESTGEQNDDLVAVGKERMSNVDDDGVTFKSHLDGTMHRFTPEVSMRVQHELGADIMFAFDELTTLVNTRGYQVESLERTRQWALRCIEEHQRQTAARTHRPYQALFGVLHGAQYEDLRRKAARDLGGMDFDGFGIGGALEKENLGTIIRWVCEELPENKPRHLLGISEPDDLFEAIKTGADTFDCVSPSRVARNAAIYTRDGRYNLTGAKYRRDFGPLDPDCACYTCQNYSRAYLRHLYKAKEMLFSTLCTVHNEYFVVNLVAEIRQSMIDGRFAELEAEVLGRYYAKKA

SEQ ID NO: 52843 - protein, 419 aa, Brevibacterium antiquum
  REGION 1..419: note = tr|A0A2H1IJZ6|A0A2H1IJZ6_9MICO Queuine tRNA-ribosyltransferase OS=Brevibacterium antiquum; OX = 234835 GN=tgt PE=3 SV=1
MTRIESSAESETAPINDRSRFGFEVGTRLDQGGRTGVIHTPHGDIATPAFIPVGTKATVKAVRPDEVAELGGQAVLANAYHLYLQPGSDLIDEAGGLGKFMNWPGPTFTDSGGFQVMSLGSGFKKVISMESTGEQNDDLVAVGKERMSNVDDDGVTFKSHLDGTMHRFTPEVSMRVQHELGADIMFAFDELTTLVNTRGYQVESLERTRQWALRCIEEHQRQTAARTHRPYQALFGVLQGAQYEDLRRKAARDLGGMDFDGFGIGGALEKENLGTIIRWVCEELPENKPRHLLGISEPDDLFEAIKTGADTFDCVSPSRVARNAAIYTRDGRYNLTGAKYRRDFGPLDPDCACYTCQNYSRAYLRHLYKAKEMLFSTLCTVHNEYFVVNLVAEIRQSMIDGRFAELEAEVLGRYYAKKA

SEQ ID NO: 52844 - protein, 419 aa, Brevibacterium aurantiacum
  REGION 1..419: note = tr|A0A2H1IFL1|A0A2H1IFL1_9MICO Queuine tRNA-ribosyltransferase OS=Brevibacterium aurantiacum; OX = 273384 GN=tgt PE=3 SV=1
MTRIESSAESETAPINDRSRFGFEVGTRLDEGGRTGVIHTPHGDIATPAFIPVGTKATVKAVRPDEVAELGGQAVLANAYHLYLQPGSDLIDEAGGLGKFMNWPGPTFTDSGGFQVMSLGSGFKKVISMESTGEQNDDLVAVGKERMSNVDDDGVTFKSHLDGTMHRFTPEVSMRVQHELGADIMFAFDELTTLVNTRGYQVESLERTRQWALRCIEEHQRQTAARTHRPYQALFGVLQGAQYEDLRRKAARDLGGMDFDGFGIGGALEKENLGTIIRWVCEELPENKPRHLLGISEPDDLFEAIKTGADTFDCVSPSRVARNAAIYTRDGRYNLTGAKYRRDFGPLDPDCACYTCQNYSRAYLRHLYKAKEMLFSTLCTVHNEYFVVNLVAEIRQSMIDGRFAELEAEVLGRYYAKKA

SEQ ID NO: 52845 - protein, 405 aa, Brevibacterium aurantiacum
  REGION 1..405: note = tr|A0A2A3ZGT3|A0A2A3ZGT3_9MICO Queuine tRNA-ribosyltransferase OS=Brevibacterium aurantiacum; OX = 273384 GN=tgt PE=3 SV=1
MNDRSRFGFEVGTRLDQGGRTGVIHTPHGDIATPAFIPVGTKATVKAVRPDEVAELGGQAVLANAYHLYLQPGSDLIDEAGGLGKFMNWPGPTFTDSGGFQVMSLGSGFKKVISMESTGEQNDDLVAVGKERMSNVDDDGVTFKSHLDGTMHRFTPEVSMRVQHELGADIMFAFDELTTLVNTRGYQVESLERTRQWALRCIEEHQRQTAARTHRPYQALFGVLQGAQYEDLRRKAARDLGGMDFDGFGIGGALEKENLGTIIRWVCEELPENKPRHLLGISEPDDLFEAIKTGADTFDCVSPSRVARNAAIYTRDGRYNLTGAKYRRDFGPLDPDCACYTCQNYSRAYLRHLYKAKEMLFSTLCTVHNEYFVVNLVAEIRQSMIDGRFAELEAEVLGRYYAKKA

SEQ ID NO: 52846 - protein, 418 aa, Brevibacterium casei
  REGION 1..418: note = tr|A0A165E6F4|A0A165E6F4_9MICO Queuine tRNA-ribosyltransferase OS=Brevibacterium casei OX=33889; GN = tgt PE=3 SV=1
MTDIDSRAASETATPPINDRSQFGFEVGTRLETGGRTGVISTPHGQIRTPAFIPVGTKATVKAVKPEDVAALGGQAVLANAYHLYLQPGSDIVDEAGGLGRFMNWPGPTFTDSGGFQVMSLGAGFKKVISMEVTGEQNDDAIAAGKERLSNVDDDGVTFKSHLDGTMHRFTPEVSMRVQHELGADIMFAFDELTTLVNTRGYQETSLERTRLWAIRCIEEHQRLTQERSRRPYQALFGVLQGAQYEDLRRKAARDLGAMDFDGYGIGGALEKENLGTIIRWVCEELPEDKPRHLLGISEPDDLFEAIKTGADTFDCVSPSRVARNAAVYTRDGRYNLTGAKYRRDFGPLDPECDCYTCENYSRAYLRHLYKAKEMLFSTLCTIHNEHFVVSLVAEIRQAMEDGRFSELETEVLGRYYA

SEQ ID NO: 52847 - protein, 418 aa, Brevibacterium casei
  REGION 1..418: note = tr|A0A2H1J135|A0A2H1J135_9MICO Queuine tRNA-ribosyltransferase OS=Brevibacterium casei CIP 102111; OX = 1255625 GN=tgt PE=3 SV=1
MTDIDSRAASETAPPPINDRSQFGFEVGTRLETGGRTGVISTPHGQIRTPAFIPVGTKATVKAVKPEDVAALGGQAVLANAYHLYLQPGSDIVDEAGGLGRFMNWPGPTFTDSGGFQVMSLGAGFKKVISMEVTGEQSDDAIAAGKERLSNVDDDGVTFKSHLDGTMHRFTPEVSMQVQHELGADIMFAFDELTTLVNTRGYQETSLERTRLWAIRCIEEHQRLTQARSHRPYQALFGVLQGAQYEDLRRKAARDLGAMDFDGYGIGGALEKENLGTIIRWVCEELPEDKPRHLLGISEPDDLFEAIKTGADTFDCVSPSRVARNAAVYTRDGRYNLTGAKYRRDFGPLDPECDCYTCENYSRAYLRHLYKAKEMLFSTLCTIHNEHFVVSLVAEIRQAMEDGRFSELETEVLGRYYA

SEQ ID NO: 52848 - protein, 439 aa, Brevibacterium celere
  REGION 1..439: note = tr|A0A366IEX9|A0A366IEX9_9MICO Queuine tRNA-ribosyltransferase OS=Brevibacterium celere OX=225845; GN = tgt PE=3 SV=1
MTTPAMTPTSSSSAPAPHDASSAEAASPAPSALPVNDRARFGFEIGTRLESGGRTGVIHTPHGDIRTPAFIPVGTKATVKAVRPDEVAELGGQAVLANAYHLYLQPGSDLIDEAGGLGAFMNWPGPTFTDSGGFQVMSLGAGFKKVISMESTGEQNDDLVAAGKDRLSRVDDDGVTFKSHLDGTMHRFTPEVSMRVQHELGADIMFAFDELTTLVNTRGYQETSLERTRLWAIRCIEEHQRLTAERTHRPYQALFGVLQGAQYEDLRRKAARDLGAMDFDGFGIGGALEKENLGTIITWVCEELPEDKPRHLLGISEPDDLFEAIRTGADTFDCVSPSRVARNAAIYTRDGRFNLTGAKYRRDFGPLDPECRCYTCSNYSRAYLRHLYKAKEMLFSTLCTIHNEAFIVGLVDEIRQSIEDGRFAEFEAEVLGRYYAKRI

SEQ ID NO: 52849 - protein, 418 aa, unidentified
  source 1..418: note = [Brevibacterium] flavum
  REGION 1..418: note = tr|A0A0F6SQJ0|A0A0F6SQJ0_9CORY Queuine tRNA-ribosyltransferase OS=[Brevibacterium] flavum; OX = 92706 GN=tgt PE=3 SV=1
MSDLSFTLNNKLADDAPGKHGRTGVIHTPHGDIATPAFIPVATKATVKTLTPEQIRETGAQAILSNAYHLYLQPGPDIVDEAGGVSAFENWHGPTYTDSGGFQVMSLGSGFKKVLAMDTTNLTRNDIKAAKKERMALVDEDGVDFKSVIDGSKHRFTPEVSMQIQHQLGADIIFAFDELTTLVDTYDYQVESVERTRRWAQRCLLEHERLTQERVDKPLQSLWGVVQGAQFEDLRRQAVKGLLDLDRQAADEGRRGFGGFGIGGALEKENLGTIVGWVCDELPEDKPRHLLGISEPDDLFVAVEAGADTFDCVAPTRLGRRGGVYTLDGRMNLTGARFKRDFKGIDEEVGGYASENYSRAYIHHLLKAKEFLAGTLCTMHNLYFMITLVDKIRASIDDGTYYEFKEEFLGRYYASKVS

SEQ ID NO: 52850 - protein, 380 aa, unidentified
  source 1..380: note = [Brevibacterium] frigoritolerans
  REGION 1..380: note = tr|A0A4R6AGJ7|A0A4R6AGJ7_9BACI Queuine tRNA-ribosyltransferase OS=[Brevibacterium] frigoritolerans OX=450367 GN=tgt PE=3 SV=1
MSSPIRYELIKTCKQTGARLGRVHTPHGSFETPVFMPVGTLATVKTMSPEELVQMGAGIILSNTYHLWLRPGHEIVKEAGGLHKFMNWDRAILTDSGGFQVFSLSEFRKIEEEGVHFRNHLNGDKLFLSPEKAMQIQNALGSDIMMAFDECPPFPAEYDYMKKSVERTSRWAERCLNAHERPQDQGLFGIVQGGEYEELRKQSARDLVSMDFPGYAVGGLSVGEPKDIMNRVLESTTPLLPSNKPRYLMGVGSPDSLIDGAIRGIDMFDCVLPTRIARNGTLMTSSGRLVVKNAKYARDFGPIDENCDCYTCRNYSRAYIRHLMKCDETFGIRLTSYHNLHFLLKLMEQVRQAIREDRLGDFRDEFFEQYGFNKPNAKNF

SEQ ID NO: 52851 - protein, 379 aa, unidentified; identical to SEQ ID NO: 52138
  source 1..379: note = [Brevibacterium] frigoritolerans
  REGION 1..379: note = tr|A0A3Q9SBF9|A0A3Q9SBF9_9BACI Queuine tRNA-ribosyltransferase OS=[Brevibacterium] frigoritolerans OX=450367 GN=tgt PE=3 SV=1

SEQ ID NO: 52852 - protein, 418 aa, Brevibacterium iodinum
  REGION 1..418: note = tr|A0A2H1K9N9|A0A2H1K9N9_9MICO Queuine tRNA-ribosyltransferase OS=Brevibacterium iodinum ATCC 49514 OX=1255616 GN=tgt PE=3 SV=1
MTTDETPAASETAPINDRSQFGFEVGTRMDTGGRTGVIHTPHGDIQTPAFIPVGTKATVKAVRPDEVAELGGQAVLSNAYHLYLQPGSDLIDEAGGLGKFMNWSGPTFTDSGGFQVMSLGSGFKKVISMESTGEQNDELVAVGKERLSNVDDDGVTFKSHLDGSMHRFTPEISMRVQHELGADIMFAFDELTTLVNTRGYQEESVERTRLWALRCIDEHFRLTVERSHRPYQALFGVLQGAQYEDLRRKAARDLGAMDFDGFGIGGALEKENLGIIIRWVCEELPENKPRHLLGISEPDDLFEAIKTGADTFDCVSPSRVARNAAIYTRDGRYNLTGAKYRRDFGPLDPDCTCYTCQNYSRAYLRHLYKAKEMLFSTLCTIHNEHFVVSLVAEIRQSIVDGRFDELETEVLGRYYAKK

SEQ ID NO: 52853 - protein, 416 aa, unidentified
  source 1..416: note = Brevibacterium jeotgali
  REGION 1..416: note = tr|A0A2H1L187|A0A2H1L187_9MICO Queuine tRNA-ribosyltransferase OS=Brevibacterium jeotgali; OX = 1262550 GN=tgt PE=3 SV=1
MTETTTAAADSAADRSEFGFDVGTTMSEGGRTGTIRTPHGTIATPAFIPVGTKATVKAVKPEDVDALGADAVLANAYHLFLQPGADIVDEAGGLGAFMNWPGPTFTDSGGFQVMSLGVGSKKVLTTEFAGKDRSDLQTVDKERRMANVDEDGVTFRSHLNGDIHRFTPEVSMQVQHQLGADIIFAFDELTMLTNTRAYQEESLERTRRWAERCVTEHFRLTQERSHRPYQALFGVLQGAQYEDLRRRAARDLGAMDVDGFGIGGALEKENLGTIVGWVCEELPEEKPRHLLGIGEPDDLFAAIRRGADTFDCVSPSRVARNAAVYSRDGRYNISGARHKRDWRPIDPECTCYTCTNHSRAYLHHLWKAKEMLFSTLCTIHNEYFIVQLVAEIRGAIEDGRYDELEADVMGRYYAKR

SEQ ID NO: 52854 - protein, 418 aa, Brevibacterium linens
  REGION 1..418: note = tr|A0A2H1IKB6|A0A2H1IKB6_BRELN Queuine tRNA-ribosyltransferase OS=Brevibacterium linens ATCC 9172; OX = 1255617 GN=tgt PE=3 SV=1
MTADETSAAFETAPINDRSNFGFEVGTRMDTGGRTGVIHTPHGDIQTPAFIPVGTKATVKAVRPDEVAELGGQAVLSNAYHLYLQPGSDLIDEAGGLGRFMNWPGPTFTDSGGFQVMSLGSGFKKVISMESTGEQNDELVAVGKERLSNVDDDGVTFKSHLDGSMHRFTPEISMRVQHELGADIMFAFDELTTLVNTRGYQEESLERTRLWAIRCIEEHFRLTEERSHRPYQALFGVLQGAQYEDLRRKAARDLGDMDFDGFGIGGALEKENLGIIIRWVCEELPENKPRHLLGISEPDDLFEAIKTGADTFDCVSPSRVARNAAIYARDGRYNLTGAKYRRDFGPLDPDCSCYTCRNYSRAYLRHLYKAKEMLFSTLCTIHNEHFVVSLVDEIRQSIVDGRFSELETDVLGRYYAKK

SEQ ID NO: 52855 - protein, 418 aa, Brevibacterium linens
  REGION 1..418: note = tr|A0A2H1ILM6|A0A2H1ILM6_BRELN Queuine tRNA-ribosyltransferase OS=Brevibacterium linens OX=1703; GN = tgt PE=3 SV=1
MTADETSAAFETAPINDRSNFGFEVGTRMDTGGRTGVIHTPHGDIQTPAFIPVGTKATVKAVRPDEVAELGGQAVLSNAYHLYLQPGSDLIDEAGGLGRFMNWPGPTFTDSGGFQVMSLGSGFKKVISMESTGEQNDELVAVGKERLSNVDDDGVTFKSHLDGSMHRFTPEISMRVQHELGADIMFAFDELTTLVNTRGYQEESLERTRLWAIRCIEEHFRLTEERSHRPYQALFGVLQGAQYEDLRRKAARDLGAMDFDGYGIGGALEKENLGIIIRWVCEELPENKPRHLLGISEPDDLFEAIKTGADTFDCVSPSRVARNAAIYTRDGRYNLTGAKYRRDFGPLDPDCSCYTCQNYSRAYLRHLYKAKEMLFSTLCTIHNEHFVVSLVDEIRQSMIDGRFSELETDVLGRYYAKK

SEQ ID NO: 52856 - protein, 394 aa, Brevibacterium luteolum
  REGION 1..394: note = tr|A0A2N6PJR1|A0A2N6PJR1_9MICO Queuine tRNA-ribosyltransferase OS=Brevibacterium luteolum; OX = 199591 GN=tgt PE=3 SV=1
MATGGRTGTIRTPHGEIQTPAFIPVGTKATVKAVKPDDVAALGAQAVLANAYHLYLQPGADLLDEAGGLGKFMNWPGPTFTDSGGFQVMSLGVGFKKVISMDIPDSPDDSAMAADKERRAMVDDDGVTFKSHIDGTLHRFTPEVSMQVQHQLGADIMFAFDELTTLMNTRGYQEMSLERTRLWAERCLAEHERLTEARSHRPYQALFGVLQGAQYEDLRRKAARDLGAMDFDGFGIGGALEKENLGTIVGWVCEELPEDKPRHLLGISEPDDLFTAIKAGADTFDCVSPSRVARNAAVYTRDGRYNITGAKYRRDFGPIDPECTCYTCQNYSRAYLRHLFKAKEMLFSTLCTIHNEHFIVTLVDDIRASIEDGRFDELEAEVLGRYYAPKATTQ

SEQ ID NO: 52857 - protein, 458 aa, Brevibacterium ravenspurgense
  REGION 1..458: note = tr|A0A150H6E6|A0A150H6E6_9MICO Queuine tRNA-ribosyltransferase OS=Brevibacterium ravenspurgense; OX = 479117 GN=tgt PE=3 SV=1
MHTDSAPGGDSTARDGTSASPDRAEVSFGFTIESRLDPGSRTRSPYSLGQGSVHGRTGVIRTPHGDIQTPAFIPVGTKATVKAVRPEEMRELGAQALLANAYHLYLQPGADLVDEAGGLAAFMNWHGPTFTDSGGFQVMSLGSGFKKVISMEAAADKAGFDDDATAAGKERLSFVDDDGVNFKSHLDGSLHRFTPEISMRVQHQLGADIMFAFDELTTLMNSRAYQEESLERTRLWAIRCIEEHKKLTAERSAPGFAGLPGGKPYQALFGVIQGAQYEDLRRKACRDLGAMDFDGYGIGGALEKESLGTIVGWCNDELPEDRPRHLLGISEPNDMFTAVRAGADTFDCVQPSRVARNGAVYTAYGRYNVNNAASERNWDPIEPGCECYTCQNYSRAYLRHLFKAKEMLFSTLCTIHNEHYTVRLVEKMREAIADGTFDEYEEETLGRFYGSGPAGQRG

SEQ ID NO: 52858 - protein, 458 aa, Brevibacterium ravenspurgense
  REGION 1..458: note = tr|A0A2I1II77|A0A2I1II77_9MICO Queuine tRNA-ribosyltransferase OS=Brevibacterium ravenspurgense; OX = 479117 GN=tgt PE=3 SV=1
MHTDSAPGGDSTARGGTSASRDRGEAGFGFTIESRLDPGSRTRSPHSLGQGSVHGRTGVIRTPHGDIQTPAFIPVGTKATVKAVRPEEMRELGAQALLANAYHLYLQPGADLVDEAGGLAAFMNWNGPTFTDSGGFQVMSLGSGFKKVISMEAAADKAGFDDDATAAGKERLSFVDDDGVNFKSHLDGSLHRFTPEISMRVQHQLGADIMFAFDELTTLMNSRAYQEESLERTRLWAIRCIEEHKKLTAERSAPGFAGLPGGKPYQALFGVIQGAQYEDLRRKACRDLGAMDFDGYGIGGALEKESLGTIVGWCNDELPEDRPRHLLGISEPNDMFTAVRAGADTFDCVQPSRVARNGAVYTAYGRYNVNNAASERNWDPIEPGCECYTCQNYSRAYLRHLFKAKEMLFSTLCTIHNEHYTVRLVEKMREAIADGTFDEYEEETLGRFYGSGPAGQRG

SEQ ID NO: 52859 - protein, 429 aa, Brevibacterium sandarakinum
  REGION 1..429: note = tr|A0A1H1N8C3|A0A1H1N8C3_9MICO Queuine tRNA-ribosyltransferase OS=Brevibacterium sandarakinum; OX = 629680 GN=tgt PE=3 SV=1
MTRIESSAESETASSTDGGADAPAINDRSRFGFEVGTRLETGGRTGVIHTPHGDIATPAFIPVGTKATVKAVRPDEVEELGGQAVLSNAYHLYLQPGSDLVDEAGGLGKFMNWPGPTFTDSGGFQVMSLGSGFKKVISMESTGEQNDDLVAVGKERMSNVDDDGVTFKSHLDGSMHRFTPEVSMRVQHELGADIMFAFDELTTLVNTRGYQVLSLERTRQWALRCIEEHQRLTAARSHRPYQALFGVLQGAQYEDLRRKAAHDLGAMDFDGFGIGGALEKENLGTIIRWVCEELPESKPRHLLGISEPDDLFESIKTGADTFDCVSPSRVARNAAIYTRDGRYNLTGAKYRRDFGPLDPDCACYTCQNYSRAYLRHLYKAKEMLFSTLCTVHNEYFVVNLVAEIRQAMIDGRFAELEAEVLGRYYAKQR

SEQ ID NO: 52860 - protein, 418 aa, unidentified
  source 1..418: note = Brevibacterium siliguriense
  REGION 1..418: note = tr|A0A1H1XGK6|A0A1H1XGK6_9MICO Queuine tRNA-ribosyltransferase OS=Brevibacterium siliguriense; OX = 1136497 GN=tgt PE=3 SV=1
MTTDETPAASETAPINDRSQFGFEVGTRMDTGGRTGVIHTPHGDIQTPAFIPVGTKATVKAVRPDEVAELGGQAVLSNAYHLYLQPGSDLIDEAGGLGKFMNWPGPTFTDSGGFQVMSLGSGFKKVISMESTGEQNDELVAVGKERLSNVDDDGVTFKSHLDGSMHRFTPEISMRVQHELGADIMFAFDELTTLVNTRGYQEESLERTRLWAIRCIEEHFRLTEERSHRPYQALFGVLQGAQYEDLRRRAARDLGAMDFDGFGIGGALEKENLGIIIRWVCEELPENKPRHLLGISEPDDLFEAIKTGADTFDCVSPSRVARNAAIYTRDGRYNLTGAKYRRDFGPLDPDCTCYTCQNYSRAYLRHLYKAKEMLFSTLCTIHNEHFVVSLVAEIRQAMIDGRFDELETEVLGRYYAKK

SEQ ID NO: 52861 - protein, 481 aa, Brevibacterium sp.
  REGION 1..481: note = tr|A0A4P8HDK5|A0A4P8HDK5_9MICO Queuine tRNA-ribosyltransferase OS=Brevibacterium sp. CS2; OX = 2575923 GN=tgt PE=3 SV=1
MTVPAHTSAPASPVGTSTPAGPAPASQPADATSAPAGSAPASHPADGTSAPTGPAAASQRAGAASAPGAAPTGDTGVNDRSRFGFAVEARMESGGRAGVIRTPHGDIPTPAFVPVGTKATVKAVKPDDVAALGARAVLANAYHLYLQPGPDLIDEAGGLGAFMGWPGPTFTDSGGFQVMSLGSGFKKVLSEEFSGARSDQAVAAGKERMANVDDDGVTFKSHLDGSRHRFTAEVSMQVQHQLGADIIFAFDELTTLVNTRGYQEEALERTRLWAQRCIVEHERLTAARSHRPYQALFGVIQGAQYEDLRRKAARDLGAMDFDGFGIGGALEKDRLGTIVGWVSEELPEAKPRHLLGISEPDDLFTAIAAGADTFDCVSPSRVARNAAVYSRDGRYNLTGAKYRRDFSPLDPECTCSTCATFSRAYLRHLYKAKEMLFSTLVTIHNEHFIVDLVARIRQAIIDGRFHELEAEVLGRYYANRR

SEQ ID NO: 52862 - protein, 430 aa, Brevibacterium sp.
  REGION 1..430: note = tr|A0A2H1ISX0|A0A2H1ISX0_9MICO Queuine tRNA-ribosyltransferase OS=Brevibacterium sp. 239c; OX = 1965356 GN=tgt PE=3 SV=1
MTRIESPAESETAASNHGSVDVPAINDRSRFGFEIGTRLDEGGRTGVIHTPHGDIATPAFIPVGTKATVKAVRPDEVAELGGQAVLANAYHLYLQPGSDIVDEAGGLGKFMNWSGPTFTDSGGFQVMSLGSGFKKVISMESTGEQNDDLVAVGKERMSNVDDDGVTFKSHLDGSMHRFTPEVSMGVQHELGADIMFAFDELTTLINTRGYQVESLERTRLWALRCIEEHQRLTEARSHRPYQALFGVLQGAQYEDLRRKAAHDLGAMDFDGYGIGGALEKENLGTIIRWVCEELPENKPRHLLGISEPDDLFEAIKTGADTFDCVSPSRVARNAAIYTRDGRYNLTGAKYRRDFGPLDPDCKCYTCQNYSRAYLRHLYKAKEMLFSTLCTVHNEYFIVNLVAEIRRAMEEGRFAELETEVLGRYYAKQRG

SEQ ID NO: 52863 - protein, 445 aa, unidentified
  source 1..445: note = Brevibacterium yomogidense
  REGION 1..445: note = tr|A0A1X6X9K4|A0A1X6X9K4_9MICO Queuine tRNA-ribosyltransferase OS=Brevibacterium yomogidense; OX = 946573 GN=tgt PE=3 SV=1
MTETTTSAADAARANAGGAHAAGAPAGGDAAGGDTAGGDTAADRTQFGFDVGTTMSSGGRTGTIRTPHGTIATPAFIPVGTKATVKAVKPEDVDALGADAVLANAYHLFLQPGADIVDEAGGLGAFMNWPGPTYTDSGGFQVMSLGVGSKKVLTTEFAGKDRSDLQTVDKERRMANVDEDGVTFRSHLNGDIHRFTPEVSMQVQHQLGADIIFAFDELTMLTNTRAYQEESLERTRRWAERCVTEHVRLTQERTHRPYQALFGVLQGAQYEDLRRTAARDLGAMDFDGFGIGGALEKENLGTIVGWVCEELPEEKPRHLLGIGEPDDLFAAIRRGADTFDCVSPSRVARNAAVYSRDGRYNISGSRYKRDWQPIDPECSCYTCAHHSRAYLHHLWKAKEMLFSTLCTIHNEHFIVQLVAEIRGAIEDGRYDELEAEVMGRYYAKR

SEQ ID NO: 52864 - protein, 576 aa, unidentified
  source 1..576: note = Brevifollis gellanilyticus
  REGION 1..576: note = tr|A0A512MFH1|A0A512MFH1_9BACT Queuine tRNA-ribosyltransferase OS=Brevifollis gellanilyticus; OX = 748831 GN=tgt PE=3 SV=1
MSSSRLDFKLQARATGSRARAATFRTLHGVIETPLFMPVGTQATVKAQTPESLKASGSQILLANTYHLLLRPGGEVFERMGGIHKFMKWPGSVLTDSGGYQIFSLPNSRAMTEKGAVFQSYVDNRRILLSPELSIQMQRSIGSDIMMVLDQCIPSTADEAAAREALQVTQRWAARSLAAREDSPQSMFAIVQGALYPELRKESAAGLIEMPFDGFAIGGLAVGEEKHQREDVCELTAALLPEDRPRYLMGVGTPLDLLEAVHRGVDMFDCIIPTQVAKRGTAFTSRGIVELRRSVFKFADTPLDAACSCPVCVTHSRAYLHHLTKTQETLGWTLVGQHNIHFYHQLMREVRQSILEDRFLPLYHEKRAFLHEEDTEHPVKPPKRQSAEVVEKIGHYRLHRDEENGVSIRHAETSEEVITEVDANQHPELVQLMRKLPVLDGEEALPLVVWDVDLGSAATALAAIVMYEEAAGRGPVRPLHLVSFTEDLSPLRLALSHKRHFGYLRHGAADTLVHRGAWKSRYRHGLSWSLMLGPMDEMMKDAPGPPEVVLGGGGLSAAARLAFHPPNLGITTSSRD

SEQ ID NO: 52865 - protein, 385 aa, unidentified
  source 1..385: note = Brevifollis gellanilyticus
  REGION 1..385: note = tr|A0A512MGE3|A0A512MGE3_9BACT Queuine tRNA-ribosyltransferase OS=Brevifollis gellanilyticus; OX = 748831 GN=tgt PE=3 SV=1
MFDLLANDPASSARRGRLQTPHGVIETPVFMPVGTQGTVKAVHPNELRELNSQIILGNTYHLWVRPGMEIIREAGGLHQFMNWDRPILTDSGGFQVFSLAKLRKIKEEGCYFNNHVDGTPMFLGPETAMEIQATLGSDIAMLFDECTPYPCTHDEAKKSMELTLRWAKRCRDWVDQNQPDAGAHGRSATQTKQLHFPIVQGSVFQDLRQHCARELVAMDFPGYAVGGLSVGEPEEDMMRIAEWTCPLLPEHKPRYAMGLGTPPQIVELIARGVDMFDCVIPTRLARNGTAFTHEGLMNLRNNKFAKDFRDLAEDTHPLCRGFSRAYIRHLINTQEVLGLRLISLHNLHFYASLTSRARLAIEQGCFSEFRAEVNARYQTRSDSPD

SEQ ID NO: 52866 - protein, 374 aa, Brevinema andersonii
  REGION 1..374: note = tr|A0A1I1FAM2|A0A1I1FAM2_9SPIR Queuine tRNA-ribosyltransferase OS=Brevinema andersonii OX=34097; GN = tgt PE=3 SV=1
MKRFPFFVENSDSYARACTLTLPHGMVQTPIFMPVGTQGSVKTLSREELEDMGASIVLANSYHLFLRPGVEFFSEYGGLHKFSGWNHNFLTDSGGFQIFSLPGMRRISDDGVCFQSHLDGRQHFLTPEIMVQIQQAIGADIMMVLDECVPGNASYNSTLSALKRTTAWAERAKIEFLKLNIDNQFAFGIVQGGVFEDLRKESAKQLRDLDFPGYSIGGLSVGESKEEMYCMLDVLTDEMPVDKPRYLMGVGVPEDILEGIARGVDMFDCVFPTRVARHGTAFTRDGRINLRTQIFTYDTRPIDEECSCYACRNYDRAYIRHLLRANEVLGARLASIHNLFFLIELTRNARQSILDNNFSAFKDNFLARYCSSKK

SEQ ID NO: 52867 - protein, 376 aa, unidentified
  source 1..376: note = Brevirhabdus pacifica
  REGION 1..376: note = tr|A0A1U7DLC8|A0A1U7DLC8_9RHOB Queuine tRNA-ribosyltransferase OS=Brevirhabdus pacifica; OX = 1267768 GN=tgt PE=3 SV=1
MTQRVTFQLQARDGKARRGVIQTPRGEIRTPAFMPVGTAATVKAMLPESVRATGADVLLGNTYHLMLRPTAERIAALGGLHKFMNWERPILTDSGGFQVMSLAELRKLTEKGVTFRSHVDGARHELTPERSMEIQALLGSDIVMSFDECTPYPATEEVAASSMRLSMRWAQRSRDAFGDRPGHALFGIQQGSTFRELREESAQALQQIGFDGYAVGGLAVGEGQEAMFDVLDYAPDMLPEDKPRYLMGVGKPDDIVGAVARGIDMMDCVLPSRSGRTGQVFTHRGVVNIKNARHRDDPRPLDESCTCPACRSYSRAYLHHVFRAGEMISGMLLTWHNLHYYQVLMDGMREAIEAGDFAGFERDFHARRAEGDIEPI

SEQ ID NO: 52868 - protein, 370 aa, Brevundimonas diminuta
  REGION 1..370: note = tr|A0A246K8L3|A0A246K8L3_BREDI Queuine tRNA-ribosyltransferase OS=Brevundimonas diminuta OX=293; GN = tgt PE=3 SV=1
MPFPFEISAVEGRARTGVLKTTRGDIRTPTFMPVGTAATVKAMTVDQVKQTGADVILGNTYHLMLRPGPERMERLGGLHNFMRWDKPILTDSGGFQVMSLSGISKLSEEAVTFSSHIDGSKHVLTPERSIQIQADRLGSDIVMQLDECVAWPAEEKRAREGMELSARWAQRSKNAFGTRDAQALFGIQQGSTYENLRRESSERLQEIGFDGYALGGLAVGEGHEAMCEVLDYAPEFLPKDRPRYLMGVGKPIDLVEAVYRGVDMFDCVLPTRAGRHGQAWTWDGPLNLKNARFAEDQDPLDPEVPCPASQDYSKAYLHHLIRADEILGKILLSWHNIAFFQALTAAMRAAIAEGRFEQFRRDFRARHLKA

SEQ ID NO: 52869 - protein, 370 aa, Brevundimonas diminuta
  REGION 1..370: note = tr|L1QFS2|L1QFS2_BREDI Queuine tRNA-ribosyltransferase OS=Brevundimonas diminuta 470-4; OX = 1035191 GN=tgt PE=3 SV=1
MPFPFEISATEGRARTGVLKTTRGDIRTPAFMPVGTAATVKAITVDQVKQTGADIILGNTYHLMLRPGPERMERLGGLHNFMRWDKPILTDSGGFQVMSLSGISKLTEKAVTFSSHIDGSKHVLTPERSIQIQADRLGSDIVMQLDECVAWPAEEKRAREGMELSARWAQRSKNAFGTRDAQALFGIQQGSTYENLRRESSERLQEIGFDGYAIGGLAVGEGHEAMCEVLDYAPEFLPKDRPRYLMGVGKPIDLVEAVYRGVDMFDCVLPTRAGRHGQAWTWDGPLNLKNARFAEDQDPLDPEVPCPASQDYSKAYLHHLIRADEILGKILLSWHNIAFFQALTAAMRAAIAEGRFEQFRRDFRARHLKA

SEQ ID NO: 52870 - protein, 370 aa, Brevundimonas intermedia
  REGION 1..370: note = tr|A0A4Y9S1Y8|A0A4Y9S1Y8_9CAUL Queuine tRNA-ribosyltransferase OS=Brevundimonas intermedia; OX = 74315 GN=tgt PE=3 SV=1
MMPFPFEISATEGRARTGVLKTARGDIRTPAFMPVGTAATVKAMTVDQVKATGADIILGNTYHLMLRPGPERMERLGGLHKFMGWDKPILTDSGGFQVMSLAGISKVKEEAVTFSSHIDGSKHVLTPERSIEIQADRIGADISMQLDQCVSWPAERDAAQKAMELSIRWGARSKARFGEREHQALFGIQQGSTFEDLRRQSSDQLQEIGFDGYAIGGLAVGEGHQAMCEVLDYAPEMLPADRPRYLMGVGKPIDLVEAVWRGVDMFDCVLPTRAGRHGQAWTWDGPLNLKNARFAEDQNPLDPAIDGPSSQYSKAYLHHLIRADEILGKVLLSWHNIAFYQALTAAMRAAISEGRFEQFRRDFHARHTSN

SEQ ID NO: 52871 - protein, 370 aa, Brevundimonas naejangsanensis
  REGION 1..370: note = tr|A0A4P7BP43|A0A4P7BP43_9CAUL Queuine tRNA-ribosyltransferase OS=Brevundimonas naejangsanensis; OX = 588932 GN=tgt PE=3 SV=1
MPFPFEISAAEGRARTGVLKTPRGDIRTPAFMPVGTAATVKAMTLDQVKQTGADIILGNTYHLMLRPGPERMERLGGLHNFMRWDKPILTDSGGFQVMSLSGISKLTEEAVTFSSHIDGSKHVLTPERSIQIQADRLGSDIVMQLDECVAWPAEEKRAREGMELSARWAQRSKNAFGTRDAQALFGIQQGSTYENLRRESSERLQEIGFDGYAIGGLAVGEGHEAMCEVLDYAPEFLPKDRPRYLMGVGKPIDLVEAVYRGVDMFDCVLPTRAGRHGQAWTWDGPLNLKNARFAEDQDPLDPEVPCPASQDYSKAYLHHLIRADEILGKILLSWHNIAFFQALTAAMRAAIAEGRFEQFRREFRARHLKA

SEQ ID NO: 52872 - protein, 371 aa, Brevundimonas naejangsanensis
  REGION 1..371: note = tr|A0A494RQI1|A0A494RQI1_9CAUL Queuine tRNA-ribosyltransferase OS=Brevundimonas naejangsanensis; OX = 588932 GN=tgt PE=3 SV=1
MLPFPFDIFATEGRARTGVLKTPRGDIRTPAFMPVGTAATVKAMTVDQVKQTGADILLGNTYHLMLRPGPERMERLGGLHNFMRWDKPILTDSGGFQVMSLSGISKLTEEAVTFSSHIDGSKHILTPERSIQIQADRLGSDIVMQLDECVAWPAEEKRAREGMELSARWAQRSKNAFGTRDAQALFGIQQGSTYENLRRESSERLQEIGFDGYAIGGLAVGEGHEAMCEVLDFAPEFLPKDRPRYLMGVGKPIDLVEAVYRGVDMFDCVLPTRAGRHGQAWTWDGPLNLKNARFAEDQDPLDPGVPCPASQDYSKAYLHHLIRADEILGKILLSWHNIAFFQALTAAMREAISEGRFEQFRRDFRARHLKA

SEQ ID NO: 52873 - protein, 370 aa, Brevundimonas nasdae
  REGION 1..370: note = tr|A0A0B4CR95|A0A0B4CR95_9CAUL Queuine tRNA-ribosyltransferase OS=Brevundimonas nasdae OX=172043; GN = tgt PE=3 SV=1
MPFPFQISATEGRARTGVLKTARGDIRTPAFMPVGTAATVKAMTVDQVKATGADILLGNTYHLMLRPGPERMERLGGLHKFMGWDKPILTDSGGFQVMSLAGISKVKEEAVTFSSHIDGSKHVLTPERSIEIQADRIGADISMQLDQCVAYPAEKDAARKAMELSIRWGARSKARFGERENQALFGIQQGSTFEDLRRQSSEQLQEIGFDGYAIGGLAVGEGHQAMCEVLDYAPEMLPADRPRYLMGVGKPVDLVEAVYRGVDMFDCVLPTRAGRHGQAWTWDGPLNLKNARFAEDQDPLDPTIDGPSSQYSKAYLHHLIRADEILGKVLLSWHNIAFYQALTAAMRAAISEGRFEQFRRDFHARHTSNG

SEQ ID NO: 52874 - protein, 371 aa, Brevundimonas sp.
  REGION 1..371: note = tr|A0A0Q7T6I3|A0A0Q7T6I3_9CAUL Queuine tRNA-ribosyltransferase OS=Brevundimonas sp. Root1423; OX = 1736462 GN=tgt PE=3 SV=1
MPFPFHIQNTEGRARTGVLRTPRGDIRTPAFMPVGTAATVKAMTVDQVAQTGADIILGNTYHLMLRPGPERMERLGGLHKFMGWNRPILTDSGGFQVMSLAGISKVKEDAVTFASHIDGSKHVLSPERSIEIQADRIGADISMQLDQCVAWPAEEPAARAAMELSARWGARSKAAFGTRETQALFGIQQGSTFENLRRESSERLRETGFDGYAIGGLAVGEGHQAMCEVLDYAPDMLPADRPRYLMGVGKPVDLVEAVWRGVDMFDCVLPTRAGRHGQAWTWDGPINLKNARFAEDQDPLDPALACPGSSQYSKAYLHHLIRADEILGKVLLSWHNIAFFQALMAAMRAAIAEGRFEAFRRDFHARHTSNG

SEQ ID NO: 52875 - protein, 370 aa, Brevundimonas sp.
  REGION 1..370: note = tr|A0A3B8UCP2|A0A3B8UCP2_9CAUL Queuine tRNA-ribosyltransferase OS=Brevundimonas sp. OX=1871086; GN = tgt PE=3 SV=1
MPFPFEISATEGRARTGVLKTTRGDIRTPAFMPVGTAATVKAMTVDQVKQTGADIILGNTYHLMLRPGPERMERLGGLHNFMRWDKPILTDSGGFQVMSLSGISKLTEEAVTFSSHIDGSKHVLTPERSIQIQADRLGSDIVMQLDECVAWPAEEKRAREGMELSARWAQRSKNAFGTRDAQALFGIQQGSTYENLRRESSERLQEIGFDGYAIGGLAVGEGHEAMCEVLDYAPEFLPKDRPRYLMGVGKPIDLVEAVYRGVDMFDCVLPTRAGRHGQAWTWDGPLNLKNARFAEDQDPLDPEVPCPASQDYSKAYLHHLIRADEILGKILLSWHNIAFFQALTAAMRAAIAEGTFEQFRRDFRARHLKA

SEQ ID NO: 52876 - protein, 370 aa, Brevundimonas subvibrioides
  REGION 1..370: note = tr|D9QM84|D9QM84_BRESC Queuine tRNA-ribosyltransferase OS=Brevundimonas subvibrioides (strain ATCC 15264 / DSM 4735 / LMG 14903 / NBRC 16000 / CB 81) OX=633149 GN=tg t PE=3 SV=1
MPFPFTLTATEGRARTGVLTTPRGDIRTPAFMPVGTAATVKAMSVDQVKATGADIILGNTYHLMLRPGPERMERLGGLHAFMGWDKPILTDSGGFQVMSLAGISKVKEEAVTFSSHIDGSKHILSPERSIEIQADRIGADISMQLDECVAWPAEEPRARAAMELSARWAARSKAAFGTRETQGLFGIQQGSTFENLRRESSERLIDIGFDGYAIGGLAVGEGHQAMCEVLDYAPDMLPADRPRYLMGVGKPVDLVEAVWRGVDMFDCVLPTRAGRHGQAWTWDGPINLKNARFAEDRTPLDPTIDCPASSQTSKAYLHHLIRADEILGKTLLSWHNIAFYQAVTAAMREAIAHGRFEAWRKDFHARHVSN

SEQ ID NO: 52877 - protein, 369 aa, Brevundimonas subvibrioides
  REGION 1..369: note = tr|A0A258HDP4|A0A258HDP4_9CAUL Queuine tRNA-ribosyltransferase OS=Brevundimonas subvibrioides; OX = 74313 GN=tgt PE=3 SV=1
MPFPFEISATEGRARTGVLKTARGDIRTPAFMPVGTAATVKAMTVEQVKATGADIILGNTYHLMLRPGPERMERLGGLHKFMGWDKPILTDSGGFQVMSLAGISKVKEDAVTFASHIDGSKHVLSPERSIEIQADRIGADISMQLDQCVAWPAEKPAAKAAMELSIRWGARSKAAFGPRETQALFGIQQGSTFEDLRRQSSDQLREIGFDGYAIGGLAVGEGHTAMCEVLDYAPEMLPADRPRYLMGVGKPIDLVEAVYRGVDMFDCVLPTRAGRHGQAWTWDGPINLKNARFAEDQDPLDPTLSGPSSQYSKAYLHHLIRADEILGKILLSWHNIAFFQALTAAMRDAIQHGRFEQFRRDFHTRHTSN

SEQ ID NO: 52878 - protein, 370 aa, Brevundimonas vancanneytii
  REGION 1..370: note = tr|A0A4P1K4W2|A0A4P1K4W2_9CAUL Queuine tRNA-ribosyltransferase OS=Brevundimonas vancanneytii; OX = 1325724 GN=tgt PE=3 SV=1
MPFPFEISAVEGRARTGVLKTTRGDIRTPAFMPVGTAATVKAITVDQVKQTGADIILGNTYHLMLRPGPERMERLGGLHNFMRWDKPILTDSGGFQVMSLSGISKLSEEAVTFSSHIDGSKHVLTPERSIQIQADRLGSDIVMQLDECVAWPAEEKRAREGMELSARWAQRSKNAFGTRDAQALFGIQQGSTYENLRRESSERLQEIGFDGYAIGGLAVGEGHEAMCEVLDFAPEFLPKDRPRYLMGVGKPIDLVEAVYRGVDMFDCVLPTRAGRHGQAWTWDGPLNLKNARFAEDQDLLDPEVPCPASQDYSKAYLHHLIRADEILGKILLSWHNIAFFQALTAAMRAAIAEGRFEQFRRDFRARHLKA

SEQ ID NO: 52879 - protein, 370 aa, Brevundimonas vesicularis
  REGION 1..370: note = tr|A0A2X1CGX3|A0A2X1CGX3_BREVE Queuine tRNA-ribosyltransferase OS=Brevundimonas vesicularis; OX = 41276 GN=tgt PE=3 SV=1
MPFPFQISATEGRARTGVLKTARGDIRTPAFMPVGTAATVKAMTVDQVKATGADILLGNTYHLMLRPGPERMERLGGLHTFMGWDKPILTDSGGFQVMSLAGISKVKEEAVTFSSHIDGSKHVLTPERSIEIQADRIGADISMQLDQCVAYPAEKDAAKKAMELSIRWGARSKTRFGERENQALFGIQQGSTFEDLRRQSSEQLQEIGFDGYAIGGLAVGEGHQAMCEVLDYAPEMLPADRPRYLMGVGKPVDLVEAVYRGVDMFDCVLPTRAGRHGQAWTWDGPLNLKNARFAEDQDPLDPTIDGPSSSYSKAYLHHLIRADEILGKVLLSWHNIAFYQALTAAMRAAISEGRFEQFRRDFHARHTSNG

SEQ ID NO: 52880 - protein, 370 aa, Brevundimonas vesicularis
  REGION 1..370: note = tr|A0A1Z3U547|A0A1Z3U547_BREVE Queuine tRNA-ribosyltransferase OS=Brevundimonas vesicularis; OX = 41276 GN=tgt PE=3 SV=1
MPFPFQIFATEGRARTGVLKTARGDIRTPAFMPVGTAATVKAMTVDQVKATGADILLGNTYHLMLRPGPERMERMGGLHKFMGWDKPILTDSGGFQVMSLAGISKVKEEAVTFSSHIDGSKHVLTPERSIEIQADRIGADISMQLDQCVAYPAEKDAARKAMELSIRWGARSKARFGERENQALFGIQQGSTFADLRRQSSEQLQEIGFDGYAIGGLAVGEGHHAMCEVLDYAPEMLPADRPRYLMGVGKPVDLVEAVYRGVDMFDCVLPTRAGRHGQAWTWDGPLNLKNARFAEDQDPLDPTIDGPSSQYSKAYLHHLIRADEILGKVLLSWHNIAFYQALTAAMRAAISEGRFKQFRRDFHARHTSNG

SEQ ID NO: 52881 - protein, 373 aa, unidentified
  source 1..373: note = Brevundimonas viscosa
  REGION 1..373: note = tr|A0A1I6S180|A0A1I6S180_9CAUL Queuine tRNA-ribosyltransferase OS=Brevundimonas viscosa OX=871741; GN = tgt PE=3 SV=1
MPFPFDISATDGRARTGLLRTPRGDIRTPAFMPVGTAATVKALTVGQVEQTGADILLGNTYHLMLRPGPERMERLGGLHRFMRWDKPILTDSGGFQVMSLSGISKLTEEAVTFSSHVDGSKHVLTPERSIEIQADRLGSDIVMQLDECVAWPAEESRAREGMELSARWAKRSKAAFGSRDAQALFGIQQGSTFEHLRRESSDRLQDIGFDGYAIGGLAVGEGHAAMCEVLDYAPEMLPADRPRYLMGVGKPVDLVEAVWRGVDMFDCVLPTRAGRHGQAWTWAGPINLKNARFAEDEEPLDPEVPCPASQDYSKAYLHHLVRTDEILGKVLLSWHNIAFFQALTAAMRAAIAEGRFEQFRRDFHARHVSNGRG

SEQ ID NO: 52882 - protein, 380 aa, Brochothrix campestris
  REGION 1..380: note = tr|W7D136|W7D136_9LIST Queuine tRNA-ribosyltransferase OS=Brochothrix campestris FSL F6-1037 OX=1265861 GN=tgt PE=3 SV=1
MKPAVTYELIKTDKATGARAGIIHTPHGSFPTPMFMPVGTLATVKTMAPEDLKEMNAGIILSNTYHLWLRPGHELIREAGGLHKFMNWDQPILTDSGGFQVFSLSKIRDIKEEGVHFRSHLDGSKLFLSPEKAIEIQEALGSDIMMSFDECPPYPASREYMIQSMARTTRWAERGLKAHTTMDKQSLFGIVQGGVYADLRQQHAKELASLDFPGYSIGGLSVGEEKHLMNEALEATTPFLPADKPRYLMGVGSPDALIDGVIRGIDMFDCVLPTRIARNGTTMTSQGRVVIKNKIYEKDFGPLDPNCDCHVCKNYSRAYIRHLVKAKESFGIRLTSYHNLHFLIKLMENVREAIMEDRLLAFREEFFEQYGYNKPNPRNF

SEQ ID NO: 52883 - protein, 380 aa, Brochothrix thermosphacta
  REGION 1..380: note = tr|A0A1D2LQ71|A0A1D2LQ71_BROTH Queuine tRNA-ribosyltransferase OS=Brochothrix thermosphacta; OX = 2756 GN=tgt PE=3 SV=1
MRPAVVYELLKTDKETGARAGIIHTPHGSFPTPMFMPVGTLATVKTLSPEELKEMGSGIILSNTYHLWLRPGHELIREAGGLHKFMNWDQPILTDSGGFQVFSLSKIRDIKEEGVHFRSHLDGSKLFLSPEKAIEIQEALGSDIMMSFDECPPYPASREYMIQSMARTTRWAERGLKAHTTMDKQSLFGIVQGGVYSDLRQQHAKELASLDFPGYSIGGLSVGEEKHLMNEALEATTPFLPADKPRYLMGVGSPDALIDGVIRGIDMFDCVLPTRIARNGTTMTSQGRVVIKNAIYERDFGPLDPNCDCHVCKNYSRAYLRHLIKAKEAFGIRLTSYHNLYFLIKLMEDVREAIMEDRLLAFREEFFEQYGYNKENPRNF

SEQ ID NO: 52884 - protein, 377 aa, unidentified
  source 1..377: note = Brockia lithotrophica
  REGION 1..377: note = tr|A0A2T5G785|A0A2T5G785_9THEO Queuine tRNA-ribosyltransferase OS=Brockia lithotrophica OX=933949; GN = tgt PE=3 SV=1
MAIRFEVLARDRRSGARVGRLVTPHGTFETPMFMPVGTQATVKTLAPEELREIGAKIVLANTYHLWLRPGEDVVAEAGGLHRFMAWDGAILTDSGGFQVFSLAERRRVEEEGVYFLSHLDGSVKFMSPEVSIAVQNALDADIIMAFDECPPLEADRTYVEKSAERTLRWAERSLRAHRFPERQALFGIVQGGFYPDLRIAHARALVALDFPGYAVGGLSIGEPKEVMYRILEETVPHLPEGKPRYLMGVGSPDAIFAAVERGIDLFDSVLPTRIARNGTAMTSRGRLVVRNAEYRRSWDPLDAACDCKVCRTFTRGYLRHLFHAEEMLGPRLLTYHNLYFLLSLMEGIRASIREGRFQEFKEAFLTAYYADQPNRGF

SEQ ID NO: 52885 - protein, 253 aa, unidentified
  source 1..253: note = Brucella abortus
  REGION 1..253: note = tr|D7H3N1|D7H3N1_BRUAO Queuine tRNA-ribosyltransferase (Fragment) OS=Brucella abortus bv. 5 str. B3196 OX=520453 GN=BAYG_01362 PE=3 SV=1
MTTENFGFKVLARDGAARQGEISMPRGVVRTPAFMPVGTAGTVKAMYMDQVKELGADIILGNTYHLMLRPGAERVARLGGLHEFGGWKGPILTDSGGFQVMSLAQLRKLNEHGVTFRSHIDGKAYEMTPERSIEIQGLLDSDIQMQLDECVALPSPEKNTERAMELSLRWAERCKVAFGDQPGKAMFGIVQGGDIARLRERSAEALKAMDLKGYSVGGLAVGEPQEVMLDMLEVVCPILPTEKPRYLMGVGTP

SEQ ID NO: 52886 - protein, 377 aa, unidentified
  source 1..377: note = Brucella abortus
  REGION 1..377: note = tr|Q57D46|Q57D46_BRUAB Queuine tRNA-ribosyltransferase OS=Brucella abortus biovar 1 (strain 9-941) OX=262698 GN=tgt PE=3 SV=1
MTTENFGFKVLARDGAARQGEISMPRGVVRTPAFMPVGTAGTVKAMYMDQVKELGADIILGNTYHLMLRPGAERVARLGGLHEFGGWKGPILTDSGGFQVMSLAQLRKLNEHGVTFRSHIDGKAYEMTPERSIEIQGLLDSDIQMQLDECVALPSPEKNTERAMELSLRWAERCKVAFGDQPGKAMFGIVQGGDIARLRERSAEALKAMDLKGYSVGGLAVGEPQEVMLDMLEVVCPILPTEKPRYLMGVGTPDDILKSVARGIDMFDCVMPTRAGRHGLAFTRFGKVNLRNARHAEDHRPLDPQSDCPASRDYSRAYLHHLVKSGEALGAMLLTWNNLAYYQYLMKGIRAAIADGNFSDFTAETTEGWARGDMPAL

SEQ ID NO: 52887 - protein, 377 aa, unidentified; identical to SEQ ID NO: 52886
  source 1..377: note = Brucella canis
  REGION 1..377: note = tr|A9M5A3|A9M5A3_BRUC2 Queuine tRNA-ribosyltransferase OS=Brucella canis (strain ATCC 23365 / NCTC 10854) OX=483179 GN=tgt PE=3 SV=1

SEQ ID NO: 52888 - protein, 377 aa, Brucella ceti
  REGION 1..377: note = tr|C0G6I2|C0G6I2_9RHIZ Queuine tRNA-ribosyltransferase OS=Brucella ceti str. Cudo; OX = 595497 GN=tgt PE=3 SV=1
MTTENFGFKVLARDGAARQGEISMPRGVVRTPAFMPVGTAGTVKAMYMDQVKELGADIILGNTYHLMLRPGAERVARFGGLHEFGGWKGPILTDSGGFQVMSLAQLRKLNEHGVTFRSHIDGKAYEMTPERSIEIQGLLDSDIQMQLDECVALPSPEKNTERAMELSLRWAERCKVAFGDQPGKAMFGIVQGGDIARLRERSAEALKAMDLKGYSVGGLAVGEPQEVMLDMLEVVCPILPTEKPRYLMGVGTPDDILKSVARGIDMFDCVMPTRAGRHGLAFTRFGKVNLRNARHAEDHRPLDPQSDCPASRDYSRAYLHHLVKSGEALGAMLLTWNNLAYYQYLMKGIRAAIADGNFSDFTAETTEGWARGDMPAL

SEQ ID NO: 52889 - protein, 377 aa, Brucella melitensis; identical to SEQ ID NO: 52886
  REGION 1..377: note = tr|A0A4P6KM72|A0A4P6KM72_BRUML Queuine tRNA-ribosyltransferase OS=Brucella melitensis OX=29459; GN = tgt PE=3 SV=1

SEQ ID NO: 52890 - protein, 377 aa, Brucella melitensis
  REGION 1..377: note = sp|Q8YHB2|TGT_BRUME Queuine tRNA-ribosyltransferase; OS = Brucella melitensis biotype 1 (strain 16M / ATCC 23456 / NCTC 10094) OX=224914 GN=tgt PE=3 SV=1
MTTENFGFKVLARDGAARQGEISMPRGVVRTPAFMPVGTAGTVKAMYMDQVKELGADIILGNTYHLMLRPGAERVARLGGLHEFGGWKGPILTDSGGFQVMSLAQLRKLNEHGVTFRSHIDGKAYEMTPERSIEIQGLLDSDIQMQLDECVALPSPEKNTERAMELSLRWAERCKVAFGDQPGKAMFGIVQGGDIARLRERSAEALKAMDLKGYSVGGLAVGEPQEVMLDMLEVVCPILPTEKPRYLMGVGTPDDILKSVARGIDMFDCVMPTRAGRHGLAFTRFGKVNLRNARHAEDHRPLDPQSDCPASRDYSRAYLHHLVKSGEALGAMLLTWNNLAYYQYLMKGIRAAIADGKFSDFTAETTEGWARGDMPAL

SEQ ID NO: 52891 - protein, 377 aa, Brucella microti; identical to SEQ ID NO: 52890
  REGION 1..377: note = tr|C7LC44|C7LC44_BRUMC Queuine tRNA-ribosyltransferase OS=Brucella microti (strain CCM 4915) OX=568815 GN=tgt PE=3 SV=1

SEQ ID NO: 52892 - protein, 202 aa, unidentified
  source 1..202: note = Brucella neotomae
  REGION 1..202: note = tr|A0A381B8T7|A0A381B8T7_BRUNE Queuine tRNA-ribosyltransferase OS=Brucella neotomae OX=29460; GN = tgt_1 PE=4 SV=1
MAFGDQPGKAMFGIVQGGDIARLRERSAEALKAMDLKGYSVGGLAVGEPQEVMLDMLEVVCPILPTEKPRYLMGVGTPDDILKSVARRIDMFDCVMPTRAGRHGLAFTRFGKVNLRNARHAEDHRPLDPQSDCPASRDYSRAYLHHLVKSGEALGAMLLTWNNLAYYQYLMKGIRAAIADGKFSDFTAETTEGWARGDMPAL

SEQ ID NO: 52893 - protein, 377 aa, unidentified
  source 1..377: note = Brucella neotomae
  REGION 1..377: note = tr|A0A381B945|A0A381B945_BRUNE Queuine tRNA-ribosyltransferase OS=Brucella neotomae OX=29460; GN = tgt_2 PE=3 SV=1
MTTENFGFKVLARDGAARQGEISMPRGVVRTPAFMPVGTAGTVKAMYMDQVKELGADIILGNTYHLMLRPGAERVARLGGLHEFGGWKGPILTDSGGFQVMSLAQLRKLNEHGVTFRSHIDGKAYEMTPERSIEIQGLLGSDIQMQLDECVALPSPEKNTERAMELSLRWAERCKVAFGDQPGKAMFGIVQGGDIARLRERSAEALKAMDLKGYSVGGLAVGEPQEVMLDMLEVVCPILPTEKPRYLMGVGTPDDILKSVARGIDMFDCVMPTRAGRHGLAFTRFGKVNLRNARHAEDHRPLDPQSDCPASRDYSRAYLHHLVKSGEALGAMLLTWNNLAYYQYLMKGIRAAIADGNFSDFTAETTEGWARGDMPAL

SEQ ID NO: 52894 - protein, 377 aa, unidentified
  source 1..377: note = Brucella ovis
  REGION 1..377: note = tr|N8LXX5|N8LXX5_BRUOV Queuine tRNA-ribosyltransferase OS=Brucella ovis IntaBari-2002-82-58 OX=1293916 GN=tgt PE=3 SV=1
MTIENFGFKVLARDGAARQGKISMPRGVVRTPAFMPVGTAGTVKAMYMDQVKELGADIILGNTYHLMLRPGAERVARLGGLHEFGGWKGPILTDSGGFQVMSLAQLRKLNEHGVTFRSHIDGKAYEMTPERSIEIQGLLDSDIQMQLDECVALPSPEKNTERAMELSLRWAERCKVAFGDQPGKAMFGIVQGGDIARLRERSAEALKAMDLKGYSVGGLAVGEPQEVMLDMLEVVCPILPTEKPRYLMGVGTPDDILKSVARGIDMFDCVMPTRAGRHGLAFTRFGKVNLRNARHAEDHRPLDPQSDCPASRDYSRAYLHHLVKSGEALGAMLLTWNNLAYYQYLMKGIRAAIADGNFSDFTAETTEGWARGDMPAL

SEQ ID NO: 52895 - protein, 377 aa, unidentified; identical to SEQ ID NO: 52894
  source 1..377: note = Brucella ovis
  REGION 1..377: note = tr|A0A0H3ARE5|A0A0H3ARE5_BRUO2 Queuine tRNA-ribosyltransferase OS=Brucella ovis (strain ATCC 25840 / 63/290 / NCTC 10512) OX=444178 GN=tgt PE=3 SV=1

SEQ ID NO: 52896 - protein, 377 aa, Brucella pinnipedialis; identical to SEQ ID NO: 52886
  REGION 1..377: note = tr|A0A0E1X2A7|A0A0E1X2A7_9RHIZ Queuine tRNA-ribosyltransferase OS=Brucella pinnipedialis M292/94/1 OX=520462 GN=tgt PE=3 SV=1

SEQ ID NO: 52897 - protein, 377 aa, Brucella sp.
  REGION 1..377: note = tr|A0A1M4LAK0|A0A1M4LAK0_9RHIZ Queuine tRNA-ribosyltransferase OS=Brucella sp. 10RB9215; OX = 1149953 GN=tgt PE=3 SV=1
MTTENFGFKVLARDGAARQGEISMPRGVVRTPAFMPVGTAGTVKAMYMDQVKELGADIILGNTYHLMLRPGAERVARLGGLHEFGGWKGPILTDSGGFQVMSLAQLRKLNEHGVTFRSHIDGKAYEMTPERSIEIQGLLDSDIQMQLDECVALPSPEKNTERAMELSLRWAERCKVAFGDQPGKAMFGIVQGGDIARLREKSAEALKAMDLKGYSVGGLAVGEPQEVMLDMLEVVCPILPMEKPRYLMGVGTPDDILKSVARGIDMFDCVMPTRAGRHGLAFTRFGKVNLRNARHAEDHRPLDPQSDCPASRDYSRAYLHHLVKSGEALGAMLLTWNNLAYYQYLMKGIRAAIADGNFSDFTAETTEGWARGDMPAL

SEQ ID NO: 52898 - protein, 377 aa, Brucella sp.
  REGION 1..377: note = tr|D1CY51|D1CY51_9RHIZ Queuine tRNA-ribosyltransferase OS=Brucella sp. 83/13 OX=520449; GN = tgt PE=3 SV=1
MTTENFGFKVLARDGAARQGEISMPRGVVRTPAFMPVGTAGTVKAMYMDQVKELGADIILGNTYHLMLRPGAERVARLGGLHEFGGWKGPILTDSGGFQVMSLAQLRKLNEHGVTFRSHIDGKAYEMTPERSIEIQGLLDSDIQMQLDECVALPSPEKNTERAMELSLRWAERCKVAFGDQPGKAMFGIVQGGDIARLRERSAEALKAMDLKGYSVGGLAVGEPQEVMLDMLEVVCPILPTEKPRYLMGVGTPDDILKSVARGIDMFDCVMPTRAGRHGLAFTRFGKVNLRNARHAEDHRPLDPQSDCPASRDYSRAYLHHLVKSGEALGAMLLTWNNLAYYQYLMKGIRAAIADGNFSDFTAEITEGWARGDMPAL

SEQ ID NO: 52899 - protein, 374 aa, unidentified
  source 1..374: note = Brucella suis
  REGION 1..374: note = tr|A0A4Z0F0X8|A0A4Z0F0X8_BRUSS Queuine tRNA-ribosyltransferase (Fragment) OS=Brucella suis; OX = 29461 GN=tgt PE=3 SV=1
MTTENFGFKVLARDGAARQGEISMPRGVVRTPAFMPVGTAGTVKAMYMDQVKELGADIILGNTYHLMLRPGAERVARLGGLHEFGGWKGPILTDSGGFQVMSLAQLRKLNEHGVTFRSHIDGKAYEMTPERSIEIQGLLDSDIQMQLDECVALPSPEKNTERAMELSLRWAERCKVAFGDQPGKAMFGIVQGGDIARLRERSAEALKAMDLKGYSVGGLAVGEPQEVMLDMLEVVCPILPTEKPRYLMGVGTPDDILKSVARGIDMFDCVMPTRAGRHGLAFTRFGKVNLRNARHAEDHRPLDPQSDCPASRDYSRAYLHHLVKSGEALGAMLLTWNNLAYYQYLMKGIRAAIADGNFSDFTAETTEGWARGDM

SEQ ID NO: 52900 - protein, 377 aa, unidentified; identical to SEQ ID NO: 52886
  source 1..377: note = Brucella suis
  REGION 1..377: note = sp|Q8G0K1|TGT_BRUSU Queuine tRNA-ribosyltransferase; OS = Brucella suis biovar 1 (strain 1330) OX=204722 GN=tgt; PE = 3 SV=1

SEQ ID NO: 52901 - protein, 377 aa, unidentified
  source 1..377: note = Brucellaceae bacterium
  REGION 1..377: note = tr|A0A3P1UNF2|A0A3P1UNF2_9RHIZ Queuine tRNA-ribosyltransferase OS=Brucellaceae bacterium VT-16-1752 OX=2487907 GN=tgt PE=3 SV=1
MTSENFEFTVLARDGAARQGEISMPRGVVRTPAFMPVGTAGTVKAMYMDQVKDLGADIILGNTYHLMLRPGAERVARLGGLHEFGGWKGPILTDSGGFQVMSLAQLRKLDEKGVTFRSHIDGKAYEMTPERSIEIQGLLDSDIQMQLDECVALPSPEKNTERAMELSLRWAERCKVAFGDQPGKAMFGIVQGGDNARLRERSAEALKAMDLKGYSVGGLAVGEPQNVMLDMLEVVCPILPAEKPRYLMGVGTPDDILKSVARGIDMFDCVMPTRAGRHGLAFTRFGKVNLRNARHADDHRPLDPESDCPASRDYSRAYLHHLVKSGEALGAMLLTWNNLAYYQYLMKGIRAAIAEGRFNDFAAETTAGWERGDIPAL

SEQ ID NO: 52902 - protein, 376 aa, unidentified
  source 1..376: note = Brumimicrobium aurantiacum
  REGION 1..376: note = tr|A0A3E1EY97|A0A3E1EY97_9FLAO Queuine tRNA-ribosyltransferase OS=Brumimicrobium aurantiacum; OX = 1737063 GN=tgt PE=3 SV=1
MHFELKHQDKNSQARAGKLVTDHGEIETPIFMPVGTVGSVKGIHQHEIENEINAQIILGNTYHLFLRPGTEVLEAAGGLHKFIDYKRPILTDSGGYQVYSMSGSRKITEEGVKFQSHVDGSYHFFTPERAIDIQRSIGADIIMAFDECTPYPCDYQYAKRSMKMTHRWLDRCFTQMNNTQPKYGYDQALFPIVQGSVYTDLRQESAKYIADTDSLGNAIGGLSVGEPAEELYAMTEVVTDILPKEKPRYLMGVGTPMNLLECIALGVDMFDCVMPTRNARHGMLFTSEGIINIKNKKWEKDFTPIDPNGTSSVDTVYTKAYLRHLIKTKESLGLQIASIHNLAFYLALMKEARKRIIDGSFKEWKNVMVKKMAQRL

SEQ ID NO: 52903 - protein, 376 aa, Brumimicrobium glaciale
  REGION 1..376: note = tr|A0A4V1WG11|A0A4V1WG11_9FLAO Queuine tRNA-ribosyltransferase OS=Brumimicrobium glaciale; OX = 200475 GN=tgt PE=3 SV=1
MHFELLHQDKNSQARAGKLVTDHGEIETPIFMPVGTVGSVKGIHQHEIENEIKAQIILGNTYHLFLRPGTEVLEAAGGLHKFMNYNRPILTDSGGYQVYSMSGSRKITEEGVKFQSHVDGSYHFFTPERAIDIQRSIGADIIMAFDECTPYPCDYQYAKRSMKMTHRWLDRCFTQMNNTEPKYGYEQALFPIVQGSVYTDLRQESAKYIADTDSLGNAIGGLSVGEPAEELYAMTEVVTAILPKEKPRYLMGVGTPINLLECIALGIDMFDCVMPTRNARHGMLFTSEGIINIKNKKWEKDFSPIDPNGTSSVDTFYTKAYLRHLVRTKESLGLQIASIHNLAFYLALMKEARTRIIDGTFTEWKNKMVVKLGQRL

SEQ ID NO: 52904 - protein, 376 aa, unidentified
  source 1..376: note = Brumimicrobium salinarum
  REGION 1..376: note = tr|A0A2I0R3M4|A0A2I0R3M4_9FLAO Queuine tRNA-ribosyltransferase OS=Brumimicrobium salinarum; OX = 2058658 GN=tgt PE=3 SV=1
MHFELLHQDKDTKARVGKLHTDHGEIETPIFMPVGTAGTVKGIHQYEIENEIQAQIILGNTYHLFLRPGTEVIEAAGGLHKFINYNRPILTDSGGYQVYSLSGSRKITEEGVKFQSHIDGTYHFFTPERAIDIQKSIGADIIMAFDECTPYPCDYQYAKNSMKMTHRWLDRCFAQFNKTPGKYGYEQALFPIVQGSVYKDLRQESAKYIADTDSLGNAIGGLSVGEPAEELYEMTEVVTDILPSEKPRYLMGVGTPINLLECIALGIDMFDCVMPTRNARHGLLFTSEGTINIKNKKWEKDFSPIDPNGTSSVDSFYTKAYLRHLIKTKEYLGVQIASIHNLAFYLALIKEARVKIMEGTFLEWKDEMVKKLGQRL

SEQ ID NO: 52905 - protein, 376 aa, Brumimicrobium sp.
  REGION 1..376: note = tr|A0A2U2X0P0|A0A2U2X0P0_9FLAO Queuine tRNA-ribosyltransferase OS=Brumimicrobium sp. C305; OX = 2100725 GN=tgt PE=3 SV=1
MHFELLHQDKSSQARAGKLVTDHGEIETPIFMPVGTVGSVKGVHQQEIENEIKAQIILGNTYHLFLRPGTEVLEAAGGLHKFMNYNRPILTDSGGYQVYSMSGSRKITEEGVKFQSHVDGSYHFFTPERAIDIQRSIGADIIMAFDECTPYPCDYQYAKRSMKMTHRWLDRCFTQMNNTEPKYGYEQALFPIVQGSVYTDLRQESAKYIADTDSLGNAIGGLSVGEPAEELYAMTEVVTEILPKEKPRYLMGVGTPVNLLECVALGIDMFDCVMPTRNARHGMLFTSEGVINIKNKKWEKDFTPLDPNGTSSVDHFYTKAYLRHLLKTKESLGMQIASIHNLAFYLALMKEARARIVDGTFTEWKNKMVVKLDQRL

SEQ ID NO: 52906 - protein, 284 aa, unidentified
  source 1..284: note = Bryobacterales bacterium
  REGION 1..284: note = tr|A0A359LRF9|A0A359LRF9_9BACT Queuine tRNA-ribosyltransferase (Fragment) OS=Bryobacterales bacterium OX=2026791 GN=tgt PE=3 SV=1
SGGFQVFSLNGLRKISEEGVLFRSHLNGDAHLFTPESTVDTQLAFGSDIMMVLDECLAYPASHEASAVSSDLTVRWARRAFAHYRDQCERIETRHALFPIVQGGMFPDLRRRCAEQLLELDAEGYAIGGLSVGEPRALSLEMTEAAAPLLPEDRPRYVMGVGMPEELGEYVARGVDMMDCVLPTRNARNGCLFTSRGRVIIKQARYREDDQPLDANCRCYTCAHFSRAYLRHLFQSGEILFSTLATIHNLSHYLDRMKQMRESIGFGTFPAFLKAVHSQAEEDS

SEQ ID NO: 52907 - protein, 380 aa, unidentified
  source 1..380: note = Bryobacterales bacterium
  REGION 1..380: note = tr|A0A350UEG0|A0A350UEG0_9BACT Queuine tRNA-ribosyltransferase OS=Bryobacterales bacterium; OX = 2026791 GN=tgt PE=3 SV=1
MRAIRFELEAVCPETGARAGRLHTPHGIVETPVFMPVGTQATVKGVLQRDLAEELGARIILGNTYHLFLRPGHELIRKFGGLHGFMQWDRAILTDSGGFQVWSLSKLRKVREEGVVFQSHLNGDRHLFTPESVVDVQRALGSDIMMVLDECTDYPATEKDARRSMELTVRWARRAFAHYRTQGGEAEGRQALFPIVQGSMFAEFRRECAAQLVELDADGYAIGGLSVGEPRPLSLEMTEAAEPLLPADRPRYVMGVGMPGELPEYVARGIDMMDCVLPSRNARNGCLFTSEGKLIIKQAQYREDPRPVDPACGCLTCRSYSRAYLRHLFVAGEMLYSTLATIHNIAHYLDIMRRMRESIVLGTFPAFLQSVRTSPLAAGD

SEQ ID NO: 52908 - protein, 426 aa, Bryocella elongata
  REGION 1..426: note = tr|A0A1H5YD66|A0A1H5YD66_9BACT Queuine tRNA-ribosyltransferase OS=Bryocella elongata OX=863522; GN = tgt PE=3 SV=1
MSNVPGQEATKNPHLVPDFYNEVWMQPDFTVHNTTPAGGRRSVLRLPHGEVQTPVFMPVGTAATVKTIEQSVIESLNAEIILANTYHLYLRPGHELIRRAGGVHRFMSWQRPMLTDSGGFQVFSLSKLRKVTPDGVEFRSHLDGSKHFFSPEHSMAVQIALGADIMMAFDECVETPASWERTRDSMGLTHEWAARSKRYWEEHRHEVPWGQGLGIREQGLDLAPGGSTAFGRTYDHTRFSDKHQLLFGIVQGGMYPDLRRESAERLVEMDFPGYAIGGLAVGEPREVTREMIALSLEILPKDKPRYVMGVGYPDEIEEYAKLGVDMMDCVLPTRAGRHGLVFIREDPNDRASKPIRWNIKRVDNAEDHGPIDAGCKCMVCERYSRAYLRHLYVSDEPLGAMLNSIHNVAFYLETMTRVRAELQAQV

SEQ ID NO: 52909 - protein, 370 aa, Buchnera aphidicola
  REGION 1..370: note = sp|P57233|TGT_BUCAI Queuine tRNA-ribosyltransferase; OS = Buchnera aphidicola subsp. Acyrthosiphon pisum (strain APS) OX=107806 GN=tgt PE=3 SV=1
MNFKVLYQDNNARCGVFNFNQEIIETPVFMPVGTYGAVKSISTEEIKNTGSRIILSNAFHLYFRPGLEIIKLHGNLHNFMNWSGPILTDSGGFQVFSLSRFCKVNEEGVIFQNHIDGKKTFLTPKISMKIQSDLGSNIVMIFDQCIEYNQNWEKTKNAMERSLYWAKKSRIYFDSYKNKNSLFGIIHGGIYPSLRDISLQELIKIDFDGYALGGLAVGEPKIEMYKLLDHICPQIPKNKPRYLMGVGKPEDLIEGVRRGVDMFDCVIPTRNARNGHLFVTNGVIKIRNKKYKKDLSCLDNTCVCYTCRYYSRSYLHHLDACNEILGARLNTIHNLHYYQTLMSNIRNSIKNNTFEQFSVNFYKQKNKIDF

SEQ ID NO: 52910 - protein, 370 aa, Buchnera aphidicola
  REGION 1..370: note = sp|B8D738|TGT_BUCAT Queuine tRNA-ribosyltransferase; OS = Buchnera aphidicola subsp. Acyrthosiphon pisum (strain Tuc7) OX=561501 GN=tgt PE=3 SV=1
MNFEVLYQDNNARCGVFNFNQEIIETPVFMPVGTYGAVKSISTEEIKNTGSRIILSNAFHLYFRPGLEIIKLHGNLHNFMNWSGPILTDSGGFQVFSLSRFCKINEEGVIFQNHIDGKKTFLTPKISMKIQSDLGSNIVMIFDQCIEYNQNWEKTKNAMERSLYWAKKSRIYFDSYKNKNSLFGIIHGGIYPSLRDISLQELIKIDFDGYALGGLAVGEPKIEMYKLLDHICPQIPKNKPRYLMGVGKPEDLIEGVRRGVDMFDCVIPTRNARNGHLFVTNGVIKIRNKKYKKDLSCLDNTCACYTCRYYSRSYLHHLDACNEILGARLNTIHNLHYYQTLMSNIRNSIKNNTFEQFSLNFYKQKNKIDF

SEQ ID NO: 52911 - protein, 333 aa, Budvicia aquatica
  REGION 1..333: note = tr|A0A484ZVA6|A0A484ZVA6_9GAMM Queuine tRNA-ribosyltransferase OS=Budvicia aquatica OX=82979; GN = tgt PE=3 SV=1
MKFELQTTDGRARRGRLVFERGVVETPAFMPVGTYGTVKGMTPEEVKETGAQILLGNTFHLWLRPGQDIMRKHGDLHDFMNWHGPILTDSGGFQVFSLGDISKITEEGVNFRNPINGDAIFLSPEKSMEIQNDLGSDIVMIFDECTPYPADWDYAKRSMEMSLRWAKRSRVRFDELNNKNALFGIIQGSVYEDLRDVSVKGLVDIGFDGYAVGGLAVGEPKEDMHRILEHVCPQIPADKPRYLMGVGKPEDLVEGVRRGIDMFDCVMPTRNARNGHLFVTDGVVKIRNAKHKDDTSTLDEHCDCYTCRNYSRAYLYHLDRCNEILGARLNTIP

SEQ ID NO: 52912 - protein, 374 aa, Budvicia aquatica
  REGION 1..374: note = tr|A0A2C6DK83|A0A2C6DK83_9GAMM Queuine tRNA-ribosyltransferase OS=Budvicia aquatica OX=82979; GN = tgt PE=3 SV=1
MKFELQTTDGRARRGRLVFERGVVETPAFMPVGTYGTVKGMTPEEVKETGAQILLGNTFHLWLRPGQDIMRKHGDLHDFMNWHGPILTDSGGFQVFSLGDISKITEEGVNFRNPINGDAIFLSPEKSMEIQNDLGSDIVMIFDECTPYPADWDYAKRSMEMSLRWAKRSRVRFDELNNKNALFGIIQGSVYEDLRDVSVKGLVDIGFDGYAVGGLAVGEPKEDMHRILEHVCPQIPADKPRYLMGVGKPEDLVEGVRRGIDMFDCVMPTRNARNGHLFVTDGVVKIRNAKHKDDTSTLDEHCDCYTCRNYSRAYLYHLDRCNEILGARLNTIHNLRYYQRLMAGLRNAIEQGTLEHFVADFYDRIGKTVPPLAN

SEQ ID NO: 52913 - protein, 377 aa, Bulleidia extructa
  REGION 1..377: note = tr|D2MP01|D2MP01_9FIRM Queuine tRNA-ribosyltransferase OS=Bulleidia extructa W1219; OX = 679192 GN=tgt PE=3 SV=1
MKNPVTFEITHICKQSGARTGLLHTPHGDVETPMFMPVGTLATVKFISPEELYTMKAGVILANTYHLWLRPGEEIVFKAGGVQKFMNYKGPMLTDSGGFQVFSLSDTRKIAEEGVYFKNIFNGDSLFLSPEKSIQIQNKIGADIIMSFDECIPYPATYDYAKKSMERTLRWAKRGKEANRRPEEQALFGIVQGGDNEDLRRYCAEKLVEMDFPGYAIGGTSVGEDKETMMRMVDYCTPYLPENKPRYLMGVGAVNDLLGAILRNIDMCDCVLPTRIARHGTLLTSEGRINIHKAIYKEDFRPLDSKCDCYCCQNYSRAYLHHLFKTKEGFGTRLMSIHNIRFLIRLMENARQAIKEDRYLDFMNETLANMGFDERGF

SEQ ID NO: 52914 - protein, 397 aa, Burkholderia ambifaria
  REGION 1..397: note = tr|A0A2S9L072|A0A2S9L072_9BURK Queuine tRNA-ribosyltransferase OS=Burkholderia ambifaria; OX = 152480 GN=tgt PE=3 SV=1
MTEGSSHDHDTHAPVHDRPANGLEFELLTTDGHARRGRVKLNHGVVETPIFMPVGTYGTVKAIQPRELHEINAQIILGNTFHLWLRPGLDTIDAHGGLHGFMGWNKPILTDSGGFQVFSLGDLRKITEDGVTFASPINGDKLFLSPEVSMQIQKVLNSDIVMQFDECTPYATNGVPTTHKEAADSMRMSLRWAKRSLDEFDRLGNPNALFGIVQGGMFEDLRDESLAGLSELGFHGLAIGGLSVGEPKEDMMRVLRHVGPKLPANKPHYLMGVGTPEDLVEGVANGIDMFDCVMPTRNARNGWLFTRFGDVKIRNATHKNSLKPLDASCTCYTCQNFSRGYLHHLHRVGEILGAQLNTIHNLHYYLQLMGEIRDAIETHTFDAFRQRFAEDRARGVD

SEQ ID NO: 52915 - protein, 395 aa, Burkholderia ambifaria
  REGION 1..395: note = tr|B1T9K0|B1T9K0_9BURK Queuine tRNA-ribosyltransferase OS=Burkholderia ambifaria MEX-5; OX = 396597 GN=tgt PE=3 SV=1
MTEGSSHDTHPPVQGRPANGLEFELLTTDGHARRGRVKLNHGVVETPIFMPVGTYGTVKAIQPRELHEIKAQIILGNTFHLWLRPGLDTIDAHGGLHGFMGWNKPILTDSGGFQVFSLGDLRKITEDGVTFASPINGDKLFLSPEVSMQIQKVLNSDIVMQFDECTPYATNGVPTTHKEAADSMRMSLRWAKRSLDEFDRLGNPNALFGIVQGGMFEDLRDESLAGLSELGFHGLAIGGLSVGEPKEDMMRVLRHVGPKLPANKPHYLMGVGTPEDLVEGVANGIDMFDCVMPTRNARNGWLFTRFGDVKIRNATHKNALKPLDASCTCYTCQNFSRGYLHHLHRVGEILGAQLNTIHNLHYYLQLMGEIRDAIETHTFDAFRQRFAEDRARGVD

SEQ ID NO: 52916 - protein, 399 aa, Burkholderia anthina
  REGION 1..399: note = tr|A0A3P0C938|A0A3P0C938_9BURK Queuine tRNA-ribosyltransferase OS=Burkholderia anthina OX=179879; GN = tgt PE=3 SV=1
MTEGSSHDTHAHPSAPVQDRPANGLEFELLTTDGHARRGRVKLNHGTVETPIFMPVGTYGTVKAIQPRELHEIKAQIILGNTFHLWLRPGLDTIDAHGGLHGFMGWNKPILTDSGGFQVFSLGDLRKITEDGVTFASPINGDKLFLSPEVSMQIQKVLNSDIVMQFDECTPYATNGVPTTHKEAADSMRMSLRWAKRSLDEFNRLGNPNALFGIVQGGMFEDLRDESLAGLSELGFHGLAIGGLSVGEPKEDMMRVLRHVGPKLPASKPHYLMGVGTPEDLVDGVTNGIDMFDCVMPTRNARNGWLFTRFGDVKIRNATHKNSLKPLDSTCTCYTCQNFSRGYLHHLHRVGEILGAQLNTIHNLHYYLQLMSEIRDAIETHTFDAFRQRFAEDRARGVD

SEQ ID NO: 52917 - protein, 399 aa, Burkholderia anthina
  REGION 1..399: note = tr|A0A104L625|A0A104L625_9BURK Queuine tRNA-ribosyltransferase OS=Burkholderia anthina OX=179879; GN = tgt PE=3 SV=1
MTEGSSHDTHAHPSAPVQDRPANGLEFELLTTDGHARRGRVKLNHGTVETPIFMPVGTYGTVKAIQPRELHEIKAQIILGNTFHLWLRPGLDTIDAHGGLHGFMGWNKPILTDSGGFQVFSLGDLRKITEDGVTFASPINGDKLFLSPEVSMQIQKVLNSDIVMQFDECTPYATNGVPTTHKEAADSMRMSLRWAKRSLDEFNRLGNPNALFGIVQGGMFEDLRDESLAGLSELGFHGLAIGGLSVGEPKEDMMRVLRHVGPKLPASKPHYLMGVGTPEDLVDGVANGIDMFDCVMPTRNARNGWLFTRFGDVKIRNATHKNSLKPLDSTCTCYTCQNFSRGYLHHLHRVGEILGAQLNTIHNLHYYLQLMSEIRDAIETHTFDAFRQRFAEDRARGVD

SEQ ID NO: 52918 - protein, 395 aa, unidentified
  source 1..395: note = Burkholderia catarinensis
  REGION 1..395: note = tr|A0A1J9NTL5|A0A1J9NTL5_9BURK Queuine tRNA-ribosyltransferase OS=Burkholderia catarinensis; OX = 1108140 GN=tgt PE=3 SV=1
MTEGSSHDTNAPVQDRPANGLEFELLATDGHARRGRVKLNHGVVETPIFMPVGTYGTVKAIQPRELHEIKAQIILGNTFHLWLRPGLDTIDAHGGLHGFMGWNKPILTDSGGFQVFSLGDLRKITEDGVTFASPINGDKLFLSPEVSMQIQKVLNSDVVMQFDECTPYATNGVPTTHKEAADSMRMSLRWAKRSLDEFDRLGNPNALFGIVQGGMFEDLRDESLAGLSELGFHGLAIGGLSVGEPKEDMMRVLRHVGPKLPANKPHYLMGVGTPEDLVEGVANGIDMFDCVMPTRNARNGWLFTRFGDVKIRNATHKNSLKPLDASCTCYTCQNFSRGYLHHLHRVGEILGAQLNTIHNLHYYLQLMSEIRDAIETHTFDAFRQRFAEDRARGVD

SEQ ID NO: 52919 - protein, 447 aa, Burkholderia cenocepacia
  REGION 1..447: note = tr|A0A0H2XML5|A0A0H2XML5_BURCA Queuine tRNA-ribosyltransferase OS=Burkholderia cenocepacia (strain AU 1054) OX=331271 GN=tgt PE=3 SV=1
MRTMAGASHCRRAVFYVVRATLARTRFSPPPISRAAFPTCAGLFSGSKESNTMTEGSSHDTHAPVQDRPANGLEFELLTTDGHARRGRVKLNHGTVETPIFMPVGTYGTVKAIQPRELHEIKAQIILGNTFHLWLRPGLDTIDAHGGLHGFMGWNKPILTDSGGFQVFSLGDLRKITEDGVTFASPINGDKLFLSPEVSMQIQKVLNSDVVMQFDECTPYATNGVPTTHQEAADSMRMSLRWAKRSLDEFHRLGNPNALFGIVQGGMFEDLRDESLAGLAELGFHGLAIGGLSVGEPKEDMMRVLQHVGPKLPANKPHYLMGVGTPEDLVEGVANGIDMFDCVMPTRNARNGWLFTRFGDVKIRNATHKNSLKPLDSTCTCYTCQNFSRGYLHHLHRVGEILGAQLNTIHNLHYYLQLMSEIRDAIETHTFDAFRQRFAEDRARGVD

SEQ ID NO: 52920 - protein, 395 aa, Burkholderia cenocepacia
  REGION 1..395: note = tr|A0A071MG88|A0A071MG88_9BURK Queuine tRNA-ribosyltransferase OS=Burkholderia cenocepacia; OX = 95486 GN=tgt PE=3 SV=1
MTEGSSHDTHAPVQDRPANGLEFELLTTDGHARRGRVKLNHGVVETPIFMPVGTYGTVKAIQPRELHEIKAQIILGNTFHLWLRPGLDTIDAHGGLHGFMGWNKPILTDSGGFQVFSLGDLRKITEDGVTFASPINGDKLFLSPEVSMQIQKVLNSDVVMQFDECTPYATDGVPTTHKEAADSMRMSLRWAKRSLDEFNRLGNPNALFGIVQGGMFEDLRDESLAGLAELGFHGLAIGGLSVGEPKEDMMRVLRHVGPKLPANKPHYLMGVGTPEDLVEGVANGVDMFDCVMPTRNARNGWLFTRFGDVKIRNATHKNSLKPLDASCTCYTCRNFSRGYLHHLHRVGEILGAQLNTIHNLHYYLQLMSEIREAIETHTFDAFRQRFAEDRARGVD

SEQ ID NO: 52921 - protein, 395 aa, Burkholderia cepacia
  REGION 1..395: note = tr|A0A103ZBY2|A0A103ZBY2_BURCE Queuine tRNA-ribosyltransferase OS=Burkholderia cepacia OX=292; GN = tgt PE=3 SV=1
MTEGSSHDTHAPVQDRPANGLEFELLTTDGHARRGRVKLNHGVVETPIFMPVGTYGTVKAIQPRELHEIKAQIILGNTFHLWLRPGLDTIDAHGGLHGFMGWNKPILTDSGGFQVFSLGDLRKITEDGVTFASPINGDKLFLSPEVSMQIQKVLNSDVVMQFDECTPYATDGVPTTHKEAADSMRMSLRWAKRSLDEFNRLGNPNALFGIVQGGMFEDLRDESLAGLAELGFHGLAIGGLSVGEPKEDMMRVLRHVGPKLPANKPHYLMGVGTPEDLVEGVANGVDMFDCVMPTRNARNGWLFTRFGDVKIRNATHKNSLKPLDASCTCYTCRNFSRGYLHHLHRVGEILGAQLNTIHNLHYYLQLMSEIRDAIETHTFDAFRQRFAEDRARGVD

SEQ ID NO: 52922 - protein, 395 aa, Burkholderia cepacia
  REGION 1..395: note = tr|A0A0U4BZL4|A0A0U4BZL4_BURCE Queuine tRNA-ribosyltransferase OS=Burkholderia cepacia JBK9; OX = 1395570 GN=tgt PE=3 SV=1
MTEGSSHDTHAPVQDRPAGGLEFELLTTDGHARRGRVKLNHGVVETPIFMPVGTYGTVKAIQPRELHEIKAQIILGNTFHLWLRPGLDTIDAHGGLHGFMGWNKPILTDSGGFQVFSLGDLRKITEDGVTFASPINGDKLFLSPEVSMQIQKVLNSDVVMQFDECTPYATNGVPTTHKEAADSMRMSLRWAKRSLDEFDRLGNPNALFGIVQGGMFEDLRDESLAGLAELGFHGLAIGGLSVGEPKEDMMRVLRHVGPKLPANKPHYLMGVGTPEDLVEGVANGVDMFDCVMPTRNARNGWLFTRFGDVKIRNATHKNSLKPLDASCTCYTCQNFSRGYLHHLHRVGEILGAQLNTIHNLHYYLQLMSEIREAIETHTFDAFRQRFAEDRARGVD

SEQ ID NO: 52923 - protein, 399 aa, Burkholderia contaminans
  REGION 1..399: note = tr|A0A2S5DYK8|A0A2S5DYK8_9BURK Queuine tRNA-ribosyltransferase OS=Burkholderia contaminans; OX = 488447 GN=tgt PE=3 SV=1
MTEGSSHDTHADTHTPVQDRPANGLEFELLTTDGHARRGRVKLNHGVVETPIFMPVGTYGTVKAIQPRELHEIKAQIILGNTFHLWLRPGLDTIDAHGGLHAFMGWNKPILTDSGGFQVFSLGDLRKITEDGVTFASPINGDKLFLSPEVSMQIQKVLNSDVVMQFDECTPYATNGVPTTHKEAADSMRMSLRWAKRSLDEFNRLGNPNALFGIVQGGMFEDLRDESLAGLAELGFHGLAIGGLSVGEPKEDMMRVLRHVGPKLPANKPHYLMGVGTPEDLVEGVANGVDMFDCVMPTRNARNGWLFTRFGDVKIRNATHKNSLKPLDASCTCYTCQNFSRGYLHHLHRVGEILGAQLNTIHNLHYYLQLMSEIREAIETHTFDAFRQRFAEDRARGVD

SEQ ID NO: 52924 - protein, 395 aa, Burkholderia contaminans
  REGION 1..395: note = tr|A0A0G3YY27|A0A0G3YY27_9BURK Queuine tRNA-ribosyltransferase OS=Burkholderia contaminans; OX = 488447 GN=tgt PE=3 SV=1
MTEGSSHDTHAPVQDRPANGLEFELLTTDGHARRGRVKLNHGVVETPIFMPVGTYGTVKAIQPRELHEIKAQIILGNTFHLWLRPGLDTIDAHGGLHGFMGWNKPILTDSGGFQVFSLGDLRKITEDGVTFASPINGDKLFLSPEVSMQIQKVLNSDVVMQFDECTPYATNGVPTTHKEAADSMRMSLRWAKRSLDEFDRLGNPNALFGIVQGGMFEDLRDESLAGLAELGFHGLAIGGLSVGEPKEDMMRVLQHVGPKLPANKPHYLMGVGTPEDLVEGVANGIDMFDCVMPTRNARNGWLFTRFGDVKIRNATHKNSLKPLDASCTCYTCQNFSRGYLHHLHRVGEILGAQLNTIHNLHYYLQLMSEIREAIETHTFDAFRQRFAEDRARGVD

SEQ ID NO: 52925 - protein, 394 aa, unidentified
  source 1..394: note = Burkholderia dabaoshanensis
  REGION 1..394: note = tr|A0A2N7W185|A0A2N7W185_9BURK Queuine tRNA-ribosyltransferase OS=Burkholderia dabaoshanensis; OX = 564714 GN=tgt PE=3 SV=1
MTAGHTHDHSPSPESGLPGLKFELLKTDGLARRGRVTLNHGVVETPIFMPVGTYGTVKAIAPRELEEIQAQIILGNTFHLWLRPGLDTVAAHGGLHGFMGWRRPILTDSGGFQVFSLGDLRKITEDGVTFASPVNGDKLFLSPEVSMQIQKVLNSDIVMQFDECTPYATDGVPTSRDDAAASMRMSMRWAKRSIAEFNRLGNPNALFGIVQGGMFEDLRDESLAGLSELGFHGLAVGGLSVGEPKEDMMRVLEHVGPKLPADKPHYLMGVGTPEDLVAGVASGIDMFDCVMPTRNARNGWLFTRFGDIKIRNATHKNSLRPLDESCGCYTCRNFTRGYLHHLHRVGEILGAQLNTIHNLHYYLELMSEIREAIETGTFEAFRRRFRDERARGVD

SEQ ID NO: 52926 - protein, 395 aa, Burkholderia diffusa
  REGION 1..395: note = tr|A0A1B4BPR5|A0A1B4BPR5_9BURK Queuine tRNA-ribosyltransferase OS=Burkholderia diffusa OX=488732; GN = tgt PE=3 SV=1
MTEGSSHDTHAPVQERPANGLEFELLTTDGHARRGRVKLNHGMVETPIFMPVGTYGTVKAIQPRELHEINAQIILGNTFHLWLRPGLDTIDAHGGLHGFMGWNKPILTDSGGFQVFSLGDLRKITEDGVTFASPINGDKLFLSPEVSMQIQKVLNSDIVMQFDECTPYATNGVPTTHKEAADSMRMSLRWAKRSLDEFDRLGNPNALFGIVQGGMFEDLRDESLAGLSELGFHGLAIGGLSVGEPKEDMMRVLRHVGPKLPADKPHYLMGVGTPEDLVEGVANGVDMFDCVMPTRNARNGWLFTRFGDVKIRNATHKNSLKPLDASCTCYTCRNFSRGYLHHLHRVGEILGAQLNTIHNLHYYLQLMSEIRDAIETHTFDAFRQRFAEDRARGVD

SEQ ID NO: 52927 - protein, 395 aa, Burkholderia dolosa
  REGION 1..395: note = tr|A2WCI9|A2WCI9_9BURK Queuine tRNA-ribosyltransferase OS=Burkholderia dolosa AU0158; OX = 350701 GN=tgt PE=3 SV=1
MTEGSSHDTHAPVYDRPADGLEFELLTTDGNARRGRVKLNHGVVETPIFMPVGTYGTVKAIQPRELHEINAQIILGNTFHLWLRPGLDTIDAHGGLHGFMGWNKPILTDSGGFQVFSLGDLRKITEDGVTFASPINGDKLFLSPEVSMQIQKVLNSDIVMQFDECTPYATDGVPTTHKEAADSMRMSLRWAKRSLDEFDRLGNPNALFGIVQGGMFEDLRDESLAGLSELGFHGLAIGGLSVGEPKEDMMRVLRHVGPKLPANKPHYLMGVGTPEDLVEGVANGVDMFDCVMPTRNARNGWLFTRFGDVKIRNATHKNSLKPLDPSCTCYTCSNFSRGYLHHLHRVGEILGAQLNTIHNLHYYLQLMSEIRSAIETHTFDAFRQRFAEDRATGVD

SEQ ID NO: 52928 - protein, 396 aa, Burkholderia gladioli
  REGION 1..396: note = tr|F2L963|F2L963_BURGS Queuine tRNA-ribosyltransferase OS=Burkholderia gladioli (strain BSR3) OX=999541 GN=tgt PE=3 SV=1
MTDRQSESVQAHVPPENGLKFELLTTDGHARRGRVTLNHGVVETPIFMPVGTYGTVKAVQPRELHEMQAQIILGNTFHLWLRPGLETIGAHGGLHRFMGWNKPILTDSGGFQVFSLGELRKITEDGVTFASPINGDKLFLSPEVSMQIQKVLNSDIVMQFDECTPYATDGVPTTHKEAAESMRMSLRWARRSLDEFNGLGNPNALFGIVQGGMFEDLRDESLAGLAELDFHGYAIGGLSVGEPKEDMMRVLQHVGPRLPAHKPHYLMGVGTPEDLVEGVANGVDMFDCVMPTRNARNGWLFTRFGDVKIRNATHKNSLRPLDESCGCYTCRNFTRGYLHHLHRVGEILGAQLNTIHNLHYYLTLMSEIREAIETHSFEAFRLRFAADRARGVEQRE

SEQ ID NO: 52929 - protein, 396 aa, Burkholderia gladioli
  REGION 1..396: note = tr|A0A3G3LCH8|A0A3G3LCH8_BURGA Queuine tRNA-ribosyltransferase OS=Burkholderia gladioli OX=28095; GN = tgt PE=3 SV=1
MTDRQSEPVQAHVPPENGLKFELLTTDGHARRGRVTLNHGVVETPIFMPVGTYGTVKAVQPRELHEMQAQIILGNTFHLWLRPGLETIGAHGGLHRFMGWNKPILTDSGGFQVFSLGELRKITEDGVTFASPINGDKLFLSPEVSMQIQKVLNSDIVMQFDECTPYATDGVPTTHKEAAESMRMSLRWARRSLDEFNGLGNPNALFGIVQGGMFEDLRDESLAGLAELDFHGYAIGGLSVGEPKEDMMRVLQHVGPRLPAHKPHYLMGVGTPEDLVEGVANGVDMFDCVMPTRNARNGWLFTRFGDVKIRNATHKNSLRPLDESCGCYTCRNFTRGYLHHLHRVGEILGAQLNTIHNLHYYLTLMSEIREAIETHSFEAFRLRFAADRARGVEQRE

SEQ ID NO: 52930 - protein, 406 aa, Burkholderia glumae
  REGION 1..406: note = tr|A0A2J9HDC1|A0A2J9HDC1_BURGL Queuine tRNA-ribosyltransferase OS=Burkholderia glumae OX=337; GN = tgt PE=3 SV=1
MTDRRPEPVPTHVPPENGLNFELLTTDGHARRGRVTLNHGVVETPIFMPVGTYGTVKAVQPRELREMQAQIILGNTFHLWLRPGLETIGAHGGLHRFMGWDRPILTDSGGFQVFSLGELRKITEDGVTFASPINGDKLFLSPEVSMQIQKVLNSDIVMQFDECTPYATGGVPTTHREAAESMRMSLRWAKRSLDEFDRLGNPNALFGIVQGGMFEDLRDESLAGLAALDFHGYAIGGLSVGEPKEDMMRVLRHVGPKLPAHKPHYLMGVGTPEDLVEGVANGVDMFDCVMPTRNARNGWLFTRFGDVKIRNATHRNSLKPLDERCGCYTCRHFTRGYLHHLHRVGEILGAQLNTIHNLHYYLELMSEIRAAIETHTFDAFRARFAADRARGVEAEPVAPGEAAAGG

SEQ ID NO: 52931 - protein, 406 aa, Burkholderia glumae; identical to SEQ ID NO: 52930
  REGION 1..406: note = tr|C5AB58|C5AB58_BURGB Queuine tRNA-ribosyltransferase OS=Burkholderia glumae (strain BGR1) OX=626418 GN=tgt PE=3 SV=1

SEQ ID NO: 52932 - protein, 386 aa, unidentified
  source 1..386: note = Burkholderia insecticola
  REGION 1..386: note = tr|R4WT91|R4WT91_9BURK Queuine tRNA-ribosyltransferase OS=Burkholderia insecticola; OX = 758793 GN=tgt PE=3 SV=1
MTATHTAPENGLKFDLLTTDGQARRGRLTLNHGVIETPIFMPVGTYGTVKAIQPRELEEIRAQIILGNTFHLWLRPGLETIGAHGGLHRFMGWNRPILTDSGGFQVFSLGDLRKITEDGVTFASPINGDKLFLSPEVSMQIQKVLNSDIVMQFDECTPYATKGVPTSHQEAADSMRMSMRWAKRSIDEFNRLGNPNALFGIVQGGMFEDLRDESLAGLSEIGFHGLAIGGLSVGEPKEDMMRVLNHIGPKLPADKPHYLMGVGTPEDLVAGVAAGVDMFDCVMPTRNARNGWLFTRFGDLKIKNATHKNSMKPLDESCGCYTCQNFTRGYLHHLHRVGEILGAQLNTIHNLHYYLQLMSEVRESIENHTFDAFRKTFAENRARGVD

SEQ ID NO: 52933 - protein, 395 aa, Burkholderia lata
  REGION 1..395: note = tr|A0A3G3H160|A0A3G3H160_BURL3 Queuine tRNA-ribosyltransferase OS=Burkholderia lata (strain ATCC 17760 / DSM 23089 / LMG 22485 / NCIMB 9086 / R18194 / 383); OX = 482957GN=tgt PE=3 SV=1
MTEGSSHDTHAPVQDRPANGLEFELLTTDGHARRGRVKLNHGVVETPIFMPVGTYGTVKAIQPRELHEIKAQIILGNTFHLWLRPGLDTIDAHGGLHGFMGWNKPILTDSGGFQVFSLGDLRKITEDGVTFASPINGDKLFLSPEVSMQIQKVLNSDIVMQFDECTPYATNGVPTTHKEAADSMRMSLRWAKRSLDEFDRLGNPNALFGIVQGGMFEDLRDESLAGLAELGFHGLAIGGLSVGEPKEDMMRVLRHVGPKLPANKPHYLMGVGTPEDLVEGVSNGIDMFDCVMPTRNARNGWLFTRFGDVKIRNATHKNSLKPLDASCTCYTCQNFSRGYLHHLHRVGEILGAQLNTIHNLHYYLQLMSEIRDAIETHTFDAFRQRFAEDRARGVD

SEQ ID NO: 52934 - protein, 395 aa, Burkholderia lata
  REGION 1..395: note = tr|Q39JF5|Q39JF5_BURL3 Queuine tRNA-ribosyltransferase OS=Burkholderia lata (strain ATCC 17760 / DSM 23089 / LMG 22485 / NCIMB 9086 / R18194 / 383); OX = 482957 GN=tgtPE=3 SV=1
MTEGSSHDTHAPVQDRPANGLEFELLTTDGHARRGRVKLNHGVVETPIFMPVGTYGTVKAIQPRELHEIKAQIILGNTFHLWLRPGLDTIDAHGGLHAFMGWNKPILTDSGGFQVFSLGDLRKITEDGVTFASPINGDKLFLSPEVSMQIQKVLNSDVVMQFDECTPYATNGVPTTHKEAADSMRMSLRWAKRSLDEFNRLGNPNALFGIVQGGMFEDLRDESLAGLAELGFHGLAIGGLSVGEPKEDMMRVLRHVGPKLPANKPHYLMGVGTPEDLVEGVANGVDMFDCVMPTRNARNGWLFTRFGDVKIRNATHKNSLKPLDASCTCYTCQNFSRGYLHHLHRVGEILGAQLNTIHNLHYYLQLMSEIREAIETHTFDAFRQRFAEDRARGVD

SEQ ID NO: 52935 - protein, 399 aa, Burkholderia latens
  REGION 1..399: note = tr|A0A1B4NPL6|A0A1B4NPL6_9BURK Queuine tRNA-ribosyltransferase OS=Burkholderia latens OX=488446; GN = tgt PE=3 SV=1
MTEGSSHDTHADTHAPAQERPANGLEFELLTTDGHARRGRVKLNHGVVETPIFMPVGTYGTVKAIQPRELHEIKAQIILGNTFHLWLRPGLDTIDAHGGLHGFMGWNKPILTDSGGFQVFSLGDLRKITEDGVTFASPINGDKLFLSPEVSMQIQKVLNSDIVMQFDECTPYATNGVPTTHKEAADSMRMSLRWAKRSLDEFDRLGNPNALFGIVQGGMFEDLRDESLAGLSELGFHGLAIGGLSVGEPKEDMMRVLRHVGPKLPADKPHYLMGVGTPEDLVEGVANGVDMFDCVMPTRNARNGWLFTRFGDVKIRNATHKNSLKPLDASCTCYTCQNFSRGYLHHLHRVGEILGAQLNTIHNLHYYLQLMSEIREAIETHTFDAFRQRFAEDRARGVD

SEQ ID NO: 52936 - protein, 397 aa, Burkholderia mallei
  REGION 1..397: note = tr|A0A0H2WLK4|A0A0H2WLK4_BURMA Queuine tRNA-ribosyltransferase OS=Burkholderia mallei (strain ATCC 23344) OX=243160 GN=tgt PE=3 SV=1
MTTEGPSHDTHDTSAGIRPHGGLKFELLTTDGRARRGRVTLNHGVVETPIFMPVGTYGTVKAVQPRELDEMRAQIILGNTFHLWLRPGLETIGAHGGLHRFMGWNKPILTDSGGFQVFSLGDLRKITEEGVTFASPINGDRLFLSPEVSMQIQKTLNSDIVMQFDECTPYATNGVPTTHREAAESMRMSLRWAKRSLDEFERLGNPNALFGIVQGGMYEDLRDESLAGLSALGFHGLAIGGLSVGEPKEDMMRVLEHVAPRLPADKPHYLMGVGTPEDLVAGVAAGVDMFDCVMPTRNARNGWLFTRFGDVKIRNATHKNSLKPLDETCGCYTCRNFSRGYLHHLHRVGEILGAQLNTIHNLHYYLDLMREIREAIETHTFEAFQKRFAQDRARGVD

SEQ ID NO: 52937 - protein, 397 aa, Burkholderia mallei; identical to SEQ ID NO: 52936
  REGION 1..397: note = tr|A2S5D1|A2S5D1_BURM9 Queuine tRNA-ribosyltransferase OS=Burkholderia mallei (strain NCTC 10229) OX=412022 GN=tgt PE=3 SV=1

SEQ ID NO: 52938 - protein, 395 aa, Burkholderia metallica
  REGION 1..395: note = tr|A0A1B4HQY1|A0A1B4HQY1_9BURK Queuine tRNA-ribosyltransferase OS=Burkholderia metallica; OX = 488729 GN=tgt PE=3 SV=1
MTEGSSHDTHAPVQDRPVGGLEFELLTTDGHARRGRVKLNHGTVETPIFMPVGTYGTVKAIQPRELHEIKAQIILGNTFHLWLRPGLDTIDAHGGLHGFMGWNKPILTDSGGFQVFSLGDLRKITEDGVTFASPINGDKLFLSPEVSMQIQKVLNSDVVMQFDECTPYATNGVPTTHKEAADSMRMSLRWAKRSLDEFNRLGNPNALFGIVQGGMFEDLRDESLAGLAELGFHGLAIGGLSVGEPKEDMMRVLRHVGPKLPANKPHYLMGVGTPEDLVEGVANGVDMFDCVMPTRNARNGWLFTRFGDVKIRNATHKNSLKPLDASCTCYTCQNFSRGYLHHLHRVGEILGAQLNTIHNLHYYLQLMSEIREAIETHTFDAFRQRFAEDRARGVD

SEQ ID NO: 52939 - protein, 399 aa, Burkholderia multivorans
  REGION 1..399: note = tr|A0A2S9L5Z8|A0A2S9L5Z8_9BURK Queuine tRNA-ribosyltransferase OS=Burkholderia multivorans; OX = 87883 GN=tgt PE=3 SV=1
MTEGSSHDTRAHAPEAAPARPANGLEFELLTTDGHARRGRVKLNHGVVETPIFMPVGTYGTVKAIQPRELHEIKAQIILGNTFHLWLRPGLDTIDAHGGLHGFMGWNKPILTDSGGFQVFSLGDLRKITEDGVTFASPINGDKLFLSPEVSMQIQKVLNSDIVMQFDECTPYATNGVPTTHKEAADSMRMSLRWAKRSLDEFNRLGNPNALFGIVQGGMFEDLRDESLAGLSELGFHGLAIGGLSVGEPKEDMMRVLRHVGPKLPAHKPHYLMGVGTPEDLVEGVANGVDMFDCVMPTRNARNGWLFTRFGDVKIRNATHKNSLKPLDRSCTCYTCSNFSRGYLHHLHRVGEILGAQLNTIHNLHYYLQLMSEIRDAIESHTFDAFRQRFAEDRARGVD

SEQ ID NO: 52940 - protein, 399 aa, Burkholderia multivorans
  REGION 1..399: note = tr|A0A0H3KGY5|A0A0H3KGY5_BURM1 Queuine tRNA-ribosyltransferase OS=Burkholderia multivorans (strain ATCC 17616 / 249) OX=395019 GN=tgt PE=3 SV=1
MTEGSSHDTRAHAPEAAPARPANGLEFELLTTDGHARRGRVKLNHGVVETPIFMPVGTYGTVKAIQPRELHEIKAQIILGNTFHLWLRPGLDTIDAHGGLHGFMGWNKPILTDSGGFQVFSLGDLRKITEDGVTFASPINGDKLFLSPEVSMQIQKVLNSDIVMQFDECTPYATNGVPTTHKEAADSMRMSLRWAKRSLDEFNRLGNPNALFGIVQGGMFEDLRDESLAGLSELGFHGLAIGGLSVGEPKEDMMRVLRHVGPKLPAHKPHYLMGVGTPEDLVEGVANGVDMFDCVMPTRNARNGWLFTRFGDVKIRNATHKNSLKPLDPSCTCYTCSNFSRGYLHHLHRVGEILGAQLNTIHNLHYYLQLMSEIRDAIESHTFDAFRQRFAEDRARGVD

SEQ ID NO: 52941 - protein, 386 aa, unidentified
  source 1..386: note = Burkholderia novacaledonica
  REGION 1..386: note = tr|A0A2U3I4Q9|A0A2U3I4Q9_9BURK Queuine tRNA-ribosyltransferase OS=Burkholderia novacaledonica; OX = 1544861 GN=tgt PE=3 SV=1
MTTHHIPPENGLKFELLTTDGQARRGRLTLNHGVVETPIFMPVGTYGTVKAIQPRELEEIRAQIILGNTFHLWLRPGLDVIGAHGGLHKFMGWNRPILTDSGGFQVFSLGELRKITEEGVTFASPINGDRLFLSPEVSMQIQKVLNSDIVMQFDECTPYATNGIPTSHKDAADSMRMSMRWAKRSIDEFNGLGNPNALFGIVQGGMFEDLRDESLAGLSDIGFHGFAIGGLSVGEPKEDMMRVLNHIGPKLPADKPHYLMGVGTPEDLVAGVAAGVDMFDCVMPTRNARNGWLFTRFGDLKIKNATHKNSMKPLDESCACYTCRNFTRGYLHHLHRVGEILGAQLNTIHNLHYYLQLIGEVRESIENHTFEAFRKTFAENRARGVD

SEQ ID NO: 52942 - protein, 393 aa, Burkholderia oklahomensis
  REGION 1..393: note = tr|A0A381BTC9|A0A381BTC9_9BURK Queuine tRNA-ribosyltransferase OS=Burkholderia oklahomensis; OX = 342113 GN=tgt PE=3 SV=1
MTEGSSHDTAAGIRPHGGLKFELLTTDGRARRGRVTLNHGVVETPIFMPVGTYGTVKAVQPRELDEMRAQIILGNTFHLWLRPGLETIAAHGGLHRFMGWNKPILTDSGGFQVFSLGDLRKITEDGVTFASPINGDRLFLSPEVSMQIQKTLNSDIVMQFDECTPYATNGVPTTHQEAADSMRMSLRWAKRSLDEFDRLGNPNALFGIVQGGMFEDLRDESLAGLAELGFHGLAIGGLSVGEPKEDMMRVLEHVAPRLPADKPHYLMGVGTPEDLVAGVAAGVDMFDCVMPTRNARNGWLFTRFGDVKIRNATHRNSLKPLDETCGCYTCRNFSRGYLHHLHRVGEILGAQLNTIHNLHYYLELMREIREAIETHTFDAFRKRFAEDRARGVD

SEQ ID NO: 52943 - protein, 406 aa, Burkholderia plantarii
  REGION 1..406: note = tr|A0A0B6RIF7|A0A0B6RIF7_9BURK Queuine tRNA-ribosyltransferase OS=Burkholderia plantarii OX=41899; GN = tgt PE=3 SV=1
MTDRQPESVSPHVPPDNGLKFDLLTTDGHARRGRVTLNHGVVETPIFMPVGTYGTVKAVQPRELREMQAQIILGNTFHLWLRPGLETIGAHGGLHRFMGWDKPILTDSGGFQVFSLGDLRKITEDGVTFASPINGDKLFLSPEVSMQIQKVLNSDVVMQFDECTPYATDNVPTTHQEAAGSMRMSLRWAKRSLDEFNRLGNPNALFGIVQGGMFEDLRDESLAGLAALDFHGYAIGGLSVGEPKEDMMRVLRHVGPKLPAHKPHYLMGVGTPEDLVEGVANGVDMFDCVMPTRNARNGWLFTRFGDVKIRNATHRNSLKPLDESCDCYTCRNFTRGYLHHLHRVGEILGAQLNTIHNLHYYLKLMSEIREAIETHTFDAFRARFAADRARGVDAEPVAPGATAAGG

SEQ ID NO: 52944 - protein, 394 aa, Burkholderia pseudomallei
  REGION 1..394: note = tr|A0A2K9DBT4|A0A2K9DBT4_BURPE Queuine tRNA-ribosyltransferase OS=Burkholderia pseudomallei; OX = 28450 GN=tgt PE=3 SV=1
MTTEGPSHDTSAGIRPHGGLKFELLTTDGRARRGRVTLNHGVVETPIFMPVGTYGTVKAVQPRELDEMRAQIILGNTFHLWLRPGLETIGAHGGLHRFMGWNKPILTDSGGFQVFSLGDLRKITEEGVTFASPINGDRLFLSPEVSMQIQKTLNSDIVMQFDECTPYATNGVPTTHREAAESMRMSLRWAKRSLDEFERLGNPNALFGIVQGGMYEDLRDESLAGLSALGFHGLAIGGLSVGEPKEDMMRVLEHVAPRLPADKPHYLMGVGTPEDLVAGVAAGVDMFDCVMPTRNARNGWLFTRFGDVKIRNATHKNSLKPLDETCGCYTCRNFSRGYLHHLHRVGEILGAQLNTIHNLHYYLDLMREIREAIETHTFEAFQKRFAQDRARGVD

SEQ ID NO: 52945 - protein, 397 aa, Burkholderia pseudomallei
  REGION 1..397: note = tr|A8EI52|A8EI52_BURPE Queuine tRNA-ribosyltransferase OS=Burkholderia pseudomallei 406e; OX = 360118 GN=tgt PE=3 SV=1
MTTEGPSHDTHDTSAGIRPHGGLKFELLTTDGRARRGRVTLNHGVVETPIFMPVGTYGTVKAVQPRELDEMRAQIILGNTFHLWLRPGLETIGAHGGLHRFMGWNKPILTDSGGFQVFSLGDLRKITEEGVTFASPINGDRLFLSPEVSMQIQKTLNSDIVMQFDECTPYATNGVPTTHREAAESMRMSLRWAKRSLDEFERLGNPNALFGIVQGGMYEDLRDESLAGLSALGFHGLAIGGLSVGEPKEDMMRVLEHVAPRLPADKPHYLMGVGTPEDLVAGVAAGVDMFDCVMPTRNARNGWLFTRFGDVKIRNATHKNSLKPLDETCGCYTCRNFSRGYLHHLHRVGEILGAQLNTIHNLHYYLELMREIREAIETHTFDAFQKRFAQDRARGVD

SEQ ID NO: 52946 - protein, 397 aa, unidentified
  source 1..397: note = Burkholderia pseudomultivorans
  REGION 1..397: note = tr|A0A132EBW3|A0A132EBW3_9BURK Queuine tRNA-ribosyltransferase OS=Burkholderia pseudomultivorans; OX = 1207504 GN=tgt PE=3 SV=1
MTDGSSHDTHAQEAAPARPANGLEFELLTTDGHARRGRVKLNHGVVETPIFMPVGTYGTVKAIQPRELHEIKAQIILGNTFHLWLRPGLDTIDAHGGLHGFMGWNKPILTDSGGFQVFSLGDLRKITEEGVTFASPINGDKLFLSPEVSMQIQKVLNSDIVMQFDECTPYATDNVPTTHQEAADSMRMSLRWAKRSLDEFNRLGNPNALFGIVQGGMFEDLRDESLAGLSELGFHGLAIGGLSVGEPKEDMMRVLRHVGPKLPANKPHYLMGVGTPEDLVEGVANGVDMFDCVMPTRNARNGWLFTRFGDVKIRNATHKNSLKPLDPSCTCYTCSNFSRGYLHHLHRVGEILGAQLNTIHNLHYYLQLMSEIREAIETHTFDAFRQRFAEDRARGVD

SEQ ID NO: 52947 - protein, 397 aa, unidentified
  source 1..397: note = Burkholderia pseudomultivorans
  REGION 1..397: note = tr|A0A132F724|A0A132F724_9BURK Queuine tRNA-ribosyltransferase OS=Burkholderia pseudomultivorans; OX = 1207504 GN=tgt PE=3 SV=1
MTEGSSHDTHAHEAAPARPANGLEFELLTTDGHARRGRVKLNHGLVETPIFMPVGTYGTVKAIQPRELHEIKAQIILGNTFHLWLRPGLDTIDAHGGLHGFMGWNKPILTDSGGFQVFSLGDLRKITEEGVTFASPINGDKLFLSPEVSMQIQKVLNSDIVMQFDECTPYATDNVPTTHKEAADSMRMSLRWAKRSLDEFNRLGNPNALFGIVQGGMFEDLRDESLAGLSELGFHGLAIGGLSVGEPKEDMMRVLRHVGPKLPANKPHYLMGVGTPEDLVEGVANGVDMFDCVMPTRNARNGWLFTRFGDVKIRNATHKNSLKPLDPSCTCYTCSNFSRGYLHHLHRVGEILGAQLNTIHNLHYYLQLMSEIREAIETHTFDAFRQRFAEDRARGVD

SEQ ID NO: 52948 - protein, 395 aa, unidentified
  source 1..395: note = Burkholderia puraquae
  REGION 1..395: note = tr|A0A1X1PBJ6|A0A1X1PBJ6_9BURK Queuine tRNA-ribosyltransferase OS=Burkholderia puraquae; OX = 1904757 GN=tgt PE=3 SV=1
MTEGSSHDTHAPVQDRPANGLEFELLTTDGHARRGRVKLNHGVVETPIFMPVGTYGTVKAIQPRELHEIKAQIILGNTFHLWLRPGLDTIDAHGGLHGFMGWNKPILTDSGGFQVFSLGDLRKITEDGVTFASPINGDKLFLSPEVSMQIQKVLNSDVVMQFDECTPYATNGVPTTHKEAADSMRMSLRWAKRSLDEFNRLGNPNALFGIVQGGMFEDLRDESLAGLAELGFHGLAIGGLSVGEPKEDMMRVLRHVGPKLPANKPHYLMGVGTPEDLVEGVANGVDMFDCVMPTRNARNGWLFTRFGDVKIRNATHKNSLKPLDASCTCYTCQNFSRGYLHHLHRVGEILGAQLNTIHNLHYYLQLMSEIRDAIETHTFDAFRQRFAEDRARGVD

SEQ ID NO: 52949 - protein, 397 aa, Burkholderia pyrrocinia
  REGION 1..397: note = tr|A0A318IVJ2|A0A318IVJ2_BURPY Queuine tRNA-ribosyltransferase OS=Burkholderia pyrrocinia; OX = 60550 GN=tgt PE=3 SV=1
MTEGSSHDHDTHAPVHDRPANGLEFELLTTDGHARRGRVKLNHGVVETPIFMPVGTYGTVKAIQPRELHEINAQIILGNTFHLWLRPGLDTIDAHGGLHGFMGWNKPILTDSGGFQVFSLGDLRKITEDGVTFASPINGDKLFLSPEVSMQIQKVLNSDVVMQFDECTPYATDGVPTTHKEAADSMRMSLRWAKRSLDEFDRLGNPNALFGIVQGGMFEDLRDESLAGLSELGFHGLAIGGLSVGEPKEDMMRVLRHVGPKLPANKPHYLMGVGTPEDLVEGVANGIDMFDCVMPTRNARNGWLFTRFGDVKIRNATHKNSLKPLDASCACYTCRNFSRGYLHHLHRVGEILGAQLNTIHNLHYYLQLMSEIRDAIETHTFDAFRQRFAEDRARGVD

SEQ ID NO: 52950 - protein, 393 aa, Burkholderia pyrrocinia
  REGION 1..393: note = tr|A0A104MTY3|A0A104MTY3_BURPY Queuine tRNA-ribosyltransferase OS=Burkholderia pyrrocinia; OX = 60550 GN=tgt PE=3 SV=1
MTEGSSHDTHAHIRPHNGLKFDLLTTDGHARRGRVTLNHGVVETPIFMPVGTYGTVKAIQPRELHEIKAQIILGNTFHLWLRPGLDTIDAHGGLHGFMGWNKPILTDSGGFQVFSLGDLRKITEDGVTFASPINGDKLFLSPEVSMQIQKVLNSDIVMQFDECTPYATNGVPTTHQEAADSMRMSLRWAKRSLDEFDRLGNPNALFGIVQGGMFEDLRDESLAGLAELDFHGLAIGGLSVGEPKEDMMRVLQHVGPKLPAHKPHYLMGVGTPEDLVAGVANGIDMFDCVMPTRNARNGWLFTRFGDVKIRNATHKNSLKPLDPSCTCYTCQNFSRGYLHHLHRVGEILGAQLNTIHNLHYYLQLMSEIRDAIETHTFDAFRQRFAEDRARGVD

SEQ ID NO: 52951 - protein, 398 aa, unidentified
  source 1..398: note = Burkholderia reimsis
  REGION 1..398: note = tr|A0A365QH84|A0A365QH84_9BURK Queuine tRNA-ribosyltransferase OS=Burkholderia reimsis OX=2234132; GN = tgt PE=3 SV=1
MTEGSSHDTHDAHAPVQDRPANGLEFELLTTDGHARRGRVKLNHGVVETPIFMPVGTYGTVKAIQPRELHEIKAQIILGNTFHLWLRPGLDTIDAHGGLHGFMGWNKPILTDSGGFQVFSLGDLRKITEDGVTFASPINGDKLFLSPEVSMQIQKVLNSDVVMQFDECTPYATNGVPTTHKEAADSMRMSLRWAKRSLDEFNRLGNPNALFGIVQGGMFEDLRDESLAGLAELGFHGLAIGGLSVGEPKEDMMRVLRHVGPKLPANKPHYLMGVGTPEDLVEGVANGVDMFDCVMPTRNARNGWLFTRFGDVKIRNATHKNSLKPLDASCTCYTCQNFSRGYLHHLHRVGEILGAQLNTIHNLHYYLQLMSEIRDAIETHTFDAFRQRFAEDRARGVD

SEQ ID NO: 52952 - protein, 395 aa, Burkholderia seminalis
  REGION 1..395: note = tr|A0A103KE17|A0A103KE17_9BURK Queuine tRNA-ribosyltransferase OS=Burkholderia seminalis; OX = 488731 GN=tgt PE=3 SV=1
MTEGSSHDTHAPVQDRPANGLEFELLTTDGHARRGRVKLNHGVVETPIFMPVGTYGTVKAIQPRELHEIKAQIILGNTFHLWLRPGLDTIDAHGGLHGFMGWNKPILTDSGGFQVFSLGDLRKITEDGVTFASPINGDKLFLSPEVSMQIQKVLNSDVVMQFDECTPYATDGVPTTHKEAADSMRMSLRWAKRSLDEFNRLGNPNALFGIVQGGMFEDLRDESLAGLAELGFHGLAIGGLSVGEPKEDMMRVLRHVGPKLPANKPHYLMGVGTPEDLVEGVANGVDMFDCVMPTRNARNGWLFTRFGDVKIRNATHKNSLKPLDASCTCYTCQNFSRGYLHHLHRVGEILGAQLNTIHNLHYYLQLMSEIREAIETHTFDAFRQRFAEDRARGVD

SEQ ID NO: 52953 - protein, 393 aa, unidentified
  source 1..393: note = Burkholderia singularis
  REGION 1..393: note = tr|A0A103E481|A0A103E481_9BURK Queuine tRNA-ribosyltransferase OS=Burkholderia singularis; OX = 1503053 GN=tgt PE=3 SV=1
MTEGSSHDTHTHVHAHGGLKFELLTTDGRARRGRVTLNHGVVDTPIFMPVGTYGTVKAVKPSELEEMRAQIILGNTFHLWLRPGLETIGAHGGLHRFMGWNKPILTDSGGFQVFSLGELRKITEEGVTFASPINGDRLFLSPEVSMQIQKVLNSDIVMQFDECTPYATNGVPTTHREAADSMRMSLRWAKRSLDEFQRLGNPNALFGIVQGGMYEDLRDESLAGLSELGFHGLAIGGLSVGEPKEDMMRVLEHVAPRLPADKPHYLMGVGTPEDLVAGVAAGVDMFDCVMPTRNARNGWLFTRFGDVKIRNASHKNALKPLDETCGCYTCRNFSRGYLHHLHRVGEILGAQLNTIHNLHYYLELMREIREAIDTHTFDAFRKRFAQDRARGVD

SEQ ID NO: 52954 - protein, 393 aa, unidentified
  source 1..393: note = Burkholderia singularis
  REGION 1..393: note = tr|A0A238H9U6|A0A238H9U6_9BURK Queuine tRNA-ribosyltransferase OS=Burkholderia singularis; OX = 1503053 GN=tgt PE=3 SV=1
MTEGSSHDTHTHVHAHDGLKFELLTTDGRARRGRVTLNHGVVDTPIFMPVGTYGTVKAVKPSELDEMRAQIILGNTFHLWLRPGLETIGAHGGLHRFMGWNKPILTDSGGFQVFSLGELRKITEEGVTFASPINGDRLFLSPEVSMQIQKVLNSDIVMQFDECTPYATNGVPTTHREAADSMRMSLRWAKRSLDEFRRLGNPNALFGIVQGGMYEDLRDESLAGLSELGFHGLAIGGLSVGEPKEDMMRVLEHVAPRLPADKPHYLMGVGTPEDLVAGVAAGVDMFDCVMPTRNARNGWLFTRFGDVKIRNASHKNALKPLDETCGCYTCRNFSRGYLHHLHRVGEILGAQLNTIHNLHYYLELMREIREAIDTHTFDAFRKRFAQDRARGVD

SEQ ID NO: 52955 - protein, 393 aa, Burkholderia sp.
  REGION 1..393: note = tr|A0A063BM59|A0A063BM59_9BURK Queuine tRNA-ribosyltransferase OS=Burkholderia sp. lig30; OX = 1192124 GN=tgt PE=3 SV=1
MTEGSSHDTHTHIRPHNGLKFDLLTTDGHARRGRVTLNHGVVETPIFMPVGTYGTVKAIQPRELHEINAQIILGNTFHLWLRPGLETIDAHGGLHGFMGWNKPILTDSGGFQVFSLGDLRKITEDGVTFASPINGDKLFLSPEVSMQIQKVLNSDIVMQFDECTPYATNGIPTTHKEAADSMRMSLRWAKRSLDEFGRLGNPNALFGIVQGGMFEDLRDESLAGLAELDFHGLAIGGLSVGEPKDDMVRILQHVAPKLPAHKPHYLMGVGTPEDLVAGVAAGIDMFDCVMPTRNARNGWLFTRFGDVKIRNATHKNSLKPLDESCGCYTCRNFSRGYLHHLHRVGEILGAQLNTIHNLHYYLELMSEIREAIETHTFDAFRKRFAEDRARGVD

SEQ ID NO: 52956 - protein, 395 aa, Burkholderia sp.
  REGION 1..395: note = tr|A0A3P0S9N8|A0A3P0S9N8_9BURK Queuine tRNA-ribosyltransferase OS=Burkholderia sp. Bp9004; OX = 2184559 GN=tgt PE=3 SV=1
MTEGSSHDTHAPVQDRPANGLEFELLTTDGHARRGRVKLNHGVVETPIFMPVGTYGTVKAIQPRELHEIKAQIILGNTFHLWLRPGLETIDAHGGLHGFMGWNKPILTDSGGFQVFSLGDLRKITEDGVTFASPINGDKLFLSPEVSMQIQKVLNSDIVMQFDECTPYATNGVPTTHKEAADSMRMSLRWAKRSLDEFDRLGNPNALFGIVQGGMFEDLRDESLAGLSELGFHGLAIGGLSVGEPKEDMMRVLRHVGPKLPANKPHYLMGVGTPEDLVEGVANGVDMFDCVMPTRNARNGWLFTRFGDVKIRNATHKNSLKPLDASCTCYTCQNFSRGYLHHLHRVGEILGAQLNTIHNLHYYLQLMSEIRDAIETHTFDAFRQRFAEDRARGVD

SEQ ID NO: 52957 - protein, 395 aa, Burkholderia stabilis
  REGION 1..395: note = tr|A0A1D7ZCV5|A0A1D7ZCV5_9BURK Queuine tRNA-ribosyltransferase OS=Burkholderia stabilis OX=95485; GN = tgt PE=3 SV=1
MTEGSSHDTHAPVQDRPANGLEFELLTTDGHARRGRVKLNHGVVETPIFMPVGTYGTVKAIQPRELHEIKAQIILGNTFHLWLRPGLDTIDAHGGLHRFMGWNKPILTDSGGFQVFSLGDLRKITEDGVTFASPINGDKLFLSPEVSMQIQKVLNSDVVMQFDECTPYATNGVPTTHKEAADSMRMSLRWAKRSLDEFNRLGNPNALFGIVQGGMFEDLRDESLAGLSELGFHGLAIGGLSVGEPKEDMMRVLRHVGPKLPANKPHYLMGVGTPEDLVEGVSNGVDMFDCVMPTRNARNGWLFTRFGDVKIRNATHKNSLKPLDASCTCYTCQNFSRGYLHHLHRVGEILGAQLNTIHNLHYYLQLMSEIRDAIETHTFDAFRQRFAEDRARGVD

SEQ ID NO: 52958 - protein, 397 aa, Burkholderia stabilis
  REGION 1..397: note = tr|A0A1Y1BQH2|A0A1Y1BQH2_9BURK Queuine tRNA-ribosyltransferase OS=Burkholderia stabilis OX=95485; GN = tgt PE=3 SV=1
MTEGSSHDHDTHASVQDRPANGLEFELLTTDGHARRGRVKLNHGVVETPIFMPVGTYGTVKAIQPRELHEIKAQIILGNTFHLWLRPGLDTIDAHGGLHGFMGWNKPILTDSGGFQVFSLGDLRKITEDGVTFASPINGDKLFLSPEVSMQIQKVLNSDVVMQFDECTPYATDGVPTTHKEAADSMRMSLRWAKRSLDEFDRLGNPNALFGIVQGGMFEDLRDESLAGLSELGFHGLAIGGLSVGEPKEDMMRVLRHVGPKLPANKPHYLMGVGTPEDLVEGVANGIDMFDCVMPTRNARNGWLFTRFGDVKIRNATHKNSLKPLDASCTCYTCRNFSRGYLHHLHRVGEILGAQLNTIHNLHYYLQLMSEIRDAIETHTFDAFRQRFAEDRARGVD

SEQ ID NO: 52959 - protein, 393 aa, unidentified
  source 1..393: note = Burkholderia stagnalis
  REGION 1..393: note = tr|A0A118SC32|A0A118SC32_9BURK Queuine tRNA-ribosyltransferase OS=Burkholderia stagnalis; OX = 1503054 GN=tgt PE=3 SV=1
MTEGSSHDTHAHLRPHNGLKFDLLTTDGHARRGRVTLNHGVVETPIFMPVGTYGTVKAIQPRELHEIKAQIILGNTFHLWLRPGLDTIDAHGGLHGFMGWNKPILTDSGGFQVFSLGDLRKITEDGVTFASPINGDKLFLSPEVSMQIQKVLNSDIVMQFDECTPYATNGVPTTHKEAADSMRMSLRWAKRSLDEFDRLGNPNALFGIVQGGMFEDLRDESLAGLAELDFHGLAIGGLSVGEPKEDMMRVLQHVGPKLPAHKPHYLMGVGTPEDLVAGVANGIDMFDCVMPTRNARNGWLFTRFGDVKIRNATHKNSLKPLDPSCTCYTCQNFSRGYLHHLHRVGEILGAQLNTIHNLHYYLQLMSEIRDAIETHTFDAFRQRFAEDRARGVD

SEQ ID NO: 52960 - protein, 395 aa, unidentified
  source 1..395: note = Burkholderia territorii
  REGION 1..395: note = tr|A0A102G088|A0A102G088_9BURK Queuine tRNA-ribosyltransferase OS=Burkholderia territorii; OX = 1503055 GN=tgt PE=3 SV=1
MTEGSSHDTHAPVHERPANGLEFELLTTDGHARRGRVKLNHGVVETPIFMPVGTYGTVKAIQPRELHEINAQIILGNTFHLWLRPGLDTIDAHGGLHGFMGWNKPILTDSGGFQVFSLGDLRKITEDGVTFASPINGDKLFLSPEVSMQIQKVLNSDIVMQFDECTPYATNGVPTTHKEAADSMRMSLRWAKRSLDEFDRLGNPNALFGIVQGGMFEDLRDESLAGLSELGFHGLAIGGLSVGEPKEDMMRVLRHVGPKLPADKPHYLMGVGTPEDLVEGVANGVDMFDCVMPTRNARNGWLFTRFGDVKIRNATHKNSLKPLDASCACYTCRNFSRGYLHHLHRVGEILGAQLNTIHNLHYYLQLMSEIRDAIETHTFDAFRQRFAEDRARGVD

SEQ ID NO: 52961 - protein, 394 aa, Burkholderia thailandensis
  REGION 1..394: note = tr|Q2SZ24|Q2SZ24_BURTA Queuine tRNA-ribosyltransferase OS=Burkholderia thailandensis (strain ATCC 700388 / DSM 13276 / CIP 106301 / E264); OX = 271848 GN=tgt PE=3 SV=1
MTTEGPSHDTPTGIRPHNGLKFELLTTDGRARRGRVTLNHGVVETPIFMPVGTYGTVKAVQPRELDEMRAQIILGNTFHLWLRPGLETIDAHGGLHRFMGWNKPILTDSGGFQVFSLGDLRKITEEGVTFASPINGDRLFLSPEVSMQIQKTLNSDIVMQFDECTPYATNGVPTTHREAAESMRMSLRWAKRSLAEFERLGNPNALFGIVQGGMYEDLRDESLAGLSELGFHGLAIGGLSVGEPKEDMMRVLEHVAPRLPADKPHYLMGVGTPEDLVAGVAAGVDMFDCVMPTRNARNGWLFTRFGDVKIRNATHKNSLKPLDETCGCYTCRHFSRGYLHHLHRVGEILGAQLNTIHNLHYYLELMREIREAIETHTFEAFQKRFAQDRARGVD

SEQ ID NO: 52962 - protein, 394 aa, Burkholderia thailandensis
  REGION 1..394: note = tr|A0A2N8QVC3|A0A2N8QVC3_BURTH Queuine tRNA-ribosyltransferase OS=Burkholderia thailandensis; OX = 57975 GN=tgt PE=3 SV=1
MTTEGPSHDTPTGIRPHNGLKFELLTTDGRARRGRVTLNHGVVETPIFMPVGTYGTVKAVQPRELDEMRAQIILGNTFHLWLRPGLETIDAHGGLHRFMGWNKPILTDSGGFQVFSLGDLRKITEEGVTFASPINGDRLFLSPEVSMQIQKTLNSDIVMQFDECTPYATNGVPTTHREAAESMRMSLRWAKRSLAEFERLGNPNALFGIVQGGMYEDLRDESLAGLSELGFHGLAIGGLSVGEPKEDMMRVLEHVAPRLPADKPHYLMGVGTPEDLVAGVAAGVDMFDCVMPTRNARNGWLFTRFGDVKIRNATHKNSLKPLDETCGCYTCRNFSRGYLHHLHRVGEILGAQLNTIHNLHYYLELMREIREAIETHTFEAFQKRFAQDRARGVD

SEQ ID NO: 52963 - protein, 393 aa, Burkholderia ubonensis
  REGION 1..393: note = tr|A0A3N7Q015|A0A3N7Q015_9BURK Queuine tRNA-ribosyltransferase OS=Burkholderia ubonensis; OX = 101571 GN=tgt PE=3 SV=1
MTEGSSHDTHAHIRPHNGLKFDLLTTDGHARRGRVTLNHGVVETPIFMPVGTYGTVKAIQPRELHEIKAQIILGNTFHLWLRPGLDTIDAHGGLHGFMGWNKPILTDSGGFQVFSLGDLRKITEDGVTFASPINGDKLFLSPEVSMQIQKVLNSDIVMQFDECTPYATNGVPTTHKEAADSMRMSLRWAKRSLDEFNRLGNPNALFGIVQGGMFEDLRDESLAGLAELDFHGLAIGGLSVGEPKEDMMRVLRHVGPKLPAHKPHYLMGVGTPEDLVDGVANGIDMFDCVMPTRNARNGWLFTRFGDVKIRNATHKNSLKPLDPSCTCYTCQNFSRGYLHHLHRVGEILGAQLNTIHNLHYYLQLMSESREAIETHTFDAFRQRFAEDRARGVD

SEQ ID NO: 52964 - protein, 395 aa, Burkholderia ubonensis
  REGION 1..395: note = tr|A0A105RG09|A0A105RG09_9BURK Queuine tRNA-ribosyltransferase OS=Burkholderia ubonensis; OX = 101571 GN=tgt PE=3 SV=1
MTEGPSHDHDTHAHIRPHNGLKFDLLTTDGHARRGRVTLNHGVVETPIFMPVGTYGTVKAIQPRELHEIKAQIILGNTFHLWLRPGLDTIDAHGGLHGFMGWNKPILTDSGGFQVFSLGDLRKITEDGVTFASPINGDKLFLSPEVSMQIQKVLNSDIVMQFDECTPYATNGVPTTHKEAADSMRMSLRWAKRSLDEFNRLGNPNALFGIVQGGMFEDLRDESLAGLAELDFHGLAIGGLSVGEPKEDMMRVLRHVGPKLPAHKPHYLMGVGTPEDLVDGVANGIDMFDCVMPTRNARNGWLFTRFGDVKIRNATHKNSLKPLDPSCACYTCRNFSRGYLHHLHRVGEILGAQLNTIHNLHYYLQLMSEIREAIETHTFDAFRQRFAEDRARGVD

SEQ ID NO: 52965 - protein, 397 aa, Burkholderia vietnamiensis
  REGION 1..397: note = tr|A4JBP2|A4JBP2_BURVG Queuine tRNA-ribosyltransferase OS=Burkholderia vietnamiensis (strain G4 / LMG 22486) OX=269482 GN=tgt PE=3 SV=1
MTEGSSHDTHASADVHERPANGLEFELLTTDGHARRGRVKLNHGVVETPIFMPVGTYGTVKAIQPRELHEINAQIILGNTFHLWLRPGLDTIDAHGGLHRFMGWNKPILTDSGGFQVFSLGDLRKITEDGVTFASPINGDKLFLSPEVSMQIQKVLNSDIVMQFDECTPYATNGVPTTHKEAADSMRMSLRWAKRSLDEFDRLGNPNALFGIVQGGMFEDLRDESLAGLSELGFHGLAIGGLSVGEPKEDMMRVLQHVGPKLPADKPHYLMGVGTPEDLVDGVANGIDMFDCVMPTRNARNGWLFTRFGDVKIRNATHKNSLKPLDPTCSCYTCRNFSRGYLHHLHRVGEILGAQLNTIHNLHYYLQLMSEIREAIETHTFDAFRQRFAQDRATGVD

SEQ ID NO: 52966 - protein, 397 aa, Burkholderia vietnamiensis
  REGION 1..397: note = tr|A0A103HX10|A0A103HX10_BURVI Queuine tRNA-ribosyltransferase OS=Burkholderia vietnamiensis; OX = 60552 GN=tgt PE=3 SV=1
MTEGSSHDTHASADVHERPANGLEFELLTTDGHARRGRVKLNHGVVETPIFMPVGTYGTVKAIQPRELHEINAQIILGNTFHLWLRPGLDTIDAHGGLHRFMGWNKPILTDSGGFQVFSLGDLRKITEDGVTFASPINGDKLFLSPEVSMQIQKVLNSDIVMQFDECTPYATNGVPTTHKEVADSMRMSLRWAKRSLDEFDRLGNPNALFGIVQGGMFEDLRDESLAGLSELGFHGLAIGGLSVGEPKEDMMRVLRHVGPKLPADKPHYLMGVGTPEDLVDGVANGIDMFDCVMPTRNARNGWLFTRFGDVKIRNATHKNSLKPLDPTCSCYTCRNFSRGYLHHLHRVGEILGAQLNTIHNLHYYLQLMSEIREAIETHTFDAFRQRFAQDRATGVD

SEQ ID NO: 52967 - protein, 379 aa, unidentified
  source 1..379: note = Burkholderiaceae bacterium
  REGION 1..379: note = tr|A0A4U8VGY6|A0A4U8VGY6_9BURK Queuine tRNA-ribosyltransferase OS=Burkholderiaceae bacterium PBA; OX = 795666 GN=tgt PE=3 SV=1
MLKYELLKTDGHARRGRLTLNHGVVETPIFMPVGTYGSVKAMSPLELNEIGAQIILGNTFHLWLRPGLEVVATHEGLHGFIGWGKPILTDSGGFQVFSLGDLRKITEDGVTFASPVNGDKLFLSPEISMQIQRTLNSDIVMQFDECTPYEIDGRPATRDEAAKSMRMSLRWGKRSRDEFDRGENPNALFGIVQGGMFEDLREESLAGLQATGDGGFHGYAIGGLSVGEPKEDMLRVLEHIGPKLPADKPHYLMGVGTPEDLVAGVASGVDMFDCVMPTRNARNGWLFTRYGDIKIKNAAHKNDPRPLDESCGCYTCRNFSRAYLHHLHRVGEILGARLNTIHNLYYYLELMREMRDAIDAGQFSAFVARFHADRGRGAQ

SEQ ID NO: 52968 - protein, 291 aa, unidentified
  source 1..291: note = Burkholderiaceae bacterium
  REGION 1..291: note = tr|A0A522FT69|A0A522FT69_9BURK Queuine tRNA-ribosyltransferase (Fragment) OS=Burkholderiaceae bacterium OX=2030806 GN=EPN64_11495 PE=3 SV=1
MLQFELLKTDDAQGGYAGSHARRGRLTLNHGVVETPIFMPVGTYGTVKGVLPRSLQEMGAQIILGNTFHLWMRPGQDVMTSFGGLHQFEKWDKPILTDSGGFQVWSLGEMRKITEEGVHFASPVNGDKLFMSPEVSMQIQTVLNSDIAMQLDECTPYETAGHVTTEREARASMEMSLRWARRSQDEFARLQNPNALFGIVQGGMFENLREESLEQLAAMDFPGYAIGGVSVGEPKDEMLRIMAHTPHRLPAHKPRYLMGVGTPEDLVEGVAQGVDMFDCVMPTRNARNGTL

SEQ ID NO: 52969 - protein, 401 aa, unidentified
  source 1..401: note = Burkholderiales bacterium
  REGION 1..401: note = tr|A0A1F4M1U4|A0A1F4M1U4_9BURK Queuine tRNA-ribosyltransferase OS=Burkholderiales bacterium RIFOXYD12_FULL_59_19 OX=1797574 GN=tgt PE=3 SV=1
MVQFDLLRTDPPVSDTGYAGSHARRGTLVLNHGMVQTPIFMPVGTYGTVKGVMPSNLEDMGAQIILGNTFHLWMRPGLDVMQSFGGLHDFERWTKPILTDSGGFQVWSLGAMRKITEEGVHFSSPVNGDKLFMSPEVSMQIQTTLNSDIAMQLDECTPYLSVEPKTKGQITTEHEARSSMEMSLRWAKRSQDEFARLDNPNALFGIVQGGMFEGLRQESLEQLVAMDFPGYAVGGVSVGEPKDEMLRIMAHTPHRLPWHKPRYLMGVGTPEDLVEGVAQGVDMFDCVMPTRNARNGTLFTRFGDLKMRNARHKADHGPLDSTCSCYTCKGTTRPNGTISGGFSRAYLHHLDRCGEMLGPMLASIHNLHYYLNLMREVRAALDGGSFGAFRQQFKADRARGV

SEQ ID NO: 52970 - protein, 390 aa, unidentified
  source 1..390: note = Burkholderiales bacterium
  REGION 1..390: note = tr|A0A1M3JUS7|A0A1M3JUS7_9BURK Queuine tRNA-ribosyltransferase OS=Burkholderiales bacterium 68-12; OX = 1896170 GN=tgt PE=3 SV=1
MLQFQILATDPSSHARRATLTLNHGVVQTPIFMPVGTYGTVKGVMPQSLHDMGAQIILGNTFHLWMRPGLDVVQSFGGLHGFEQWHKPILTDSGGFQVWSLGAMRKITEEGVHFASPVNGDKLFMSPEVSMQIQTTLNSDIVMQLDECTPYETNGHLTTEAEARKSMEMSRRWAARSKAEFERLGNPNALFGIVQGGMYEHLRQESLDALVEMDFPGYAVGGVSVGEPKDEMLRIMAHTPHRLPAHKPRYLMGVGTPEDLVEGVAQGVDMFDCVMPTRNARNGTIFTRYGDLKIRNARHKTDHQPLDVSCTCHACAGQAGVAWDAGGRGGFSRAYLHHLDRCGEMLGPMLTTIHNLHYYLHLMGEIRAALDAGRFAAFRAQFKADRARGV

SEQ ID NO: 52971 - protein, 375 aa, Buttiauxella agrestis
  REGION 1..375: note = tr|A0A381CDL5|A0A381CDL5_9ENTR Queuine tRNA-ribosyltransferase OS=Buttiauxella agrestis OX=82977; GN = tgt PE=3 SV=1
MKFELDTTDGRARRGRLVFDRGVVETPAFMPVGTYGTVKGMTPEEVEATGAHIILGNTFHLWLRPGQEIMKLHGDLHDFMQWKGPILTDSGGFQVFSLGDIRKITEAGVHFRNPINGDAIFLDPEKSMEIQYDLGSDIVMIFDECTPYPADWDYAKRSMEMSLRWAQRSRDRFDSLENKNALFGIIQGSVYEDLRDISVKGLVEIGFDGYAVGGLAVGEPKEDMHRILEHVCPQIPADKPRYLMGVGKPEDLVEGVRRGIDMFDCVMPTRNARNGHLFVTDGVVKIRNAKYKDDTSSLDSECDCYTCRNYSRAYLHHLDRCNEILGARLNTIHNLRYYQRLMAGLRKAIEEGKLEHFVSDFYERTGKPVPPLNVD

SEQ ID NO: 52972 - protein, 375 aa, Buttiauxella agrestis
  REGION 1..375: note = tr|A0A085GI02|A0A085GI02_9ENTR Queuine tRNA-ribosyltransferase OS=Buttiauxella agrestis ATCC 33320 OX=1006004 GN=tgt PE=3 SV=1
MKFELDTTDGRARRGRLVFDRGVVETPAFMPVGTYGTVKGMTPEEVEATGAQIILGNTFHLWLRPGQEIMKLHGDLHDFMQWKGPILTDSGGFQVFSLGDIRKITEAGVHFRNPINGDAIFLDPEKSMEIQYDLGSDIVMIFDECTPYPADWDYAKRSMEMSLRWAQRSRDRFDSLENKNALFGIIQGSVYEDLRDISVKGLVEIGFDGYAVGGLAVGEPKEDMHRILEHVCPQIPADKPRYLMGVGKPEDLVEGVRRGIDMFDCVMPTRNARNGHLFVTDGVVKIRNAKHKDDTSTLDSECDCYTCRNYSRAYLYHLDRCNEILGARLNTIHNLRYYQRLMAGLRKAIEEGKLEHFVSDFYERIGKPVPPLNVD

SEQ ID NO: 52973 - protein, 375 aa, Buttiauxella brennerae
  REGION 1..375: note = tr|A0A1B7IUZ8|A0A1B7IUZ8_9ENTR Queuine tRNA-ribosyltransferase OS=Buttiauxella brennerae ATCC 51605 OX=1354251 GN=tgt PE=3 SV=1
MKFELDTTDGRARRGRLVFDRGVVETPAFMPVGTYGTVKGMTPEEVEATGAQIILGNTFHLWLRPGQEIMKLHGDLHDFMQWKGPILTDSGGFQVFSLGDIRKITEAGVHFRNPINGDAIFLDPEKSMEIQYDLGSDIVMIFDECTPYPADWDYAKRSMEMSLRWAQRSRDRFDSLENKNALFGIIQGSVYEDLRDISVKGLVDIGFDGYAVGGLAVGEPKEDMHRILEHVCPQIPADKPRYLMGVGKPEDLVEGVRRGIDMFDCVMPTRNARNGHLFVTDGVVKIRNAKHKDDTSTLDSECDCYTCRNYSRAYLYHLDRCNEILGARLNTIHNLRYYQRLMAGLRKAIEEGKLEHFVSDFYERIGKPVPPLNVD

SEQ ID NO: 52974 - protein, 375 aa, Buttiauxella gaviniae
  REGION 1..375: note = tr|A0A1B7HU79|A0A1B7HU79_9ENTR Queuine tRNA-ribosyltransferase OS=Buttiauxella gaviniae ATCC 51604 OX=1354253 GN=tgt PE=3 SV=1
MKFELDTTDGRARRGRLVFDRGVVETPAFMPVGTYGTVKGMTPEEVEATGAQIILGNTFHLWLRPGQEIMKLHGDLHDFMQWKGPILTDSGGFQVFSLGDIRKITEAGVHFRNPINGDAIFLDPEKSMEIQYDLGSDIVMIFDECTPYPADWDYAKRSMEMSLRWAQRSRDRFDSLENKNALFGIIQGSVYEDLRDISVKGLVEIGFDGYAVGGLAVGEPKEDMHRILEHVCPQIPADKPRYLMGVGKPEDLVEGVRRGIDMFDCVMPTRNARNGHLFVTDGVVKIRNAKHKDDTSTLDSECDCYTCRNYSRAYLYHLDRCNEILGARLNTIHNLRYYQRLMAGLRKAIEEGKLEQFVSDFYERIGKPVPPLNVD

SEQ ID NO: 52975 - protein, 375 aa, Buttiauxella izardii; identical to SEQ ID NO: 52972
  REGION 1..375: note = tr|A0A3A5JYB1|A0A3A5JYB1_9ENTR Queuine tRNA-ribosyltransferase OS=Buttiauxella izardii OX=82991; GN = tgt PE=3 SV=1

SEQ ID NO: 52976 - protein, 375 aa, Buttiauxella noackiae
  REGION 1..375: note = tr|A0A1B7I1I3|A0A1B7I1I3_9ENTR Queuine tRNA-ribosyltransferase OS=Buttiauxella noackiae ATCC 51607 OX=1354255 GN=tgt PE=3 SV=1
MKFELDTTDGRARRGRLVFDRGVVETPAFMPVGTYGTVKGMTPEEVEATGAQIILGNTFHLWLRPGQEIMKLHGDLHDFMQWKGPILTDSGGFQVFSLGDIRKITEAGVHFRNPINGDAIFLDPEKSMEIQYDLGSDIVMIFDECTPYPADWDYAKRSMEMSLRWAQRSRDRFDSLENKNALFGIIQGSVYEDLRDISVKGLVEIGFDGYAVGGLAVGEPKEDMHRILEHVCPQIPADKPRYLMGVGKPEDLVEGVRRGIDMFDCVMPTRNARNGHLFVTDGVVKIRNAKHKDDVSPLDAECDCYTCRNYSRAYLHHLDRCNEILGARLNTIHNLRYYQRLMAGLRKAIEEGKLEHFVSDFYERTGKPVPPLNVD

SEQ ID NO: 52977 - protein, 375 aa, Buttiauxella sp.
  REGION 1..375: note = tr|A0A5C5DAP8|A0A5C5DAP8_9ENTR Queuine tRNA-ribosyltransferase OS=Buttiauxella sp. B2 OX=2587812; GN = tgt PE=3 SV=1
MKFELDTTDGRARRGRLVFDRGVVETPAFMPVGTYGTVKGMTPEEVEATGAQIILGNTFHLWLRPGQEIMKLHGDLHDFMQWKGPILTDSGGFQVFSLGDIRKITEAGVHFRNPINGDAIFLDPEKSMEIQYDLGSDIVMIFDECTPYPADWDYAKRSMEMSLRWAQRSRDRFDSLENKNALFGIIQGSVYEDLRDISVKGLVDIGFDGYAVGGLAVGEPKEDMHRILEHVCPQIPTDKPRYLMGVGKPEDLVEGVRRGIDMFDCVMPTRNARNGHLFVTDGVVKIRNAKYKDDTSTLDSECDCYTCRNYSRAYLYHLDRCNEILGARLNTIHNLRYYQRLMAGLRKAIEEGKLEHFVSDFYERIGKPVPPLNVD

SEQ ID NO: 52978 - protein, 375 aa, Buttiauxella sp.
  REGION 1..375: note = tr|A0A4P5QCH4|A0A4P5QCH4_9ENTR Queuine tRNA-ribosyltransferase OS=Buttiauxella sp. A111; OX = 2563088 GN=tgt PE=3 SV=1
MKFELDTTDGRARRGRLVFDRGVVETPAFMPVGTYGTVKGMTPEEVEATGAQIILGNTFHLWLRPGQEIMKLHGDLHDFMQWKGPILTDSGGFQVFSLGDIRKITEAGVHFRNPINGDAIFLDPEKSMEIQYDLGSDIVMIFDECTPYPADWDYAKRSMEMSLRWAQRSRDRFDSLENKNALFGIIQGSVYEDLRDISVKGLVEIGFDGYAVGGLAVGEPKEDMHRILEHVCPQIPADKPRYLMGVGKPEDLVEGVRRGIDMFDCVMPTRNARNGHLFVTDGVVKIRNAKHKDDTSPLDSECDCYTCRNYSRAYLHHLDRCNEILGARLNTIHNLRYYQRLMAGLRKAIEEGKLEHFVSDFYERTGKPVPPLNVD

SEQ ID NO: 52979 - protein, 375 aa, Buttiauxella warmboldiae
  REGION 1..375: note = tr|A0A3N5E0P0|A0A3N5E0P0_9ENTR Queuine tRNA-ribosyltransferase OS=Buttiauxella warmboldiae; OX = 82993 GN=tgt PE=3 SV=1
MKFELDTTDGRARRGRLVFERGVVETPAFMPVGTYGTVKGMTPEEVEATGAQIILGNTFHLWLRPGQEIMKLHGDLHDFMQWKGPILTDSGGFQVFSLGDIRKITEAGVHFRNPINGDAIFLDPEKSMEIQYDLGSDIVMIFDECTPYPADWDYAKRSMEMSLRWAQRSRDRFDSLENKNALFGIIQGSVYEDLRDISVKGLVEIGFDGYAVGGLAVGEPKEDMHRILEHVCPQIPADKPRYLMGVGKPEDLVEGVRRGIDMFDCVMPTRNARNGHLFVTDGVVKIRNAKHKDDTSPLDAECDCYTCRNYSRAYLHHLDRCNEILGARLNTIHNLRYYQRLMAGLRQAIEEGKLELFVSDFYQRTGKPVPPLNVD

SEQ ID NO: 52980 - protein, 381 aa, unidentified
  source 1..381: note = Unknown
  REGION 1..381: note = tr|D7GSK3|D7GSK3_9FIRM Queuine tRNA-ribosyltransferase OS=butyrate-producing bacterium SS3/4 OX=245014 GN=tgt PE=3 SV=1
MKYKILAKDGRAKRADVETVHGTIHTPVFMNVGTVAAIKGAVSTDDLRGIGTQVELSNTYHLHVRTGDKLIKELGGLHRFMNWDRPILTDSGGFQVFSLAGLRKIKEEGVYFNSHIDGHKIFMGPEESMQIQSNLGSTIAMAFDECAPHPCTREYMENSVARTTRWLARCQAEMARLNSLPDTVNKEQLLFGINQGGTFEDIRIAHADTISKMNCDGYAVGGLAVGESHEEMYRILDAVVPHLPEEKPTYLMGVGTPANILEAVDRGVDFFDCVYPTRNGRHGHVYTNHGKINLFNEQFSKDMRPIEEGCQCPACRSYSRAYIRHLLKAKEMLGMRLCVLHNLYFYNTMMTEIREAIENHCYAEYKEKKLEGVTGNYKDKV

SEQ ID NO: 52981 - protein, 369 aa, unidentified
  source 1..369: note = Butyribacterium methylotrophicum
  REGION 1..369: note = tr|A0A1E7S0W1|A0A1E7S0W1_BUTME Queuine tRNA-ribosyltransferase OS=Butyribacterium methylotrophicum OX=1487 GN=tgt PE=3 SV=1
MFRYELIKEDKHTGARLGKIHTSHGVINTPIFMPVGTQATVKSMTSEDLEEMDANIILGNTYHLYLRPGQEIMEKAGGLHKFMHWDRPILTDSGGFQVFSLNDLRKITEEGVEFCSHLDGSRHFMSPEKSIDMQNTIGADIIMCFDECAPADADYEYTKKSMEMTTRWAKRCKDAHRRPDDQALFGIVQGGMYEDLRAESVRGLTEIDFPGYSIGGLSVGESKDTMYRILDATVPLLPKDKPRYLMGVGSVDALLEGVIRGVDMFDCVLQTRIARNGTAMTSQGKVVVRNATYKEDFTPLDPECDCFVCRNYTRAYLRHLVKCNEILGARLLTYHNLYFTLKLMEKVRNAIMEDNLLAFKESFFQKYGI

SEQ ID NO: 52982 - protein, 376 aa, unidentified
  source 1..376: note = Butyricicoccus porcorum
  REGION 1..376: note = tr|A0A252F343|A0A252F343_9CLOT Queuine tRNA-ribosyltransferase OS=Butyricicoccus porcorum; OX = 1945634 GN=tgt PE=3 SV=1
MFKVLRTEGNARRGEFTCAHGTVQTPVFQNVGTQGAIKGAVSAQDLKELGCQIELSNTYHLHVRPGDQIVRAMGGLHKFMNWDGPILTDSGGFQVFSLSSLRRIKEEGVYFSSHVDGRKIFMGPEESMQIQSNLGSDIAMAFDECCENPSPYEYVKKSCERTTRWLYRCKAELDRLNSLPTTVNPQQMLFGINQGGTYDDLRIQHMKDIAQLDLPGYAIGGLAVGESTETMYHILDVVLPHAPADKPRYLMGVGTPSNIIEAVWRGVDFFDCVMPTRNARHGHLFTWDGIRNLNNAKYQLDDKPIDERCNCPVCRTYSRAYIRHLLKSGEMLGQRLTVMHNLWFYNNLMAEIRKALDEGRFAEFRAQWSDRLSQRI

SEQ ID NO: 52983 - protein, 380 aa, Butyricicoccus pullicaecorum
  REGION 1..380: note = tr|R8W4N0|R8W4N0_9CLOT Queuine tRNA-ribosyltransferase OS=Butyricicoccus pullicaecorum 1.2 OX=1203606 GN=tgt PE=3 SV=1
MEIGAFELKKTEGKARRGAFQTAHGLVQTPVFMNVGTAGAIKGAVDAFDLKELGCQVELSNTYHLHVRPGDAIVKQMGGLHKFMRWDGPMLTDSGGFQVFSLASLRKIREEGVTFNSHVDGRKIFMGPEESMRIQSNLGSDIAMAFDECIENPAPYEYVKDSCARTTRWLVRCKEEMARLNSLPDTVNPHQLLFGINQGGTYDDLRVAHMEEIAKLDLPGYAIGGLAVGESTDVMYHILDVVLPHAPEHKPRYLMGVGTPSNIIEGVARGIDFFDCVMPTRNARHGHLFTWDGIMNIHNAKYQTDDRPIEEGCQCPTCRKFSRAYVRHLLKAGEMLSQRLLVQHNLWFYNNLMVKIREALDQGTFAEFRAQYSEKLAKRI

SEQ ID NO: 52984 - protein, 380 aa, Butyricicoccus pullicaecorum
  REGION 1..380: note = tr|A0A1Y4LG57|A0A1Y4LG57_9CLOT Queuine tRNA-ribosyltransferase OS=Butyricicoccus pullicaecorum; OX = 501571 GN=tgt PE=3 SV=1
MEIGAFELKKTEGKARRGAFQTAHGLVQTPVFMNVGTAGAIKGAVDAFDLKELGCQVELSNTYHLHVRPGDAIVKQMGGLHKFMRWDGPMLTDSGGFQVFSLASLRKIREEGVTFNSHVDGRKIFMGPEESMRIQSNLGSDIAMAFDECIENPAPYEYVKDSCARTTRWLVRCKEEMARLNSLPDTVNPHQLLFGINQGGTYDDLRIAHMEEIAKLDLPGYAIGGLAVGESTDVMYHILDVVLPHAPEHKPRYLMGVGTPSNIIEGVARGIDFFDCVMPTRNARHGHLFTWDGIMNIHNAKYQTDDRPIEEGCQCPTCRKFSRAYVRHLLKAGEMLSQRLLVQHNLWFYNNLMVKIREALDQGTFAEFRAQYSEKLAKRI

SEQ ID NO: 52985 - protein, 380 aa, Butyricicoccus sp.
  REGION 1..380: note = tr|A0A417HX09|A0A417HX09_9CLOT Queuine tRNA-ribosyltransferase OS=Butyricicoccus sp. AM28-25; OX = 2292294 GN=tgt PE=3 SV=1
MEIGKFNLIKTEGRARRGEFCTAHGVVQTPVFQNVGTAGAIKGAVDAFDLKELGCQIELSNTYHLHVRPGDQIVKQMGGLHKFMRWDGPMLTDSGGFQVFSLATLRKIKEEGVTFHSHVDGRKIFMGPEESMRIQSNLGSDIAMAFDECIENPAPREYVKNSIDRTTRWLKRCKTELDRLNTLPDTVNPHQMLFGINQGGTYDDLRIEHMQAIAELDLPGYAIGGLAVGESTEVMYHILDVVLPHAPEHKPRYLMGVGTPSNIIEGVARGIDFFDCVMPTRNARHGHLFTHNGILNIMNAKYQTDDRPIEEGCQCPTCQRFSRAYLRHLLKSGEMLSQRLLVMHNLWFYNHLMQEIRDALDNGTFEDYRAEYSEKMSKRI

SEQ ID NO: 52986 - protein, 380 aa, Butyricicoccus sp.
  REGION 1..380: note = tr|A0A396MDN9|A0A396MDN9_9CLOT Queuine tRNA-ribosyltransferase OS=Butyricicoccus sp. AF15-40; OX = 2292197 GN=tgt PE=3 SV=1
MEIGKFNLIKTEGRARRGEFCTAHGVVQTPVFQNVGTAGAIKGAVDAFDLKELGCQIELSNTYHLHVRPGDQIVKQMGGLHKFMRWDGPMLTDSGGFQVFSLATLRKIKEEGVTFHSHVDGRKIFMGPEESMRIQSNLGSDIAMAFDECIENPAPREYVKNSIDRTTRWLKRCKTELDRLNTLPDTVNPHQMLFGINQGGTYDDLRIEHMQAIAELDLPGYAIGGLAVGESTEVMYHILDVVLPHAPEHKPRYLMGVGTPSNIIEGVARGIDFFDCVMPTRNARHGHLFTHNGILNIMNAKYQTDDRPIEEGCQCPTCQRFSRAYLRHLLKSGEMLSQRLLVMHNLWFYNHLMQEIRDALDNGTFEAYRAEYSEKMSKRI

SEQ ID NO: 52987 - protein, 376 aa, unidentified
  source 1..376: note = Butyricimonas faecalis
  REGION 1..376: note = tr|A0A3S9VSG6|A0A3S9VSG6_9BACT Queuine tRNA-ribosyltransferase OS=Butyricimonas faecalis; OX = 2093856 GN=tgt PE=3 SV=1
MKYTLLAKDKNSDARCGVLTTDHGNIETPIFMPVGTVGTVKAVHARELKEDIKAQIILGNTYHLYLRPGTEVLEEAGGLHKFNSWDRPILTDSGGFQVFSLGDCRKITEEGVVFRSHIDGSKHLFTPENVMDIQRKIGADIIMAFDECPPGQSEYGYAKNSLELTQRWLERCVKRLDATEPLYGYHQSLFPIVQGCTFRDLREKAAEHAVALDREGYAIGGLAVGEEADVMYEMIQVVNRILPQDKPRYLMGVGTPENILEAISLGVDMFDCVMPTRNGRNGMLFTTEGVINIKNKKWEKDFSRIDPAVLSFVDSDYSKAYLRHLIKADEILGLQICSIHNLSFYLWLVREARKHILEGDFVTWKESTIKKVTRRL

SEQ ID NO: 52988 - protein, 376 aa, Butyricimonas sp.
  REGION 1..376: note = tr|A0A1Y3VNT9|A0A1Y3VNT9_9BACT Queuine tRNA-ribosyltransferase OS=Butyricimonas sp. An62; OX = 1965649 GN=tgt PE=3 SV=1
MKYTLLAKDKNSDARCGVLTTDHGNIETPIFMPVGTVGTVKAVHARELKEDIKAQIILGNTYHLYLRPGTEVLEEAGGLHKFNSWDRPILTDSGGFQVFSLGDCRKITEEGVVFRSHIDGSKHLFTPENVMDIQRKIGADIIMAFDECPPGQSEYGYAKNSLELTQRWLERCVKRLDSTEPLYGYHQSLFPIVQGCTFRDLREKAAEHAVALDREGYAIGGLAVGEEAEVMYEMIQVVNRILPQDKPRYLMGVGTPENILEAISLGVDMFDCVMPTRNGRNGMLFTTEGVINIKNKKWEKDCSRIDPAGLSFVDDDYSKAYLRHLIKADEILGLQICSIHNLSFYLWLVREARKHILEGDFVTWKESTIKKVTRRL

SEQ ID NO: 52989 - protein, 376 aa, Butyricimonas sp.
  REGION 1..376: note = tr|A0A3D2DRT2|A0A3D2DRT2_9BACT Queuine tRNA-ribosyltransferase OS=Butyricimonas sp. OX=1969738; GN = tgt PE=3 SV=1
MKYTLLAKDKNSDARCGVLTTDHGNIETPIFMPVGTVGTVKAVHARELKEDIKAQIILGNTYHLYLRPGTEVLEEAGGLHKFNSWDRPILTDSGGFQVFSLGDCRKITEEGVVFRSHIDGSKHLFTPENVMDIQRKIGADIIMAFDECPPGQSEYGYAKNSLELTQRWLERCVKRLDSTEPLYGYHQSLFPIVQGCTFRDLREKAAEHAVALDREGYAIGGLAVGEEAEVMYEMIQVVNRILPQDKPRYLMGVGTPENILEAISLGVDMFDCVMPTRNGRNGMLFTTEGVINIKNKKWEKDFSRIDPAGLSFVDNDYSKAYLRHLIKADEILGLQICSIHNLSFYLWLVREARKHILEGDFVTWKESTIKKVTRRL

SEQ ID NO: 52990 - protein, 376 aa, Butyricimonas synergistica
  REGION 1..376: note = tr|A0A1U7LAK6|A0A1U7LAK6_9BACT Queuine tRNA-ribosyltransferase OS=Butyricimonas synergistica; OX = 544644 GN=tgt PE=3 SV=1
MKYTLLAKDKNSDARCGVLTTNHGNIETPIFMPVGTVGTVKAVHARELKEDIKAQIILGNTYHLYLRPGTEVLEEAGGLHKFNSWDRPILTDSGGFQVFSLGDCRKIAEEGVVFRSHIDGSKHLFTPENVMDIQRKIGADIIMAFDECPPGQSEYGYAKNSLELTQRWLERCVNRLDSTEPLYGYHQSLFPIVQGCTFRDLREKAAEHAVALDREGYAIGGLAVGEEAEVMYEMIQVVNRILPQDKPRYLMGVGTPENILEAISLGVDMFDCVMPTRNGRNGMLFTTEGVINIKNKKWEKDFSRIDPAGLSFVDDDYSKAYLRHLIKADEILGLQICSIHNLSFYLWLVREARKHILEGDFVTWKESTIKKVTRRL

SEQ ID NO: 52991 - protein, 376 aa, Butyricimonas virosa
  REGION 1..376: note = tr|A0A415QP46|A0A415QP46_9BACT Queuine tRNA-ribosyltransferase OS=Butyricimonas virosa OX=544645; GN = tgt PE=3 SV=1
MKYTLLAKDKNSDARCGVLTTDHGNIETPIFMPVGTVGTVKAVHARELKEDIKAQIILGNTYHLYLRPGTEVLEEAGGLHKFNSWDRPILTDSGGFQVFSLGDCRKITEEGVVFRSHIDGSKHLFTPENVMDIQRKIGADIIMAFDECPPGQSEYGYAKNSLELTQRWLERCVKRFDSTEPLYGYHQSLFPIVQGCTFRDLREKAAEHAVTLDREGYAIGGLAVGEEAEVMYEMIQVVNRILPQDKPRYLMGVGTPENILEAISLGVDMFDCVMPTRNGRNGMLFTTEGVINIKNKKWEKDFSRIDPAGLSFVDNDYSKAYLRHLIKADEILGLQICSIHNLSFYLWLVREARKHILEGDFVTWKESTIKKVTRRL

SEQ ID NO: 52992 - protein, 376 aa, Butyricimonas virosa
  REGION 1..376: note = tr|A0A413IIT8|A0A413IIT8_9BACT Queuine tRNA-ribosyltransferase OS=Butyricimonas virosa OX=544645; GN = tgt PE=3 SV=1
MKYTLLAKDKNSDARCGVLTTDHGNIETPIFMPVGTVGTVKAVHARELKEDIKAQIILGNTYHLYLRPGTEVLEEAGGLHKFNSWDRPILTDSGGFQVFSLGDCRKITEEGVVFRSHIDGSKHLFTPENVMDIQRKIGADIIMAFDECPPGQSEYGYAKNSLELTQRWLERCVKRFDSTEPLYGYHQSLFPIVQGCTFRDLREKAAEHAVALDREGYAIGGLAVGEEAEVMYEMIQVVNRILPQDKPRYLMGVGTPENILEAISLGVDMFDCVMPTRNGRNGMLFTTEGVINIKNKKWEKDFSRIDPAGLSFVDNDYSKAYLRHLIKADEILGLQICSIHNLSFYLWLVREARKHILEGDFVTWKESTIKKVTRRL

SEQ ID NO: 52993 - protein, 379 aa, Butyrivibrio crossotus
  REGION 1..379: note = tr|R5LXA1|R5LXA1_9FIRM Queuine tRNA-ribosyltransferase OS=Butyrivibrio crossotus CAG:259; OX = 1263062 GN=tgt PE=3 SV=1
MEYKVLKTDGKAKRAEMKTVHGTIQTPVFMNVGTVAAIKGAVSTDDLREIGCQVELSNTYHLHVRTGDKLIKEMGGIREFMNWDRPVLTDSGGFQVFSLAKLRKIKEEGVSFNSHIDGHKIFMGPEESMQIQSNLGSTIAMAFDECIENPSPRDYVQKSVDRTTRWLVRCKNEMARLNSLPDTVNKEQLLFGINQGGTYDDIRINHAKAIAELNLDGYAIGGLAVGETHEEMYRIIDAVVPHLPADKPVYLMGVGTPANILEAVDRGVDFFDCVYPSRNGRHGHVYTRFGKLNLFNAQYEKDARPIEEGCGCPACRSYSRAYIRHLLKAKEMLGMRLCVLHNLYFYNHLMEQIREAIDEGRYSEFKKETLESLQGGQTS

SEQ ID NO: 52994 - protein, 379 aa, Butyrivibrio crossotus
  REGION 1..379: note = tr|D4S0N9|D4S0N9_9FIRM Queuine tRNA-ribosyltransferase OS=Butyrivibrio crossotus DSM 2876; OX = 511680 GN=tgt PE=3 SV=1
MEYKVLKTDGKAKRAEMKTVHGTIQTPVFMNVGTVAAIKGAVSTDDLREIGCQVELSNTYHLHVRTGDKLIKEMGGIREFMNWDRPVLTDSGGFQVFSLAKLRKIKEEGVSFNSHIDGHKIFMGPEESMQIQSNLGSTIAMAFDECIENPSPRDYVQKSVDRTTRWLVRCKNEMARLNSLPDTVNKEQLLFGINQGGTYDDIRINHAKAIAGLNLDGYAIGGLAVGETHEEMYRIIDSVVPNLPADKPVYLMGVGTPANILEAVDRGVDFFDCVYPSRNGRHGHVYTRFGKLNLFNAQYEKDARPIEEGCGCPACRSYSRAYIRHLLKAKEMLGMRLCVLHNLYFYNHLMEQIREAIDEGRYSEFKKETLESLQGGQTS

SEQ ID NO: 52995 - protein, 393 aa, Butyrivibrio fibrisolvens
  REGION 1..393: note = tr|A0A1M5PMR6|A0A1M5PMR6_BUTFI Queuine tRNA-ribosyltransferase OS=Butyrivibrio fibrisolvens DSM 3071 OX=1121131 GN=tgt PE=3 SV=1
MYKLLKTEGRAKRGEFQTVHGTIQTPVFMNVATVAAIKGAVSTEDLEGIKNQVVLCNTYHLHLRPGDDNVYRMGGLHKFMSCNKPILTDSGGFQVFSLAKTRRIREEGVYFHSHIDGHKLFMGPEESMRIQSHLGSTIAMAFDECPSARADHEYVQMSVDRTTRWLERCKKEMDRLNSLPDTVNPHQMLFGINQGAIFDDIRIEHAKRIAEMNLDGYAVGGLAVGETHEEMYHVLDTVVPYLPQDKPTYLMGVGTPANILEAVERGVDFFDCVYPSRNGRHGHVYTKKGKLNLLNARFELDSHPIEEGCQCPACKRYSRGYIRHLLKSGEMLGMRLCVLHNLYFYNNMMEEIRDALDNGNFAEYKKKTIEGFSEYEELSTAPGSDIAKNWRKG

SEQ ID NO: 52996 - protein, 393 aa, Butyrivibrio fibrisolvens
  REGION 1..393: note = tr|A0A317G608|A0A317G608_BUTFI Queuine tRNA-ribosyltransferase OS=Butyrivibrio fibrisolvens; OX = 831 GN=tgt PE=3 SV=1
MYKLLKTEGRAKRGEFQTVHGTIQTPVFMNVATVAAIKGAVSTEDLEGIKNQVVLCNTYHLHLRPGDDNVYRMGGLHKFMSCNKPILTDSGGFQVFSLAKTRRIKEEGVYFHSHIDGHKLFMGPEESMRIQSHLGSTIAMAFDECPSARADHEYVQMSVDRTTRWLERCKKEMDRLNSLPDTVNPHQMLFGINQGAIFDDIRIEHAKRIREMDLDGYAVGGLAVGETHEEMYHVLEQVVPYLPQDKPTYLMGVGTPANILEGVERGIDFFDCVYPSRNGRHGHVYTKKGKLNLLNARFELDSHPIEEGCQCPACKRYSRGYIRHLLKAGEMLGMRLCVLHNLYFYNNMMEEIRDALDNGNFAAYKKKTLDGFREYEELSTAPGGDIAKNWRKG

SEQ ID NO: 52997 - protein, 393 aa, Butyrivibrio hungatei
  REGION 1..393: note = tr|A0A1M7T5Y7|A0A1M7T5Y7_9FIRM Queuine tRNA-ribosyltransferase OS=Butyrivibrio hungatei DSM 14810; OX = 1121132 GN=tgt PE=3 SV=1
MYKILKKDGNAKRAEFTTVHGKIQTPVFMNVATVAAIKGGVSTEDLEGIDTQVVLSNTYHLHLRPGDDVVYKMGGLHKFMSCNKPILTDSGGFQVFSLAKTRRIKEEGVYFHSHIDGHKLFMGPEESMRIQSHLGSTIAMAFDECPSAKAEHEYVQMSVDRTTRWLERCKKEMDRLNGLEYTVNKNQMLFGINQGAIFDDIRIEHAKRISELDLDGYAVGGLAVGESHEEMYHVLETTVPYLPENKPTYLMGVGTPANILEAVERGVDFFDCVYPSRNGRHGHLYTNKGHINLLNARYELDDSPIEEGCGCPACRRYSKAYIRHLLKSGEMLGLRLCVLHNLYFYNHMMIEIRDAIEKGEYSAYKKRKLDGFLEYDSIPVNDGYNIARNWRKG

SEQ ID NO: 52998 - protein, 365 aa, Butyrivibrio hungatei
  REGION 1..365: note = tr|A0A1D9P1X8|A0A1D9P1X8_9FIRM Queuine tRNA-ribosyltransferase OS=Butyrivibrio hungatei OX=185008; GN = tgt PE=3 SV=1
MNVATVAAIKGGVSTEDLEGIDTQVVLSNTYHLHLRPGDDVVYKMGGLHKFMSCNKPILTDSGGFQVFSLAKTRRIKEEGVYFHSHIDGHKLFMGPEESMRIQSHLGSTIAMAFDECPSAKAEHEYVQMSVDRTTRWLERCKKEMDRLNGLEYTVNKNQMLFGINQGAIFDDIRIEHAKRISELDLDGYAVGGLAVGESHEEMYHVLETTVPYLPENKPTYLMGVGTPANILEAVERGVDFFDCVYPSRNGRHGHLYTNKGHINLLNARYELDDSPIEEGCGCPACRRYSKAYIRHLLKSGEMLGLRLCVLHNLYFYNHMMIEIRDAIEKGEYSAYKKRKLDGFLEYDSIPVNDGYNIARNWRKG

SEQ ID NO: 52999 - protein, 393 aa, Butyrivibrio proteoclasticus
  REGION 1..393: note = tr|E0RUN1|E0RUN1_BUTPB Queuine tRNA-ribosyltransferase OS=Butyrivibrio proteoclasticus (strain ATCC 51982 / DSM 14932 / B316) OX=515622 GN=tgt; PE = 3 SV=1
MYKILKKDGSAKRAEFTTVHGTVQTPVFMNVATVAAIKGGVSTEDLEGIDTQVVLSNTYHLHLRPGDDVVYRMGGLHKFMSCNKPILTDSGGFQVFSLAKTRKIKEEGVYFHSHIDGHKLFMGPEESMRIQSHLGSTIAMAFDECPSAKAEHEYVQMSVDRTTRWLERCKKEMDRLNSLEYTVNHDQMLFGINQGAIFDDIRIEHAKRISELDLDGYAVGGLAVGESHEEMYHVLETVVPYLPENKPTYLMGVGTPANILEAVERGVDFFDCVYPSRNGRHGHLYTNRGHINLLNARYELDDTPIEEGCKCPACRRYSKAYIRHLLKSGEMLGLRLCVLHNLYFYNHMMEEIRDAIDAGRFQEYKKNKLYGMQEFDSVVNTEYANIDKNWRKG

SEQ ID NO: 53000 - protein, 393 aa, Butyrivibrio proteoclasticus
  REGION 1..393: note = tr|A0A1I5QGH0|A0A1I5QGH0_9FIRM Queuine tRNA-ribosyltransferase OS=Butyrivibrio proteoclasticus; OX = 43305 GN=tgt PE=3 SV=1
MYKILKKDGNAKRAEFTTVHGTVQTPVFMNVATVAAIKGGVSTEDLEGIDTQVVLSNTYHLHLRPGDELVYRMGGLHKFMSCNKPILTDSGGFQVFSLAKTRKIREEGVYFHSHIDGHKLFMGPEESMRIQSHLGSTIAMAFDECPSAKAEHEYVQMSVDRTTRWLLRCKKEMDRLNGLEYTVNPHQMLFGINQGAIFDDIRIEHAKRISELDLDGYAVGGLAVGESHEEMYHVLDTVVPFLPENKPTYLMGVGTPANILESVDRGVDFFDCVYPSRNGRHGHLYTNRGHINILNAKYEMDDTPIEEGCGCPACRRYTKAYIRHLLKAGEMLGMRLCVLHNLYFYNHMMTEIREAIEKGEYKEYKKRKLEGMLEFDSETIADGYNIARNWRKG

SEQ ID NO: 53001 - protein, 393 aa, Butyrivibrio sp.
  REGION 1..393: note = tr|A0A1I1CV18|A0A1I1CV18_9FIRM Queuine tRNA-ribosyltransferase OS=Butyrivibrio sp. YAB3001; OX = 1520812 GN=tgt PE=3 SV=1
MYKILKKDGSAKRAEFSTVHGTIQTPVFMNVATVAAIKGGVSTEDLEGIDTQVVLSNTYHLHLRPGDDVVYRMGGLHKFMSCNKPILTDSGGFQVFSLAKTRRIKEEGVYFHSHIDGHKLFMGPEESMRIQSHLGSTIAMAFDECPSAKAEHEYVQMSVDRTTRWLKRCQDEMRRLNGLEYTVNPNQLLFGINQGAIFDDIRIEHAKVISDMNLDGYAVGGLAVGETHEEMYHVLETVVPYLPEDKPTYLMGVGTPANILEAVERGVDFFDCVYPSRNGRHGHLYTSKGHINLLNARYELDDTPIDSGCNCPACRRYTKAYIRHLLKSGEMLGMRLCVLHNLYFYNHLMEEIRDAIEKGEYASYKKKKLEGFMEYDSAEIKDSYNIARNWRKG

SEQ ID NO: 53002 - protein, 393 aa, Butyrivibrio sp.
  REGION 1..393: note = tr|A0A1H5RXU1|A0A1H5RXU1_9FIRM Queuine tRNA-ribosyltransferase OS=Butyrivibrio sp. Su6 OX=1520810; GN = tgt PE=3 SV=1
MYKILKKDGNAKRAEFTTVHGTVQTPVFMNVATVAAIKGGVSTEDLEGIDTQVVLSNTYHLHLRPGDELVYRMGGLHKFMSCNKPILTDSGGFQVFSLAKTRKIREEGVYFHSHIDGHKLFMGPEESMRIQSHLGSTIAMAFDECPSAKAEHEYVQMSVDRTTRWLLRCKKEMDRLNGLEYTVNPHQMLFGINQGAIFDDIRIEHAKRISELDLDGYAVGGLAVGESHEEMYHVLDTVVPFLPDNKPTYLMGVGTPANILEAVDRGVDFFDCVYPSRNGRHGHLYTNRGHINILNAKYEMDDTPIEEGCGCPACRRYTKAYIRHLLKAGEMLGMRLCVLHNLYFYNHMMIEIREAIEKGEYKAYKKRKLEGMLEFDSETIADGYNIARNWRKG

SEQ ID NO: 53003 - protein, 375 aa, unidentified
  source 1..375: note = Bythopirellula goksoyri
  REGION 1..375: note = tr|A0A5B9QLM5|A0A5B9QLM5_9PLAN Queuine tRNA-ribosyltransferase OS=Bythopirellula goksoyri; OX = 1400387 GN=tgt PE=3 SV=1
MASSPFRFELLHSDTGCDARRGRLHTPHGTVELPTFMPVGTLGTVKGVDIARLRETGAQIVLGNTYHLALRPGANVVAELGGLHVFMGWQGPILTDSGGFQVFSLAERVKVTEKGVSFRSHIDGSALEITPERSIAIQEELGSDFAMAFDHVVALPNKREVIEDATWRSVRWAERCLEAAQREDQMLLGIVQGGLDPELRQSCAKALVSLDFRGYAIGGLSVGEPPEEMYSTLEATVPALPTERPRYLMGVGRPEDLVESMARGVDMFDCVMPTRNGRNALAFTDQGTVRLRNSQHERNRDPLEANCPCPACQHSRGYLRHLFQAKEMLGPILTSIHNITYYQRLMAEARQAIEADSFSEFRRAKLAAWGAKDSK

SEQ ID NO: 53004 - protein, 386 aa, unidentified
  source 1..386: note = Caballeronia arationis
  REGION 1..386: note = tr|A0A158A220|A0A158A220_9BURK Queuine tRNA-ribosyltransferase OS=Caballeronia arationis; OX = 1777142 GN=tgt PE=3 SV=1
MTDGHNPPANGLKFDLLTTDGQARRGRLTLNHGVVETPIFMPVGTYGTVKAIQPRELEEIRAQIILGNTFHLWLRPGLETIRAHGGLHQFMNWKRPILTDSGGFQVFSLGDLRKITEDGVTFASPINGDKLFLSPEISMQIQKILNSDIVMQFDECTPYATNGVPTSHKDAADSMRMSMRWAKRSIDEFDRLGNPNALFGIVQGGMFEDLRDESLAGLADIGFHGLAIGGLSVGEPKEDMMRVLKHIGPKLPADKPHYLMGVGTPEDLVAGVAAGVDMFDCVMPTRNARNGWLFTRFGDVKIRNATHKNSLKPLDETCGCYTCANFTRGYLHHLHRVGEILGAQLNTIHNLHYYLQLMTEVRESIENHKFDTFRKQFHENRARGID

SEQ ID NO: 53005 - protein, 387 aa, unidentified
  source 1..387: note = Caballeronia arvi
  REGION 1..387: note = tr|A0A158J795|A0A158J795_9BURK Queuine tRNA-ribosyltransferase OS=Caballeronia arvi OX=1777135; GN = tgt PE=3 SV=1
MTTGQFTPPENGLKFELLTTDGQARRGRLTLNHGVVETPIFMPVGTYGTVKAIQPRELEEIRAQIILGNTFHLWLRPGLEVIGAHGGLHKFMGWNRPILTDSGGFQVFSLGDLRKITEEGVTFASPINGDKLFLSPEVSMQIQKVLNSDIVMQFDECTPYSTNGIATSHKDAADSMRMSMRWAKRSIDEFQRLGNPNALFGIVQGGMFEDLRDESLAGLSEIGFHGLAIGGLSVGEPKEDMMRVLNHIGPKLPADKPHYLMGVGTPEDLVAGVAAGVDMFDCVMPTRNARNGWLFTRFGDLKIKNATHKNSMKPLDESCGCYTCQNFTRGYLHHLHRVGEILGAQLNTIHNLHYYLQLIGEVRESIENHTFEAFRKTFAENRARGVD

SEQ ID NO: 53006 - protein, 387 aa, unidentified
  source 1..387: note = Caballeronia calidae
  REGION 1..387: note = tr|A0A158B4V2|A0A158B4V2_9BURK Queuine tRNA-ribosyltransferase OS=Caballeronia calidae OX=1777139; GN = tgt PE=3 SV=1
MTAGQFTPPENGLKFELLTTDGQARRGRLTLNHGVVETPIFMPVGTYGTVKAIQPRELEEIRAQIILGNTFHLWLRPGLEVIGAHGGLHKFMGWNRPILTDSGGFQVFSLGDLRKITEDGVTFASPINGDKLFLSPEVSMQIQKVLNSDIVMQFDECTPYATNGIPTSHKDAADSMRMSMRWAKRSIDEFGRLGNPNALFGIVQGGMFEDLRDESLAGLSDIGFHGLAIGGLSVGEPKEDMMRVLNHIGPKLPADKPHYLMGVGTPEDLVAGVAAGVDMFDCVMPTRNARNGWLFTRFGDLKIKNATHKNSMKPLDESCTCYTCQNFTRGYLHHLHRVGEILGAQLNTIHNLHYYLQLIGEVRESIENHTFEAFRKTFAKNRARGVD

SEQ ID NO: 53007 - protein, 387 aa, unidentified
  source 1..387: note = Caballeronia catudaia
  REGION 1..387: note = tr|A0A158A9L2|A0A158A9L2_9BURK Queuine tRNA-ribosyltransferase OS=Caballeronia catudaia; OX = 1777136 GN=tgt PE=3 SV=1
MTAGQFTPPANGLKFELLTTDGQARRGRLTLNHGVVETPIFMPVGTYGTVKAIQPRELEEIRAQIILGNTFHLWLRPGLEVIGAHGGLHRFMGWNRPILTDSGGFQVFSLGDLRKITEEGVTFASPINGDKLFLSPEVSMQIQKVLNSDIVMQFDECTPYSTNGIATSHKDAADSMRMSMRWAKRSIDEFQRLGNPNALFGIVQGGMFEDLRDESLAGLSDIGFHGLAIGGLSVGEPKEDMMRVLNHIGPKLPADKPHYLMGVGTPEDLIAGVAAGVDMFDCVMPTRNARNGWLFTRFGDLKIKNATHKNSMKPLDESCGCYTCQNFTRGYLHHLHRVGEILGAQLNTIHNLHYYLQLIGEVRESIESHTFEAFRKTFADNRARGVD

SEQ ID NO: 53008 - protein, 386 aa, unidentified
  source 1..386: note = Caballeronia choica
  REGION 1..386: note = tr|A0A158KFX9|A0A158KFX9_9BURK Queuine tRNA-ribosyltransferase OS=Caballeronia choica OX=326476; GN = tgt PE=3 SV=1
MTDGHNPPANGLKFDLLTTDGQARRGRLTLNHGVVETPIFMPVGTYGTVKAIQPRELEEIKAQIILGNTFHLWLRPGLETIGAHGGLHQFMNWKRPILTDSGGFQVFSLGELRKITEDGVTFASPINGDKLFLSPEISMQIQKVLNSDIVMQFDECTPYATNGVPTSHQDAADSMRMSMRWAKRSVDEFNRLGNPNALFGIVQGGMFEDLREESLAGLKDIGFHGLAIGGLSVGEPKEDMMRVLNHIGPKLPADKPHYLMGVGTPEDLVAGVAAGVDMFDCVMPTRNARNGWLFTRFGDVKIRNAAHKNSLKPLDETCGCYTCANFTRGYLHHLHRVGEILGAQLNTIHNLHYYLQLMSEVRESIENHTFDTFRKQFHENRARGID

SEQ ID NO: 53009 - protein, 387 aa, unidentified
  source 1..387: note = Caballeronia cordobensis
  REGION 1..387: note = tr|A0A158ER19|A0A158ER19_9BURK Queuine tRNA-ribosyltransferase OS=Caballeronia cordobensis; OX = 1353886 GN=tgt PE=3 SV=1
MTEGQHNPPENGLKFELLTTDGQARRGRLTLNHGVVETPIFMPVGTYGTVKAIQPRELEEIRAQIILGNTFHLWLRPGLEVIGAHGGLHKFMGWNRPILTDSGGFQVFSLGDLRKITEDGVTFASPINGDKLFLSPEVSMQIQKVLNSDIVMQFDECTPYSTNGIATSHKDAADSMRMSMRWAKRSIDEFNRLGNPNALFGIVQGGMFEDLRDESLAGLSDIGFHGLAIGGLSVGEPKEDMMRVLNHIGPKLPADKPHYLMGVGTPEDLVAGVAAGVDMFDCVMPTRNARNGWLFTRFGDLKIKNATHKNSMKPLDESCGCYTCRNFTRGYLHHLHRVGEILGAQLNTIHNLHYYLELIGEVRESIENHTFDAFRKTFAENRARGVD

SEQ ID NO: 53010 - protein, 386 aa, unidentified
  source 1..386: note = Caballeronia fortuita
  REGION 1..386: note = tr|A0A157ZHD2|A0A157ZHD2_9BURK Queuine tRNA-ribosyltransferase OS=Caballeronia fortuita; OX = 1777138 GN=tgt PE=3 SV=1
MTENHTPPDNGLKFELLTTDGQARRGRLTLNHGVVETPIFMPVGTYGTVKAIQPRELEEIRAQIILGNTFHLWLRPGLEVIGAHGGLHKFMGWNRPILTDSGGFQVFSLGELRKITEEGVTFASPINGDKLFLSPEVSMQIQKVLNSDIVMQFDECTPYSTNGIPTSHKDAADSMRMSMRWAKRSIDEFNKLGNPNALFGIVQGGMFEDLRDESLAGLSDIGFHGFAIGGLSVGEPKEDMMRVLNHIGPKLPADKPHYLMGVGTPEDLVAGVAAGVDMFDCVMPTRNARNGWLFTRFGDLKIKNATHKNSMKPLDESCACYTCRNFTRGYLHHLHRVGEILGAQLNTIHNLHYYLQLIGEVRESIENHTFEAFRKTFAENRARGVD

SEQ ID NO: 53011 - protein, 386 aa, unidentified
  source 1..386: note = Caballeronia glathei
  REGION 1..386: note = tr|A0A069Q4P1|A0A069Q4P1_9BURK Queuine tRNA-ribosyltransferase OS=Caballeronia glathei OX=60547; GN = tgt PE=3 SV=1
MTDGHTPPANGLKFDLLTTDGQARRGRLTLNHGVVETPIFMPVGTYGTVKAIQPRELEEIRAQIILGNTFHLWLRPGLETIGAHGGLHAFMNWKRPILTDSGGFQVFSLGDLRKITEDGVTFASPINGDKLFLSPEISMQIQKVLNSDIVMQFDECTPYATSGVPTSHQDAADSMRMSMRWAKRSVDEFGRLGNPNALFGIVQGGMFEDLREESLAGLADIGFHGLAIGGLSVGEPKEDMMRVLNHIGPKLPADKPHYLMGVGTPEDLVAGVAAGVDMFDCVMPTRNARNGWLFTRFGDVKIRNASHKNSLKPLDESCGCYTCANFTRGYLHHLHRVGEILGAQLNTIHNLHYYLQLMSEIRESIENHTFDTFRKHFYENRARGID

SEQ ID NO: 53012 - protein, 386 aa, unidentified
  source 1..386: note = Caballeronia glebae
  REGION 1..386: note = tr|A0A157ZAU8|A0A157ZAU8_9BURK Queuine tRNA-ribosyltransferase OS=Caballeronia glebae OX=1777143; GN = tgt PE=3 SV=1
MTATHTPPENGLKFELLTTDGQARRGRLTLNHGVVETPIFMPVGTYGTVKAIQPRELEEIRAQIILGNTFHLWLRPGLEVVGAHGGLHKFMGWNRPILTDSGGFQVFSLGELRKITEDGVTFASPINGDKLFLSPEVSMQIQKVLNSDIVMQFDECTPYATNGIATSHKDAADSMRMSMRWAKRSIDEFDRLDNPNALFGIVQGGMFEDLRDESLAGLSDIGFHGFAIGGLSVGEPKEDMMRVLNHIGPKLPADKPHYLMGVGTPEDLVAGVAAGVDMFDCVMPTRNARNGWLFTRFGDLKIKNATHKNSLKPLDESCACYTCQNFTRGYLHHLHRVGEILGAQLNTIHNLHYYLQLMSEVRDSIENHTFEAFRKTFAENRARGVD

SEQ ID NO: 53013 - protein, 386 aa, unidentified
  source 1..386: note = Caballeronia grimmiae
  REGION 1..386: note = tr|A0A069P6E2|A0A069P6E2_9BURK Queuine tRNA-ribosyltransferase OS=Caballeronia grimmiae; OX = 1071679 GN=tgt PE=3 SV=1
MTENHTPPDNGLKFELLTTDGQARRGRLTLNHGVIETPIFMPVGTYGTVKAIQPRELEEIRAQIILGNTFHLWLRPGLQTIGAHGGLHRFMGWDRPILTDSGGFQVFSLGDLRKITEEGVTFASPINGDRLFLSPEVSMQIQKVLNSDIVMQFDECTPYSTNGVPTSHQDAADSMRMSMRWAKRSIDEFTRLDNPNALFGIVQGGMFEDLRDESLAGLSDIPFHGFAIGGLSVGEPKEDMMRVLNHIGPKLPADKPHYLMGVGTPEDLVAGVAAGVDMFDCVMPTRNARNGWLFTRFGDLKIKNATHRNSMKPLDESCGCYTCQNFTRAYLHHLHRVGEILGAQLNTIHNLHYYLQLIGEVRESIEKHTFEAFRKTFAENRARGVD

SEQ ID NO: 53014 - protein, 386 aa, unidentified
  source 1..386: note = Caballeronia humi
  REGION 1..386: note = tr|A0A158EXJ8|A0A158EXJ8_9BURK Queuine tRNA-ribosyltransferase OS=Caballeronia humi OX=326474; GN = tgt PE=3 SV=1
MTDGHNPPTNGLKFDLLTTDGQARRGRLTLNHGVVETPIFMPVGTYGTVKAIQPRELEEIRAQIILGNTFHLWLRPGLETIGAHGGLHQFMNWKRPILTDSGGFQVFSLGDLRKITEDGVTFASPINGDKLFLSPEISMQIQKVLNSDIVMQFDECTPYATNGVPTSHKDAADSMRMSMRWAKRSVDEFARLGNPNALFGIVQGGMFEDLRDESLAGLADIGFHGLAIGGLSVGEPKEDMMRVLNHIGPKLPADKPHYLMGVGTPEDLVAGVAAGVDMFDCVMPTRNARNGWLFTRFGDVKIRNATHKNSLKPLDESCGCYTCANFTRGYLHHLHRVGEILGAQLNTIHNLHYYLELMSEVRESIENHTFDTFRKQFHENRARGID

SEQ ID NO: 53015 - protein, 387 aa, unidentified
  source 1..387: note = Caballeronia hypogeia
  REGION 1..387: note = tr|A0A157Z2T9|A0A157Z2T9_9BURK Queuine tRNA-ribosyltransferase OS=Caballeronia hypogeia; OX = 1777140 GN=tgt PE=3 SV=1
MTAGHHTPPENGLKFELLTTDGQARRGRLTLNHGVIETPIFMPVGTYGTVKAIQPRELEEIRAQIILGNTFHLWLRPGLEVIGAHGGLHKFMGWNRPILTDSGGFQVFSLGDLRKITEDGVTFASPINGDKLFLSPEVSMQIQKVLNSDIVMQFDECTPYATNGVPTSHKDAADSMRMSMRWAQRSIDEFSRLGNPNALFGIVQGGMFEDLRDESLAGLSDIGFHGFAIGGLSVGEPKEDMMRVLNHIGPKLPADKPHYLMGVGTPEDLVAGVAAGVDMFDCVMPTRNARNGWLFTRFGDLKIKNATHKNSLKPLDESCTCYTCQNFTRGYLHHLHRVGEILGAQLNTIHNLHYYLQLIGEVRESIENHTFDAFRKTFAENRARGVD

SEQ ID NO: 53016 - protein, 386 aa, unidentified
  source 1..386: note = Caballeronia jiangsuensis
  REGION 1..386: note = tr|A0A038H6L4|A0A038H6L4_9BURK Queuine tRNA-ribosyltransferase OS=Caballeronia jiangsuensis; OX = 1458357 GN=tgt PE=3 SV=1
MTATHTPPENGLKFELLTTDGQARRGRLTLNHGVVETPIFMPVGTYGTVKAIQPRELEEIRAQIILGNTFHLWLRPGLEVIGAHGGLHKFMGWNRPILTDSGGFQVFSLGELRKITEEGVTFASPINGDKLFLSPEVSMQIQKVLNSDIAMQFDECTPYSTNGIPTSHKDAADSMRMSMRWAKRSIDEFSKLGNPNALFGIVQGGMFEDLRDESLAGLSDIGFHGLAIGGLSVGEPKEDMMRVLNHIGPKLPADKPHYLMGVGTPEDLVAGVAAGVDMFDCVMPTRNARNGWLFTRFGDLKIKNATHKNSMKPLDESCGCYTCRNFTRGYLHHLHRVGEILGAQLNTIHNLHYYLELIGEVRESIENHTFEAFRKTFAENRARGVD

SEQ ID NO: 53017 - protein, 386 aa, unidentified
  source 1..386: note = Caballeronia megalochromosomata
  REGION 1..386: note = tr|A0A149Q024|A0A149Q024_9BURK Queuine tRNA-ribosyltransferase OS=Caballeronia megalochromosomata; OX = 1399969 GN=tgt PE=3 SV=1
MTATHTPPENGLKFELLTTDGQARRGRLTLNHGVVETPIFMPVGTYGTVKAIQPRELEEIRAQIILGNTFHLWLRPGLEVIGAHGGLHKFMGWNRPILTDSGGFQVFSLGELRKITEEGVTFASPINGDRLFLSPEVSMQIQKVLNSDIVMQFDECTPYSTNGIPTSHKDAADSMRMSMRWAKRSIDEFNGLGNPNALFGIVQGGMFEDLRDESLAGLSEIGFHGLAIGGLSVGEPKEDMMRVLNHIGPKMPADKPHYLMGVGTPEDLVAGVAAGVDMFDCVMPTRNARNGWLFTRFGDLKIKNATHKNSMKPLDESCGCYTCQNFTRGYLHHLHRVGEILGAQLNTIHNLHYYLQLIGEVRESIENHTFEAFRKTFAENRARGVD

SEQ ID NO: 53018 - protein, 395 aa, unidentified
  source 1..395: note = Caballeronia mineralivorans
  REGION 1..395: note = tr|A0A0J1CQS1|A0A0J1CQS1_9BURK Queuine tRNA-ribosyltransferase OS=Caballeronia mineralivorans PML1(12) OX=908627 GN=tgt PE=3 SV=1
MTEASSAADTIDTTAQPANGLQFELITTDGKARRGRVTLNHGVVETPIFMPVGTYGTVKAVAPRELEEMNAQIILGNTFHLWLRPGLETIAAHGGLHRFMNWQRPILTDSGGFQVFSLGDLRKITEDGVTFASPINGDKLFLSPEISMQIQKVLNSDIVMQFDECTPYATNGVPTPHQDAADSMRMSMRWAKRSVDEFAKGENPNALFGIVQGGMFEDLRDESLAGLADIGFHGFAIGGLSVGEPKEDMMRVLEHIGPKLPADKPHYLMGVGTPEDLVAGVASGVDMFDCVMPTRNARNGWLFTRFGDVKIRNAAHKNSLKPLDETCGCYTCRNFTRGYLHHLHRVGEILGSQLNTIHNLHYYLQLMQEIRDSIENHTFDTFVKQFQENRARGID

SEQ ID NO: 53019 - protein, 386 aa, unidentified
  source 1..386: note = Caballeronia pedi
  REGION 1..386: note = tr|A0A157Z598|A0A157Z598_9BURK Queuine tRNA-ribosyltransferase OS=Caballeronia pedi OX=1777141; GN = tgt PE=3 SV=1
MTATHTPPDNGLKFELLTTDGQARRGRLTLNHGVVETPIFMPVGTYGTVKAIQPRELEEIRAQIILGNTFHLWLRPGLEVIGAHGGLHKFMGWNRPILTDSGGFQVFSLGELRKITEEGVTFASPINGDRLFLSPEVSMQIQKVLNSDIVMQFDECTPYSTNGIPTSHKDAADSMRMSMRWAKRSIDEFNGLGNPNALFGIVQGGMFEDLRDESLAGLSEIGFHGLAIGGLSVGEPKEDMMRVLNHIGPKLPADKPHYLMGVGTPEDLVAGVAAGVDMFDCVMPTRNARNGWLFTRFGDLKIKNATHKNSMKPLDESCGCYTCQNFTRGYLHHLHRVGEILGAQLNTIHNLHYYLQLIGEVRESIETHTFEAFRKTFAENRARGVD

SEQ ID NO: 53020 - protein, 386 aa, unidentified
  source 1..386: note = Caballeronia peredens
  REGION 1..386: note = tr|A0A158GAD9|A0A158GAD9_9BURK Queuine tRNA-ribosyltransferase OS=Caballeronia peredens; OX = 1777132 GN=tgt PE=3 SV=1
MTATHTAPDNGLKFDLLTTDGQARRGRLTLNHGVVETPIFMPVGTYGTVKAIQPRELEEIRAQIILGNTFHLWLRPGLETIGAHGGLHRFMGWNRPILTDSGGFQVFSLGDLRKITEDGVTFASPINGDKLFLSPEVSMQIQKVLNSDIVMQFDECTPYATNGVPTSHQDAADSMRMSMRWAKRSIDEFGRLGNPNALFGIVQGGMFEDLRDESLAGLSEIGFHGLAIGGLSVGEPKEDMMRVLNHIGPKLPADKPHYLMGVGTPEDLVAGVAAGVDMFDCVMPTRNARNGWLFTRFGDLKIKNATHKNSMKPLDESCGCYTCRNFTRGYLHHLHRVGEILGAQLNTIHNLHYYLQLMSEVRESIETHTFDAFRRSFAENRARGVD

SEQ ID NO: 53021 - protein, 387 aa, unidentified
  source 1..387: note = Caballeronia ptereochthonis
  REGION 1..387: note = tr|A0A158BJW4|A0A158BJW4_9BURK Queuine tRNA-ribosyltransferase OS=Caballeronia ptereochthonis; OX = 1777144 GN=tgt PE=3 SV=1
MTAGHPNAPENGLKFELLTTDGQARRGRLTLNHGVVETPIFMPVGTYGTVKAIQPRELEEIRAQIILGNTFHLWLRPGLETIGAHGGLHRFMGWQRPILTDSGGFQVFSLGDLRKITEDGVTFASPINGDKLFLSPEVSMQIQKVLNSDIVMQFDECTPYATSGVPTSHKDAADSMRMSMRWAKRSIDEFNGLGNPNALFGIVQGGMYEDLRDESLAGLSDIGFHGLAIGGLSVGEPKEDMMRVLNHIGPKLPADKPHYLMGVGTPEDLVAGVAAGVDMFDCVMPTRNARNGWLFTRFGDLKIKNATHRNSMKPLDESCGCYTCQNFSRGYLHHLHRVGEILGAQLNTIHNLHYYLQLMSEVRESIENHTFEAFRKTFSENRARGVD

SEQ ID NO: 53022 - protein, 395 aa, unidentified
  source 1..395: note = Caballeronia sordidicola
  REGION 1..395: note = tr|A0A4R1PH97|A0A4R1PH97_9BURK Queuine tRNA-ribosyltransferase OS=Caballeronia sordidicola; OX = 196367 GN=tgt PE=3 SV=1
MSETSNPADTIEAPAQPANGLKFELITTDGQARRGRVTLNHGVVETPIFMPVGTYGTVKAVAPRELEEMNAQIILGNTFHLWLRPGLETIVAHGGLHRFMNWQRPILTDSGGFQVFSLGDLRKITEDGVTFASPINGDKLFLSPEISMQIQKVLNSDIVMQFDECTPYATNGVPTPHQDAADSMRMSMRWAKRSVDEFAKGENPNALFGIVQGGMFEDLRDESLAGLADIGFHGFAIGGLSVGEPKEDMMRVLEHIGPKLPADKPHYLMGVGTPEDLVAGVASGVDMFDCVMPTRNARNGWLFTRFGDVKIRNAAHKNSLKPLDETCGCYTCRNFTRGYLHHLHRVGEILGSQLNTIHNLHYYLQLMQEIRDSIENHVFDAFVKQFKEDRARGID

SEQ ID NO: 53023 - protein, 395 aa, unidentified
  source 1..395: note = Caballeronia sordidicola
  REGION 1..395: note = tr|A0A226WLV8|A0A226WLV8_9BURK Queuine tRNA-ribosyltransferase OS=Caballeronia sordidicola; OX = 196367 GN=tgt PE=3 SV=1
MTEANNTVDTIDTPARPENGLKFELITTDGQARRGRVTLNHGVVETPIFMPVGTYGTVKAVAPRELEEMNAQIILGNTFHLWLRPGLETIAAHGGLHRFMNWQRPILTDSGGFQVFSLGDLRKITEDGVTFASPINGDKLFLSPEISMQIQKVLNSDIVMQFDECTPYATNDVPTPHQDAADSMRMSMRWAKRSVDEFAKGENPNALFGIVQGGMFEDLRDESLAGLADIGFHGFAIGGLSVGEPKEDMMRVLEHIGPKLPADKPHYLMGVGTPEDLVAGVASGVDMFDCVMPTRNARNGWLFTRFGDVKIRNAAHKNSLKPLDETCACYTCRNFTRGYLHHLHRVGEILGSQLNTIHNLHYYLQLMQEIRDSIENHAFDAFVKQFKEDRARGID

SEQ ID NO: 53024 - protein, 386 aa, unidentified
  source 1..386: note = Caballeronia telluris
  REGION 1..386: note = tr|A0A158K401|A0A158K401_9BURK Queuine tRNA-ribosyltransferase OS=Caballeronia telluris OX=326475; GN = tgt PE=3 SV=1
MTDGHHPPENGLKFDLLTTDGQARRGRLTLNHGVVETPIFMPVGTYGTVKAIQPRELEEIRAQIILGNTFHLWLRPGLETIGAHGGLHQFMNWKRPILTDSGGFQVFSLGDLRKITEDGVTFASPINGDKLFLSPEISMQIQKVLNSDVVMQFDECTPYATNGVPTSHQDAADSMRMSMRWAKRSIDEFGRLGNPNALFGIVQGGMFEDLRDESLAGLADIGFHGLAIGGLSVGEPKEDMMRVLNHIGPKLPADKPHYLMGVGTPEDLVAGVAAGVDMFDCVMPTRNARNGWLFTRFGDVKIRNATHKSSLKPLDETCGCYTCANFTRGYLHHLHRVGEILGAQLNTIHNLHYYLQLMAEVRESIENHTFDTFRKQFHENRARGIE

SEQ ID NO: 53025 - protein, 386 aa, unidentified
  source 1..386: note = Caballeronia temeraria
  REGION 1..386: note = tr|A0A158B6E8|A0A158B6E8_9BURK Queuine tRNA-ribosyltransferase OS=Caballeronia temeraria; OX = 1777137 GN=tgt PE=3 SV=1
MTTTHTPPDNGLKFELLTTDGQARRGRLTLNHGVVETPIFMPVGTYGTVKAIQPRELEEVRAQIILGNTFHLWLRPGLEVIGAHGGLHKFMGWNRPILTDSGGFQVFSLGELRKITEEGVTFASPINGDRLFLSPEVSMQIQKVLNSDIVMQFDECTPYSTNGIPTSHKDAADSMRMSMRWAKRSIDEFNGLGNPNALFGIVQGGMFEDLRDESLAGLSEIGFHGLAIGGLSVGEPKEDMMRVLNHIGPKLPADKPHYLMGVGTPEDLVAGVAAGVDMFDCVMPTRNARNGWLFTRFGDLKIKNATHKNSMKPLDGSCTCYTCQNFTRGYLHHLHRVGEILGAQLNTIHNLHYYLQLIGEVRESIETHTFEAFRKTFAENRARGVD

SEQ ID NO: 53026 - protein, 386 aa, unidentified
  source 1..386: note = Caballeronia terrestris
  REGION 1..386: note = tr|A0A158JWP5|A0A158JWP5_9BURK Queuine tRNA-ribosyltransferase OS=Caballeronia terrestris; OX = 1226301 GN=tgt PE=3 SV=1
MTDGHNPPANGLKFDLLTTDGQARRGRLTLNHGVVETPIFMPVGTYGTVKAIQPRELEEIKAQIILGNTFHLWLRPGLETIGAHGGLHQFMNWKRPILTDSGGFQVFSLGDLRKITEDGVTFASPINGDKLFLSPEISMQIQKVLNSDIVMQFDECTPYATNGVPTSHKDAADSMRMSMRWAKRSVDEFSRLGNPNALFGIVQGGMFEDLRDESLAGLADIGFHGLAIGGLSVGEPKDDMMRVLNHIGPKLPADKPHYLMGVGTPEDLVAGVAAGVDMFDCVMPTRNARNGWLFTRFGDVKIRNATHKSALKPLDETCGCYTCANFTRGYLHHLHRVGEILGAQLNTIHNLHYYLQLMSEVRESIENHTFDTFRKQFHENRARGID

SEQ ID NO: 53027 - protein, 386 aa, unidentified
  source 1..386: note = Caballeronia turbans
  REGION 1..386: note = tr|A0A158G9M3|A0A158G9M3_9BURK Queuine tRNA-ribosyltransferase OS=Caballeronia turbans OX=1777134; GN = tgt PE=3 SV=1
MTANHTPPENGLKFELLTTDGQARRGRLTLNHGVVETPIFMPVGTYGTVKAIQPRELEELRAQIILGNTFHLWLRPGLEVIGAHGGLHKFMGWNRPILTDSGGFQVFSLGELRKITEEGVTFASPINGDRLFLSPEVSMQIQKVLNSDIVMQFDECTPYSTNGIPTSHKDAADSMRMSMRWAKRSIDEFNRLGNPNALFGIVQGGMFEDLRDESLAGLSEIGFHGLAIGGLSVGEPKEDMMRVLNHIGPKLPADKPHYLMGVGTPEDLVAGVAAGVDMFDCVMPTRNARNGWLFTRFGDLKIKNATHKNSMKPLDESCGCYTCQNFTRGYLHHLHRVGEILGAQLNTIHNLHYYLQLIGEVRASIENHSFEAFRKTFAENRARGVD

SEQ ID NO: 53028 - protein, 394 aa, unidentified
  source 1..394: note = Caballeronia udeis
  REGION 1..394: note = tr|A0A3M0VDS3|A0A3M0VDS3_9BURK Queuine tRNA-ribosyltransferase OS=Caballeronia udeis OX=1232866; GN = tgt PE=3 SV=1
MTEPNAADTIDATAQPANGLRFELITTDGKARRGRVRLNHGVVETPIFMPVGTYGTVKAVAPRELKEMNAQIILGNTFHLWLRPGLDTIAAHGGLHRFMNWQRPILTDSGGFQVFSLGDLRKITEDGVTFASPINGDKLFLSPEISMQIQKVLNSDIVMQFDECTPYATNGVPTPHQDTADSMRMSMRWAKRSVDEFAKGENPNALFGIVQGGMFEDLRDESLAGLADIGFHGFAIGGLSVGEPKEDMMRVLEHIGPKLPADKPHYLMGVGTPEDLVAGVASGVDMFDCVMPTRNARNGWLFTRFGDVKIRNAAHKNSLKPLDETCDCYTCRNFTRGYLHHLHRVGEILGSQLNTIHNLHYYLQLMQEIRDSIENHTFDTFVKQFQENRARGID

SEQ ID NO: 53029 - protein, 395 aa, unidentified
  source 1..395: note = Caballeronia udeis
  REGION 1..395: note = tr|A0A158JEP4|A0A158JEP4_9BURK Queuine tRNA-ribosyltransferase OS=Caballeronia udeis OX=1232866; GN = tgt PE=3 SV=1
MSETSNPADTIEAPARPANGLKFELITTDGQARRGRVTLNHGVVETPIFMPVGTYGTVKAVAPRELEEMNAQIILGNTFHLWLRPGLETIAAHGGLHRFMNWQRPILTDSGGFQVFSLGDLRKITEDGVTFASPINGDKLFLSPEISMQIQKVLNSDIVMQFDECTPYATNGVPTPHQDAADSMRMSMRWAKRSVDEFAKGENPNALFGIVQGGMFEDLRDESLAGLADIGFHGFAIGGLSVGEPKEDMMRVLEHIGPKLPADKPHYLMGVGTPEDLVAGVASGVDMFDCVMPTRNARNGWLFTRFGDVKIRNAAHKNSLKPLDETCGCYTCRNFTRGYLHHLHRVGEILGSQLNTIHNLHYYLQLMQEIRDSIENHAFDAFVKQFKEDRARGID

SEQ ID NO: 53030 - protein, 401 aa, Caedibacter sp.
  REGION 1..401: note = tr|A0A1M3ITJ1|A0A1M3ITJ1_9PROT Queuine tRNA-ribosyltransferase OS=Caedibacter sp. 37-49; OX = 1895735 GN=tgt PE=3 SV=1
MLPYPNFQFDILKPSHNSKARLGRLMTPHGIVNTPAFIFCATKAAIKGATPNQVNEVDTQIILSNTYHLMLQPGGEIIEKQGGLHRFMGWNKPMLTDSGGFQIFSLGHGSVASEIKGKRLTTRPKTLLKITEEGAKFKSYIDGRMHLLTPERSIQVQRQLGADLIVVLDECTPFHVDKTYTQRSMQLSHRWALRSLSEFQRTDNQKQALYGIIQGGVYTDLRSESSKFVNDQPFFGHAVGGSLGASKEQMHDIVALTMSLLNPERPVHLLGIGGVSDIFNGVRQGIDTFDCVHPTRLARHGGALIQPSFWDNEDGQGGEHINLRNARFREDSKPIDETCPCPTCKTFSRSYLHHLLRAQEILALQAITIHNISFMNRLLTAIREAIAQDQLESEEKNWVFK

SEQ ID NO: 53031 - protein, 404 aa, Caedibacter sp.
  REGION 1..404: note = tr|A0A1M3IL74|A0A1M3IL74_9PROT Queuine tRNA-ribosyltransferase OS=Caedibacter sp. 38-128; OX = 1895736 GN=tgt PE=3 SV=1
MSHYPNFQFEIHKTSKNSKARLGRLVTPRGIVETPAFIFCATKAAIKGATPQQIDEANTQIILSNTYHLMLQPGGEIIERQGGLHRFMGWNKPMLTDSGGFQIFSLGHGSVASEIKGKRLTKRPKTLLKITEEGAQFKSYIDGRMHLLTPERSIQVQRQLGADLIVVLDECTPFHVDKIYTQRSMQLSHRWALRSLAEFQRTDNQRQALYGIIQGGVYDDLRKESSQFVNDHSFFGHAVGGSLGASKDQMHDIVALTMSLLNPERPVHLLGIGGVSDIFNGVRQGIDTFDCVHPTRLARHGGALVQPSFWHKNDGKGGEHINLRNAHFREDSKPIDETCPCATCKTFSRSYLHHLLKAQEILALQAITIHNIAFMNRLLRAIREAISLDQLDEEEKNWVFKEST

SEQ ID NO: 53032 - protein, 401 aa, unidentified
  source 1..401: note = Caedimonas varicaedens
  REGION 1..401: note = tr|A0A0K8MFV7|A0A0K8MFV7_9PROT Queuine tRNA-ribosyltransferase OS=Caedimonas varicaedens; OX = 1629334 GN=tgt PE=3 SV=1
MSLYPKFSFNITHRSAVSGARAGLLKTPHGTIETPAFIFCATKGAIKGAFPREMKAAGTQIILSNTYHMMLQPGSELVEKMGGLHKFIGWDGPMLTDSGGYQIFSLGHGSVASEIKGKRVTHRPKTMLKITEEGARFKSYINGQIFLLTPERSLEIQRQLGADLIVVLDECTPFHVDKSYTECSMHLSHRWALRSLAEFQRGNDGRQALYGIIQGGIYEDLRRQGAEFVNHHPFFGHAVGGSLGASKEQMHDIVGLTLKMLDPERPVHLLGIGGISDIFNGVEQGIDTFDCVHPTRLARHGGALVTADHWMRYEGKGGEHINLRNKIYREDSRPIDESCGCHSCQNFSRAYLHHLLKAQEMLALQALTIHNVYFMNELLKNIREAIRTDTLDIQKKKWAGV

SEQ ID NO: 53033 - protein, 386 aa, Caenimonas sp.
  REGION 1..386: note = tr|A0A562ZMD1|A0A562ZMD1_9BURK Queuine tRNA-ribosyltransferase OS=Caenimonas sp. HX-9-20; OX = 2596921 GN=tgt PE=3 SV=1
MLHFDLLKTEGHARRGRLTLNHGVVETPIFMPVGTYGTVKGVMPRSLEEMGAQIILGNTFHLWMRPGLDVLKQFGGLHRFENWTRPILTDSGGFQVWSLGEMRKIAEEGVNFASPVNGDKLFLTPEISMQIQTALNSDIVMQFDECTPYDTKGHITTEDEARFSMELSRRWALRCKAEFERLANPNALFGIVQGGMFESLREESLQALVEMDFPGYAVGGVSVGEPKEEMLRIMAHTPHRLPANKPRYLMGVGTPEDLVEGVAQGVDMFDCVMPTRNARNGHLFTRFGDLKIRNAKHRSDERPLDETCGCYTCRGHTRADGSVQGGFSRAYLHHLERCGEMLGPMLATIHNLHYYLNLMREVREALDQGTFAAFTQRFREDRRRGV

SEQ ID NO: 53034 - protein, 377 aa, Caenispirillum bisanense
  REGION 1..377: note = tr|A0A286GY41|A0A286GY41_9PROT Queuine tRNA-ribosyltransferase OS=Caenispirillum bisanense; OX = 414052 GN=tgt PE=3 SV=1
MTHVFRYELLKTDGAARLGRVHTAHGTIDTPAFMPVGTAATVKAMRPEEVRATGAQIILGNTYHLMLRPTAERVAALGGLRNFMNWRGPILTDSGGFQVMSLAKLRKLTEDGVTFQSHVDGSRHHLTPERSIEIQHLLDATITMAFDECTPFPATHEQAAESMRLSMRWAERSRKAFVARPGYGQFGIVQGSVFEDLRRESVEALNALDYEGYAVGGLAVGEGQEAMFSTLEFTTPLMPQHKPRYLMGVGKPADLVGAVMRGIDMFDCVLPTRSGRTAQAFTRRGTVNLRNARHSDDPRPLDAECSCAACRQYSRAYLHHLIRCEEILGMMLLTQHNLQYYQDLMRGIRGAIQEGRLAEFAARFDEDQARGDIAPLA

SEQ ID NO: 53035 - protein, 378 aa, unidentified
  source 1..378: note = Caenispirillum salinarum
  REGION 1..378: note = tr|K9GYS0|K9GYS0_9PROT Queuine tRNA-ribosyltransferase OS=Caenispirillum salinarum AK4; OX = 1238182 GN=tgt PE=3 SV=1
MTHVFRYERLATDGPARLGRVHTAHGIVDTPAFMPVGTAATVKAQRPEEVRATGAQIILGNTYHLMLRPTAERVAKLGGLRNFMNWRGPILTDSGGFQVMSLAKLRKMTEEGVTFQSHIDGTKHHLTPERSIEIQHLLDATITMAFDECTPYPASHEQAAESMRLSMRWAERSRKAFVARPGYGQFGIVQGSVYEDLRRESVEALAGMDYEGYAVGGLAVGEGQELMFQTLDFTCPMMPEDKPRYLMGVGKPADIVGAVARGIDMFDCVLPTRSGRTAQAFTRRGTVNLRNARHAEDPRPLDADCACAACRQYSRAYLHHLIRCDEILGLMLLTGHNLQYYQDLMRSLRGAIGDGRLGDFIARFEEDQARGDIAPLED

SEQ ID NO: 53036 - protein, 378 aa, Caldalkalibacillus thermarum
  REGION 1..378: note = tr|F5LAQ5|F5LAQ5_CALTT Queuine tRNA-ribosyltransferase OS=Caldalkalibacillus thermarum (strain TA2.A1) OX=986075 GN=tgt PE=3 SV=1
MAVRYELIKTCKQSGARLGRLHTPHGTIETPVFMPVGTLATVKTMSPEELKEMNAQIILSNTYHLYLRPGEDIVREAGGLHAFMNWDRPILTDSGGFQVFSLSKLRHIEEEGVHFRNHISGEKLFISPEKATQIQNDLGADIIMAFDECAPYPADRDYVKASLERTTRWAERCLKAHQRPHDQALFGIVQGGMYPDLRAQSVKEITSLGFPGYAVGGLSVGEPKEVMNQILEETTPLLPADKPRYLMGVGSPDALIDGVIRGIDMFDCVLPTRIARNGTTMTSQGRLVVRNAQYARDFRPLDPECDCYTCRNYTRAYIRHLIKCNETFGFRLTTYHNLYFLLRLMENIKEAIRNDSLLDFREQFFEKYGFNRPGARPF

SEQ ID NO: 53037 - protein, 375 aa, Caldanaerobacter subterraneus
  REGION 1..375: note = sp|Q8RAM9|TGT_CALS4 Queuine tRNA-ribosyltransferase; OS = Caldanaerobacter subterraneus subsp. tengcongensis (strain DSM 15242 / JCM 11007 / NBRC 100824 / MB4); OX = 27306 8 GN=tgt PE=3 SV=1
MAAIKYQVIKKDARTKARLGILETPHGVIETPVFMPVGTQATVKAMTPDELKEMGATIILGNTYHLYLRPGHKIIEKAGGLHKFMNWDRAILTDSGGFQVFSLSSLRKITEDGVEFRSHIDGSKHFFTPEKVIEIQNSLGSDIIMSFDECAPYPADYDYVKRSMELTIKWAKRGKKAHKNTDRQALFGIVQGGTYKDLRRECAERLVDMDFPGYAIGGLSVGEPKDLMYEIIDFTTDYLPHDKPRYLMGVGTPEDLIEGVIRGVDMFDCVLPTRIARNGTVFTSRGKLIVRDAPYAEDFSPLDEECDCYTCKNYSRAYLRHLFKAKEILAARLATYHNLYFLIKLMEKIREAIRQDRLLEFKEEFLKKYYGNREE

SEQ ID NO: 53038 - protein, 375 aa, Caldanaerobacter subterraneus
  REGION 1..375: note = tr|U5CQC1|U5CQC1_CALSX Queuine tRNA-ribosyltransferase OS=Caldanaerobacter subterraneus subsp. yonseiensis KB-1 OX=1388761 GN=tgt PE=3 SV=1
MAAIKYRVIKKDARTKARLGILETPHGVIETPVFMPVGTQATVKAMTPDELKEMGATIILGNTYHLYLRPGHKIIEKAGGLHKFMNWDKAILTDSGGFQVFSLSSLRKITEDGVEFRSHIDGSKHFFTPEKVIEIQNSLGSDIIMSFDECAPYPADYDYVKRSMELTIKWAERGKKAHKNTDRQALFGIVQGGTYKDLRRECAERLVDMDFPGYAIGGLSVGEPKDLMYEIIDFTTDYLPHDKPRYLMGVGTPEDLIEGVIRGVDMFDCVLPTRIARNGTVFTSRGKLIVRDAPYAEDFSPLDEECDCYTCKNYSRAYLRHLFKAKEILAARLATYHNLYFLIKLMEKIREAIRQDRLLEFKEEFLKKYYGNREE

SEQ ID NO: 53039 - protein, 371 aa, Caldanaerobius fijiensis
  REGION 1..371: note = tr|A0A1M4TXN1|A0A1M4TXN1_9THEO Queuine tRNA-ribosyltransferase OS=Caldanaerobius fijiensis DSM 17918 OX=1121256 GN=tgt PE=3 SV=1
MLKFEVHKREKNTMARLGLLQTSHGTIETPVFMPVGTQATVKAMTPDELKDIGAKIILSNTYHLYLRPGHELIEKAGGLHKFMSWNGSILTDSGGFQIFSLNKLRNISEDGVEFISHLDGSRHFIGPEENMRIQNALGADIIMAFDECVPYPADYDYVKNSMELTLKWAKRCKESHKRPDEQALFGIVQGGTYRDLREESARRTVDLDFPGYAIGGLSVGEEKELMYEVIEYTTPLLPFDKPRYLMGVGSPDALIEGVIRGIDMFDCVLPTRIARNGTVMTSHGKLVIRNAEYAEDFRPLDEECDCYACRNFSRAYIRHLFKAGEILAARLATIHNLYFLMKLMEKIRQAIKEDRLLEFRKEFFTKYGYVY

SEQ ID NO: 53040 - protein, 369 aa, Caldanaerovirga acetigignens
  REGION 1..369: note = tr|A0A1M7JKD6|A0A1M7JKD6_9FIRM Queuine tRNA-ribosyltransferase OS=Caldanaerovirga acetigignens; OX = 447595 GN=tgt PE=3 SV=1
MMKFSIIKSSHQCMARIGYLETLHGVIKTPVFMPVGTQATVKTMTPEELEQIGAKIILSNTYHLYLRPGHELIEEAGGLHKFMNWKGSILTDSGGYQVFSLGELREIKEEGVTFRSHLDGSLHFISPEMSIEIQNSLGADIIMAFDECIPYPATYEYAKNSVERTTRWAERCKKHHKRDDQALFGIVQGGLYRDLREKSAKDLVAMDFEGYAVGGLSVGEPKECMYEVLDYVVPLLPEEKPRYLMGVGSPDSIFEGIQRGIDMFDCVLPTRIARHGTVFTARGKLVVRNAAYAKDFSPLDPECDCYVCKNYTRAYIRHLLNAGEILGLRLTTYHNLYFLLRLVEKVREAIEGDYFFDLKEEFFSKYGYS

SEQ ID NO: 53041 - protein, 380 aa, unidentified
  source 1..380: note = Calderihabitans maritimus
  REGION 1..380: note = tr|A0A1Z5HT42|A0A1Z5HT42_9THEO Queuine tRNA-ribosyltransferase OS=Calderihabitans maritimus; OX = 1246530 GN=tgt PE=3 SV=1
MTIAFEVIKECKDTRARVGRLYTPHGVVDTPVFMPVGTQATVKAMSPEELEEIGAQIILSNTYHLYLRPGAEIIKEAGGLHRFMHWNHPILTDSGGFQVFSLADLRQINDEGVTFRSHIDGSSHFLSPEKATEIQMALGSDIAMCFDECPPYPASYEQVEKAVKRTSSWAERCLEAHRREDQALFGIVQGGVFRDLRERSAAELTALDFPGYAIGGLSVGEPKRLMYEVLDYTVPLLPASKPRYLMGVGTPDALLEGVKKGVDMFDCVLPTRVARNGLALTSSGKVVVRNARYARDYEPLDPECDCYVCRNYTRAYIRHLLKANEILGLRLTTYHNLYFLIRLMAKIRTAVMEGYFLKFAEEFMAKYLEKEVSSGECRNQ

SEQ ID NO: 53042 - protein, 381 aa, unidentified
  source 1..381: note = Caldibacillus debilis
  REGION 1..381: note = tr|A0A3E0K0I3|A0A3E0K0I3_9BACI Queuine tRNA-ribosyltransferase OS=Caldibacillus debilis OX=301148; GN = tgt PE=3 SV=1
MHLAPIRFELIKVCKQTGARLGILHTPHGSFETPMFMPVGTLATVKTMSPEDLKELGAGIILSNTYHLWLRPGHEIVEEAGGLHAFMNWDRGILTDSGGFQVFSLSDLRQIDEEGVHFRSHLNGDKLFLSPEKATEIQNALGADIIMAFDECPPYPCDYDYMKKSVERTSRWAERCLKAHKKPDWQGMFGIVQGGAYEDLRKQSAADLVSLDFPGYAIGGLSVGEPKEVMNRMLEFTAPLLPADKPRYLMGVGSPDSLVDGAIRGIDMFDCVLPTRIARNGTLLTSSGRLVVKNAQYRRDFRPPDEACDCYVCKNYTRAYLRHLIHANEILGFRLATYHNLYFLLKLMEQVRQAIREDRLADFREQFFDQYGYNKPDAKNF

SEQ ID NO: 53043 - protein, 381 aa, unidentified
  source 1..381: note = Caldibacillus debilis
  REGION 1..381: note = tr|A0A420VC11|A0A420VC11_9BACI Queuine tRNA-ribosyltransferase OS=Caldibacillus debilis GB1; OX = 1339248 GN=tgt PE=3 SV=1
MHLAPIRFELIKVCKQTGARLGILHTPHGSFETPMFMPVGTLATVKTMSPEDLKELGAGIILSNTYHLWLRPGHEIVEEAGGLHAFMNWDRGILTDSGGFQVFSLSDLRQIDEEGVHFRSHLNGDKLFLSPEKATEIQNALGADIIMAFDECPPYPCDYDYMKKSVERTSRWAERCLKAHKKPDRQGMFGIVQGGAYEDLRKQSAADLVSLDFPGYAIGGLSVGEPKEVMNRMLEFTAPLLPADKPRYLMGVGSPDSLVDGAIRGIDMFDCVLPTRIARNGTLLTSSGRLVVKNAQYRRDFRPPDEACDCYVCKNYTRAYLRHLIHANEILGFRLATYHNLYFLLKLMEQVRQAIREDRLADFREQFFDQYGYNKPDAKNF

SEQ ID NO: 53044 - protein, 357 aa, Caldicellulosiruptor bescii
  REGION 1..357: note = tr|B9MN60|B9MN60_CALBD Queuine tRNA-ribosyltransferase OS=Caldicellulosiruptor bescii (strain ATCC BAA-1888 / DSM 6725 / Z-1320) OX=521460; GN = tgt PE=3 SV=1
MAIKFELIKKSKKSNARRGRLYTPHGVIETPVFMPVGTQATVKAIMHRDLYEMGAQIILANTYHLYLRPGIDVIKEAGGLHRFMNWQKPILTDSGGFQVFSLSRLRTITDDGVEFRSHIDGSRHFFTPEKVIEIQNILGADIIMAFDECVPYPCDHEYAKWALERTARWLKRCKAHHKNTENQALFGIVQGSTYKDLRIESAKRTVEEDLPGYAIGGLSVGEPKELMYEMIEVLHPILPEDRPRYLMGVGTPDCLYESVIRGVDMFDCVFATRTARNGTVFTKEGRMIIKNAQYAKDFRPIEEDCDCYTCQNFTRAYLRHLIKSEEILGAILLSIHNVRFLLRFMEKLRKDIEEDRI

SEQ ID NO: 53045 - protein, 357 aa, unidentified
  source 1..357: note = Caldicellulosiruptor changbaiensis
  REGION 1..357: note = tr|A0A3T0D2G2|A0A3T0D2G2_9FIRM Queuine tRNA-ribosyltransferase OS=Caldicellulosiruptor changbaiensis OX=1222016 GN=tgt PE=3 SV=1
MAIKFELIKKSKKSNARRGRLYTPHGVIETPVFMPVGTQATVKAIMHRDLYEMGTQIILANTYHLYLRPGIDVIKEAGGLHKFMNWQKPILTDSGGFQVFSLSKLRTITDDGVEFRSHIDGSRHFFTPEKVIEIQNILGSDIIMAFDECVPYPCDHEYAKWAVERTARWLKRCKAHHKNTENQALFGIVQGSTYKDLRIESAKRTVEEDLPGYAIGGLSVGEPKELMYEMIEVLHPILPEDRPRYLMGVGTPDCLYESVIRGVDMFDCVFATRTARNGTVFTKEGRMIIKNAQYAKDFRPIEEDCDCYTCQNFTRAYLRHLIKAEEILGAILLSIHNVRFLLRFMEKLRKDIEEDRI

SEQ ID NO: 53046 - protein, 357 aa, Caldicellulosiruptor hydrothermalis
  REGION 1..357: note = tr|E4Q8D0|E4Q8D0_CALH1 Queuine tRNA-ribosyltransferase OS=Caldicellulosiruptor hydrothermalis (strain DSM 18901 / VKM B-2411 / 108); OX = 632292 GN=tgt PE=3 SV=1
MAIKFELIKKSKKSNARRGRLYTPHGVIETPVFMPVGTQATVKAIMHRDLYEMGTQIILANTYHLYLRPGIDVIKEAGGLHKFMNWQKPILTDSGGFQVFSLSKLRTITEDGVEFRSHIDGSRHFFTPEKVIEIQNILGSDIIMAFDECVPYPCDHEYAKWALERTARWLKRCKAHHKNTENQALFGIVQGSTYKDLRIESAKRTVEEDLPGYAIGGLSVGEPKELMYEMIEVLHPILPEDRPRYLMGVGTPDCLYESVIRGVDMFDCVFATRTARNGTVFTKEGRMIIKNAQYAKDFRPIEEDCDCYTCQNFTRAYLRHLIKAEEILGAILLSIHNVRFLLRFMEKLRKDIEEDRI

SEQ ID NO: 53047 - protein, 357 aa, Caldicellulosiruptor kristjanssonii
  REGION 1..357: note = tr|E4S840|E4S840_CALKI Queuine tRNA-ribosyltransferase OS=Caldicellulosiruptor kristjanssonii (strain ATCC 700853 / DSM 12137 / I77R1B); OX = 632335 GN=tgt PE=3 SV=1
MAIKFELIKKSKKSNARRGRLYTPHGVIETPVFMPVGTQATVKAIMHRDLYEMGTQIILANTYHLYLRPGIDVIKEAGGLHKFMNWQKPILTDSGGFQVFSLSKLRTITEDGVEFRSHIDGSRHFFTPERVIEIQNILGSDIIMAFDECVPYPVDHEYAKWAVERTARWLKRCKAHHKNTENQALFGIVQGSTYKDLRIESAKRTVEEDLPGYAIGGLSVGEPKELMYEMIEVLHPILPEDRPRYLMGVGTPDCLYESVIRGVDMFDCVFATRTARNGTVFTKEGRMIIKNAQYAKDFRPIEEDCDCYTCQNFTRAYLRHLIKAEEILGAILLSIHNVRFLLRFMEKLRKDIEEDRI

SEQ ID NO: 53048 - protein, 357 aa, Caldicellulosiruptor kronotskyensis
  REGION 1..357: note = tr|E4SH61|E4SH61_CALK2 Queuine tRNA-ribosyltransferase OS=Caldicellulosiruptor kronotskyensis (strain DSM 18902 / VKM B-2412 / 2002); OX = 632348 GN=tgt PE=3 SV=1
MAIKFELIKKSKKSNARRGRLYTPHGVIETPVFMPVGTQATVKAIMHRDLYEMGTQIILANTYHLYLRPGIDVIKEAGGLHSFMNWQKPILTDSGGFQVFSLSKLRTITEDGVEFRSHIDGSRHFFTPEKVIEIQNILGSDIIMAFDECVPYPCDHEYAKWALERTARWLKRCKAHHKNTENQALFGIIQGSTYKDLRIESAKRTIEEDLPGYAIGGLSVGEPKELMYEMIEVLHPILPEDRPRYLMGVGTPDCLYESVIRGVDMFDCVFATRTARNGTVFTKEGRMIIKNAQYAKDFRPIEEDCDCYTCQNFTRAYLRHLIKAEEILGAILLSIHNVRFLLRFMEKLRKDIEEDRI

SEQ ID NO: 53049 - protein, 357 aa, Caldicellulosiruptor lactoaceticus; identical to SEQ ID NO: 53047
  REGION 1..357: note = tr|G2PVJ6|G2PVJ6_9FIRM Queuine tRNA-ribosyltransferase OS=Caldicellulosiruptor lactoaceticus 6A OX=632516 GN=tgt PE=3 SV=1

SEQ ID NO: 53050 - protein, 357 aa, unidentified
  source 1..357: note = Caldicellulosiruptor obsidiansis
  REGION 1..357: note = tr|D9TI49|D9TI49_CALOO Queuine tRNA-ribosyltransferase OS=Caldicellulosiruptor obsidiansis (strain ATCC BAA-2073 / strain OB47) OX=608506; GN = tgt PE=3 SV=1
MAIKFELIKKSKKSNARRGRLYTPHGVIETPVFMPVGTQATVKAIMHRDLYEMGTQIILANTYHLYLRPGVDVIKEAGGLHKFMNWQKPILTDSGGFQVFSLSKLRTITEDGVEFRSHIDGSRHFFTPEKVIEIQNILGSDIIMAFDECVPYPVDHEYAKWAVERTARWLKRCKAHHKNTENQALFGIVQGSTYKDLRIESAKRTVEEDLPGYAIGGLSVGEPKQLMYEMIEVLHPILPEDKPRYLMGVGTPDCLYESVIRGVDMFDCVFATRTARNGTVFTKEGRMIIKNAQYAKDFRPIEEDCDCYTCQNFTRAYLRHLIKAEEILGAILLSIHNVRFLLRFMEKLRKDIEEDRI

SEQ ID NO: 53051 - protein, 357 aa, Caldicellulosiruptor owensensis
  REGION 1..357: note = tr|E4Q312|E4Q312_CALOW Queuine tRNA-ribosyltransferase OS=Caldicellulosiruptor owensensis (strain ATCC 700167 / DSM 13100 / OL) OX=632518 GN=tgt; PE = 3 SV=1
MAIKFELIKKSKKSNARRGRLYTPHGVIETPVFMPVGTQATVKAIMHRDLYEMGTQIILANTYHLYLRPGIDVIKEAGGLHRFMNWQKPILTDSGGFQVFSLSKLRKITDDGVEFRSHIDGSRHFFTPEKVIEIQNILGSDIIMAFDECVPYPVDHEYAKWAVERTARWLKRCKAHHKNTENQALFGIVQGSTYKDLRIESAKRTVEEDLPGYAIGGLSVGEPKERMYEMIEVLHPFLPEDKPRYLMGVGTPDCLYESVIRGVDMFDCVFATRTARNGTVFTKEGRMIIKNAQYAKDFRPIEEDCDCYTCQNFTRAYLRHLIKAEEILGAILLSIHNVRFLLRFMEKLRKDIEEDRI

SEQ ID NO: 53052 - protein, 357 aa, Caldicellulosiruptor saccharolyticus
  REGION 1..357: note = tr|A4XG69|A4XG69_CALS8 Queuine tRNA-ribosyltransferase OS=Caldicellulosiruptor saccharolyticus (strain ATCC 43494 / DSM 8903 / Tp8T 6331); OX = 351627 GN=tgt PE=3 SV=1
MAIKFELIKKSKKSNARRGRLYTPHGVIETPVFMPVGTQATVKAIMHRDLYEMGTQIILANTYHLYLRPGIDVIKEAGGLHKFMNWQKPILTDSGGFQVFSLSKLRTITDDGVEFRSHIDGSRHFFTPEKVIEIQNILGSDIIMAFDECVPYPCDHEYAKWALERTARWLKRCKTHHKNTENQALFGIVQGSTYKDLRIESAKRTVEEDLPGYAIGGLSVGEPKELMYEMIEVLHPILPEDRPRYLMGVGTPDCLYESVIRGVDMFDCVFATRTARNGTVFTKEGRMIIKNAQYAKDFRPIEEDCDCYTCQNFTRAYLRHLIKTEEILGAILLSIHNVRFLLRFMEKLRKDIEEDRI

SEQ ID NO: 53053 - protein, 373 aa, unidentified
  source 1..373: note = Caldicoprobacter faecalis
  REGION 1..373: note = tr|A0A1I5VJ87|A0A1I5VJ87_9FIRM Queuine tRNA-ribosyltransferase OS=Caldicoprobacter faecalis; OX = 937334 GN=tgt PE=3 SV=1
MSFKFEVIKECSKTGARLGRIYTPHGSFETPIFMPVGTQATVKALTPRDLKEINAQIILANTYHLYLRPGYELIRQAGGLHKFMNWDRPILTDSGGFQVFSLADLREITDEGVYFRSHLDGSKHFISPEKAIEIENALGADIIMAFDECVPYPCDYETAKDAVERTSRWARRCKAAHQREDQALFGIIQGSVFRDLRMRSLEQLLELDFPGYGIGGLSVGEPKPVMYEILEHMIPAMPKDKPRYLMGVGSPDCLIEGVIRGVDMFDCVLPTRTARTGLAMTSRGKVMLRNAPYQRDFSPLDPECDCYTCQNFSRAYLRHLVKAREILAAILISLHNVRFLIRLMEEIREAIRNDRLLEYRDSFFEKYGYNNKE

SEQ ID NO: 53054 - protein, 373 aa, Caldicoprobacter oshimai
  REGION 1..373: note = tr|A0A2W4KPG5|A0A2W4KPG5_9FIRM Queuine tRNA-ribosyltransferase OS=Caldicoprobacter oshimai; OX = 551788 GN=tgt PE=3 SV=1
MSFKFEVIKECSKTGARLGRIYTPHGSFETPIFMPVGTQATVKALTPRDLKEINAQIILANTYHLYLRPGYELIRQAGGLHKFMNWDRPILTDSGGFQVFSLADLREITDEGVYFRSHLDGSKHFISPEKAIEIENALGADIIMAFDECVPYPCDYETAKDAVERTSRWARRCKAAHQREDQALFGIIQGSVFRDLRMRSLEQLLELDFPGYGIGGLSVGEPKPVMYEILEHMIPAMPKDKPRYLMGVGSPDCLIEGVIRGVDMFDCVLPTRTARTGLAMTSRGKVMLRNAPYQRDFSPLDPECDCYTCKNFSRAYLRHLVKAREILAAILISLHNVRFLIRLMEEIREAIRNDCLLEYRDSFFEKYGYNNKE

SEQ ID NO: 53055 - protein, 386 aa, Caldilinea aerophila
  REGION 1..386: note = tr|I0I5G3|I0I5G3_CALAS Queuine tRNA-ribosyltransferase OS=Caldilinea aerophila (strain DSM 14535 / JCM 11387 / NBRC 104270 / STL-6-O1) OX=926550; GN = tgt PE=3 SV=1
MTFHFDLLCQDGQARRGVFHTPHGPIQMPAFAPVGTQANVKTLEPRDLHEAGAELILANTYHLYLRPGHRLIERMGGLHAFMAWDRPILTDSGGYQVFSLADSRKLNEEGVLFRSHIDGSLHHFTPEKVMEIEQALGADIAMVLDECPPPLDRAYNEEALARTHRWAERCKAAHCRKDQALFGIVQGGIFEDLRLQSVEFLCQLDFPGYAIGGLAVGETKEQMYATLDFTCSAMPPNKPRYLMGVGAPEDIVESVARGVDFFDCVLPTRIARNGQLLTPDGRMNLRNAQYAEDPRPVQEDCTCYTCRTFSRAYLRHLYKAGEISALRLGTIHNVHFMLELMRQIQTAIEEGRFAAFREQFHQRFRITDQAKRHEQRALRQAKRAQT

SEQ ID NO: 53056 - protein, 387 aa, unidentified
  source 1..387: note = Caldilineae bacterium
  REGION 1..387: note = tr|A0A3M1EZM0|A0A3M1EZM0_9CHLR Queuine tRNA-ribosyltransferase OS=Caldilineae bacterium; OX = 2420332 GN=tgt PE=3 SV=1
MFTFQLHSTDGQARLSTYHTPHGPIPMPAFAPVGTLANVKTLEPRDLEELGARLILANTYHLYLRPGHELVRKMGGLHRFMAWDGPILTDSGGFQVFSLAHRRQVDADGVTFRSHLDGSRHRFTPEKVMEIEQALGADIAMVLDECADPLDRAYNEAALARTHAWAERCRTAHIRPDQALFGIVQGGIFPDLRQESAAFLAGLDFHGYAVGGLAVGETKAQMYATLDETCPALPAEKPRYLMGVGAPEDILEAVDRGIDMFDCVLPTRVARNGGLLTPHGRINIRNQVHQEDPRPIWEGCTCYTCRTFSRAYLRHLFKAKEISGLRLATIHNVHFMLRFMEDIRTAIAQGRFQQFKQDFLAGYQLTDQTVRHEQRRKRAEAIRSQNS

SEQ ID NO: 53057 - protein, 385 aa, unidentified
  source 1..385: note = Caldilineae bacterium
  REGION 1..385: note = tr|A0A3M1E8R5|A0A3M1E8R5_9CHLR Queuine tRNA-ribosyltransferase OS=Caldilineae bacterium; OX = 2420332 GN=tgt PE=3 SV=1
MVVHSANDFAAEEFVSAFQFELLREDTETAARAGVIHTPHGDIPTPVFAPVGTQGTVKTLSPADLQSLGATLILGNTYHLYLRPGPDLIADFGGLHHFMGWHGPILTDSGGFQVFSLEGLRDIDDDGVTFRSHLDGSLHRFTPEKVIAIQEQIGADIIMAFDECPPPGDYEYNVIALRRTHRWADRCRAAHRRPDQALYGIVQGGIFPDLRARSAEFLTGLDFDGYGIGGLSVGESKADMHAMLEVLHPLLPRHKPRYLMGVGSPEDLFECVARGVDQFDCVLPTRIARNGAVLTHRGRLNLRNAKYARRKDPIEAGCACYTCQHFSLAYLRHLIKANEILGLHLATLHNVHFMLETMRRIRQSILDGTFAAYRAEFLATYLAGA

SEQ ID NO: 53058 - protein, 387 aa, unidentified
  source 1..387: note = Caldimicrobium thiodismutans
  REGION 1..387: note = tr|A0A2N7PJ39|A0A2N7PJ39_9BACT Queuine tRNA-ribosyltransferase OS=Caldimicrobium thiodismutans; OX = 1653476 GN=tgt PE=3 SV=1
MSMFKFEVLFSDKKTGARIGKIITPRGVVETPVFMPVGTAGSVKALLPEFVASLGYRIILANTYHLLLRPGPEIIKKAGGLHPFMNWRGLILTDSGGFQVYSLSFLRKIKTEGILFKSHLDGQEIFLTPEFSLEIQLKLNSDILMVLDTCIPYPANREETEELTHLTHTWALKSLEFWEKNKKEGKALFGIVQGGMFEDLRKQSARFIANLPFDGYAIGGLSVGEPLELRNKMLEIAVPELPESSPRYLMGVGTPLDLIESVIRGIDMFDCVLPTRNARRGTLFTSQGIISIKNSRYKEDFTPLDPECNCYTCRNYTKAYLRHLFYAKELLIYSLLTLHNLTYYAKIMREIKEAIKTSSLEKLREELFIKFYKSQKEEYDESLGNCY

SEQ ID NO: 53059 - protein, 384 aa, unidentified
  source 1..384: note = Caldimicrobium thiodismutans
  REGION 1..384: note = tr|A0A0U5APU3|A0A0U5APU3_9BACT Queuine tRNA-ribosyltransferase OS=Caldimicrobium thiodismutans; OX = 1653476 GN=tgt PE=3 SV=1
MFLFKLLYSDSKTQARIGQIITPRGVIETPVFMPVGTAGTVKALFPELVASLGFSIILANTYHLLLRPGPEIIKNAGGLHAFMNWKGLILTDSGGFQVYSLSSFRKITSEGILFQSHLDGSEYFLTPEFALEIQLMLNSDILMVLDTCIPYPSDIEKTQILTELTHKWAIKSLEFWERNKKEGKAIFGIVQGGMFEDLRKESARFIANLPFNGYALGGLSVGEPFELRNAMLDIAIPELPEGAPRYLMGVGTPLDLVEAVIRGIDMFDCVLPTRNARRGSLFTSQGIISIKSSKYKEDFSPLDPECSCYTCRNYTKAYLRHLFLAKELLIYSLLTLHNLTYYAKIVRQIKEAVRTGNLSALREDLYLKYYKTSKEEDDGSDVNF

SEQ ID NO: 53060 - protein, 371 aa, unidentified
  source 1..371: note = Caldisalinibacter kiritimatiensis
  REGION 1..371: note = tr|R1CEE8|R1CEE8_9CLOT Queuine tRNA-ribosyltransferase OS=Caldisalinibacter kiritimatiensis OX=1304284 GN=tgt PE=3 SV=1
MAIKYELIKESKECNARLGKLHTPHGVIETPIFMPVGTKATVKTMTPEELKDIGAQIILSNTYHLYLRPGHELIKEAGGLHKFMNWDGPILTDSGGFQVFSLGHLRNITEEGVEFRSHIDGSKHFISPEKSIEIQNSLGSDIIMAFDECAPYPSDREYVKNSLERTTRWAKRCIKAHKNPEKQALFGIVQGGMYKDLREQSAKDLLELDFPGYAVGGLSVGEPAELMYEVLDYTVPLLPKNKPRYLMGVGSPDYLFEAVVRGIDMADCVLPTRMARNGTFLTSQGRVVIKNAKYKKDFNKLDPECDCYTCQNYSRAYLRHLFKANEILGARLATIHNLYFLLKLMENIREAIKEDRLLEYKNEFYRKYGYI

SEQ ID NO: 53061 - protein, 374 aa, unidentified
  source 1..374: note = Caldiserica bacterium
  REGION 1..374: note = tr|A0A2H9MBF6|A0A2H9MBF6_9BACT Queuine tRNA-ribosyltransferase OS=Caldiserica bacterium CG02_land_8_20_14_3_00_36_38 OX=1973932 GN=tgt PE=3 SV=1
MKDIKFKITATDRNSRARVTQFETAHGIIETPVFMPVGTQATVKTLTPDELNEIGFKIILANTYHLYLQPGASVIERAHGIHKFMNWNGAILTDSGGFQVLSLKDLRKISKEGVQFKSFIDGSTHFFSPEVVVETQEKIGSDIAIHLDICGIYQSDWKETNRELDITLQWAKRSLLHKKREDQIMFGVVQGGFYKDLRKKAAEEISSMDFPGFTLGGLSVGEERALTEEFVDYTVQLLPDDKPRYLMGVGDPLSIIEYIKMGVDMFDCVLPTRIARNRSLFTKHGVIKITKNIYKEDFTPIEDDCSCYTCRNFTKAYLHHLFKSKEYLAGRLATIHNLFFLQKLILNIRESIKSGSFDQFYRDFKNNYSQINYE

SEQ ID NO: 53062 - protein, 374 aa, unidentified; identical to SEQ ID NO: 53061
  source 1..374: note = Caldiserica bacterium
  REGION 1..374: note = tr|A0A2H9MRL5|A0A2H9MRL5_9BACT Queuine tRNA-ribosyltransferase OS=Caldiserica bacterium CG17_big_fil_post_rev_8_21_14_2_50_35_7 OX=1973933 GN=tgt; PE = 3 SV=1

SEQ ID NO: 53063 - protein, 375 aa, Caldisericum exile
  REGION 1..375: note = tr|I0GJC6|I0GJC6_CALEA Queuine tRNA-ribosyltransferase OS=Caldisericum exile (strain DSM 21853 / NBRC 104410 / AZM16c01) OX=511051 GN=tgt PE=3 SV=1
MFDIKFKVLAEDSWSRARITQFETPHGTIETPVFMPVGTQATVKTLTSDEIREIGFKIILSNTYHLYLQPGASIIEKAGGIHKFMDWDGAVLTDSGGFQVLSLKDLRKINSDGVEFKSFIDGSKHFFTPELVIETQEKIGSDIAIPLDICGTYPSPHSETKRELDITVEWAKRSLKAHKREDQILFGVIQGGFYKDLRKEAVERILELDFPGVTLGGLSIGEEKELTAEMVDYTVSLLPKYKPRYFMGVGDPISILEYVRLGVDMFDCVLPTRIARNRTLFTKTGTIKITKAIYKEDFTPIENDCGCYTCKHYTKAYLNHLFKAKEHLAGRLATIHNLYFMNWLIQEIRKSIKEGYFKDFYQEFKSKYKEGNNSE

SEQ ID NO: 53064 - protein, 374 aa, Caldisericum sp.; identical to SEQ ID NO: 53061
  REGION 1..374: note = tr|A0A1J5C1S3|A0A1J5C1S3_9BACT Queuine tRNA-ribosyltransferase OS=Caldisericum sp. CG2_30_36_11; OX = 1805053 GN=tgt PE=3 SV=1

SEQ ID NO: 53065 - protein, 373 aa, Calditerrivibrio nitroreducens
  REGION 1..373: note = tr|A0A2J6WJZ9|A0A2J6WJZ9_9BACT Queuine tRNA-ribosyltransferase OS=Calditerrivibrio nitroreducens; OX = 477976 GN=tgt PE=3 SV=1
MLSFVIDKKDKNCSARAGTIKTTHGIIETPIFMPVGTVGSVKTLTPDELYEIGATIILGNTYHLHLRPGEEIVAHFGGLHRFMNWQRNILTDSGGFQVFSLADLNKITEDGVEFKSHIDGSRHFFSPEISMEIQKKLGSDIVMAFDECVPYPSEKSYVAKSLERTTRWAKRCKEYTLDNHQSLFGIVQGGVFKDLRKISADQLIDLDFPGYAIGGLSVGEEIPLMYEIAEYTAHLLPEEKPRYLMGVGTPEDILNGISFGIDMFDCVMPTRNARNALLFTSEGRLSIKRADLAKSDDPIDKNCGCYTCRNFSRGYLRHLYKAGEILAMRLNTIHNLHFYISLVKSARNAIINGNFEKFKSDMLLKLNQGGNNV

SEQ ID NO: 53066 - protein, 373 aa, Calditerrivibrio nitroreducens
  REGION 1..373: note = tr|E4TJ16|E4TJ16_CALNY Queuine tRNA-ribosyltransferase OS=Calditerrivibrio nitroreducens (strain DSM 19672 / NBRC 101217 / Yu37-1) OX=768670 GN=tgt; PE = 3 SV=1
MLSFVVDAKDKNCSARAGTIKTTHGIIETPIFMPVGTVGSVKTLTPDELYEIGATIILGNTYHLHLRPGDDIVAHFGGLHRFMNWKRNILTDSGGFQVFSLADLNKITEDGVEFKSHIDGSKHFFSPEISMEIQKKLGSDIVMAFDECVPYPSEKSYVAKSLERTTRWAKRCKEYSLDYHQSLFGIVQGGVFKDLRKISADQLIDLDFPGYAIGGLSVGEEIPLMYEIAEYTAQLLPEEKPRYLMGVGTPEDILNGISFGIDMFDCVMPTRNARNALLFTSEGRLSIKRADLAKSDDPIDKNCDCYTCRNFSRGYLRHLYKAGEILAMRLNTIHNLHFYISLVKSARNAIINGNFEAFKNDMLLKLNQGGNNV

SEQ ID NO: 53067 - protein, 377 aa, Caldithrix abyssi
  REGION 1..377: note = tr|H1XPF5|H1XPF5_9BACT Queuine tRNA-ribosyltransferase OS=Caldithrix abyssi DSM 13497; OX = 880073 GN=tgt PE=3 SV=1
MFFDLKHTDVNSKARAGVLNTDHGSIETPIFMPVGTQGTVKALSPRDLKEVNASIILGNTYHLYMRPGHRLIEKMGGLHRFMGWDRAILTDSGGFQVFSLKELRKIDDEGILFQSHLDGSYHKFTPQLVLEIQRSLGSDIMMVLDECPPYPSTRDYALKSNQLTIDWARQAREIFSGWQPLYGHRQWLFAIVQGGTFKDIREQSARALMELDFPGYAIGGLAVGEPKDEMFDITDFCTEILPEQKPRYLMGVGMPDDILEAIERGVDMFDCVIPTRNARNGTVFTTEGKMVLKSARFKEDTKPVDANCQCYTCKNFSRAYLRHLYNANEILGLTLATIHNVHFYLWLVRQARKAILQDNYVSWKERILQKITRVVEN

SEQ ID NO: 53068 - protein, 377 aa, Caldithrix sp.
  REGION 1..377: note = tr|A0A1F4N6H0|A0A1F4N6H0_9BACT Queuine tRNA-ribosyltransferase OS=Caldithrix sp. RBG_13_44_9; OX = 1797576 GN=tgt PE=3 SV=1
MKFQIDAEDVNSKARATSFFTEHGVVKTPVFMPVGSIGTIKTLSPEDLISSEVQIILANTYHLYLKPGLEILEKAGGLHRFINWSGPILTDSGGFQVYSLDELKKISEEGVEFKSHWDGSSHFFTPHKVVDIQRVIGSDIILVLDQCIPNPSDKTTSRNAHLLTFKWADIARKYFLNLRPLYQFRQYQFAVIQGGIYPDLRKESIDKLIDLDFDGYAIGGLAVGESWEKRNEITEFCTTRMPHQKPKYLMGVGTPVDILNAIERGVDMFDCVIPTRNARNGTLFTRFGKLVIRNADYKSDFQPIDPGCSCYSCRNFSRAYIRHLFNINEVLGLRLATYHNIYFYMNLLKQARQAILDRFFNSFKKQFLEIYSSIESI

SEQ ID NO: 53069 - protein, 384 aa, Caldithrix sp.
  REGION 1..384: note = tr|A0A523IJT8|A0A523IJT8_9BACT Queuine tRNA-ribosyltransferase OS=Caldithrix sp. OX=1962856; GN = tgt PE=3 SV=1
MTLDFKVLHQDQTSKARLGSLTTAHGQIQTPVFMPVGTQGTVKSLSPQELVEVGSQIILGNAYHLYLRPGHEIIERAGGLHKFSSWEKPILTDSGGYQVFSLSDLRKINDEGVTFQSHHDGSFHELSPERAVEIQMSLGSDIMMVLDECPPYPSPESYIAESVERTRNWAQRCLRKWQNSKPKFGYEQSLFAIVQGSTLSKLRKTSAQALIEMDFPGYAIGGLSIGEPKPVLFEMIGVCTDILPENKPRYLMGMGKPEDLVEAVSLGVDMFDCVIPTRNGRKGQFFTWTGTLNVRNAAYKEDFLPVDETCKCYTCLNFSRAYLRHLFHSNELLGLRLGSLHNLYFYHQLTQQIRQHIESNNFISWRQDFLNHYKSSSEVNKEEN

SEQ ID NO: 53070 - protein, 379 aa, unidentified
  source 1..379: note = Calditrichaeota bacterium
  REGION 1..379: note = tr|A0A3N9N2S7|A0A3N9N2S7_9BACT Queuine tRNA-ribosyltransferase OS=Calditrichaeota bacterium; OX = 2212469 GN=tgt PE=3 SV=1
MKFDLIHKDKNSEARAGLLETDHGMVETPIFMPVGTQATVKTMAPRNLDETGVQIILGNTYHLYLRPGEELIGRFGGIHNFMGWNKPVLTDSGGYQVFSLKELRKLDSEGVTFQSHLDGSSHRFTPEKVLDIQRHLGSDIMMVLDECAPYPSTHEYAEESNALTLKWAREARVLYEKKERLYGYDQWLFGIVQGSIYEDLREGSARELMDMDFPGYAIGGLAVGESKSEMYRITSLCTDILPAHKPRYLMGVGMPEDILEGIARGVDMFDCVLPTRNARNGTVFTWNGRLVIKAGRFKEDTLPIDEQCTCYTCRNFSRAYLRHLFNANEILGLHLATLHNIHFYMDLVKKSREKILNNEFSVWSKTVLPTVANLIENNN

SEQ ID NO: 53071 - protein, 379 aa, unidentified
  source 1..379: note = Calditrichaeota bacterium
  REGION 1..379: note = tr|A0A3M1XCG9|A0A3M1XCG9_9BACT Queuine tRNA-ribosyltransferase OS=Calditrichaeota bacterium; OX = 2212469 GN=tgt PE=3 SV=1
MEFLLEASDSATRARAGRFRTAHGVVETPQFMPVGTVGTVKTLTPAELWEAGARIILGNTYHLYLRPGLEVLQAAGGLHRFNGWNGPILTDSGGFQIYSLNDLRQVNQEGVEFRSHWDGSTHFFSPERVVDIQRVIGSDIMMVLDQCIANPSDEAAARQAHLLTLDWAQRSREHFLRQKPLYGFPQLQFGIVQGGVYDHLRKESVRELVAIGFDGYAIGGLAVGEDARTRNRMTELCTDLLPENRVRYLMGVGKPEDLLDAIARGVDIFDCVIPTRNARNGWAFTRTGKVVIRNARYRSDFAPLSADCRCFCCTHFTRAYLHHLFRVKEMLGYRLLTIHNVHFFLSLMRQARRHILDGTFQDFQNRFLESYFTHQEKGR

SEQ ID NO: 53072 - protein, 376 aa, unidentified
  source 1..376: note = Calditrichales bacterium
  REGION 1..376: note = tr|A0A524LAB3|A0A524LAB3_9BACT Queuine tRNA-ribosyltransferase OS=Calditrichales bacterium; OX = 2528038 GN=tgt PE=3 SV=1
MNFKLEHTDTQSKARCGTVSTGHGDIKTPIFMPVGTNGTVKTLSPLELTDNGAQIILGNTYHLYMRPGDDLLARFGGLHKFMGWNGPILTDSGGFQVFSLADLRKIDADGVTFQSHLDGSKHRFDAEKVIDIQQNIGSDIMMVLDECTPYPCTPDYAEKSMQMTLRWAERARDYWESSAKSRNPQQALFAIVQGSVYEELRRQCAVDLIQLDFPGYAIGGLAVGEPFDERNRITDICTDVLPTDKPRYLMGVGLPEDILESIALGVDMFDCVIPTRNARNGTVFTTKGKLIAKAARYKEDPLPIDTDCDCYTCRNFSRAYIRHLFNSNEILGLRLATIHNIHFYLWLVKQAREKILNGAFVQWKSQMIQTWKNETD

SEQ ID NO: 53073 - protein, 374 aa, Caloramator australicus
  REGION 1..374: note = tr|I7KWS9|I7KWS9_9CLOT Queuine tRNA-ribosyltransferase OS=Caloramator australicus RC3; OX = 857293 GN=tgt PE=3 SV=1
MSAIRFELIKTCKQSGARLGKLYTPHGVIDTPIFMPVGTQATVKAMTPEELKEIGAQIILSNTYHLYLRPGEKLVEKAGGLHKFMNWDRAILTDSGGFQVFSLSDLRNITEEGVTFKSHIDGSKHFISPEKAIQIENALGADIIMAFDECTPYEADYDYTKNSMERTLRWAERCLKAHQKPDKQALFGIVQGGMFKDLRQESARQTVKMDFPGYAVGGLSIGEPKEIMYQVLDWTVPFLPENKPRYLMGVGSPDALLEGVIRGIDMFDCVLPTRIARNGTVFTSKGKLVVRNAEYAEDFRPLDDECDCYACKNYSRAYIRHLFKAKEILAARLATIHNLRFLLKLMEDVRRAIMEDSLLDFKEEFFRKYGYTNE

SEQ ID NO: 53074 - protein, 374 aa, Caloramator fervidus
  REGION 1..374: note = tr|A0A1H5W0F0|A0A1H5W0F0_9CLOT Queuine tRNA-ribosyltransferase OS=Caloramator fervidus OX=29344; GN = tgt PE=3 SV=1
MSAIRFELLKVCKQSGARLGKLHTPHGTIDTPIFMPVGTQATVKAMTPEELKEIGAQIILSNTYHLYLRPGEKLIEKAGGLHNFMHWDRAILTDSGGFQVFSLSDLRDITEEGVTFKSHIDGSKHFISPEKAIEIENALGADIIMAFDECTPYEADYDYTKNSMERTLRWAERCLKAHRKPEKQALFGIVQGGMFKDLRQESARQTVKMDFPGYAVGGLSIGEPKEIMYQVLEWTVPLLPENKPRYLMGVGSPDALLEGVIRGIDMFDCVLPTRIARNGTVFTSKGKLVVRNAEYAEDFRPLDDECDCYACKNYSRAYIRHLFKAKEILAARLATIHNLRFLLRLMEDIRRAIMEDSLLDFKEEFFRKYGYTKE

SEQ ID NO: 53075 - protein, 374 aa, Caloramator mitchellensis
  REGION 1..374: note = tr|A0A0R3JV89|A0A0R3JV89_9CLOT Queuine tRNA-ribosyltransferase OS=Caloramator mitchellensis; OX = 908809 GN=tgt PE=3 SV=1
MSAIRYELIKQCKQSGARLGKLHTPHGIIETPIFMPVGTQATVKAMTPEELKEIGAQIILSNTYHLYLRPGERLVERAGGLHEFMNWDRPILTDSGGFQVFSLSDLRNITEEGVTFRSHLDGSKHFISPEKAIEIENALGADIIMAFDECTPYEADYEYTKNSMERTLRWAERCKSAHKKPDKQALFGIVQGGMFKDLREISAKETVKMDFPGYAVGGLSIGEPKDIMYQVLDWTVPFLPENKPRYLMGVGSPDALLEGVIRGIDMFDCVLPTRIARNGTVFTSKGKVVIKNAEHAEDFSPLDDECDCYTCKNYSRAYIRHLFKAKEILAARLATIHNLRFLLKLMEDIRRAIMEDSLLDFKEEFFKKYGYTQD

SEQ ID NO: 53076 - protein, 378 aa, Caloramator proteoclasticus
  REGION 1..378: note = tr|A0A1M4WSZ0|A0A1M4WSZ0_9CLOT Queuine tRNA-ribosyltransferase OS=Caloramator proteoclasticus DSM 10124 OX=1121262 GN=tgt PE=3 SV=1
MGAIRYELIKTCKQSGARLGRLHTPHGVIETPIFMPVGTQATVKTMTPEELKEIGAQIILSNTYHLYMRPGEKLVEKAGGLHKFMNWDRPILTDSGGFQVFSLSQLRDITEEGVTFRSHIDGSKHFISPEKAIEIENALGADIIMAFDECLPYPCDYDYAKNSLYRTIRWAERCLKAHKNTEKQALFGIIQGGMYRDLREESVREMIKLDFPGYAVGGLSIGEPKDIMYEVLDWTVHLLPENKPRYLMGVGSPDALLEGVIRGVDMFDCVLPTRIARNGTVFTSKGKLVVRNAEYAEDFRPLDEECDCYACKNYSRAYIRHLFKAKEILGARLTTIHNLRFLLKLMEDVRQAIMEDRLLDFKEEFFEKYGYNEGKWTF

SEQ ID NO: 53077 - protein, 374 aa, unidentified
  source 1..374: note = Caloramator quimbayensis
  REGION 1..374: note = tr|A0A1T4WUJ4|A0A1T4WUJ4_9CLOT Queuine tRNA-ribosyltransferase OS=Caloramator quimbayensis; OX = 1147123 GN=tgt PE=3 SV=1
MEAIRYELIKKDERTGARLGKLHTPHGTIDTPVFMPVGTQATVKAMTPDELKSIGAQIILSNTYHLYLRPGEKLVEKAGGLHNFMNWDRAILTDSGGFQVFSLSELRDIKEEGVTFKSHIDGSKHFISPEKAIEIENALGADIIMAFDECPPYPADYDYTKNSLYRTIRWAERCKKTHKNTEKQALFGIIQGGMFKDLRQEAVKEMIKLDFPGYSVGGLSIGEPKPIMYDVLDWTTPLMPEDKPRYLMGVGSPDCLIEGVIRGIDMFDCVLQTRIARNGTVFTSKGKLVVRNAEYAEDFRPLDEECDCYTCRNYSRAYIRHLLKAQEILGARLTTIHNLRFTIRLMEKIREAIMQDSLLEFRDEFYAKFGYNNN

SEQ ID NO: 53078 - protein, 374 aa, Caloramator sp.
  REGION 1..374: note = tr|A0A5B7TGV1|A0A5B7TGV1_9CLOT Queuine tRNA-ribosyltransferase OS=Caloramator sp. E03 OX=2576307; GN = tgt PE=3 SV=1
MEAIRYELIKKCEKTGARLGKLHTPHGTIDTPVFMPVGTQATVKAMTPDELKSIGAQIILSNTYHLYLRPGEKLIEKAGGLHSFMNWDRAILTDSGGYQVFSLSELRDIKEEGVTFKSHIDGSKHFISPEKAIEIENALGADIIMAFDECPPYTADYDYTKNSLYRTIRWAERCKKVHKNTEKQALFGIIQGGMFKDLREEAVREMIKLDFPGYSVGGLSIGEPKPIMYEVLNWTVPLMPENKPRYLMGVGSPDCLIEGVIRGIDMFDCVLQTRIARNGTVFTSKGKLVVRNAEYAEDFRPLDEECDCYTCQNFSRAYIRHLLKAQEILGARLTTIHNLRFTIRFMEKIREAIMQDSILEFRDEFYAKFGYNNN

SEQ ID NO: 53079 - protein, 372 aa, Caloranaerobacter azorensis
  REGION 1..372: note = tr|A0A096BK22|A0A096BK22_9CLOT Queuine tRNA-ribosyltransferase OS=Caloranaerobacter azorensis H53214 OX=1156417 GN=tgt PE=3 SV=1
MAVKYELIKESTECRARLGKLYTPHGVIETPIFMPVGTRATVKTMTPEELKDLGAQIILSNTYHLYLRPGHELIKEAGGLHKFMNWDRPILTDSGGFQVFSLGDLRKITEEGVEFRSHIDGSRHFISPEKSIEIQNALGSDIMMAFDECAPYPSDRDYVKHSLERTTRWAKRCKEAHRNPDTQALFGIVQGGVYRDLREQSAKEIVDLDFPGYAIGGLSVGEPKELMYEVLDYTVPLLPKNKPRYLMGVGSPDCLFEGVIRGIDMFDCVLPTRIARNGTVMTSHGKVVIRNAKYARDFGKLDPECDCYTCRNYSRAYIRHLFNVNEILGARLTTIHNLYFLLRLMENIRLAIKEDRLLQYKEEFFKKYGYIK

SEQ ID NO: 53080 - protein, 372 aa, Caloranaerobacter azorensis; identical to SEQ ID NO: 53079
  REGION 1..372: note = tr|A0A1M5TRB0|A0A1M5TRB0_9CLOT Queuine tRNA-ribosyltransferase OS=Caloranaerobacter azorensis DSM 13643 OX=1121264 GN=tgt PE=3 SV=1

SEQ ID NO: 53081 - protein, 373 aa, Caloranaerobacter sp.
  REGION 1..373: note = tr|A0A0N8NMH0|A0A0N8NMH0_9CLOT Queuine tRNA-ribosyltransferase OS=Caloranaerobacter sp. TR13; OX = 1302151 GN=tgt PE=3 SV=1
MMAVKYELIKESTECKARLGKLHTPHGIIETPIFMPVGTRATVKTMTPEELKDLGAQIILSNTYHLYLRPGHELIKEAGGLHKFMNWDKPILTDSGGFQVFSLGDLRKITEEGVEFRSHIDGSRHFISPEKSIEIQNALGSDIIMAFDECAPYPSDRDYVKHSLERTTRWAKRCKEAHRNPETQALFGIVQGGMYRDLREQSAKEIIDLDFPGYAIGGLSVGEPKELMYEVLDYTAPLLPKNKPRYLMGVGSPDCLFEGVIRGIDMFDCVLPTRIARNGTVMTSQGKVVIRNAKYARDFGKLDPECDCYTCQNYSRAYIRHLFNVNEILGARLTTIHNLYFLLKLMENIRLAIKEDRLLQYKEEFFKKYGYIK

SEQ ID NO: 53082 - protein, 332 aa, unidentified
  source 1..332: note = Calothrix brevissima
  REGION 1..332: note = tr|A0A1Z4JU05|A0A1Z4JU05_9CYAN Queuine tRNA-ribosyltransferase OS=Calothrix brevissima NIES-22; OX = 1973478 GN=tgt PE=3 SV=1
MPVGTLANVKTVTPAQLKDTGAQMVLSNTYHLHLQPGEGIVAGGGGLHKFMGWNGPMLTDSGGFQVFSLSEMRKITEEGVTFRSPHDGQIIKLTPERSIEIQNTLGADVIMAFDECPPYPATRQEVEAATERTYRWLERCIAAHKRSDQALFGIVQGGVYLDLRSQAALALAKLDLPGYAIGGVSVGEPPELVAQIVQNTAPLLPSEKPRYLMGVGTYKEMAIAIASGVDVFDCVIPTRWARHGTAIVQGERWNLKNAKFREDFAPLDETCTCYACQNFSRAYISHLVRSQEILAYTLLSIHNITELIGFTQRIREAILSDRFATEFAHWLD

SEQ ID NO: 53083 - protein, 343 aa, unidentified
  source 1..343: note = Calothrix desertica
  REGION 1..343: note = tr|A0A433VAB2|A0A433VAB2_9CYAN Queuine tRNA-ribosyltransferase OS=Calothrix desertica PCC 7102; OX = 232991 GN=tgt PE=3 SV=1
MPVGTLANVKTITPAQLKDTGAQMVLSNTYHLHLQPGEAIVAGGGGLHKFMGWNGPMLTDSGGFQVFSLSEMRKITEEGVTFRSPHDGQIINLTPEKSIEIQNILGADVIMAFDECPPYPATREEVETATARTYRWLERCIAAHQRTDQALFGIVQGGVYLDMRSSAASSLAAFDLPGYAIGGVSVGEPPELIHQIVEATAPLLPYHKPRYLMGVGTYQEMAIAIASGIDLFDCVIPTRWARHGTAMVQGERWNIKNAKFREDFTPLDETCPCYTCQNFSRAYLSHLVRCQEILAYTLLSIHNITELIRFTQKIRQSIINGTFATDFAIWLDTSNESKVLSAE

SEQ ID NO: 53084 - protein, 375 aa, unidentified
  source 1..375: note = Calothrix elsteri
  REGION 1..375: note = tr|A0A2A2TDR8|A0A2A2TDR8_9CYAN Queuine tRNA-ribosyltransferase OS=Calothrix elsteri CCALA 953; OX = 987040 GN=tgt PE=3 SV=1
MTANFSFECIASCNQTKARAGVFQTPHGIVETPRFMPVGTLANVKTITPAQLKDTGAQMVLSNTYHLHLQPGEDIVAGGGGLHKFMGWNGPMLTDSGGFQVFSLSEMRKITEEGVTFRSPRDGRIINLTPERSIAIQNTLGADVIMAFDECPPYPATREEVEAATSRTYRWLERCISAHQRQDQALFGIVQGGVYLDLRAKAALDLKQFDLPGYAIGGVSVGEPPELIAQIVETTAPLLPSDKPRYLMGVGTYREMAMAIASGIDLFDCVIPTRWARHGTAMVQGERWNLKNAKFREDFAPLDETCPCYTCQNFSRAYISHLLRSQEILAYTLLSIHNITELIRFTQKIRNAILQGTFATDFAHWLKPGEVQEEK

SEQ ID NO: 53085 - protein, 332 aa, Calothrix parasitica
  REGION 1..332: note = tr|A0A1Z4LLD7|A0A1Z4LLD7_9CYAN Queuine tRNA-ribosyltransferase OS=Calothrix parasitica NIES-267; OX = 1973488 GN=tgt PE=3 SV=1
MPVGTLANVKTITTAQLQETGAQMVLSNTYHLHLQPGEAIVAGGGGLHKFMGWDKPMLTDSGGFQVFSLSEMRKITEEGVSFRSPLDGSIINLTPEKSIEIQNILGADVIMAFDECPPATANRTEVEAATERTYRWLLRCIEAHNRSEQALFGIVQGGIYADLRSSAANALTELDLPGYAIGGVSVGEEPELIHEIVRQTAPLLPAHKPRYLMGVGTHKEMVVAIASGVDLFDCVIPTRWARHGTAMVKGERWNVKNAKFREDFTPLDETCPCYTCQNFTRAYLSHLIRAQEILAYTLLSIHNITELIRFTQKIRESILNDTFTEEFGHWLK

SEQ ID NO: 53086 - protein, 332 aa, Calothrix sp.
  REGION 1..332: note = tr|A0A1Z4FTU5|A0A1Z4FTU5_9CYAN Queuine tRNA-ribosyltransferase OS=Calothrix sp. NIES-2098; OX = 1954171 GN=tgt PE=3 SV=1
MPVGTLANVKTVTPAQLRDTGAQMVLSNTYHLHLQPGEAIVAGGGGLHKFMGWNGPMLTDSGGFQVFSLSEMRKITEEGVTFRSPHDGQIINLTPERSIEIQNTLGADVIMAFDECPPYPATRQEVEAATGRTYRWLERCIVAHKRSDQALFGIVQGGVYLDLRSQAALALAELDLPGYAIGGVSVGEPPELMAQIVQTTAPLLPPEKPRYLMGVGTYKEMAIAIASGVDLFDCVIPTRWARHGTAMVKGDRWNLKNAKFREDFAPLDETCGCYACQNFSRAYISHLVRSQEILAYTLLSIHNITELIRFTQHIREAILSDRFATEFASWLD

SEQ ID NO: 53087 - protein, 376 aa, Calothrix sp.
  REGION 1..376: note = tr|A0A1Z4RHK4|A0A1Z4RHK4_9CYAN Queuine tRNA-ribosyltransferase OS=Calothrix sp. NIES-4101; OX = 2005461 GN=tgt PE=3 SV=1
MTANFSFECIASCQETKARAGVFQTPHGIVETPRFMPVGTLANVKTITPAQLQDTGAQMVLSNTYHLHLQPGEDIVAGGGGLHKFMGWHGPMLTDSGGFQVFSLSEMRKITEEGVTFRSPHDGQIINLTPERSIAIQNTLGADVIMAFDECPPYPATRQEVEAATSRTYRWLERCITAHQRPDQALFGIVQGGVYLDLRAKAAEDLKQLDLPGYAIGGVSVGEPPELIAQIVATTAPLLPFDKPRYLMGVGTYREMAVAIASGVDLFDCVIPTRWARHGTAMVQGERWNLKNAKFREDFAPLDETCPCYTCQNFSRAYISHLVRSQEILAYTLLSIHNITELIRFTQKIRNAIIKGTFAQDFAHWLEPSTESSDED

SEQ ID NO: 53088 - protein, 389 aa, Camelimonas lactis
  REGION 1..389: note = tr|A0A4R2GMV1|A0A4R2GMV1_9RHIZ Queuine tRNA-ribosyltransferase OS=Camelimonas lactis OX=659006; GN = tgt PE=3 SV=1
MTSQPNLTSAGNGVAQPAFAFATSAIDGRARTGLITTAHGQIRTPAFMPVGTAATVKAMYPAQVKQLGADVVLGNTYHLMLRPGAERVARLGGLHQFMNWPHPILTDSGGFQLMSLSKLRKITEKGVTFQSHIDGARYELTPERSIEIQGLLGADIQMQLDECVRMPCAREEADRAMQLSLRWAERSKAAFGALPGQGLFGIVQGADVPELRVESARKLIDIGFHGYAVGGLAVGEPQDVMLAMLDVVTPILPADRPRYLMGVGTPDDLVESVRRGVDMFDCVMPTRAGRHGLAYTRHGKVNLKNARHAEDTRPLDEASPCEASSAWSRAYLHHLVKSGEILGMMLLTWNNLAYYQELMAGMRAAIAAGRLDDFIAETKDGWARGEAAA

SEQ ID NO: 53089 - protein, 372 aa, Caminibacter mediatlanticus
  REGION 1..372: note = tr|A6DAZ3|A6DAZ3_9PROT Queuine tRNA-ribosyltransferase OS=Caminibacter mediatlanticus TB-2 OX=391592 GN=tgt PE=3 SV=1
MEFKIDGTCGNARACIIKTDHSEIKTPIFMPVGTAAAVKSLDAIDMMEILNTNIILANTYHLYLRPGDEVIKNLGGLHNFSGYKRSFLTDSGGFQAFSLGNNVKFSDEGIEFKSHIDGSRHFFTPEKVIDIEYNLNSDIMMVLDDLIPLPNTKERIKKSIQRTTNWAYRSLVHHINKGKKNNLFAIIQGGTDFEFRRISAESLVSLEYKGYSFDGFAIGGLSVGEENQLMYDTIEVTTPYMPKDKPRYLMGVGTPEDIIEAIDRGVDMFDCVMPTRNARNGYLFTSFGTLRIKNARYKLDDNPVDSSCECYTCKNFSRAYLNHLFKAKELTYFRLASIHNLHYYLTLVKEAREAILEGKFKEFKKEFYSKRS

SEQ ID NO: 53090 - protein, 372 aa, Caminicella sporogenes
  REGION 1..372: note = tr|A0A1M6M1L7|A0A1M6M1L7_9CLOT Queuine tRNA-ribosyltransferase OS=Caminicella sporogenes DSM 14501 OX=1121266 GN=tgt PE=3 SV=1
MAIKYELIKECKQTGARLGKIYTPHGTIETPIFMPVGTQATVKSMTPEELKEINAQIILSNTYHLYLRPGYELVDKAGGLHKFMNWDRPILTDSGGFQVFSLGKLRKITEEGVEFRSHLDGSKHFISPEKAIEIENALGADIIMAFDECAPYPADKEYVKNSLERTTRWAKRCKNAHKKKDSQALFGIIQGGMYKDLRKQSAYEIIEMDFPGYAVGGLSVGEPKPLMYEILEYTTPLMPKDKPRYLMGVGTPDCLIEGVIRGIDMFDCVLPTRIARNGTALTSRGKVVIKQAKYYDDFTPLDPECDCYTCKNYSRAYIRHLFKANEILSARLITYHNLYFLLKLMEKIREAIKNDRLLDFRKEFFEKYGYEL

SEQ ID NO: 53091 - protein, 374 aa, Campylobacter avium
  REGION 1..374: note = tr|A0A222MWR8|A0A222MWR8_9PROT Queuine tRNA-ribosyltransferase OS=Campylobacter avium LMG 24591; OX = 522484 GN=tgt PE=3 SV=1
MEFKIKHKDSRARVCEIKTSHSSFTTPIFMPVGTAACVKSLDFLDLSLILDAKIILANTYHLYLRPGADIVAKFKGLHGFTGFSRSFLTDSGGFQAFSLSKNSKHKEEGIEFKSHIDGSRHFFTPKSVLDTQYLLNSDIMMVLDDLVALPSDEKRVILSVQRTIKWAKESINYHKERQSKGLNLDNNIFAIIQGGTSYEQRKLCALELCELSFDGLAIGGLSVGEENALMYDTVEAVSEFIDENRPRYLMGVGTPEDLVECVERGVDMFDCVMPTRNARNGTLFTNFGKINIKKAEFLRDERAIDEDCKCYTCKNFSRGYLHHLFRAKELTFFRLASLHNLHYYLSLVKAMQEAILKDSFSEFKKEFYAKRSLS

SEQ ID NO: 53092 - protein, 372 aa, unidentified
  source 1..372: note = Campylobacter blaseri
  REGION 1..372: note = tr|A0A2P8R2D1|A0A2P8R2D1_9PROT Queuine tRNA-ribosyltransferase OS=Campylobacter blaseri; OX = 2042961 GN=tgt PE=3 SV=1
MLFKIDKKDKNARACTIKTAHSTIQTPIFMPVGTVGAVKSLDAIDMIEILDAKIILANTYHMYLRPSSKIVKEFGGLHGFTKFDRSFLTDSGGFQAFSLSKISKPDENGIKFASHIDGSKHYFTPTSVLDTQYDFGSDIMMVLDDLIALPAEKKRVELSLQRTIKWAKESIEYHKFMQNKGVGINQNIFGIIQGGTDYEARKECAKALCEMDFDGLAIGGLSVGESNEMMYDTVEGVMPFIDENRPRYLMGVGTPEDLVENIERGVDMFDCVMPTRNARNGTLFTSFGKLNIKNAKYIHDDDPIDKECDCYTCKNYSRGYLNHLFKAKELTFFRLASLHNLHYYLNLVKKAREAILASNFDEFKKEFYSKRT

SEQ ID NO: 53093 - protein, 377 aa, Campylobacter coli
  REGION 1..377: note = tr|W8KJ14|W8KJ14_CAMCO Queuine tRNA-ribosyltransferase OS=Campylobacter coli RM4661; OX = 1183379 GN=tgt PE=3 SV=1
MEFKLKHKDNLARVCEITTAHSTFETPMFMPVGTVGAVKSLDAIDLKEQLNAKIILANTYHMYLRPGSKIVKHFGGLHGFTKFDRSFLTDSGGFQAFSLSANSKHFQEGIEFKSHIDGSKHLFTPKSVLDTQYDLNSDIMMILDDLIALPATKERIKVSVDRTIKWAKEAIDYHKQMQIQGLGLKQNIFGIIQGGTDYEERKRCALALNEMDFDGLAIGGLSVGEENALMYETVENLNPFLDENHPRYLMGVGTPEDLVENIERGVDMFDCVMPTRNARNGTFFTNFGKFNIKRAEFINDHESIDNECSCYTCRNFSRGYLNHLFKAKELTFFRLASLHNLHYYLTLVAQAREAIKKSEFKKFKYEFYAKRLTNGMR

SEQ ID NO: 53094 - protein, 377 aa, Campylobacter coli
  REGION 1..377: note = tr|A0A3Z9Z2S8|A0A3Z9Z2S8_CAMCO Queuine tRNA-ribosyltransferase OS=Campylobacter coli OX=195; GN = tgt PE=3 SV=1
MEFKLKHKDNLARVCEITTAHSTFETPMFMPVGTVGAVKSLDAIDLKEQLNAKIILANTYHMYLRPGSKIVKHFGGLHGFTKFDRSFLTDSGGFQAFSLSANSKHFQEGIEFKSHIDGSKHLFTPKSVLDTQYDLNSDIMMILDDLIALPATKERIKVSVDRTIKWAKEAIDYHKQMQIQGLGLKQNIFGIIQGGTDYEERKRCALALNEMDFDGLAIGGLSVGEENALMYETVENLNPFLDENHPRYLMGVGTPEDLVENIERGVDMFDCVMPTRNARNGTFFTNFGKFNIKRAEFINDHESIDNECLCYTCRNFSRGYLNHLFKAKELTFFRLASLHNLHYYLTLVAQAREAIKKSEFKKFKYEFYAKRLTNGMR

SEQ ID NO: 53095 - protein, 376 aa, Campylobacter concisus
  REGION 1..376: note = sp|A7ZD89|TGT_CAMC1 Queuine tRNA-ribosyltransferase; OS = Campylobacter concisus (strain 13826) OX=360104 GN=tgt; PE = 3 SV=1
MKFEVIKKDGNARRGILTTAHSVIQTPVFMPVGTVGAVKSLDAFDMSEILDAKIILANTYHMYLRPGSKVVREFGGLHGFSKFDRSFLTDSGGFQAFSLRSNTKNDDGGIKFKSHIDGSTHYFTPRSVLDTQYELGSDIMMILDDLVALPAEPKRIDLSIKRTIKWAKEAIDYHKFMQSKGVGLQQNIFGIVQGGTDYEARKFCAEALNEMPFDGLAIGGLSVGESNEAMYDTVEAVMPFMDELRPRYLMGVGTPEDLVENVERGVDMFDCVMPTRNARNGTLFTSFGKINIKSAKFINDHAPIDPQCQCYTCKRYSRGYLNHLFKARELTFFRLASLHNLHYYLNLMKEMREAIEVGEFAKFKRNFYAKRSTDEL

SEQ ID NO: 53096 - protein, 376 aa, Campylobacter concisus
  REGION 1..376: note = tr|U2GT36|U2GT36_9PROT Queuine tRNA-ribosyltransferase OS=Campylobacter concisus ATCC 51561 OX=1243032 GN=tgt PE=3 SV=1
MKFEVIKKDGNARRGVLTTAHSVIQTPVFMPVGTVGAVKSLDAFDMSEILDAKIILANTYHMYLRPGSKVVREFGGLHGFSKFDRSFLTDSGGFQAFSLRSNTKNDDGGIKFKSHIDGSTHYFTPRSVLDTQYELGSDIMMILDDLVALPAEPKRIDLSIKRTIKWAKEAIDYHKFMQSKGVGLQQNIFGIVQGGTDYEARKFCAQALNEMPFDGLAIGGLSVGESNEAMYDTVEAVMPFMDELRPRYLMGVGTPEDLVENVERGVDMFDCVMPTRNARNGTLFTSFGKINIKSAKFINDHAPIDPQCQCYTCKRYSRGYLNHLFKARELTFFRLASLHNLHYYLNLMKEMREAIEVGEFAKFKRNFYAKRSTDEL

SEQ ID NO: 53097 - protein, 373 aa, Campylobacter cuniculorum
  REGION 1..373: note = tr|A0A1W6BWU0|A0A1W6BWU0_9PROT Queuine tRNA-ribosyltransferase OS=Campylobacter cuniculorum DSM 23162 = LMG 24588 OX=1121267 GN=tgt PE=3 SV=1
MDFKIKHRDQNARVCEIKTAHSSFLTPIFMPVGTLGAVKSLDANDLMDELNAQIILANTYHLYLRPTCAVIKNFGGLHKFSGFKRSFLTDSGGFQAFSLSQNSKQNENGIEFKSHIDGSLHFFTPQSVLDAQYDFKSDIMMILDDLIALPADKKRIELSVKRTIKWAKEAISYHLENKNNGIGINQNIFGIIQGGTDFHYRKHCALALNEMEFDGLAIGGLSVGEENALMYETIENLMPFMDENRPRYLMGVGTPEDLVEAVSRGVDMFDCVMPTRNARNGTFFTNFGKFNIKKAEFINDNESIDKTCSCYTCKNFSRGYLHHLFRAKELTFFRLASLHNLHFYLSLTKQMQEAIKNNRFDAFKKEFYRQRIS

SEQ ID NO: 53098 - protein, 388 aa, Campylobacter curvus
  REGION 1..388: note = sp|A7GYD5|TGT_CAMC5 Queuine tRNA-ribosyltransferase; OS = Campylobacter curvus (strain 525.92) OX=360105 GN=tgt; PE = 3 SV=1
MKFEVLKTDGNARAGVLTTAHSVIQTPIFMPVGTVGAVKSLDATDMREILDAKIILANTYHMYLRPGSRVVAEFGGLHGFCKFNRSFLTDSGGFQAFSLRANTKNDEGGIKFKSHIDGSIHYFTPRSVLDTQYELDSDIMMILDDLVELPRDPHALGADEKARLKKRIDLSVTRTIKWAREAIDYHKFKQSQGAGLDQNIFGIIQGGTDYDARKICAQALCEMPFDGLAIGGLSVGEANEHMYETVEAVMPFIDAARPRYLMGVGTPEDIVENVQRGVDMFDCVMPTRNARNGTLFTSFGKIAIKNARFVNDHEPIDPECECYTCRRYSRGYLNHLFRAHELTFFRLASLHNLHYYLNLMKQIREAITAGKFSEFKREFYAKRSGGEI

SEQ ID NO: 53099 - protein, 374 aa, Campylobacter fetus
  REGION 1..374: note = tr|A0A0E1GM31|A0A0E1GM31_CAMFE Queuine tRNA-ribosyltransferase OS=Campylobacter fetus subsp. fetus 04/554 OX=1240980 GN=tgt PE=3 SV=1
MNFKIDKTDGNARACTLQTAHSTIQTPIFMPVGTLGAVKSLDAIDLKEILDAKIILANTYHLYLRPTSKVVREFGGLHGFSKFDRSFLTDSGGFQAFSLSKISKPDENGIKFKSHIDGSMHYFTPKSVLDTQYDLSSDIMMILDDLVALPATKERIDLSIKRTINWAKIACEYHKSNKQKSVGIDQNIFGIIQGGTDYNARKLCAEALCEMEFDGLAIGGLSVGESNEEMYHTVEALMPFIDKNRPRYLMGVGTPEDLVQNVERGVDMFDCVMPTRNARNGTLFTSFGKINIKSAAFIKDDNKIDPECDCYTCSNFSRGYLNHLYKARELTFFRLASLHNLHYYLNLVKQMREAIMQGKFKEFKREFYAKRGMI

SEQ ID NO: 53100 - protein, 374 aa, Campylobacter fetus
  REGION 1..374: note = sp|A0RPL5|TGT_CAMFF Queuine tRNA-ribosyltransferase; OS = Campylobacter fetus subsp. fetus (strain 82-40); OX = 360106 GN=tgt PE=3 SV=1
MNFKIDKTDGNARACTLQTAHSTIQTPIFMPVGTLGAVKSLDAIDLKEILDAKIILANTYHLYLRPTSKVVREFGGLHGFSKFDRSFLTDSGGFQAFSLSKISKPDENGIKFKSHIDGSMHYFTPKSVLDTQYDLSSDIMMILDDLVALPATKERIDLSIKRTINWAKIACEYHKSNKQKSVGIDQNIFGIIQGGTDYNARKLCAEALCEMEFDGLAIGGLSVGESNEEMYDTVEALMPFIDKNRPRYLMGVGTPEDLVQNVERGVDMFDCVMPTRNARNGTLFTSFGKINIKSAAFIKDDNKIDPECDCYTCSNFSRGYLNHLYKARELTFFRLASLHNLHYYLNLVKQMREAIMQGKFKEFKREFYAKRGMI

SEQ ID NO: 53101 - protein, 376 aa, unidentified
  source 1..376: note = Campylobacter geochelonis
  REGION 1..376: note = tr|A0A128EIX9|A0A128EIX9_9PROT Queuine tRNA-ribosyltransferase OS=Campylobacter geochelonis; OX = 1780362 GN=tgt PE=3 SV=1
MTFNIDKTDGAARACTIKTAHSVIQTPIFMPVGTVGAVKSLDATDLKEILNAKIILANTYHMYLRPGSKIVKEFGGLHGFTKFDRSFLTDSGGFQAFSLSKNSKPDEDGIKFKSHIDGSTHYFTPRSVLDTQYELGSDIMMILDDLVALPAEKKRIELSLKRTIKWAKEAIDYHKFKQSKGVGIDQNIFGIIQGGTDFEARKECSKALCDMEFDGLAIGGLSVGESNELMYETVENMMPFVDTNRPRYLMGVGTPEDLVENTARGVDMFDCVMPTRNARNGTLFTSYGKINIKSAKFIHDDDPIDSECECYTCKRYSKGYLNHLFKAKELTFFRLASLHNLHYYLNLMRQMREAILTGKFSEFRREFYAKRGVIVS

SEQ ID NO: 53102 - protein, 388 aa, Campylobacter gracilis
  REGION 1..388: note = tr|C8PIR3|C8PIR3_9PROT Queuine tRNA-ribosyltransferase OS=Campylobacter gracilis RM3268; OX = 553220 GN=tgt PE=3 SV=1
MEFQIDGADGAARACTIRTAHSTIRTPVFMPVGTVGAVKALDATDVAGILDAQIILANTYHMYLRPGSRVVAEFGGLHGFTKFPRSFLTDSGGFQAFSLRANTKNDEGGIKFKSHIDGSMHYFTPRSVLDTQYELNSDIMMILDDLVELPREPGALSSDDRSRLKKRIDLSVARTIKWAREAIDYHEAMKSRGLHTHQNIFGIIQGGTDPQARKFCAEALCEMSFDGLAIGGLSVGEKNELMYETVEAMMPYVDPARPRYLMGVGTPEDLVENVARGVDMFDCVMPTRNARNGTLFTSFGKISIKNASFISDCDPIDPHCDCYTCKRFSRGYLNHLFRARELSFYRLASIHNLHYYLRLAADMREAIVHGRFAEFRREFYAARSGARD

SEQ ID NO: 53103 - protein, 372 aa, Campylobacter helveticus
  REGION 1..372: note = tr|A0A1V0RGM3|A0A1V0RGM3_9PROT Queuine tRNA-ribosyltransferase OS=Campylobacter helveticus; OX = 28898 GN=tgt PE=3 SV=1
MEFKLKHKDNHARVCEIKTAHSSFLTPIFMPVGTAAAVKSLDAYDMSEILKAKIILANTYHLYLRPGSKIIRNLGGLHNFTRFSHSFLTDSGGFQAFSLSQNTKHFEEGIKFKSHIDGSLHLFTPKSVLETQYDFNSDICMVLDDLVALPASRKRVELSVERTIKWAKEAITHHKFKQQQGEALSQNVFGIIQGGTEFDLRKKCALELCEMDFDGLAIGGLSVGEENALMYEVVENLTPFMDEGRPRYLMGVGTPEDLVENVERGVDMFDCVMPTRNARNGTFFTSFGKFNIKRAEFINDNESIDKTCSCYTCKTYSRAYLNHLFKAKELTFFRLASLHNLHYYLTLVKEMRGAIMQNKFSEFKKEFYAKRS

SEQ ID NO: 53104 - protein, 373 aa, unidentified
  source 1..373: note = Campylobacter hepaticus
  REGION 1..373: note = tr|A0A424Z077|A0A424Z077_9PROT Queuine tRNA-ribosyltransferase OS=Campylobacter hepaticus; OX = 1813019 GN=tgt PE=3 SV=1
MEFKLKHKDNMARVCQINTAHSSFLTPIFMPVGTLGAIKSLDANDIKNELDAKIILANTYHMYLRPGSKIIKDLGGLHGFTKFNRSFLTDSGGFQAFSLSKNSKHFDEGIEFKSHIDGSRHFFTPKNVLNAQYDFNSDIMMILDDLIALPADKKRIKISVDRTIAWAKEAINYHKIMQNQGIGLKQNIFGIIQGGTDYEERKRCALALNEMPFDGIAIGGLSVGEENSLMYETVQNLNPFMDENRPRYLMGVGTPEDLVENVERGIDMFDCVMPTRNARNGTFFTNFGKFNIKKTEFINDHEPIDQTCSCYTCRNFSRAYLNHLFKAKELTFFRLASLHNLYYYLELTKQMQKAILSNSFSQFKKEFYTKRRK

SEQ ID NO: 53105 - protein, 372 aa, Campylobacter hominis
  REGION 1..372: note = sp|A7I2I6|TGT_CAMHC Queuine tRNA-ribosyltransferase; OS = Campylobacter hominis (strain ATCC BAA-381 / LMG 19568 / NCTC 13146 / CH001A) OX=360107 GN=tgt PE=3 SV=1
MKFQIDKTDGNARACTITTAHSVIKTPIFMPVGTVGAVKSLDALDLKEILDAKIILANTYHMFLRPGSKIVKEFGGLHGFTKFDRSFLTDSGGFQAFSLRTNTKNDDDGIHFKSHIDGSLHYFTPTSVLDTQYDFGSDIMMILDDLVALPADPKRVKLSIERTIKWAKKAINYHLQKRESGVGLNQNIFGIIQGGTDENARKFCAQSLCELPFDGLAIGGLSVGETNREMYDTVEAVMPYIDSARPRYLMGVGTPEDIVENVERGVDMFDCVMPTRNARNGTLFTSFGKINIKSARFIHDDTPIDPCCDCYTCKNYSRGYLNHLYRAREITFYRLASLHNLHYYLHLVSDIRTAILEGKFLEFKKDFYSKRS

SEQ ID NO: 53106 - protein, 374 aa, Campylobacter hyointestinalis
  REGION 1..374: note = tr|A0A330FEC3|A0A330FEC3_CAMHY Queuine tRNA-ribosyltransferase OS=Campylobacter hyointestinalis subsp. lawsonii OX=91353 GN=tgt PE=3 SV=1
MNFKIDKTDGNARACTIKTAHSTIQTPIFMPVGTLGAVKSLDAIDLKEILDTKIILANTYHLYLRPTSKVVREFGGLHGFSKFDRSFLTDSGGFQAFSLSKISKPDENGIKFKSHIDGSTHYFTPKSVLDTQYDLGSDIMMILDDLVALPASFERVELSIKRTINWAKIASEYHKSNKQKGVGIDQNIFGIIQGGTDYNARKFCAEALCEMEFDGLAIGGLSVGESNEEMYDTVEAVMPFIDKDRPRYLMGVGTPEDLVENVERGVDMFDCVMPTRNARNGTLFTSFGKVNIKAAAFIKDDNKIDPQCDCYTCSNFSRGYLNHLYKARELTFFRLASLHNLHYYLNLVKQMREAIMQGKFKEFKKEFYSKRGVL

SEQ ID NO: 53107 - protein, 374 aa, Campylobacter hyointestinalis
  REGION 1..374: note = tr|A0A2S5J6D2|A0A2S5J6D2_CAMHY Queuine tRNA-ribosyltransferase OS=Campylobacter hyointestinalis subsp. hyointestinalis OX=91352 GN=tgt PE=3 SV=1
MNFKIDKTDGNARACTLKTAHSTIQTPIFMPVGTLGVVKSLDAIDLKEILDTKIILANTYHLYLRPTSKVVREFGGLHGFSKFDRSFLTDSGGFQAFSLSKISKPDENGIKFKSHIDGSTHYFTPKSVLDTQYDLGSDIMMILDDLVALPASFERVELSIKRTINWAKIASEYHKSNKQKGVGESQNIFGIIQGGTDYNARKFCAEALCEMEFDGLAIGGLSVGESNEEMYDTVEAVMPFIDKDRPRYLMGVGTPEDLVENVERGVDMFDCVMPTRNARNGTLFTSFGKVNIKAAAFIKDDNKIDPQCDCYTCSNFSLGYLNHLYKARELTFFRLASLHNLHYYLNLVKQMREAIMQGKFKEFKKEFYAKRGVL

SEQ ID NO: 53108 - protein, 376 aa, unidentified
  source 1..376: note = Campylobacter iguaniorum
  REGION 1..376: note = tr|A0A076FB96|A0A076FB96_9PROT Queuine tRNA-ribosyltransferase OS=Campylobacter iguaniorum; OX = 1244531 GN=tgt PE=3 SV=1
MNFKIDKTDGNARACTIQTAHSTIQTPIFMPVGTVGAVKSLDATDLKEILDAKIILGNTYHLYLRPTSKVVREFGGLHGFSKFDRSFLTDSGGFQAFSLSKISKPDENGIKFKSHIDGSMHYFTPKSVIDTQYDLGSDIMMILDDLVALPATKERIELSIKRTIKWAKEASLYHEENKQKGIGVNQNIFGIIQGGTDFEARRFCAEALCEMSFDGLAIGGLSVGESNQQMYDTVEAVMPHIDPKRPRYLMGVGTPEDLVENVERGVDMFDCVMPTRNARNGTLFTTFGKINIKSAAFINDHLPIDPDCDCYTCKRYSRGYLNHLYKARELTFFRLASLHNLHYYLNLVKQMRQAIMQGKFKEFKKAFYAKRGVYDK

SEQ ID NO: 53109 - protein, 373 aa, Campylobacter insulaenigrae
  REGION 1..373: note = tr|A0A0A8H019|A0A0A8H019_9PROT Queuine tRNA-ribosyltransferase OS=Campylobacter insulaenigrae NCTC 12927 OX=1031564 GN=tgt PE=3 SV=1
MQFKVEYKSANARACRIKTSHSEILTPIFMPVGTLAAVKSLDAVDMNEILNAKIILANTYHLYLRPGSKIINKMGGLHGFSKFNGSFLTDSGGFQAFSLNKNSKPNEGGIEFKSHIDGSLHYFTPQSVLDAQYDFNSDIMMILDDLVALPATKERIDLSLKRTIKWAKEAIKYHKMKQNQGIGIGQNIFGIIQGGVDFEARKQCSLSLCEMDFDGLAIGGLSVGEENQVMYDTIEAMMPFVDEDRPRYLMGVGTPEDLVENVSRGVDMFDCVMPTRNARNGTFFTSFGKFNIKKSDFITDYLPIDPKCSCYTCKNFSRAYLNHLFKAKELTFFRLASLHNLHYYLDLARQMREAIIKDEFEKFKKEFYSQRMT

SEQ ID NO: 53110 - protein, 373 aa, Campylobacter jejuni
  REGION 1..373: note = sp|Q9PNT0|TGT_CAMJE Queuine tRNA-ribosyltransferase; OS = Campylobacter jejuni subsp. jejuni serotype O:2 (strain ATCC 700819 / NCTC 11168) OX=192222 GN=tgt PE=3 SV=1
MEFKLKHKDGMARVCEITTAHSTFLTPVFMPVGTVGAVKSLDANDMKNELDAKIILANTYHMYLRPTSKVVKDFGGLHGFTKFDRSFLTDSGGFQAFSLSKNSKHFNEGIEFKSHIDGSRHLFTPKSVLDTQYDFNSDIMMILDDLVALPATKERVKISVDRTILWAKEAITYHKNMQNKGIGIGQNIFGIIQGGTDYEERKRCALSLNEMPFDGLAIGGLSVGEENALMYETVQNLNPYLDENRPRYLMGVGTPEDLVENVERGVDMFDCVMPTRNARNGTFFTSFGKFNIKKAEFINDHEVIDSTCSCYTCRNFSRGYLNHLFKAKELTFFRLASLHNLHYYLELARKMREAILNNSFTQFKRNFYHLRGK

SEQ ID NO: 53111 - protein, 373 aa, Campylobacter jejuni
  REGION 1..373: note = sp|A8FM59|TGT_CAMJ8 Queuine tRNA-ribosyltransferase; OS = Campylobacter jejuni subsp. jejuni serotype O:6 (strain 81116 / NCTC 11828) OX=407148 GN=tgt PE=3 SV=1
MEFKLKHKDGMARVCEITTAHSTFLTPVFMPVGTVGAVKSLDANDMKNELDAKIILANTYHMYLRPTSKVVKDFGGLHGFTKFDRSFLTDSGGFQAFSLSKNSKHFNEGIEFKSHIDGSRHLFTPKSVLDTQYDFNSDIMMILDDLVALPATKERVKISVDRTILWAKEAITYHKSMQNKGIGIGQNIFGIIQGGTDYKERKRCALSLNEMPFDGLAIGGLSVGEENALMYETVQNLNPYLDENRPRYLMGVGTPEDLVENVERGVDMFDCVMPTRNARNGTFFTSFGKFNIKKAEFINDHEAIDPACSCYTCCNFSRGYLNHLFKAKELTFFRLASLHNLHYYLELARKMREAILNNSFTQFKRNFYHLRGK

SEQ ID NO: 53112 - protein, 372 aa, Campylobacter lanienae
  REGION 1..372: note = tr|A0A562Y7S3|A0A562Y7S3_9PROT Queuine tRNA-ribosyltransferase OS=Campylobacter lanienae OX=75658; GN = tgt PE=3 SV=1
MEFKIDKISQNARACTIKMAHGVVQTPVFMPVGTLGAIKSLDAIDMGEILKAKIILANTYHLYLRPGSKVIRGFGGLHGFSKFGGNFLTDSGGFQAFSLSHRSKADENGIKFKSHIDGSLHYFTPKSVLDTQYDLGSDIMMILDDLVALPATKERIELSLKRTIKWAKEAEIYHKNQKANGVGVNQNLFGIIQGGTDYKARKECAMALCDMDFDGLAIGGLSVGESNEQMYDTVEGVMPYIDPNRPRYLMGVGTPEDLVENVSRGVDMFDCVMPTRNARNGTLFTSFGKLNIKAAAFINDHEPIDLECRCYTCKRYSRGYLNHLYKAKELTFFRLASLHNLHYYLNLMKEMREAIMADKFIEFRAKFYAKRA

SEQ ID NO: 53113 - protein, 375 aa, Campylobacter lanienae
  REGION 1..375: note = tr|A0A381D929|A0A381D929_9PROT Queuine tRNA-ribosyltransferase OS=Campylobacter lanienae OX=75658; GN = tgt PE=3 SV=1
MEFKIDKISQNARACTIKMAHGVVQTPVFMPVGTLGAIKSLDAVDMSEILGAKIILANTYHMYLRPGSKVIRGFGGLHGFSKFGGNFLTDSGGFQAFSLSHRSKPDENGIKFKSHIDGSLHYFTPKSVLDTQYDLGSDIMMILDDLVALPATKERIELSLKRTIKWAKEAEIYHKSQKSKGIGVDQNLFGIIQGGTDYNARKECAMALCDMDFDGLAIGGLSVGESNEQMYDTVEGVMPYIDPNRPRYLMGVGTPEDLVENVSRGVDMFDCVMPTRNARNGTLFTSFGKLNIKAAAFINDHEPIDNECQCYTCKRYSRGYLNHLYKAKELTFFRLASLHNLHYYLNLMKEMREAIMADKFIEFKMEFYAKRALTK

SEQ ID NO: 53114 - protein, 373 aa, Campylobacter lari
  REGION 1..373: note = sp|B9KFT3|TGT_CAMLR Queuine tRNA-ribosyltransferase; OS = Campylobacter lari (strain RM2100 / D67 / ATCC BAA-1060) OX=306263 GN=tgt PE=3 SV=1
MEFKVEYKSANARACRIKTTHSEILTPAFMPVGTLAAIKSLDAIDMSEILDAKIILANTYHLYLRPSSKVIKQMGGLHGFSKFDRSFLTDSGGFQAFSLNKISKPDEEGIKFKSHIDGSLHYFTPKSVLDAQYDFNSDIMMILDDLVALPASKERIELSLKRTIKWAKEAIDYHKLKQNQGVGMGQNIFGIIQGGTDFEARRICSQALCEMDFDGLAIGGLSVGEENEVMYDTVEAMMPYVDNNRPRYLMGVGTPEDLVENVARGVDMFDCVMPTRNARNGTLFTSFGKFNIKKAEFITDHSPIDSKCSCYTCKNFSRAYLNHLFKAKELTFFRLASLHNLHYYLNLAKQMREAIIKNEFENFKKEFYRQRTC

SEQ ID NO: 53115 - protein, 373 aa, Campylobacter lari
  REGION 1..373: note = tr|A0A0A8HU74|A0A0A8HU74_CAMLA Queuine tRNA-ribosyltransferase OS=Campylobacter lari NCTC 11845; OX = 1388749 GN=tgt PE=3 SV=1
MEFEVQYKSANARACRIKTTHSEILTPIFMPVGTLAAIKSLDAIDMSEILNAKIILANTYHLYLRPGSKVIKQMGGLHGFSKFKGSFLTDSGGFQAFSLSKNSKPDEKGIQFKSHIDGSLHYFTPQSVLDAQYDFNSDIMMILDDLVALPASKERIELSLKRTIKWAKEAIDYHKLKQSQGIGIGQNIFGIIQGGTDFEARKICSQVLCEMDFDGLAIGGLSVGEENEAMYDTVEAMMPYVDNNRPRYLMGVGTPEDLVENVARGVDMFDCVMPTRNARNGTLFTSFGKFNIKKAEFITDHAPIDNKCSCYTCKNFSRAYLNHLFKAKELTFFRLASIHNLHYYLNLVKQMREAIIKDEFENFRKEFYRQRIC

SEQ ID NO: 53116 - protein, 373 aa, unidentified
  source 1..373: note = Campylobacter ornithocola
  REGION 1..373: note = tr|A0A1C2FST5|A0A1C2FST5_9PROT Queuine tRNA-ribosyltransferase OS=Campylobacter ornithocola; OX = 1848766 GN=tgt PE=3 SV=1
MEFEVQYKSANARACRIKTTHSEILTPIFMPVGTLAVIKSLDAIDMSEILNAKIILANTYHLYLRPGSKVIKQMGGLHGFSKFNGSFLTDSGGFQAFSLSKNSKPDEKGIQFKSHIDGSLHYFTPQSVLDAQYDFNSDIMMILDDLVALPASKERIELSLKRTIKWAKEAIDYHKLKQSQGVGIGQNIFGIIQGGTDFEARKICSQALCEMDFDGLAIGGLSVGEENEVMYDTVEAMMPYVDNNRPRYLMGVGTPEDLVENVARGVDMFDCVMPTRNARNGTLFTSFGKFNIKKAEFITDHAPIDNKCSCYTCKNFSRAYLNHLFKAKELTFFRLASIHNLHYYLNLVKQMREAIIKDEFENFRKEFYRQRIC

SEQ ID NO: 53117 - protein, 372 aa, Campylobacter peloridis
  REGION 1..372: note = tr|A0A0A8GR78|A0A0A8GR78_9PROT Queuine tRNA-ribosyltransferase OS=Campylobacter peloridis LMG 23910 OX=1388753 GN=tgt PE=3 SV=1
MEFEVQYKSANARACRIKTTHSEILTPIFMPVGTLAAIKSLDAIDMSEILNAKIILANTYHLYLRPGSKVIKQMGGLHGFSKFEGSFLTDSGGFQAFSLSKNSKPDECGIKFKSHIDGSLHYFTPQNVLDAQYDFNSDIMMILDDLVALPASKERIELSLKRTIKWAKEAIDYHKIKQNQGIGIGQNIFGIIQGGTDFEARKICSEALCEMEFDGLAIGGLSVGEENKAMYDTVEAMMPYVDENRPRYLMGVGTPEDLVENVSRGVDMFDCVMPTRNARNGTLFTSFGKFNIKKAEFITDHTPIDPKCSCYTCRNFSRAYLNHLFKAKELTFFRLASLHNLHYYLNLVKQMREAIIKNEFENFKKEFYRQRS

SEQ ID NO: 53118 - protein, 372 aa, Campylobacter peloridis
  REGION 1..372: note = tr|A0A5C7DKM5|A0A5C7DKM5_9PROT Queuine tRNA-ribosyltransferase OS=Campylobacter peloridis; OX = 488546 GN=tgt PE=3 SV=1
MEFEVQYKSANARACRIKTTHSEILTPIFMPVGTLAAIKSLDAIDMSEILNAKIILANTYHLYLRPGSKVIKQMGGLHGFSKFNGSFLTDSGGFQAFSLSKNSKPDECGIKFKSHIDGSLHYFTPQSVLDAQYDFNSDIMMILDDLVALPASKERIELSLKRTIKWAKEAIDYHKIKQKQGIGIGQNIFGIIQGGTDFEARKICSQALCEMDFDGLAIGGLSVGEENEAMYDTVEAMMPYVDENRPRYLMGVGTPEDLVENVSRGVDMFDCVMPTRNARNGTLFTSFGKFNIKKAEFITNHTPIDPKCSCYTCRNFSRAYLNHLFKARELTFFRLASLHNLHYYLNLVKQMREAIIKNEFEKFKKEFYRQRS

SEQ ID NO: 53119 - protein, 375 aa, unidentified
  source 1..375: note = Campylobacter pinnipediorum
  REGION 1..375: note = tr|A0A1S6TPS9|A0A1S6TPS9_9PROT Queuine tRNA-ribosyltransferase OS=Campylobacter pinnipediorum subsp. pinnipediorum OX=1660067 GN=tgt PE=3 SV=1
MKFDIVAKDSNARAGIIQTAHSMIQTPVFMPVGTVGAVKSLDALDMKETLNANIILANTYHMYLRPGSKIVKEFGGLHGFTKFDRSFLTDSGGFQAFSLRSNTKNDDGGIKFKSHIDGSMHYFTPKSVLDTQYDFGSDIMMILDDLVALPADKKRVELSLHRTIKWAKEAIDYHKLKQSQGIGVNQNIFGIIQGGTDYEARKKCATEISQMDFDGLAIGGLSVGESNQEMYDTVEAVMPFIDQNRPRYLMGVGTPEDLVENVGRGVDMFDCVMPTRNARNGTLFTSFGKINIKSAKFINDHMPIDPECQCYTCKNYSRGYLNHLFKARELTFFRLASLHNLHYYLNLMKEIREAIIKGEFAKFKIKFYAKRNIQK

SEQ ID NO: 53120 - protein, 375 aa, unidentified
  source 1..375: note = Campylobacter pinnipediorum
  REGION 1..375: note = tr|A0A1S6U858|A0A1S6U858_9PROT Queuine tRNA-ribosyltransferase OS=Campylobacter pinnipediorum subsp. caledonicus OX=1874362 GN=tgt PE=3 SV=1
MKFDIVAKDSNARAGVIQTAHSTIQTPVFMPVGTVGAVKSLDALDMKETLNANIILANTYHMYLRPGSKIVKEFGGLHGFTKFDRSFLTDSGGFQAFSLRSNTKNDDGGIKFKSHIDGSMHYFTPKSVLDTQYDFGSDIMMILDDLVALPADKKRVELSLHRTIKWAKEAIDYHKFKQSQGIGVNQNIFGIIQGGTDYEARKKCAIEISQMDFDGLAIGGLSVGESNQEMYDTVEAVMPFIDKNRPRYLMGVGTPEDLVENVERGVDMFDCVMPTRNARNGTLFTSFGKINIKSAKFINDHMPIDPECQCYTCKNYSRGYLNHLFKARELTFFRLASLHNLHYYLNLMKEIRESIIKGEFTKFKIKFYAKRNIQK

SEQ ID NO: 53121 - protein, 378 aa, Campylobacter rectus
  REGION 1..378: note = tr|B9D297|B9D297_CAMRE Queuine tRNA-ribosyltransferase OS=Campylobacter rectus RM3267; OX = 553218 GN=tgt PE=3 SV=1
MTFSIDKTDGVARAGTLTTAHSTIKTPVFMPVGTVGAVKSLDAVDMMQILGAQIILGNTYHLYLRPGSKVVKELGGLHGFTKFNRSFLTDSGGFQAFSLSKISKPDENGIKFKSHIDGSAHYFTPRSVLDTQYDLNSDIMMILDDLVALPAEKKRVELSIKRTIKWAREAIDYHKFKQDKGEGLTQNIFGIIQGGTDEAARKFCAEALCEMPFDGLAIGGLSVGESNQEMYDTVQAVMPYIDAARPRYLMGVGTPEDLVENVARGVDMFDCVMPTRNARNGTLFTSFGKINIKSAKFAADPAPIDPQCDCYACRNYSRAYLSHLYRAGELTFFRLASLHNLHYYLNLMRQMREAITAGEFEKFRRNFYAKRGKDAPSI

SEQ ID NO: 53122 - protein, 378 aa, Campylobacter rectus
  REGION 1..378: note = tr|A0A3P1X7G4|A0A3P1X7G4_CAMRE Queuine tRNA-ribosyltransferase OS=Campylobacter rectus OX=203; GN = tgt PE=3 SV=1
MTFSIDKTDGAARAGTLITAHSTIKTPVFMPVGTVGAVKSLDAVDMMQILGAQIILGNTYHLYLRPGSKVVKELGGLHGFTKFNRSFLTDSGGFQAFSLSKISKPDENGIKFKSHIDGSAHYFTPRSVLDTQYDLNSDIMMILDDLVALPAEKKRVELSIKRTIKWAREAIDYHKFKQNNGEGLTQNIFGIIQGGTDEAARKFCAEALCEMPFDGLAIGGLSVGESNQEMYDTVQAVMPYIDAARPRYLMGVGTPEDLVENVARGVDMFDCVMPTRNARNGTLFTSFGKINIKSARFATDRAPIDPQCDCYACQNYSCAYLSHLYRAGELTFFRLASLHNLHYYLNLMRQMREAIMAGEFEKFRRNFYAKRGKDAPSI

SEQ ID NO: 53123 - protein, 378 aa, Campylobacter showae
  REGION 1..378: note = tr|C6RFF3|C6RFF3_9PROT Queuine tRNA-ribosyltransferase OS=Campylobacter showae RM3277; OX = 553219 GN=tgt PE=3 SV=1
MTFSIDKTDGAARAGTLITAHSTIKTPVFMPVGTVGVVKSLDAVDMMQILGAQIILGNTYHLYLRPSSKVVKELGGLHGFTKFNHSFLTDSGGFQAFSLSKISKPDENGIKFKSHIDGSAHYFTPRSVLDTQYDLNSDIMMILDDLVALPAEKKRVELSIKRTIKWAREAIDYHKFKQSKGEGLTQNIFGIIQGGTDEAARKFCAEALCEMPFDGLAIGGLSVGESNQEMYDTVQGVMPYIDAARPRYLMGVGTPEDLVENAARGVDMFDCVMPTRNARNGTLFTSFGKINIKSAKFATDRAPIDPQCNCYACQNYSRAYLSHLYRAGELTFFRLASLHNLQYYLNLMKQMREAIIAGEFEKFRRNFYAKRGKDAPSI

SEQ ID NO: 53124 - protein, 374 aa, Campylobacter showae
  REGION 1..374: note = tr|M5IR57|M5IR57_9PROT Queuine tRNA-ribosyltransferase OS=Campylobacter showae CSUNSWCD; OX = 1244083 GN=tgt PE=3 SV=1
MTFSIDKTDGAARAGTLTTAHSTIKTPVFMPVGTVGAVKSLDAVDMMQILDAQIILGNTYHLYLRPGSKVVKELGGLHGFTKFNRSFLTDSGGFQAFSLSKISKPDENGIKFKSHIDGSTHYFTPRSVLDTQYDLNSDIMMILDDLVALPAEKKRVELSIKRTIKWAREAIDYHKFKQNKGEGLTQNIFGIIQGGTDEAARKFCAEALCEMPFDGLAIGGLSVGESNQEMYDTVQAVMPYIDAARPRYLMGVGTPEDLVENVARGVDMFDCVMPTRNARNGTLFTSFGKINIKSARFATDRAPIDPECECYACQNYSRAYLSHLYRAGELTFFRLASLHNLHYYLNLMKQMREAIKDGKFAEFRREFYAKRQAK

SEQ ID NO: 53125 - protein, 372 aa, Campylobacter sp.
  REGION 1..372: note = tr|A0A1X9SWQ1|A0A1X9SWQ1_9PROT Queuine tRNA-ribosyltransferase OS=Campylobacter sp. RM6137; OX = 1660073 GN=tgt PE=3 SV=1
MEFKIDKISQNARACTIKMAHGIIKTPVFMPVGTLGAIKSLDAVDMSEILDAKIILANTYHLYLRPGSKVVKGFGGLHGFSGFDRNFLTDSGGFQAFSLSHRSKADENGIKFKSHIDGSLHYFTPKSVLDTQYDLGSDIMMILDDLVALPATKERIELSLKRTIKWAKEAQMYHKTQKANGVGAHQNLFGIIQGGTDYKARKECATALCDMEFDGLAIGGLSVGESNQQMYDTVQGVMPYIDPNRPRYLMGVGTPEDLVENVSRGVDMFDCVMPTRNARNGTLFTSFGKLNIKAAAFINDHEPIDQECQCYTCKRYSRGYLNHLYKARELTFFRLASLHNLHYYLNLMKQIREAIMADKFAEFRSEFYAKRA

SEQ ID NO: 53126 - protein, 376 aa, Campylobacter sp.
  REGION 1..376: note = tr|A0A4U7BPA4|A0A4U7BPA4_9PROT Queuine tRNA-ribosyltransferase OS=Campylobacter sp. MIT 17-664; OX = 2040646 GN=tgt PE=3 SV=1
MEFKLKYKDGMARVCEITTAHSTFETPIFMPVGTVGAVKSLDTNDLRNELNAKIILANTYHMYLRPGLEVIKNFKGLHGFTRFDRSFLTDSGGFQAFSLSKNSKHFNEGIEFKSHIDGSKHLFTPRSVLDIQYTFKSDIMMILDDLVALPANKERVKISVDRTILWAKEAIEYHKKMQKQNIGLDQNIFGIIQGGTDYEERKRCALALNEMEFDGLAIGGLSVGEENALMYETVENLNPFLDENRPRYLMGVGTPEDLVENVERGVDMFDCVMPTRNARNGTFFTSFGKFNIKKAEFVNDHDPIDKTCQCYTCRNFSRAYLNHLFKAKELTFFRLASLHNLYYYLDLVKQMREAIKKNEFNKFKKDFYSKRLNNAI

SEQ ID NO: 53127 - protein, 376 aa, Campylobacter sputorum
  REGION 1..376: note = tr|A0A381DKE4|A0A381DKE4_9PROT Queuine tRNA-ribosyltransferase OS=Campylobacter sputorum biovar sputorum OX=32024 GN=tgt PE=3 SV=1
MKFKIDKIDQNARACTIQTSHSTIQTPIFMPVGTLGAVKSLDANDLLDELDAKIILGNTYHLYLRPGSKIIKEFGGLHGFTKFNRSFLTDSGGFQAFSLRSNTKNDDLGIKFKSHIDGSMHYFTPKSVLDTQYDFNSDIMMILDDLPALPASKERIELSIKRTLSWAKIAIDYHEQNKQNGIGINQNIFGIIQGGTDYEARKLCSQSLCEMNFDGLAIGGLSVGESNNEMYDTVEAMMPFVDTNRPRYLMGVGTPEDIVENIERGVDMFDCVMPTRNARNGTLFTTFGKINIKSAKFINDQGPIDPNCNCYTCRNFSRGYLNHLFKSRELTFFRLASIHNLHYYLSLVKEAREAILQCKFSKFKKEFYAKRGKNEI

SEQ ID NO: 53128 - protein, 373 aa, Campylobacter subantarcticus
  REGION 1..373: note = tr|A0A0A8H8P8|A0A0A8H8P8_9PROT Queuine tRNA-ribosyltransferase OS=Campylobacter subantarcticus LMG 24374 OX=1388751 GN=tgt PE=3 SV=1
MEFEVQYKSANARACRIKTTHSEIVTPIFMPVGTLAAIKSLDAVDMSEILDARIILANTYHLYLRPGSKVIKQMGGLHGFSKFEGSFLTDSGGFQAFSLSKNSKPDEKGIQFKSHIDGSLHYFTPQSVLDAQYDFNSDIMMILDDLVALPASKERIELSLKRTIKWAKEAIDYHKLKQSQGVGIGQNIFGIIQGGTDFEARKICSQALCEMDFDGLAIGGLSVGEENEAMYDTVEAMMPYVDNNRPRYLMGVGTPEDLVENVARGVDMFDCVMPTRNARNGTLFTSFGKFNIKKAEFITDHAPIDSKCSCYTCKNFSRAYLNHLFKAKELTFFRLASIHNLHYYLNLVKQMREAIIKDEFENFRKEFYRQRMC

SEQ ID NO: 53129 - protein, 372 aa, Campylobacter upsaliensis
  REGION 1..372: note = tr|A0A381EIC4|A0A381EIC4_CAMUP Queuine tRNA-ribosyltransferase OS=Campylobacter upsaliensis; OX = 28080 GN=tgt PE=3 SV=1
MEFKLKYKDNNARVCEIKTAHSSFLTPIFMPVGTAAAVKSLDAYDMSEILKAKIILANTYHLYLRPSSKVIKNLGGLHHFTQFPYSFLTDSGGFQAFSLSKNSKHFEEGIKFKSHIDGSLHLFTPQSVLETQYDFNSDICMVLDDLVALPSSRARVELSVERTIKWAKEAINYHKFKQNEGEGLTQNVFGIIQGGTEFDLRKKCALELCEMDFDGLAIGGLSVGEENTLMYEVVENLTPFMDENRPRYLMGVGTPEDLVENVERGVDMFDCVMPTRNARNGTFFTSFGKFNIKRAEFINDNESIDKTCSCYTCQNYSRAYLNHLFRAKELTFFRLASLHNLHYYLNLVKQMQEAIMKNQFNEFKREFYAKRS

SEQ ID NO: 53130 - protein, 372 aa, Campylobacter upsaliensis
  REGION 1..372: note = tr|E6L916|E6L916_CAMUP Queuine tRNA-ribosyltransferase OS=Campylobacter upsaliensis JV21; OX = 888826 GN=tgt PE=3 SV=1
MEFKLKYKDNNARVCEIKTAHSSFLTPIFMPVGTAAAVKSLDAYDMSEILKAKIILANTYHLYLRPSSKVIKNLGGLHHFTQFPYSFLTDSGGFQAFSLSKNSKHFEEGIKFKSHIDGSLHLFTPQSVLETQYDFNSDICMVLDDLVALPSSRARVELSVERTIKWAKEAIDYHKFKQNEGEGLTQNVFGIIQGGTEFDLRKKCALELCEMDFDGLAIGGLSVGEENALMYEVVENLTPFMDEKRPRYLMGVGTPEDLVENVERGVDMFDCVMPTRNARNGTFFTSFGKFNIKKAEFINDNESIDKTCSCYTCQNYSRAYLNHLFRAKELTFFRLASLHNLHYYLNLVQQMREAIMKNQFSEFKREFYAKRS

SEQ ID NO: 53131 - protein, 372 aa, Campylobacter ureolyticus
  REGION 1..372: note = tr|A0A381E8D9|A0A381E8D9_9PROT Queuine tRNA-ribosyltransferase OS=Campylobacter ureolyticus; OX = 827 GN=tgt PE=3 SV=1
MEFNIDKIDGNARACTIKTTHSTIQTPIFMPVGTVGAVKSLDAFDLMQTLDAKIILANTYHMYLRPGSKIVKNFGGLHGFTKFNRSFLTDSGGFQAFSLSDISKPDENGIKFRSHIDGSKHYFTPKSVLDIQYDLGSDIMMILDDLVGLPATKKRVDESIKRTIKWAKEAIDYHKLNQNKGIGINQNLFGIIQGGTDYEARKFCAQKLCEMEFDGLAIGGLSVGESNEEMYDTVEGVMPFVDKNRPRYLMGVGTPEDLVENIERGVDMFDCVMPSRNARNGTLFTSFGKINIKGAKFINDHEPVDKTCNCHTCKNYSRAYLNHLYRSKELTFYRLATLHNLHYYLNLVKDAREAILKGKFSEFKKEFYSLRS

SEQ ID NO: 53132 - protein, 373 aa, Campylobacter ureolyticus
  REGION 1..373: note = tr|S3XR58|S3XR58_9PROT Queuine tRNA-ribosyltransferase OS=Campylobacter ureolyticus ACS-301-V-Sch3b OX=883165 GN=tgt PE=3 SV=1
MEFNIDKIDGNARACTIKTAHSTIQTPIFMPVGTVGAVKSLDAFDLMQTLDAKIILANTYHMYLRPGSKIVKNFGGLHGFTKFNRSFLTDSGGFQAFSLSDISKPDENGIKFRSHIDGSKHYFTPKSVLDTQYDLGSDIMMILDDLVGLPATKKRVDESIKRTIKWAKEAIDYHKLNQNKGVGIGQNLFGIVQGGTDYEARKFCAQKLCEMEFDGLAIGGLSVGESNEEMYDTVEGVMPFIDKNRPRYLMGVGTPEDLVENIERGVDMFDCVMPSRNARNGTLFTSFGKINIKGAKFINDHEPVDKTCNCHTCKNYSRAYLNHLYRSKELTFYRLATLHNLHYYLNLVKDAREAILKGKFSEFKKEFYSLRSL

SEQ ID NO: 53133 - protein, 373 aa, Campylobacter volucris
  REGION 1..373: note = tr|A0A5C8KXT6|A0A5C8KXT6_9PROT Queuine tRNA-ribosyltransferase OS=Campylobacter volucris; OX = 1031542 GN=tgt PE=3 SV=1
MEFKVEYKSSNARACRIKTSHSEILTPIFMPVGTLAAIKSLDAIDMSEILDAKIILANTYHLYLRPGSKIIKQMGGLHGFSKFDRSFLTDSGGFQAFSLSKNSKPDEEGIKFKSHIDGSLHYFTPKSVLDAQYDFNSDIMMILDDLVALPASKERIELSLKRTIKWAKEAIDYHKLKQSQGIGIGQNIFGIIQGGTDFEARKICSQALCEMSFDGLAIGGLSVGEENEAMYDTVEAMMPYVDENRPRYLMGVGTPEDLVENVSRGVDMFDCVMPTRNARNGTLFTSFGKFNIKKAEFITDNLPIDLKCSCYTCKNFSRAYLNHLFKAKELTFFRLASLHNLHYYLDLVKQMRQAIIKDEFENFKREFYRQRTC

SEQ ID NO: 53134 - protein, 373 aa, Campylobacter volucris
  REGION 1..373: note = tr|A0A5C7E5L9|A0A5C7E5L9_9PROT Queuine tRNA-ribosyltransferase OS=Campylobacter volucris; OX = 1031542 GN=tgt PE=3 SV=1
MEFKIEYKSSNARACCIKTSHSEILTPVFMPVGTLAAIKSLDAIDMSEILDAKIILANTYHLYLRPGSKIIKQMGGLHGFSKFNRSFLTDSGGFQAFSLSANSKPDEEGIKFKSHIDGSLHYFTPKSVLDAQYDFNSDIMMILDDLVALPASKERIDLSLKRTIKWAKEAIDYHKFKQSQGIGIEQNIFGIIQGGTDFEARKICAQALCEMSFDGLAIGGLSVGEENEAMYDTVEAMMPYVDENRPRYLMGVGTPEDLVENVSRGVDMFDCVMPTRNARNGTLFTSFGKFNIKKAEFITDNLPIDPKCSCYTCKNFSRAYLNHLFKAKELTFFRLASLHNLHYYLDLAKQMRQAIIKDEFENFKREFYRQRTC

SEQ ID NO: 53135 - protein, 377 aa, unidentified
  source 1..377: note = Campylobacteraceae bacterium
  REGION 1..377: note = tr|A0A1V4R5D3|A0A1V4R5D3_9PROT Queuine tRNA-ribosyltransferase OS=Campylobacteraceae bacterium 4484_166 OX=1956165 GN=tgt PE=3 SV=1
MRFDINFQSQKARATTIQTASSVIQTPVFMPVGTQATVKALDTNDIKNLQAKIVLANTYHLYLRPGYKLIKELGGLHKFTNYPHSFLTDSGGFQAFSLSKLNKNSVKVDENGIRFKSHIDGSTHYFTPISVLEAQYGFKSDIMMVLDDLISLPNTTKRILKSIQRTTSWAKISLDFHKLQQKKGIATTQNIFAIIQGGTDKNMRTISSKQLCELDFDGFAIGGLSVGEPNELMYDIVEHTTAYMPTHKPRYLMGVGTPIDLLECIHRGVDMFDCVMPTRNARNGTIFTNNGRLNIRNKEFISDDRPLEAGCECHSCRHYTRAYLNHLYKTKEMSYFRLASIHNIHYYMNLMRQAREAILQDNWFEFKTATIKKLQQK

SEQ ID NO: 53136 - protein, 379 aa, unidentified
  source 1..379: note = Campylobacteraceae bacterium
  REGION 1..379: note = tr|A0A1V4R820|A0A1V4R820_9PROT Queuine tRNA-ribosyltransferase OS=Campylobacteraceae bacterium 4484_166 OX=1956165 GN=tgt PE=3 SV=1
MKFDIDNICGSARAGTIVTKHSTITTPVFMPVGTQATVKALDGIDMTNLGAKIILANTYHLYLRPKSTTIRKAGGIHKFANYPYSFLTDSGGFQAFSLGKLQKNSVKQNEHGIEFRSHIDGSKHIFTPTSVLDTQYDIRSDIMMVLDDLVALPNSKKRIELSVNRTTKWAKQSILYHQQQQKKGIGLDQNIFAIIQGGTDKSLRTKSAKELCSLDGFDGFAIGGLSVGEANDIMYDIVSHTTQYMPSNKPRYLMGVGTPADLISCIDRGVDMFDCVMPTRNARNGTLFTKYGRINIRNSTYIDDFTAIEDDCSCYCCVNFTKAYLNHLYKTKELIYFRLATIHNIHYYLQLMRQARSAIIEDRWQEFKQKFFYDINLRK

SEQ ID NO: 53137 - protein, 373 aa, unidentified
  source 1..373: note = Campylobacterales bacterium
  REGION 1..373: note = tr|A0A258X145|A0A258X145_9PROT Queuine tRNA-ribosyltransferase OS=Campylobacterales bacterium 16-40-21 OX=1970501 GN=tgt PE=3 SV=1
MEFTIDATCGKARACTITTAHSTIQTPIFMPVGTVGSVKSLDMFDMNDILGAQIILANTYHTYLRPGDETIAAMGGLHGFTTYPKTFLTDSGGFQAFSLSDISKPTESGIEFKSHIDGSRHFFTPEKVIDIQNNLGSDIMMILDDLVALPATQERIKTSIDRTTQWAKQSIEYFRHKQSLGIGTQQNIFAIIQGGTDLNFRTQSANELCAMDYDGFAIGGLSVGESNNLMYDTVEHTTPLMPVNKPRYLMGVGTPEDLVENIERGIDMFDCVMPTRNARNGTLFTTYGRINIRGAKFKLDSEPIDPACECYTCKRYTRAYLHHLFRAKELTFFRLASLHNLHYYLWLVGEARKAIIAGQFSEFKKDFYARRQA

SEQ ID NO: 53138 - protein, 365 aa, unidentified
  source 1..365: note = Scalindua sp.
  REGION 1..365: note = tr|A0A286TV83|A0A286TV83_9BACT Queuine tRNA-ribosyltransferase OS=Candiadtus Scalindua japonica; OX = 1284222 GN=tgt PE=3 SV=1
MQFRLLASDNKTKARCGEITTNHGLIPTPAFMPVGTQATVKTLTPLQLQETEAHALLCNAYHLYLRPGHEVVKKLGGLHKFMKWDRSIITDSGGYQVFSLERLTKVTDDGVEFQSPIDGSRRFLNPEIVMDIQHALGADIIMAFDECLPYPCEKDRVRQSMYRTVKWANRCLKAHNSDDQELFAIVQGSVFKDIREECTDRLVEMEFNGYAIGGLSVGEGNLLMNEVLEYTTPRLPENKPRYLMGVGFPLDILDGIEHGIDLFDCVIPTRNGRNGCAFTSNGKLKIRNSCYKTDERPIDKNCHCYACKNFSRAYIRHLLTSNEILGLSLMSLHNICFFENMMKKARQSIIEGNFLNFKSKFLSLQ

SEQ ID NO: 53139 - protein, 378 aa, unidentified
  source 1..378: note = Unknown
  REGION 1..378: note = tr|A0A2M7TKX8|A0A2M7TKX8_9BACT Queuine tRNA-ribosyltransferase OS=candidate division WWE3 bacterium CG_4_10_14_0_2_um_filter_41_14 OX=1975072 GN=tgt; PE = 3 SV=1
MTVEKFAINSKDALTNARTGILNSRNGNIQTPCFLPDATRATVKHLSPTDLDDIGVQIILGNLYHLWLRPGVEVIEHMGGLHSFMNWHKPILTDSGGYQVFSLLHSKGLGKITQEGAYFTSHIDGKKLMLTPESSVSMQYRMGSDVILMLDESAPGTSSESYISQSVERTIAWAKRSKQTYENLNKDHDRFLFGIVQGGVYENQLIKSAQETVAIGFDGYALGGVAVGITADKLHDVMGYSIEHLPVDKPRYLLGAGYPNDIVRAVSLGVDVFDCVVPTRNARHGSLFTQNGKLCLTNAQFTTDPNPIDETCSCYACKNFSRAYIRHLIRVNEALGFRLTTIHNLTYYMWLMKTIRQTIENGTFSVFYKEIIGQYEKT

SEQ ID NO: 53140 - protein, 425 aa, unidentified
  source 1..425: note = Unknown
  REGION 1..425: note = tr|A0A2M7WYV9|A0A2M7WYV9_9BACT Queuine tRNA-ribosyltransferase (Fragment) OS=candidate division WWE3 bacterium CG_4_9_14_3_um_filter_43_9 OX=1975082; GN = tgt PE=3 SV=1
LPHGKVETPSFVPVGTQASVKALSSQELKEIGVKIFFGNTYHLFLRPGAQVIQKLGGIHKFMGWDGPIMTDSGGFQVFSLGLGKLKLKIEKEKLKIAGRYETPYENASPVCAGKLDPSVPIRRLRMTFKESKTGKNQFLAEFAEEGVRFKSHLDGSEHFLTPEKSIQIQKQLGADIILAFDDCTPYPVDYAYAELSMERTHRWAERSLKEFKRLRTKTKAGLRPQFLASGQSLYGVIQGSTFEDLRKKSARFIDALGTEGIAIGGMAVGESKKLMYKTLEWTIPELEEEKPRHLLGVGEVDDIFEAVERGVDTLDCVTPTRLARHKNLFVHPKIAALEKSKSRFNLIITNAKYAADKSPVDPLCQCVVCQNYSRAYLHHLYKSNEILGVRLGTYHNLYFLVSLMKQIREAIADNRFQRLKQEWLV

SEQ ID NO: 53141 - protein, 373 aa, unidentified
  source 1..373: note = Abawacabacteria bacterium
  REGION 1..373: note = tr|A0A1F4XLF7|A0A1F4XLF7_9BACT Queuine tRNA-ribosyltransferase OS=Candidatus Abawacabacteria bacterium RBG_16_42_10 OX=1817814 GN=tgt PE=3 SV=1
MFDFAITSKKITNTYARTGMFSTPHGNFETPIFMPVGTKGTVKTFTPEELVSLGAEIILGNTYHLYLRPGPEFLAERGGLHRWIHWDKPILTDSGGFQVFSLKKIRSITEDGVEFQSIHDGSKHFFTPEKVMEVQADIGADIIMAFDECAPGRVDMAYAKEAMDRTHRWLERCIAAQKRPKDQALFPIIQGVTYDDLRIESCKFVTQHDLPGIAIGGLAVGEAKDTTYRVLDTLAPYLPEHKPHYLMGVGSPEDLWESVHRGVDMFDCVLPTRVGRHGGVFTQTGRIDVKRNAYRTSDKPIDETCSCYTCKNYSLSYLRHLITENEILGARLCSFHNMHFLFEQIRHIRASIQDGTFLTQKEAFTRKYKYMGS

SEQ ID NO: 53142 - protein, 375 aa, unidentified
  source 1..375: note = Abyssubacteria bacterium
  REGION 1..375: note = tr|A0A3A4P0D8|A0A3A4P0D8_9BACT Queuine tRNA-ribosyltransferase OS=Candidatus Abyssubacteria bacterium SURF_5 OX=2093360 GN=tgt PE=3 SV=1
MKEDFAFQILKTDSRTRARAGRFITPHGAVDTPQFMPVGTQATVKTLTSEDLHLLGAQIILSNTYHLYLRPGHQIIQAAGGLHSFMNWPKPILTDSGGFQVFSLAELNKVTEDGVHFQSHIDGSRHFFTPELCMEIQNALGADIIMVFDECLPYPVEKDYARSSLQLTLQWAQRCKAAHNNRRQALFGIVQGATFHDLRIEAARRLVDMDFPGYAVGGLSVGETPQTMYEILDYTVEELPPQKPRYLMGSGPPADIFEAVERGIDMFDCVMPTRNARNASLMTSQGVVIVKNAEYASDFSPLDSECDCLTCRNYTRAYLRHLFKAGEITAMRLATLHNVRFMVTLLDNIRSAILSDSYSEFKRSFLEKYQRKVRP

SEQ ID NO: 53143 - protein, 377 aa, unidentified
  source 1..377: note = Abyssubacteria bacterium
  REGION 1..377: note = tr|A0A419F6J0|A0A419F6J0_9BACT Queuine tRNA-ribosyltransferase OS=Candidatus Abyssubacteria bacterium SURF_17 OX=2093361 GN=tgt PE=3 SV=1
MLMQANEFTFEVIRNDSGTRARVGKLTTPHGIVNTPQFIPVGTQAAVKTLSSEDLHTLGSEIILSNTYHLYLRPGHEVVRSAGGLHSFMNWPKPILTDSGGFQVFSLAELNKVTEDGVHFQSHLDGSRHFFTPELCMEVQNALGADIVMVFDECLPYPIEHDYAKASLRLTLNWAERCKKAHQNHQQALFGIVQGATFRDLRMECARELARMDFPGYAIGGLSVGETPQMMYEILDYTADELPAGKPRYLMGSGPPVDIFEAVERGIDLFDCVMPTRNARNASLMTSQGVVIVKNAEYAADFSALDPECSCITCQHYTRAYLRHLFKAGEITAMRLATLHNVHFMLTLLVQIREAILSDRYMEFKQSFLEKYRKSVD

SEQ ID NO: 53144 - protein, 369 aa, unidentified
  source 1..369: note = Accumulibacter sp.
  REGION 1..369: note = tr|A0A080M407|A0A080M407_9PROT Queuine tRNA-ribosyltransferase OS=Candidatus Accumulibacter sp. SK-02 OX=1453999 GN=tgt PE=3 SV=1
MNFELLASDGAARRGRLGLAHGCIETPVFMPVGTYGTVKAMTPRDLIETGTQICLGNTFHLWLRPGLEVIAAHAGLHRFMCWNGPILTDSGGFQVFSLGALRKISEEGVRFQSPINGDRLFLTPEESMRIQHVLDSDIVMILDECTPYPATRSEAASSMRLSLRWASRSRLQHDQLENGNALFGIVQGGMYEDLRDESLAGLAEIGFDGFAIGGLSVGEPKHEMARILAHSTPRLPQNKPRYLMGVGTPEDLVAAVQAGIDMFDCVLPTRNARNGHFFTRHGDVRIRNAKHKNDPRPLDESCGCYTCRNFSRAYLHHLNRVGEILAAQLGTLHNLHYYHQLMKELRDAISTGTLSAVVAAFHSRRCQQS

SEQ ID NO: 53145 - protein, 371 aa, unidentified
  source 1..371: note = Accumulibacter aalborgensis
  REGION 1..371: note = tr|A0A1A8XFR7|A0A1A8XFR7_9PROT Queuine tRNA-ribosyltransferase OS=Candidatus Accumulibacter aalborgensis OX=1860102 GN=tgt PE=3 SV=1
MKFALLANDGAARRGCLTLAHGSVDTPAFMPVGTYGTVKAMTPRDLTETGAQICLGNTFHLWLRPGLEVIAAHGGLHRFMCWNGPILTDSGGFQVFSLGALRKITEEGVRFQSPINGDRLFLTPEESMHIQHVLNSDIVMILDDCTPYPASHDQAATSMRLSLRWAQRSRATHDRLDNGNALFGIVQGGMYEDLRDESLAGLAEIGFDGFAIGGLSVGEPKGDMARILAHSAPRLPQDKPRYLMGVGTPEDLVAAVSAGIDMFDCVLPTRNARNGHLFTRHGDVRIRNARHKNDPRPLDEGCPCYTCRNFSRAYLHHLNRVGEILGAHLGTLHNLSYYHDLMRDLRTAIAGGTLAIAVSAFHRARAQEAQR

SEQ ID NO: 53146 - protein, 403 aa, unidentified
  source 1..403: note = Acetothermia bacterium
  REGION 1..403: note = tr|A0A3D3X2P3|A0A3D3X2P3_9BACT Queuine tRNA-ribosyltransferase OS=Candidatus Acetothermia bacterium OX=2053493 GN=tgt PE=3 SV=1
MYKLKRQDKRSPARTGLLKTAHGTVATPAFVAVATRATVKALEPQALTKIGVQIVIANSYHLHLRPGEETIATLGGLHRFSGWKGPTMTDSGGFQVFSLGAGKEHGVGKIGSIFPGEEPRPPTKREKQGKSLVKLSEEGAYFRSIIDGSEHFFSPEGVIELERKLGADIIFVLDECTSPLHDYTYTKGAMERTHRWAKRALNAFNELACDASFPNPDQILYGIVQGGAYKDLRHESATVIGGMDFGGFAIGGSLGRSKEEMHKVLDWTIPLLPEEKARHLLGIGEIEDIFAAVRRGIDTFDCAAPTRIARNGTVFFKDAPRHRINLRNSRFRDDPQPIDETCNCFTCCHHSRAYLRHLCLAGEFSFYRLATIHNLHFLVRLMQDIRAAIESDTLDKLENEWEN

SEQ ID NO: 53147 - protein, 402 aa, unidentified
  source 1..402: note = Acetothermia bacterium
  REGION 1..402: note = tr|A0A351JN22|A0A351JN22_9BACT Queuine tRNA-ribosyltransferase OS=Candidatus Acetothermia bacterium OX=2053493 GN=tgt PE=3 SV=1
MSSFRIIARVPGSAARRGELVTPHGTVQTPAFVAVATRGTVKALGIEDVLALGVEVLIGNTYHLALRPGADAIGPRGGLHGFTGWTGPWFTDSGGFQVFSLGAGKVHGVGKIASIFPGETPTKPVGESLVELTEDGARFRSVVDGSRVFFSPEGVIRLQRLLGADVVLPLDECTSPFHDRAYTGAAMERTHRWAERARVAFERTRGIGPNPGQALWGIVQGGAYEDLRRMSAKVIGGMGFPGFAIGGSLGRSKDDMLNVIEWTVDKLPPDPPRHLLGIGTVEDILAAVNLGVDTFDCAAPTRLARNGALLTFGEEGFRIAIKNARFRDDDRPVEEGCDCPTCARHSRAFLRHLLQTGELSYYRLATLHNVRFMARLMERVRAALAAGRFPTLDVLRERQRSE

SEQ ID NO: 53148 - protein, 377 aa, unidentified
  source 1..377: note = Acididesulfobacter guangdongensis
  REGION 1..377: note = tr|A0A519BHL3|A0A519BHL3_9DELT Queuine tRNA-ribosyltransferase OS=Candidatus Acididesulfobacter guangdongensis OX=2597225 GN=tgt PE=3 SV=1
MFEILKKDPLSNARTGKLRTKNETIDTPVFMPVGTLGTVKSISPLELYNEGFKIMLSNTYHLFLRPGMEVIEKFGSLRNFTNYKGAILTDSGGFQIFSLSKFAKISSGGAEFMSHIDGSVHIFTPERVVKLQETFDSDIIMPLDVFSGPGVSKKIAEKDLDITLEWAERSISAKNKEKNNLIFLISQGNFFDDLREKSAIYLSELNADGYAIGGLAVGEDKETMRDMLGISVSKLPENKPRYLMGVGTPEDIITAVSLGVDMFDCVLPSRNARTGFAFTSKGNLNIKNSVHKFEKQPIDDECGCYACLNFSRAYLRHAFMSKEIFSQRLLTIHNLHFYQNMILNIRRSINDGNFTDYKNDFLGKRQQTAVLPEDTSL

SEQ ID NO: 53149 - protein, 367 aa, unidentified
  source 1..367: note = Acididesulfobacter diazotrophicus
  REGION 1..367: note = tr|A0A519BN63|A0A519BN63_9DELT Queuine tRNA-ribosyltransferase OS=Candidatus Acididesulfobacter diazotrophicus OX=2597226 GN=tgt PE=3 SV=1
MFEILKKDSKSKARLGKLHTQNGIIDTPVFMPVGTLGTVKSVSPLELYNEGFKIMLSNTYHLFLRPGMEVIEKFGSLRNFINYKGAILTDSGGFQIFSLAKFAKISDDSVEFMSHIDGAIHVFTPEKVVKLQEVFDSDIIMPLDVFSGPEASKSRAEKDLDITLKWAEISINAKNKEKNNLIFLISQGNFFEDLREKSAIYLSELNADGYAIGGLAVGEDKETMYNMLNISASKLPENKPRYLMGVGTPEDIITAVSLGVDMFDCVLPTRNARTGSVFTSKGNLNIKNSIHKFEKQPIDDECNCYACSNFSRAYLRHVFMSKEIFSQRLLTIHNLHFYQNMIFNIRQSINNDNFMNYKNNFLEKRLK

SEQ ID NO: 53150 - protein, 369 aa, unidentified
  source 1..369: note = Acidulodesulfobacterium ferriphilum
  REGION 1..369: note = tr|A0A519BC76|A0A519BC76_9DELT Queuine tRNA-ribosyltransferase OS=Candidatus Acidulodesulfobacterium ferriphilum OX=2597223 GN=tgt PE=3; SV = 1
MFKIIKKDECTGARIAELSTKNGIIETPVFMPVGTIGTVKSLSPFEIYDEGFKVMLGNTYHLFLRPGIDIIKKFGSLRNFTRYKGMILTDSGGFQIFSLAKFAKVKDDGVSFMSHIDGETHFFTPERVVEIQEALDSDIMMQLDVFSGPEASRDKAEKDLDITIKWAERSMSAKKKDGNLLFLISQGNFFEDLREKSAKIMSGFDADGYAIGGLAVGETKEIMFKMLASSASNLPENKPRYLMGVGTPEDIINAVSLGVDMFDCVMPTRNARNGFVFTSSGTLNIKNSKYKSETGPLDAGCGCFCCKNFSAAYVRHIFMTKEIFSQRLLTLHNLHFYQNLIVKIRQAIKENSFLNMLNKINMQKPSSLF

SEQ ID NO: 53151 - protein, 361 aa, unidentified
  source 1..361: note = Actinomarina minuta
  REGION 1..361: note = tr|S5DM12|S5DM12_9ACTN Queuine tRNA-ribosyltransferase OS=Candidatus Actinomarina minuta; OX = 1389454 GN=tgt PE=3 SV=1
MNNIKVNTIVTDGKARLNEVTLNDKTFKTPMFMPVATKGALKSLPFKYLQQTDFILGNTYHLYLRPGLDVIREFNGLHNFIGWNKLILTDSGGFQGWSIPNKFNDDGIQFKNIYDGSKFFMDPKLSMDIQQTLNSDIAMILDSLIDIDSGYDAQLKSIDTTKRWARVAREYHSNTNQSLFGIVQGGRHKELREKSTNDMISLDFNGYAIGGLAIGESAEERKEIVNFTLEMLPKEKLRYVMGLGDINGMLELIELGVDMFDCVWPARLARHGKIINKGNFFNLKNNKFRVDSEPLVQGCTCYTCLNYSKAYLRHLLNNESTSSWFYLTLHNFVQTENILNEVRESILNSEFDKYKESIING

SEQ ID NO: 53152 - protein, 307 aa, unidentified
  source 1..307: note = Actinomarina minuta
  REGION 1..307: note = tr|S5DX66|S5DX66_9ACTN Queuine tRNA-ribosyltransferase (Fragment) OS=Candidatus Actinomarina minuta OX=1389454 PE=3 SV=1
ILGNTYHLYLRPGLDVIREFNGLHNFIGWNKLILTDSGGFQGWSIPNKFKDDGIQFKNIYDGSKFFMDPKLSMDIQQTLNSDIAMILDSLIDIDSGYDSQLKSIDTTKRWAREAREYHSNTNQSLFGIVQGGRHKELREKSTNDMISLDFNGYAIGGLAIGESPEERKEIVNFTVEMLPKEKLRYVMGLGDINGMLELIELGVDMFDCVWPARLARHGKIINKGNFFNLKNNKFRMDSEPLVQGCTCYTCLNYSKAYLRHLLINESTSSWFYLTLHNFVQTENILNEVRESILNSEFDKYKESIING

SEQ ID NO: 53153 - protein, 361 aa, unidentified
  source 1..361: note = Actinomarinales bacterium
  REGION 1..361: note = tr|A0A520VRX2|A0A520VRX2_9ACTN Queuine tRNA-ribosyltransferase OS=Candidatus Actinomarinales bacterium OX=2510331 GN=tgt PE=3 SV=1
MNNININILNTDGKARTSNLNVNGKVIKTPAFMPVATRGTIKSMPHIFLNNTDVLLANTYHLHLRPGSEVIKEIGGIHKFMNWDKVILTDSGGFQIWSLPTKINEGSVTFKNVYDGSYFEMTPEDSIKIQNNLGSDIAMILDCLINIDDTKDRQINSINLTREWGYKAREFHKNDKQALFGIIQGGTYKDLREMSAKYMIEQNYDGYAIGGLAIGETPNERKDIVSYTSALLPENKPKYVMGLGDISGLIDLIEEGIDLFDCVWPARLARHGKLIIGNSYINIKNEKYKADPTPISESCSCFSCKNFSKAYLRHLIQNENTSAWLYLTVHNLIQTEIILDEARESILESNFNKFKMKYKHE

SEQ ID NO: 53154 - protein, 361 aa, unidentified
  source 1..361: note = Actinomarinales bacterium
  REGION 1..361: note = tr|A0A520VZU9|A0A520VZU9_9ACTN Queuine tRNA-ribosyltransferase OS=Candidatus Actinomarinales bacterium OX=2510331 GN=EVA27_02255 PE=3 SV=1
MNKINLKTIATDGKARVNDVIINGKSLQTPTFMPVATRGAIKSLPLNYLEKTDVLLANTYHLYLRPGLDVIKEFEGLHNFIGWDNLILTDSGGFQGWSIPNKFNEDGIEFKNIYDGSKFFMDPILSMDIQNTLNSDIAMILDSLVDIDKDYNNQLQSINTTKEWAEVARNYHSNNNQSLFGIVQGGKFLELREKSSIDMVSLNFDGYAIGGLAIGETPEERKSIVDFTVDFLPKDKLRYVMGLGDIEGMINLIDSGIDMFDCVWPARLARHGKIINKGKFFNLKNSQFKNDTEPLVLACECFVCKKYSKAYLRHLLINESTSSWLYLTLHNIFQTENILSEVRKSILNSEFENYKESIING

SEQ ID NO: 53155 - protein, 419 aa, unidentified
  source 1..419: note = Adlerbacteria bacterium
  REGION 1..419: note = tr|A0A1F4Y0U2|A0A1F4Y0U2_9BACT Queuine tRNA-ribosyltransferase OS=Candidatus Adlerbacteria bacterium RIFCSPLOWO2_01_FULL_54_21b OX=1797245 GN=tgt; PE = 3 SV=1
MPGSLARAGILHTLHGDIKTPAFVAVGTKADVKGIQVAQFGELGIQTIIANTYHLYLSPGPELIEKAGGLHKFMGFDGPIMTDSGGFQVFSLGEGFGKKISKFLPPEAQVPTKGRDERDPNSLLQDLRAPAVYDEEIATSHGKLAIIDEEGVTFTSHIDGSLHRFTPERSIEIQHELGADIIFAFDECTSPAADEAYQKEAMDRTHRWADRSLKAHRQMSGKVRPSQKGLTFTPGIYGIVQGGKFEDLRIESATELAGMDFDGYGIGGSFSKDDILGILDKVNVVLPKEKPRHLLGIGEPEDIFIGVAAGIDTFDCVLPTRNGRTGGIYTKRGKIQIPNAGYKEDFGPLDTECGCPVCREHTRAYIHHLFRTKELLGPILASMHNLYFLTTLTARIRETILNGDFEEYRDSFLSGYKMR

SEQ ID NO: 53156 - protein, 419 aa, unidentified
  source 1..419: note = Adlerbacteria bacterium
  REGION 1..419: note = tr|A0A1F4Y1W9|A0A1F4Y1W9_9BACT Queuine tRNA-ribosyltransferase OS=Candidatus Adlerbacteria bacterium RIFCSPHIGHO2_02_FULL_54_18 OX=1797241 GN=tgt; PE = 3 SV=1
MPGSLARAGILHTPHGDIKTPAFVAVGTKADVKGIQAAQFGELGIQTIIANTYHLYLSPGPELIEKAGGLHKFMGFDGPIMTDSGGFQVFSLGEGFGKKISKFLPPEAQVPTKGRDERDPNSLLQDLRAPAVYDEEIATSHGKLAIIDEEGVTFTSHIDGSLHRFTPERSIEIQHELGADIIFAFDECTSPAADEAYQKEAMDRTHRWADRSLKAHRQMSGKVRPSQKGLTFTPGIYGIVQGGKFEDLRIESATELAGMDFDGYGIGGSFSKDDILGILDKVNVVLPKEKPRHLLGIGEPEDIFIGVAAGIDTFDCVLPTRNGRTGGIYTKRGKIQIPNAGYKEDFGPLDTECGCPVCREHTRAYIHHLFRTKELLGPILASMHNLYFLTTLTARIRETILNGDFEEYRDSFLSGYKMR

SEQ ID NO: 53157 - protein, 373 aa, unidentified
  source 1..373: note = Aegiribacteria bacterium
  REGION 1..373: note = tr|A0A1V4MZM2|A0A1V4MZM2_9BACT Queuine tRNA-ribosyltransferase OS=Candidatus Aegiribacteria bacterium MLS_C OX=1775674 GN=tgt PE=3 SV=1
MRPSFRLLTRSGKARRGVLELAHGRVETPVFMPVGTQASVKTARNSDLLRDDWRIILGNTYHLYLRPGEEILASAGGLHRFMSWDRNILTDSGGFQLFSLSDLRRRSEEGYRFQSHIDGSSHLLTPERVVELQKCFGSDVMMVLDECLEQPSDRTRTEESLELTLRWAERSRRMHREDSQAMFGIVQGGAYTDLRERAATVLSGMDFDGYAIGGVSVGEPRRLMMKAVRACIGHLPEDRPRYLMGVGRPEDLVDFTAEGVDMFDCVVPTRNARGGSFFVPGGHINIRNARFAADLSPVQPDCGCYTCSTYSRAYLRHLFMSREWLAPILATLHNLHYFSVLMGRIRMAVEERHFSAWRRDWHLERRDFDPGRF

SEQ ID NO: 53158 - protein, 375 aa, unidentified
  source 1..375: note = Aerophobetes bacterium
  REGION 1..375: note = tr|A0A497E3L0|A0A497E3L0_9BACT Queuine tRNA-ribosyltransferase OS=Candidatus Aerophobetes bacterium OX=2030807 GN=tgt PE=3 SV=1
MEFKLIHQDASSKARSGKIFTSHGIIDTPVFMPVGTQGTVKTVSPDELKEIDIRIILCNTYHLYLRPGPRIIKKLGGLHKFMSWEGAILTDSGGYQIFSISSLQRAEEDGVRFKSHLDGSEHFLSPEDVLRIQLDLDSDIIMVLDECTSYPITHREAEISLEKTIKWARRTKLAWLDVSREERGLFGIVQGSTFEDLRKRCAEELIDLGFDGYALGGLSVGEPYSLRKEIIEYTCSLLPPDRPRYLMGVGTPEEILEAISLGIDMFDCALPTRIARNGTVFTMEGRKVLKNAEYKEDPSPLDPECDCYTCRNYSRAYVRHLLWAREILGMRLTTYHNLYFLTKLMKKARKAIEEDRFEKFKEKFLSRYQYKNKES

SEQ ID NO: 53159 - protein, 229 aa, unidentified
  source 1..229: note = Aerophobetes bacterium
  REGION 1..229: note = tr|A0A1V5K518|A0A1V5K518_9BACT Queuine tRNA-ribosyltransferase OS=Candidatus Aerophobetes bacterium ADurb.Bin490 OX=1852830 GN=tgt PE=3 SV=1
MMVLDECPPYPAERKYIEESLDLTLAWAKRARDYHKSDTSFLFGIIQGGVHRDLREKSMEELFKMDFPGYSIGGVSVGEGKELIYQGVDWCAPFMPENKPRYLMGVGTPEDIWYAVEKGVDMFDCVFPTRIARNGAVYTKEGQISVRNGEYKEDFRPMDPGCGCYACQNYTRAYIRHLFNTHELLGMRLTTLHNIYFMLRLMDLIRKSIFEDRYEKAKEEFFSLYKLRS

SEQ ID NO: 53160 - protein, 357 aa, unidentified
  source 1..357: note = Amesbacteria bacterium
  REGION 1..357: note = tr|A0A0G0Y8J7|A0A0G0Y8J7_9BACT Queuine tRNA-ribosyltransferase OS=Candidatus Amesbacteria bacterium GW2011_GWA2_42_12 OX=1618356 GN=tgt PE=3 SV=1
MFGFEVTGKLKGRGRTGIIHTPHGDIKTPVFMPVGTNATVKSLSPEDLQDVGARIILANNYHLFLRPGSEVVQHMGGIHKFMNWPKPILTDSGGFQVWSLGMKYTEEGAFFKSHQSGLKYFWTPEDAIKSQVQIGADIIMAFDVCTPDKVSFQDTKNALDITHKWLVRCKNTMNHEPTNQSLFGIIQGGSHKELRIESAKFVVDQDLPGIAVGGETIGYNMDGTEEVMSWIEKLLPQNKPRYAMGLGLRPSDLIRAVECGFDMFDCVAPTRIARNGNLFNPEYPSERIDISKSEYKTNSNPIWQDCDCYTCKNYTLAYIHHLFKTKELLYYRLASIHNLRVMIKTLDDWVAKQSSAN

SEQ ID NO: 53161 - protein, 376 aa, unidentified
  source 1..376: note = Amesbacteria bacterium
  REGION 1..376: note = tr|A0A1F4Z260|A0A1F4Z260_9BACT Queuine tRNA-ribosyltransferase OS=Candidatus Amesbacteria bacterium RIFCSPLOWO2_01_FULL_47_33 OX=1797258; GN = A2972_01160 PE=3 SV=1
MIEFSDTGALKGFGRTGQITTPHGQISTPVFMPVGTAATVKSLSPLDLESVGAQIILVNNYHLYLRPGSESIAALGGIHKFMNWTLPVLTDSGGFQVQSLGKADIALAKITQDGVEFRSHLDGGTLHFLTPELAIRSQLQIGADIIMAFDDSVPAGADYKRAETAVRRTHDWLVRCIKEWRRLYTTSFPPPKLGGGIKEGGTPALFGIIQGGEFPDLLKQSAEFVISQNLPGVAIGGAVIGSDPRQTADAIAAVRELLPKDKPLYAMGVGVRPSDLKSVIVAGADMFDCVAPTRLARAGLLYNMQSPNERIDISQNKFRLDTNPIDKDCDCSACGQFTRAYLHHLFKSRELLYYRLASIHNLRMMIRTVEYISSIK

SEQ ID NO: 53162 - protein, 376 aa, unidentified
  source 1..376: note = Aminicenantes bacterium
  REGION 1..376: note = tr|A0A1F5AV00|A0A1F5AV00_9BACT Queuine tRNA-ribosyltransferase OS=Candidatus Aminicenantes bacterium RBG_13_64_14 OX=1797271 GN=tgt PE=3 SV=1
MSSAFRTTSEDPLSAARTGLLETPHGTVETPAFMPVGSQGTVKGLTHAQVEALGAQIILVNSYHLFLRPGVDAVAAMGGLHSFMSWPKPILTDSGGFQIYSLSPLVRTSDEGVRFSSHLDGTKIYLKPEDVVDLQVRLGTDVLMCLDHFPAYPYSAETMKESVRLTTAWAGRSKVRFAEIDTHQQLWGISQGGIYPDLRAKSIEDLLELGFSGYAFGGLGLGEPKTRLFETLEHGNLLLPRDRPRYLMGMGYVEDVVEAVARGVDFFDCVLPTRNARNGTLFTSRGRVAIKNRKYALDERPLDEACPCYTCHNFSRAYLHHLFERGEITAAVLHTIHNLHFYLDIFRKIRHSIQSNSFGLLKKSLISNASEKEETT

SEQ ID NO: 53163 - protein, 373 aa, unidentified
  source 1..373: note = Aminicenantes bacterium
  REGION 1..373: note = tr|A0A523WQW3|A0A523WQW3_9BACT Queuine tRNA-ribosyltransferase OS=Candidatus Aminicenantes bacterium OX=2052149 GN=tgt PE=3 SV=1
MKKTFEITASDSKSSARTGIIHTMHGPIKTPAFAPVASQGTVKALTHNLVQSLKAQLILANSYHLYLRPGLETIKKLGGLHSFISWTKPILSDSGGFQIYSLSPLVKVSKEGVTFSSHLDGTKIFLTPEDIIDIQLQLGTDIIMALDYFIPFPSSEEKMKGAVEITTLWAQRSQTHFLQHNSSQLLWGISQGSIYWNLRKQSIEDLLKVDFDGYALGGLGIGEPKSLFMEIVEKSDSLIPKEKPRYLMGIGYINDILDAIEKGIDLFDCVLPTRNARNGTLFTSKGKIAIKNKKYEHDHRPLDKECSCYTCQNYSRAYLRHLYERQEINSAVLNTIHNLHFYLDIFRKIRQAIQSNSYQQLKCSISSKKKEEE

SEQ ID NO: 53164 - protein, 374 aa, unidentified
  source 1..374: note = Amoebophilus sp.
  REGION 1..374: note = tr|A0A1Q3W7N3|A0A1Q3W7N3_9BACT Queuine tRNA-ribosyltransferase OS=Candidatus Amoebophilus sp. 36-38 OX=1895716 GN=tgt PE=3 SV=1
MQFELEHVDTSSKARAGIITTSHGKIHTPIFMPVGTAGTVKAVEQRNLHQDVAAEIILGNTYHLYLRPGTHVLEQAGGLHGFINWNKPILTDSGGYQVYSLTDRRKITEQGVTFYSHIDGSIHTFTPENVIDTQRSIGSDIMMVLDECTPHPCTYTYARQSMEMTHRWLQRGIDQFKKTTTATNNYQTLFPIVQGSIYKDLRLQSAETIAAMDQPGNAIGGVCHPTGQLYEVTDWVCSVLPAEKPRYLMGVGTPRDLLECIALGIDMFDCVMPTRSGRNGRLFTTQGIINIKNQQWKQDFSPIDSGLNSYVSNHYTKAYLYHLFKSQEILGAQLASIHNLTFYLWLVKEARKQILINNFVPWKNSIIKRIMERL

SEQ ID NO: 53165 - protein, 376 aa, unidentified
  source 1..376: note = Amulumruptor caecigallinarius
  REGION 1..376: note = tr|A0A4Q0UAR9|A0A4Q0UAR9_9BACT Queuine tRNA-ribosyltransferase OS=Candidatus Amulumruptor caecigallinarius OX=2109911 GN=tgt PE=3 SV=1
MDFKLQATDTQGAARAGLITTDHGQIETPIFMPVGTVGSVKGVHMRELRDDINAQIILGNTYHLYLRPGTEILRQAGGLHKFNGWDRPILTDSGGFQVFSLSANRKLKEEGAYFRSHIDGSKHLFTPEGVVDIQRSIGADIMMALDECPPGTSDYAYARKSLDLTHRWLRRGWERYTSTEGLYGYHQAYFPIVQGCTYPELRRESAKFVTDLGAEGNAIGGLAVGEPAEVMYDMIEVVNEILPADRPRYLMGVGTPANILEAIDRGVDMMDCVMPTRNGRNGMLFTPDGIMNMRNKKWADDFSPIDETSDCFVDRVYSKAYLRHLFIAQELLAMQIASIHNLAFYLWLVREARKHIIAGDFKTWKTGMMERVTRRL

SEQ ID NO: 53166 - protein, 399 aa, unidentified
  source 1..399: note = Andersenbacteria bacterium
  REGION 1..399: note = tr|A0A2M6WYR4|A0A2M6WYR4_9BACT Queuine tRNA-ribosyltransferase OS=Candidatus Andersenbacteria bacterium CG10_big_fil_rev_8_21_14_0_10_54_11 OX=1974485; GN = tgt PE=3 SV =1
MIEFRIHKQSTRSRARLGSLTTPHGTFETPAFVPVATQATVKTLTSEQALAAGSQLLIANTFHLHLKPSEDIVAGGGGLHQFMQWPRPLMTDSGGFQVFSLGFGRDHGVGKMLSEKRDEVIALGQQPSRINITERGVMFTSPVDGAKIYLDPKKSIDIQQKLGADIMFAFDEATSPVADKSYTRESLARTHRWAQESLAAKTSDQALFGIVQGGKFKELRLASARTIGGIPFDGFGIGGEYGNDKKTMLAIIKIVIDELPSAKPRHLLGIGHLEDIPQIIKAGVDTFDCIVPTHYARHGTAFANLGGRAALALRNFSGAKFGKVSHHRLDLTKRQFLTDQSPLDAACSCAVCKTYTRAYISHLVRAKEVTGLQLLTFHNLYFFNAYVTRLREQIRHEKI

SEQ ID NO: 53167 - protein, 289 aa, unidentified
  source 1..289: note = Andersenbacteria bacterium
  REGION 1..289: note = tr|A0A353CVZ6|A0A353CVZ6_9BACT Queuine tRNA-ribosyltransferase (Fragment) OS=Candidatus Andersenbacteria bacterium OX=2053502 GN=tgt PE=3 SV=1
MTDSGGFQVFSLGFGQDHGVGKVLKQKIDESVTIGQQPKNITITNEGVTFRSPVDGQKLFIGPPESIAIQQKLGADIIYTFDEATSPVANKEYTKVSLERTHNWAKQCLSAKTSNQALFGIVQGGKFTDLRKESAQFIGSLPFDGFGIGGEYGDDKTIMPEIIQTVLQELPPDKPRHLLGIGHLEDIPTIIKAGIDTFDCIVPTHYARHGTAFTSQGKLNLKNAIFMNDQKPLDPKCQCFVCQGYKRSYIAHLIKAQEITGLKLLTFHNLHLFNSYIADIRQQIKAGKI

SEQ ID NO: 53168 - protein, 370 aa, unidentified
  source 1..370: note = Annandia adelgestsuga
  REGION 1..370: note = tr|A0A3Q9CLW2|A0A3Q9CLW2_9ENTR Queuine tRNA-ribosyltransferase OS=Candidatus Annandia adelgestsuga OX=1302411 GN=tgt PE=3 SV=1
MKFKIYKKYKNARCGYIFLKNGIIKTPAFMPVGTYGIIKTLSTNELKEIGSDIILNNSLHMYLNCDINIIKKSGDLHNFMKWKKPIITDSGGFQIFSLKKKINIDNKKITFYHPTKGNIVNIDPKKSIYIQHILGSDISMVFDECIKYTTNYNKVYNSMQKSIYWSLISKEYFENINKKKYLFGILQGGIFKNLRDISIKENLKINFDGYAIGGLAVGEPKKDMFKIIKHTCLQIPENKPRYLMGVGNPTDIINSVYLGIDLFDCVIPTRNARNGYLFTNNGIIRIRNIKYKNNIYPIDINCFCYTCKNYSCSYLHYLDKRKETLGLRLNTIHNLYFYEKLMSNIRYYIYKNKFEYFVKNFYRKFNNFKN

SEQ ID NO: 53169 - protein, 361 aa, unidentified
  source 1..361: note = Aquarickettsia rohweri
  REGION 1..361: note = tr|A0A3R9ZQS5|A0A3R9ZQS5_9RICK Queuine tRNA-ribosyltransferase OS=Candidatus Aquarickettsia rohweri OX=2602574 GN=tgt PE=3 SV=1
MSIKFKILDSCNDSRTGIIYTANGQINTPVFMPVGTLATVKSMLPESLIKTGADIILGNTYHLMLRPGEDVISNLGGLHQFMNWQKPILTDSGGFQVMSLAKLRKISDDGVEFRSHIDGKKYFLSPKKSIEIQHKLDSNITMIFDECTPYPVNYEYAKESMHLSLKWARESKDNFIDREGYGIFGIIQGSIFEDLRKESTTKLKDIEFDGYAIGGLAVGEGHDEMLKVLDFTIPHTPNNKPRYLMGVGKPIDIVASVKKGIDMFDCVLPTRSGRNGQAFITGGTLNIKNNQYISDNSPLDKNCNCYTCKNYSKAYLNHLIRSKEILGSVLMTWHNISYYQNLMRKLRKLINNDTLYQYKNE

SEQ ID NO: 53170 - protein, 394 aa, unidentified
  source 1..394: note = Arcanobacter lacustris
  REGION 1..394: note = tr|A0A0F5MQ41|A0A0F5MQ41_9RICK Queuine tRNA-ribosyltransferase OS=Candidatus Arcanobacter lacustris OX=1607817 GN=tgt PE=3 SV=1
MYKNFKFTITHQDQKTPARCGEIHTPHGIVQTPNFIFCATKAAIKGVDLATMKQEGTQIILSNTYHLMLQPGSETIRALGGLHKMMNWDGPLLSDSGGYQIFSLGHGSVSNEIKGKRNSNRPQSLLKITEEGAKFKSYIDGSYHLLTPEKSIQIQRDLGVDFMVVLDECTPFNVTKEYTEKSMHMSHRWALRSLAEFKNHDDESQSLYGIVQGGIYDDLRKQSTDFVNENEFFAHAVGGSLGASKAQMHDIVAHTMSMLSKDRPVHLLGIGGVSDIFNGIKYGIDTFDCVHPTRLARHGGALVKVSMSENGKEHINIRNNRFKTDPNPIDSECKCSTCMRYSRGYLHHLFKAGEILGMQALTIHNVHFMNKLMLAVRGAIREDRVEEEQKIWCG

SEQ ID NO: 53171 - protein, 366 aa, unidentified
  source 1..366: note = Arthromitus sp.
  REGION 1..366: note = tr|A0A1B7LMW5|A0A1B7LMW5_9CLOT Queuine tRNA-ribosyltransferase OS=Candidatus Arthromitus sp. SFB-turkey OX=1840217 GN=tgt PE=3 SV=1
MAKRAEFKTVHGTIQTPVFMNVGTLGVIKGAVSTIDLEKINCQVELSNTYHLHIRPGDEIIKKLGGIHKFMNWQKPILTDSGGFQVFSLARLRDITERGVKFNSHIDGRKIFIGPEESIRIQSNLGSTIAMAFDECIPNPSTREYVSNSVSRTTRWLERCIVEMDRLNKQEDTVNKNQLLFGINQGGVYEDIRIEHAKIISEFDLPGYAIGGLAVGESTEEMYEVLDKVVPYLPRNKPIYLMGVGTPENILEAVERGVDFFDCVLPARNGRHGQVFTNKGKINLLNKKFELDDNPIDEECKCEACCNYSRAYIRHLFKAKEMLALRLCVLHNLNFYNTLLRDVRKSIELNEFSKFKKQKLEDWKMI

SEQ ID NO: 53172 - protein, 375 aa, unidentified
  source 1..375: note = Arthromitus sp.
  REGION 1..375: note = tr|G2IHL0|G2IHL0_9CLOT Queuine tRNA-ribosyltransferase OS=Candidatus Arthromitus sp. SFB-rat-Yit OX=1041504 GN=tgt PE=3 SV=1
MYKLLNVDGRARRGEFKTVHGTIQTPVFMNVGTQGVVKGAVSTMDLNKIDCQVELSNTYHLHLRPGDENIKKMGGLHKFINWNKPILTDSGGFQIFSLSKFRKITEERVEFNSHLDGKKIFIGPEESMKIQSNLASTIAMAFDECIPNPSERSYVIDSVFRTTRWLKRCIAEMDRLNKMDDTINPNQLLFGINQGGVYSDIRIEHAKQISDLDLPGYAIGGLAVGETKEEMYHIIDEVVPYLPKHKPIYLMGVGTPENILESIYRGVDFFDCVLPARNGRHGQLFTSTGKINLINKKFELDDRPIDEKCSCEACENYSRAYIRHLFKSKEMLSMRLCVLHNLNFYNKLLEESRKAIELNQFSNFKNQKFREWGIH

SEQ ID NO: 53173 - protein, 366 aa, unidentified
  source 1..366: note = Atelocyanobacterium thalassa
  REGION 1..366: note = tr|A0A086CFQ3|A0A086CFQ3_9CHRO Queuine tRNA-ribosyltransferase OS=Candidatus Atelocyanobacterium thalassa isolate SIO64986 OX=1527444 GN=tgt PE=3 SV=1
MKFSFQLQKKCCNTQARVGVYSTPHGIVETPRFMPVGTIAAVKGITPAQLQTTEVQMILANTYHLHLQPGENIIEKAGGLHKFMHWNGPILTDSGGFQVFSLSKLREISELGVTFRSPKDGRIIKLTPEKSINIQNALGADVIMAFDECPPGNANYQTVEAATNRTYRWLKRCIEAHSRTKEQALFGIVQGGTYPKLRLKAISSLIELNLPGYAIGGVSVGEEPSLIQDIVQFSAPLLPENKPRYLMGVGTYKEIAMAIASGIDLFDCVIPTRFGRHGTALVAGERWNLKNSKFREDFMPLDEECTCYTCQNFTRAYLNHLIRSQEVLGYTLLSLHNITELVKFTQNIRKSILNNSFIEDFKFWLT

SEQ ID NO: 53174 - protein, 369 aa, unidentified
  source 1..369: note = Atribacteria bacterium
  REGION 1..369: note = tr|A0A1F5A7R2|A0A1F5A7R2_9BACT Queuine tRNA-ribosyltransferase OS=Candidatus Atribacteria bacterium RBG_19FT_COMBO_35_14 OX=1797291 GN=tgt PE=3 SV=1
MSIKFEILKESKTTKARLGKLYTCHGIIDTPVFMPVGTQATVKAMTPRELDDLGIQIILSNSYHLYLRPGYNLVAQAGGLHKFMGWKGAILTDSGGFQIFSLGKLNKISDEGVFFNSHIDGSKHFINPEKAMEIQIALGSDIAMAFDECAPYPSGKYQVEIAAQRTIQWAKRCKEAHHGSSQSLFGIVQGGAFKDLRIENANKLVELDFPGYAIGGLSVGEPKSLMYEILDCTVPCLPNNKPRYLMGVGAPQSILEGIIRGVDMFDCVLPTRNARNGSLLASSGNLSITNAKYKDDFTPLDNKCQCYTCQNFTRAYLRHLYMSNEILASILGTIHNLYFMSSLMKNIRLALLEDRLLEFKEEFLSNFLN

SEQ ID NO: 53175 - protein, 348 aa, unidentified
  source 1..348: note = Atribacteria bacterium
  REGION 1..348: note = tr|A0A2N3AHG9|A0A2N3AHG9_9BACT Queuine tRNA-ribosyltransferase (Fragment) OS=Candidatus Atribacteria bacterium HGW-Atribacteria-1 OX=2013676; GN = CVT91_17615 PE=3 SV=1
MSIKFEILKESKKTKARLGKLYTCHGIIDTPVFMPVGTQAAVKAMTPRELDDLGIQIILSNSYHLYLRPGYNLVAQVGGLHKFMGWKGAILTDSGGFQIFSLGKLNKISDEGVFFNSHIDGSKHFINPEKAMEIQMALGSDIAMAFDECAPYPSGKYQIEIAAQRTIQWAKRCKETHHSSSQSLFGIVQGGAFKDLRIENANKLVELNFPGYAIGGLSVGEPKSLMYEILDCTVPCLPNNKPRYLMGVGVPQSILEGIIRGVDMFDCVLPTRNARNGSLLTSSGNLSITNAKYKDDFTPLDNKCQCYTCQNFTRAYLRHLYMSNEILASILGTIHNLYFMSSLMKNIR

SEQ ID NO: 53176 - protein, 373 aa, unidentified
  source 1..373: note = Aureabacteria bacterium
  REGION 1..373: note = tr|A0A3A4QX38|A0A3A4QX38_9BACT Queuine tRNA-ribosyltransferase OS=Candidatus Aureabacteria bacterium SURF_26 OX=2093366 GN=tgt PE=3 SV=1
MDFTFIKKDARCGARRGEISTPRGKIQTPVFMPVGTQATVKGIFPRDLLDFDAEIILGNTYHLYLRPGMEIMKEAGGLHAFMGWDRPILTDSGGFQVFSLADLRKITGEGVEFQSHIDGSYHFFTPELVVDIQHTLGSDIVMVLDECVPYPADHNYACNSMKLSLKWAELCKRHHSKKDSESGLFGIVQGSVYRDLRKECAYALQDIGFDGYAIGGLSVGEPTSVMYEVTGYTVDYLPENQPRYVMGCGFPDDILMMVECGIDMFDCVIPTRYGRNGTGFTSSGKVPVKNGAYKSDFQPLDPECDCYTCRTFTRAYLRHLFNTGEMLGPALLSLHNIHFYLNLMRHVRSAIDNDNYLVFKHKFLSRYQEGENL

SEQ ID NO: 53177 - protein, 382 aa, unidentified
  source 1..382: note = Azambacteria bacterium
  REGION 1..382: note = tr|A0A358VNP6|A0A358VNP6_9BACT Queuine tRNA-ribosyltransferase OS=Candidatus Azambacteria bacterium OX=2053511 GN=tgt PE=3 SV=1
MEFNILKKSKKSNARLGVLKTPHGLVETPALVPVATQAVVKTLTSEEAEAAKCQMLIANTFHLHLKPGEKIVKNSGGIHEFMNWNRPLMTDSGGFQIFSLGFGYDLGVGKVLGFFPGKKGEGLVIDKTAQPKKVRITSQGAYFKSPITGEELFIGPKESIKIQEALGADIIFAFDECTPPFSSYEYVQKAIKRTHDWAKICVDNKKSNQALFGIVQGSKFQDLRSESAKYINSLGFDGFGIGGDLGETKKDMTKILSWIIPHLDEEKPRHMLGIGRLDDMENIIKSGIDLFDCTVPTHYARRGIAFVSGGKLNLSKSIFLKDKKPLDSKCECSVCQNYKRHYIAHLWKAKEITAMRLLTFHNLYFFNIFVENIRQKIKNNQI

SEQ ID NO: 53178 - protein, 397 aa, unidentified
  source 1..397: note = Azambacteria bacterium
  REGION 1..397: note = tr|A0A352KTZ7|A0A352KTZ7_9BACT Queuine tRNA-ribosyltransferase OS=Candidatus Azambacteria bacterium OX=2053511 GN=tgt PE=3 SV=1
MTAENFSFKMVKKDSKTGARAGILRTSHGEIKTPAFVTVGTQATVKALSPEELKGLGAQIVLANTYHLYLRPGEEVIEKMGGLGKFMNWDGPTMTDSGGFQVFSLGFGIEHGVGKIASIFPSEEFADKPKEARPKLAKIDEDGTTFTSHIDGSTCRLTPEKSIEIQQKLGADIILAFDECTSPLHDYEYTKNALARTHRWAERSLKAKTNPKQALFGIVQGGEYEDLRKESAKFISSLDFDGFAIGGSLGKSKEDMHRVLEWTNEILPEEKPRHLLGIGRPEDIFEGVERGVDMFDCVMPTRVARNGTLLVGKERLNITNAEFAADPNPPDKSCRCYTCSNYSRAYLNHLFKAKEILGHRLASIHNLYFIVNLVKQIRQSITEDRFLEFKKEFLRSG

SEQ ID NO: 53179 - protein, 376 aa, unidentified
  source 1..376: note = Babela massiliensis
  REGION 1..376: note = tr|V6DG82|V6DG82_9BACT Queuine tRNA-ribosyltransferase OS=Candidatus Babela massiliensis; OX = 673862 GN=tgt PE=3 SV=1
MNYFKFEVIAKSKKSRARVGRIFTPHGIINTPNFVPVATNGTLKLIDSITTSNIGVELMFCNTYHLMVHPGTETVRQAGGLHKFINRPHPIITDSGGFQVFSLAYGTVKEELKSKGIKKHTEAVVKISEEGVLFRSYKDGSKIMLTPETSIQAQKDLGADIIIPFDELPPYHIDQSKLQKSLDRTHRWEERSLKQHLKDKNNQAIYAVVHGGIDKNLRKKSCEFLTNLPFDGYAIGGSIGKNRSEMLELINYTMPMLPEDKPNHLLGIGDLESIDACVRLGIDTFDSSHPTRCARHGQIFTSEGTVKILQNKYKLKFEPLDADCICYTCQNYTSAYIHHLFKAREMTGLALASIHNTHYMIKLMSNYRNLILNEVI

SEQ ID NO: 53180 - protein, 376 aa, unidentified
  source 1..376: note = [Bacteroides] periocalifornicus
  REGION 1..376: note = tr|A0A0Q4B621|A0A0Q4B621_9BACT Queuine tRNA-ribosyltransferase OS=Candidatus [Bacteroides] periocalifornicus OX=1702214 GN=tgt PE=3 SV=1
MLFTVEVADPHSYARCGRMVLPHGVVETPIFMPVGTLGGVKAILHSNLRQDTQARIVLGNTYHLFLRPGLHTIREAGGLHAFSTWQGPMLTDSGGFQVFSLAGRRKLTEAGVSFQSHIDGSTYLFTPERVVDIERIIGADIIMPLDECPPGDAPYGYAKESMQLTLGWLERAQRQMRYTQPLYGYSQALFPIVQGAAYPDLRLRCAESMMRYDAPGYAIGGLAVGEPTEIMYSIVEGLHPVLPYHRPRYLMGVGTPANLLECIARGVDMFDCVMPTRNGRNGMLFTWKGVVNIKNRKWRNCFIPIDFSSTSRPDRQYTLAYLRHLFVSGEALAGQIASLHNVAFYLQLMAEARRQIRMGTFSSWKDSVLPTITQRL

SEQ ID NO: 53181 - protein, 370 aa, unidentified
  source 1..370: note = Baumannia cicadellinicola
  REGION 1..370: note = tr|A0A088MYX8|A0A088MYX8_9GAMM Queuine tRNA-ribosyltransferase OS=Candidatus Baumannia cicadellinicola OX=186490 GN=tgt PE=3 SV=1
MKYQLLKNHGSARRGRMVFDRGVVETPAFMPVGTYGTVKSMTPEEVKETGAQILLCNTFHLWLRPGQEVMKLHGDLHHFMHWYGPILTDSGGFQVFSMGNLRKITEEGVHFRNPINGAAIFLSPEKSMEIQYDLGSDIVMIFDECTPYPVKWDYAKNSMEMSLRWSERSRKRFDELNNNNALFGIIHGGIYQDLRDISVNRLIDIGFDGYALGGLSVGEPKENMYHILAHICPQIPEDKPRYLMGVGKPEDLVEGWRRGIDIFDCVIPTRNARNGHLFVTNGIVKIRNAKYKNDVASLDMECDCYTCCNYSRAYLHHLYRCNEILGARLNTIHNLRYYQRLMAGLRQAIDTGKSHKFIEEFYNKKINSVS

SEQ ID NO: 53182 - protein, 399 aa, unidentified
  source 1..399: note = Beckwithbacteria bacterium
  REGION 1..399: note = tr|A0A1F5E5G6|A0A1F5E5G6_9BACT Queuine tRNA-ribosyltransferase OS=Candidatus Beckwithbacteria bacterium RBG_13_42_9 OX=1797457 GN=tgt PE=3 SV=1
MVKQPFFKLEAQQSKARAGIINTAHGQIKTPCFMPVGTQASVKALDPEDLRKINAQIILGNTYHLFLRPGEKLIEKSGGLHRFMNWTGPILTDSGGFQVLSLSKVRSKEVGLNDEPEIKLSQINEDGVQFRSHIDGRWHFINPEKSIQIQKSLGADIIMAFDEADPSSDKSYARKGMERTHRWLRRSKKEWRRQKYFCSDESIHQYKKNALFGIIQGGKYKDLRQESAKFVANQDLPGIAVGGASIGSSPEETAQVLSWVKEYLPLGKPVYTMGVGVKPSDLVSVIQAGADIFDCVAPTRLARTGYLYHGFLQLSKNIDKVNFVSEFAHERLDISKSLFKNDAHPILQDCDCYTCRSGFSRAYLHHLFKCRELLYYRLASIHNLRVMIRICEEMRKAII

SEQ ID NO: 53183 - protein, 350 aa, unidentified
  source 1..350: note = Berkelbacteria bacterium
  REGION 1..350: note = tr|A0A2M7CJ17|A0A2M7CJ17_9BACT Queuine tRNA-ribosyltransferase OS=Candidatus Berkelbacteria bacterium CG03_land_8_20_14_0_80_40_36 OX=1974509 GN=tgt; PE = 3 SV=1
MKSKKIEKNCLRIVNKKINLPCFMPCATRGVVRAVSFDEIKKIGFQMVLVNAYHLYLTPGLKVIRAMGGLHKFMGWDGAILCDSGGFQVFSLKPKLTSEGVKFQSHIDGSTHFFSPEKVWEINMALGTNIAMPLDDCPPGTATKKRVAESVERTHRWLLKTIDAKDNQKGNKPKLFGIVQGGIYPDLRKKSADFVSELYKKGKIDGIAVGGVAVGEQKTKIKQVICWTSRWLPQDAPKYLMGIGEPEDIIYAVKYGFQMFDCVLPTRLGRHGIAYTQFQSLNLKFQNNNQKLNNFQFHKLDLGKSKFKTDKKWAYLHHLIRLKEIEGLRICSLNNLNIYHALMEELAKIT

SEQ ID NO: 53184 - protein, 448 aa, unidentified
  source 1..448: note = Berkelbacteria bacterium
  REGION 1..448: note = tr|A0A554LLK4|A0A554LLK4_9BACT Queuine tRNA-ribosyltransferase OS=Candidatus Berkelbacteria bacterium Athens1014_28 OX=2017145 GN=tgt PE=3 SV=1
MDFEILKKSESSSLRRGVISTYCGNIDTPVFMPVGTVGTVKSVAPWELRELGAEIILGNTYHLFLRPGEKLIEKFGGLSKWSGWGGPILTDSGGYQVFSLREKKIKNPCLAGRQEKSKIKIKEKDLFDNSELVKITDDGVEFKSYLDGTKHFFTPEKVIDIQLALGSDIIMPLDVCPSSIAHREEIENAVEISIKWLVRSKLHLERKFQITRNKSQTNLKSLPCRTSASSVESQAGQTSNLKPALFGIIQGGIDKKLRKYCAEEMIKLDLPGYAIGGLAVGESQKEMLEMVGFLDKILPKNKPRYLMGVGTPDDILKATKLGVDMFDCVLPTRMARHGTAYVKLKVKSQKSKVDGRYLFEEINLLNSKFREDKNLIDKNCQCPTCRAPQKSNSFCEIPRSEAEGDKNNFSLAYLSHLIREKEILGVRLLTLHNLHLYLNLMKEIRESI

SEQ ID NO: 53185 - protein, 383 aa, unidentified
  source 1..383: note = Berkiella aquae
  REGION 1..383: note = tr|A0A0Q9YNF5|A0A0Q9YNF5_9COXI Queuine tRNA-ribosyltransferase OS=Candidatus Berkiella aquae; OX = 295108 GN=tgt PE=3 SV=1
MLSDVANKADFRFEILYQSKRSRARVGRIITPHGVIETPNFVAVGTNGSLKTLHNHDHEELDIQLMFCNTYHLMVQPGTQLIKESGGLHTFIQRQQPIITDSGGFQVFSLAYGNVAKELKGQGGKKHPPSKMKVTEEGVVFRSYRDGTKIFLSPETSVQAQKDLGADIIIPLDELLPFHVDEATLKASFARTHRWELRSLAEHLKARQNQAMFAVIHGGTDLALRQQSCQLLTKEAFDGFAIGGSLGRDHQELHDTVGGTTSHLPTEKPIHLLGIGDVTSINHCIPFGIDTFDSSYPSKVARHGMILTAKGPLKITRTEHARERIPLEHDCPCPTCKHYTRAYLHHLFKAKEPSAASLATWHNIRFMTRWMSKIRTEILCGLL

SEQ ID NO: 53186 - protein, 384 aa, unidentified
  source 1..384: note = Berkiella cookevillensis
  REGION 1..384: note = tr|A0A0Q9YT37|A0A0Q9YT37_9COXI Queuine tRNA-ribosyltransferase OS=Candidatus Berkiella cookevillensis OX=437022 GN=tgt PE=3 SV=1
MIESQPQINSTFQFEILYQSKHSQARVGRIHTPHGIIDTPNFVAVGTNGTLKALPNHWLDELGLQLMFCNTYHLLVQPGTEVIQQAGGLHNFIQRKRPIITDSGGFQVFSLAYGGIANELKSKGTKKYTGSVLKITEEGVVFRSYFNGEKICLTPESSVQAQKAFGADIIIPLDELTPYHISDEALLDSFKRTHRWELRSLAEHRKNPNNQAMYSVIHGGIHPELRHKSCEILDNADFDGHAIGGSLGKNITELYATVQTTTPKLSPEKPRHLLGIGDLPSIDQCVPLGIDTFDSAYPTRSARHGVLFSFDGPIKIDRQIHRFEHFPVDKDCHCHLCQNYTRAYLYHLFKAKEPTAMLLASTHNVAFMMRRMESYRNQILSGLI

SEQ ID NO: 53187 - protein, 404 aa, unidentified
  source 1..404: note = Bipolaricaulis sibiricus
  REGION 1..404: note = tr|A0A410FVG7|A0A410FVG7_9BACT Queuine tRNA-ribosyltransferase OS=Candidatus Bipolaricaulis sibiricus OX=2501609 GN=tgt PE=3 SV=1
MTSFQILARASGSAARLGELVTPHGTIQTPAFVAVATRGTVKALGVDDLLGLGAEVLIANTYHLALRPGAEAVASLGGLHGFTGWRGPWFTDSGGFQVFSLGAGKVHGVGKIASMFPGERTAKPTGTSLVALTEDGAHFRSVVDGSPVFFSPEEVVRLQRLLGADVILPLDECTSPFHDRPYTESAMERTHRWAERALVAFEGTRGLGSNPGQALWGIVQGGAFDDLRRRSARTIAGMGFPGFAIGGSLGRSKDDMLRVIEWTVAELPEDRPRHLLGIGGVEDILAAVERGVDTFDCAAPTRLARNGVLLTFAEDGFRIAIRNARFARDESPVEEGCDCPTCRQYSRAFLRHLLQTGELSYHRLATLHNVRFMVRLMDRVRTALGAGEAVSDILSAPFTNPPAR

SEQ ID NO: 53188 - protein, 395 aa, unidentified
  source 1..395: note = Bipolaricaulis anaerobius
  REGION 1..395: note = tr|A0A2X3KL37|A0A2X3KL37_9BACT Queuine tRNA-ribosyltransferase OS=Candidatus Bipolaricaulis anaerobius OX=2026885 GN=tgt PE=3 SV=1
MFRVLARATGSAARLGELATPHGTIRTPAFVSVATRGTVKALGADDLRGLGVEALIGNTYHLSLRPGAETIASLGGLHGFTGWTGPWVTDSGGFQVFSLGAGKVHGVGKLATMFPGDAPAKREGESLVALTEEGAHFRSVVDGSRVFFSPEEVVRLERLLGADVILPLDECTSPFHDHAYTRAAMDRTHRWAERALAAFAKTKGLGPNPGQVLWGIVQGGAYEELRRASARTIAALGFPGVAIGGSLGRSKADMLRVIEWTVAELPEDRPRHLLGIGGVEDILAAVDRGVDTFDCAAPTRLARNGVLLTLAEDGFRIAIKNARFARDDRPVEEGCDCPTCAQYPRAFLRHLVQTGELSYYRLATLHNVRFMVRFLDRVRTALAEGRPASSSVLNP

SEQ ID NO: 53189 - protein, 366 aa, unidentified
  source 1..366: note = Blackburnbacteria bacterium
  REGION 1..366: note = tr|A0A1G1VEQ1|A0A1G1VEQ1_9BACT Queuine tRNA-ribosyltransferase (Fragment) OS=Candidatus Blackburnbacteria bacterium RIFCSPLOWO2_01_FULL_41_27; OX = 1797520 GN=A3A58_036 25 PE=3 SV=1
VATTATVKALDTKDIIECKSQVVLANTYHLLLRPGLEVLEQFGGFAPFMKWEGPTITDSGGYQVSFMRSDPPSPDGFGGVTTNVVKITDEGATFRSYVDGSKQLITPERSMEIQSVLNADIIMAFDQPLGKDYTEEKIKEAFKRTLLWEERSFHAWQDIQSKRKRQSKSYQALYGIVQGGTNKDLRRQSLEFILKTGFPGVAIGGETIGADPKITAESLDTIADLWPQDKPVHALGLGGGPEGIFEALSRGVDTFDNTSVTRIARSGLLYIYPEDGGTKENKFRLDVSKSKFKSKKESWSQTCRCYTCQNYSAAYLHHLLVARELSGFRLASIHNVHFMNELMIRIRTAIKNGDFEAMRREWAGAF

SEQ ID NO: 53190 - protein, 407 aa, unidentified
  source 1..407: note = Blackburnbacteria bacterium
  REGION 1..407: note = tr|A0A1G1VFD6|A0A1G1VFD6_9BACT Queuine tRNA-ribosyltransferase OS=Candidatus Blackburnbacteria bacterium RIFCSPLOWO2_01_FULL_40_20 OX=1797519; GN = A3A77_03850 PE=3 SV= 1
MQNKNFSFKILRKDNITCARVGTIFTPHGAIQTPAFSPVATRATVKTLDPSDLINAGSQVVLANTYHLYLRPGIKIIEDFGGFAPFMKWDGPTITDSGGYQVSFLWSPSAKASVGQDTSGQESVLDSGRVAKITDEGATFISHIDGARHLLSPEKSMEIQHSLAADIIMALDQPLGKDFSEKKKREAFERTLRWEERSFVRWNELETKRKKGTFQALYGIMQGGINKDQIRKSLEFILVTGFPGIAAGGETIGTDPMLTSRTLDLVSDLLPDDKPLHALGLGGGPEGIFEAVERGVDTFDNTSITRQARSGLLFLYPEDGGKVENKFRMDIKKSKFKDIKEPFSKVCNCYSCSNFSAAYLHHLIISGELLGLRLASIHNVHFINDLMKKIREAILNGDFIQLKREWI

SEQ ID NO: 53191 - protein, 368 aa, unidentified
  source 1..368: note = Blochmannia chromaiodes
  REGION 1..368: note = tr|L0MUH3|L0MUH3_9ENTR Queuine tRNA-ribosyltransferase OS=Candidatus Blochmannia chromaiodes str. 640 OX=1240471 GN=tgt PE=3 SV=1
MPFQLLQTDGHARLGRLICNQGIVDTPAFMPVGTYGSIKTLTSKEVEASGTQIILSNTFHLWLRPGLDIIKLHGSLHKFMSWNGPIITDSGGFQVFSLSKTRTITRKGVCFKSPIDGHLVFLTPEKSIEIQHDLQSDIVMIFDECISYPNTWDYVKKSVNISLNWAERSRLRFDTLHNSNMLFAIIQGGMYENLRDMSAKELINIGFDGYAIGGLSVGEPKKEMYRILSHICKLIPTNKPRYLMGAGKPEDLLEAVQKGIDMFDCVIPTRNARNGYLFVSDGTIKIRNAQYKKDTSPLDGDCDCYTCQHYSRSYLHHLDCCKEILGVRLNTIHNLRYYQRLMKELRQAIKTKSLQNFIDIFYKRVNRI

SEQ ID NO: 53192 - protein, 372 aa, unidentified
  source 1..372: note = Borkfalkia ceftriaxoniphila
  REGION 1..372: note = tr|A0A4Q2K8K6|A0A4Q2K8K6_9FIRM Queuine tRNA-ribosyltransferase OS=Candidatus Borkfalkia ceftriaxoniphila OX=2508949 GN=tgt PE=3 SV=1
MAEKFSFEIIKTDPETGARAGVFHTPHGDIQTPVYMSVGTQATVKGVLPKDLKEAGSQIVLANTYHLYMRPGHELVKKAGGLHRFMNWDRPILTDSGGFQVFSLAKLNNIRDEGVWFNSHIDGSKHFFTPEKVMEIENALGADIIMQFDECSEYGVDEKYAARALDRTAAWLERCAAAHANPEQALFPIVQGNFFADLRLKSLEYAKPFAKHGIAIGGLSVGEPKPLMYEMLDVLQPALPVDVPRYLMGVGSPDCLIEGVMRGIDMFDCVLATRIARNGTALTSKGKVVVRNAVYKEDFSPLDDECDCYCCKNYSKAYLRHLVNAGEMLSSMLLSLHNITFLNKLMRDMRQAILDGTLAEFRRAFYAKYGEN

SEQ ID NO: 53193 - protein, 387 aa, unidentified
  source 1..387: note = Brennerbacteria bacterium
  REGION 1..387: note = tr|A0A2H0PWY2|A0A2H0PWY2_9BACT Queuine tRNA-ribosyltransferase OS=Candidatus Brennerbacteria bacterium CG11_big_fil_rev_8_21_14_0_20_43_10 OX=1974523; GN = tgt PE=3 SV= 1
MIFEIKTVFIKMAFDLNKYLKEYVIRGGKVQFPMYLPDATRAVTRSVDSSDLEIIGIEAVVINTYHLMSTPGTTVIEQAGGVKQFMHWNGLAVSDSGGFQILSLIYETSLSGQIKDEGVIFYQKGKKRKKEIFTPEKSIQIQFALNPDIMICLDDCPHMKATRGEVEISVKRTIEWAKRCKEEFDKQVEQRKMNALLRPLLFAVIQGGSHKDLREQCGQALQDIGFDGYGFGGWPMHPQTGKLDKDILQFTAQLMPHNKPKFALGVGTPQDIVDGFFMGYTIFDCVLPTRDARHQRMYVLSKSMNDLDITKDRVFEYLDLEKEKYTRDFRPISEFCDCPTCKNYSRAYVHHLFKIEETLAYRLATMHNLRTYTQTIELLRKYVCGDG

SEQ ID NO: 53194 - protein, 387 aa, unidentified; identical to SEQ ID NO: 53193
  source 1..387: note = Brennerbacteria bacterium
  REGION 1..387: note = tr|A0A2M8C1K5|A0A2M8C1K5_9BACT Queuine tRNA-ribosyltransferase OS=Candidatus Brennerbacteria bacterium CG_4_9_14_3_um_filter_43_9 OX=1974522 GN=tgt; PE = 3 SV=1

SEQ ID NO: 53195 - protein, 367 aa, unidentified
  source 1..367: note = Brocadia sinica
  REGION 1..367: note = tr|A0A136MFT0|A0A136MFT0_9BACT Queuine tRNA-ribosyltransferase OS=Candidatus Brocadia sinica; OX = 795830 GN=tgt PE=3 SV=1
MIFRTLAVDKQTKARCGELRLANHSISTPVFMPVGTQGTIKTLTPQQLKETNTKIILCNAYHLCLRPGEKIIRQSGGLHKFIGWDGAIITDSGGYQVFSLTGLTKVSDNGVEFQSPIDGTRMFLTPERMMQIQNDIGADVIMPFDECVPYPCEQDKAGVAVKRTVEWAERCLNAHKNKQQTLFGIVQGSVFRELRIECARKLVEMNFEGYSIGGLSVGEGAFLMNEVLDYTVDYLPQERPRYLMGVGFPIDIINAVERGIDMFDCVVPTRNGRNGCAFTSAGKIKILNSQYKEDKESLDKTCGCYTCRNFTRAYLRHLFLANEILGLTLISLHNIFYFQNLMQQIRESIMKGGFKDFKAEFLLKQSE

SEQ ID NO: 53196 - protein, 367 aa, unidentified; identical to SEQ ID NO: 53195
  source 1..367: note = Brocadia sinica
  REGION 1..367: note = tr|A0A0C9NL45|A0A0C9NL45_9BACT Queuine tRNA-ribosyltransferase OS=Candidatus Brocadia sinica JPN1; OX = 1197129 GN=tgt PE=3 SV=1

SEQ ID NO: 53197 - protein, 367 aa, unidentified
  source 1..367: note = Brocadiaceae bacterium
  REGION 1..367: note = tr|A0A5C6EVC3|A0A5C6EVC3_9BACT Queuine tRNA-ribosyltransferase OS=Candidatus Brocadiaceae bacterium B188 OX=2528032 GN=tgt PE=3 SV=1
MFFRCLAVDKQTKARYGELRFLNHRIPTPVFMPVGTQGTVKTLTPQQLKETDTKIILCNAYHLCLRPGEKIIKQSGGIHKFMGWDGAIITDSGGYQVFSLSGLTKISDNGVEFQSPIDGTRFFLTPENMMQIQKDIGADIIMPFDECVPYPCEKDRASVAVKRTTEWAERCLNMHTNRQQILFGIVQGSVFKELRIECARSLVEMNFEGYSIGGLSVGEGSVLMNEVLDYTVDYLPEDRPRYLMGVGFPVDILNAVERGIDMFDCVVPTRNGRNGCAFTSMGRVKILNSQYKEDSSPLDQMCNCYTCCNFSRAYLRHLFLAHEILGLTLLSLHNISFFQNLMQQIRESIKNGDFKDFKNEFLSRQSD

SEQ ID NO: 53198 - protein, 388 aa, unidentified
  source 1..388: note = Buchananbacteria bacterium
  REGION 1..388: note = tr|A0A1G1YLG2|A0A1G1YLG2_9BACT Queuine tRNA-ribosyltransferase OS=Candidatus Buchananbacteria bacterium RIFCSPLOWO2_01_FULL_39_33 OX=1797543 GN=tgt PE=3; SV = 1
MYKLLKTSQKSQARLGILKTAHGDIPTPFFMPLATKAAVKNLTADEVKGLGAEIILANTYHLYLQPGLKVLEKIGGLHKLMNWSGPILTDSGGFQVFSLAKIRKIMPYGVEFSSPIDGSKHVLTPKKVLEIQKIIGSDIAMILDVCPSSKENKSKIKAAVDLTTIWAKEASQEIKKTRKPENNKSRNQLFFGIIQGGLYKDLRLKSLNDLVSLGWDGYAIGGLAVGESPKEMYKVLDYLTPAMPKDKPRYLMGVGTPANIIEAVKRGVDMFDCVIPTREARHGRLYCFPSLPRRGLRGGWPTVGQFLPGLSLGKEGKFYTTINITNARFRSDKTPINNTNLKQYSRAYLHHLFKTKEPLAMRLATLNNLEFYLTLMVEIRQAISRGKL

SEQ ID NO: 53199 - protein, 338 aa, unidentified
  source 1..338: note = Buchananbacteria bacterium
  REGION 1..338: note = tr|A0A1G1YBV2|A0A1G1YBV2_9BACT Queuine tRNA-ribosyltransferase (Fragment) OS=Candidatus Buchananbacteria bacterium RIFCSPHIGHO2_02_FULL_45_11b; OX = 1797541 GN=A3J65_03 485 PE=3 SV=1
MFKLLKTSNKSKARLTRLTTPHGLVDGPFFMPIATKGAVKNLTADELKGLGAQIVLANAYHLFLAPGSKLIKKAGGLHQYMNWPGPILTDSGGVQVFSLSKIRKISEKGAEFSEPSSGRKYLLTPELSVQIQKDLGVDLAMAFDDVIGYPASKEKVKLAMERTSRWAKRCLAAREQGNKRTKEQNKSILFGIIQGGVYKDLRLKSAKDLTALKFDGYAVGGVAVGEPREKMKPILDWVVPLLPENKPRYLMGLGRPEEIVAAVKEGIDMFDCVIPTREARHGRLYLWSSGKRQPLLPSSEQRLRPNQLKGKFYQTINITNSRYKTDLSPINQTNLKQY

SEQ ID NO: 53200 - protein, 402 aa, unidentified
  source 1..402: note = Burkholderia pumila
  REGION 1..402: note = tr|A0A0J7JR79|A0A0J7JR79_9BURK Queuine tRNA-ribosyltransferase OS=Candidatus Burkholderia pumila; OX = 1090375 GN=tgt PE=3 SV=1
MTEGQYHKPPENGLKFEVLTTDDQARRGRFTLNHGVIETPIFMPVGTYGTVKAIQPRELEEIKAQIILGNTFHLWLRPGLKVINAHGGLHKFMGWNRPILTDSGGFQVFSLGDLRKITEDSVTFASPINGDKLFLSPEMSMQIQKVLNSDIVMQFDECTPYATNGVPTSHKEAADSMRMSMRWAKRSIDEFNRLGNPNALFGIVQGGMFENLRDESLAGLSDIGFHGLAIGGLSVGEPKEDMMRVLNHIGPKLPADKPHYLMGVGTPEDLVNGVAAGVDMFDCVMPTRNARNGWLFTRFGDLKIKNASHKNSMKPLDETCTCYTCHNFTRGYLHHLHRVGEILGAQLNTIHNLHYYLQLIGEVRESIENHTFEAFRRTFAENRARRGLNYNMLSIAGVQNTA

SEQ ID NO: 53201 - protein, 387 aa, unidentified
  source 1..387: note = Burkholderia verschuerenii
  REGION 1..387: note = tr|A0A0L0M9E0|A0A0L0M9E0_9BURK Queuine tRNA-ribosyltransferase OS=Candidatus Burkholderia verschuerenii OX=242163 GN=tgt PE=3 SV=1
MTAGQFTPPENGLKFELLTTDGQARRGRLTLNHGVVETPIFMPVGTYGTVKAIQPRELEEIRAQIILGNTFHLWLRPGLEVIGAHGGLHKFMGWNRPILTDSGGFQVFSLGDLRKITEEGVTFASPINGDKLFLSPEVSMQIQKVLNSDIVMQFDECTPYATNGIPTTHKEAADSMRMSMRWAKRSIDEFGRLGNPNALFGIVQGGMFEDLRDESLAGLSEIGFHGLAIGGLSVGEPKEDMMRVLNHIGPKLPADKPHYLMGVGTPEDLVNGVAAGVDMFDCVMPTRNARNGWLFTRFGDLKIKNASHKSSMKPLDESCTCYTCQNFTRGYLHHLHRVGEILGAQLNTIHNLHYYLQLIGEVRESIENHTFEAFRKTFAKNRARGVD

SEQ ID NO: 53202 - protein, 402 aa, unidentified
  source 1..402: note = Campbellbacteria bacterium
  REGION 1..402: note = tr|A0A352LRX8|A0A352LRX8_9BACT Queuine tRNA-ribosyltransferase OS=Candidatus Campbellbacteria bacterium OX=2026716 GN=tgt PE=3 SV=1
MSIKFNIEKKMEGTLARAGVLETPHGKILTPSFVTVGTKATVKALTMEQVKDLGAQVVLANTYHLYLQPGDEIVKNAGGLHKMMNWFGPTMTDSGGFQAFSLGVAFGSGVSKIASADKKDIVNRCGEMSDGEGCSLAKIDEDGVTFKSHIDGSLHKFTPEKSIQIQHNIGADMIFAFDECTSPNADYDYQREAMDRTHRWAERSLDEHKKLNIEDKISLFGIVQGGRFEDLRKESAEVISKMDFDGFGIGGSFNKEDMNTAVGWVNKILPEGKPRHLLGIGEPEDLFGGVENGIDLFDCVAPTRMARNGSLHTKDGKINILNAKFKDDFSPIEKDCGCYTCKNYTKSYLSHLFRAKEMLGSTLATIHNLYFINKLVQDIRQSIMDENFDELKKDFLKRYKKE

SEQ ID NO: 53203 - protein, 401 aa, unidentified
  source 1..401: note = Campbellbacteria bacterium
  REGION 1..401: note = tr|A0A1F5EMY9|A0A1F5EMY9_9BACT Queuine tRNA-ribosyltransferase OS=Candidatus Campbellbacteria bacterium RIFCSPLOWO2_01_FULL_34_15 OX=1797579 GN=tgt PE=3; SV = 1
MLKFNIEKKIEGTLARAGVLETPHGEILTPSFVNVGTKATVKALTPEQVKDLGAQVVLANTYHLYLQPGDEIVKKAGGLHKMMNWNGPTMTDSGGFQAFSLGVAFGSGVSKIASADKKDIVNRCGEMSDGEGCSLAKIDEDGVIFKSHIDGSLHKFTPEKSIQIQHNIGADMIFAFDECTSPNADYDYQREAMDRTHRWAERSLDEHKKLNTEDKISLFGIVQGGRFEDLRKESAEVISKMDFDGFGIGGSFNKEDMNTAVGWVNKILPEEKPRHLLGIGEPEDLFGGVENGIDLFDCVAPTRMARNGSLHTKDGKINILNAKFKDDFEPIEKDCKCYTCKNYTKSYLSHLFRAKEMLGSTLATIHNLYFINKLVADIRQSIMDENFDEFKKDFLKRYKKE

SEQ ID NO: 53204 - protein, 378 aa, unidentified
  source 1..378: note = Carbobacillus altaicus
  REGION 1..378: note = tr|A0A2R6Y587|A0A2R6Y587_9BACL Queuine tRNA-ribosyltransferase OS=Candidatus Carbobacillus altaicus OX=2163959 GN=tgt PE=3 SV=1
MSTFRFELIKEDKKTGARLGRLYTTHGVIETPTFMPVGTQATVKAMTPEELREIGAQIILSNTYHLWLRPGEEIIAEAGGLHAFMNWPHPILTDSGGFQVFSLQKIREITEDGVHFASHLDGSPLFMSPEVSIRVQNALGADIIMSFDECPPYPAERSYVEASMERTHRWAERGLRAHKRAHDQALFGIVQGGMYKDLRQRSARTLVAMDFPGYAIGGLSVGEPKETMYAMLEETTPLLPRHKPRYLMGVGSPDALLEGVMRGVDMFDCVLPTRIARNGTLFTHDGRMVIKNSQYARDFSPPDPDCTCHVCQNYSRAYLRHLFRAEEILGIRLATYHNLFFLIQLMADIRAAIREDRLLAFSERFLGRYYARDPNRAF

SEQ ID NO: 53205 - protein, 375 aa, unidentified
  source 1..375: note = Cardinium hertigii
  REGION 1..375: note = tr|A0A3N2QB33|A0A3N2QB33_9BACT Queuine tRNA-ribosyltransferase OS=Candidatus Cardinium hertigii; OX = 247481 GN=tgt PE=3 SV=1
MQFLVEHEDQCSKARAGLITTGKGTIQTPIFMPVGTLGSVKSIPQNVLQDHINADIILGNTYHLYLRPGMQVLDAAGGLHSFMEWHRPILTDSGGYQVYSLAKNRSLTEEGVTFRSHIDGSKQLFTPESVIDIQRSIGSDIMMVLDECTPYPCSYSYAKDSMERTHRWLKRGSDHFDATLTEQNAYQALFAIVQGSVYKDLRIQSAEAIAAADRFGNAIGGVCHPTGQLYEITELVCDILPKHKPRYLMGVGTPLDLLECIALGVDMFDCVMPTRNGRNGTLFTTAGIINIKNSKWKTDCSPIDAQLSNALSGHYSKAYLRHLIISKEPLGLQLASVHNLTFYLWLVRQARKQIQQNNFVAWKNHVLQTIMKKIS

SEQ ID NO: 53206 - protein, 405 aa, unidentified
  source 1..405: note = Cerribacteria bacterium
  REGION 1..405: note = tr|A0A317JNM1|A0A317JNM1_9BACT Queuine tRNA-ribosyltransferase OS=Candidatus Cerribacteria bacterium 'Amazon FNV 2010 28 9' OX=2081795 GN=tgt PE=3; SV = 1
MSFSFDLLATKNKMRVGVMHTPHGDVPTPIFMPVGTQGSVKGLDAADVANTQSPIMLANTYHLYLRPGEEVVHTLGGIQRMMNWDKPVLTDSGGFQVFSLGEQLKGKNSKIKIPNSNTLTPEPSTLNPTVISDSGVEFTSHLDGSKHFFTPTKAIEIQQKIGADIMMTFDECTPDAADKNIAARAIERTYQWAIECKQQWERGDRLTAQGKYQALFGIIQGAMHEDLRKESTQQIVSLGFDGIAVGGETIGYNMPGTGEVMEWIESLLPVNKPRYAMGLGKNPQDIVDAVTLGFDMFDCVAPTRLARNGALYNGKLDKRTLKVESEFNHCRLGIGNSRFALDQTPIQDDCDCYTCVSGYTRAYLHHLFKTKELSYYRLASIHNVRFMIRLCDQLRSQILTSPSHS

SEQ ID NO: 53207 - protein, 388 aa, unidentified
  source 1..388: note = Chisholmbacteria bacterium
  REGION 1..388: note = tr|A0A1G1VSK5|A0A1G1VSK5_9BACT Queuine tRNA-ribosyltransferase OS=Candidatus Chisholmbacteria bacterium RIFCSPHIGHO2_01_FULL_52_32 OX=1797591 GN=tgt; PE = 3 SV=1
MLKGFSFSVVVKAHKTRARAGELYTPHGLVRTPVFMPVGTAGSVKALAPGDLSDAGVQILLGNTYHLYLRPGDTAVRRLGGLHRFMAWTGPILTDSGGYQVSSLGKFRDEGFPVMSRIDDHGVTFKSHLDGSMHRFTPEKAIRIQENLGADIIMAFDEATPARGKAYARHAMERTHRWLDRCVSEWKKCEERKQGKALPQALFGIIQGGNYRDLRCESAEFVVSRDLMGIAIGGASIGKNPEETAENVSWVADLLPSNNPLYLMGVGVNPEDVIGAVLCGADLIDCVAPTRLARMGHLYSGKLRGKAGKWGFTSEFSRGRLNIDQARFRLDDHVIDEGCDCYTCAMGFSRAYLHHLFRSRELLYYRLASLHNVRFMVRLTEGLRRTIV

SEQ ID NO: 53208 - protein, 399 aa, unidentified
  source 1..399: note = Chisholmbacteria bacterium
  REGION 1..399: note = tr|A0A1G1VZ37|A0A1G1VZ37_9BACT Queuine tRNA-ribosyltransferase OS=Candidatus Chisholmbacteria bacterium RIFCSPLOWO2_01_FULL_49_14 OX=1797593 GN=tgt PE=3; SV = 1
MKFDFAVIAKDSRTKARAGVLHTAHGEIRTPTFMPVGTAGSVKALSPDDLKGCGAQIILGNTYHLYLRPGDQTIHTLGGLHQFMRWDGPLLTDSGGYQVSSLGLFKENAGRMFTRIDDNGVTFTSHLDGSRHRFTPQKSIEIQRNLGADIIMAFDEATPARGKTYAREAMQRTHRWLKLCKQRWSRFGDERRRGEPPQALFGIIQGGNYRDLRRESALFVVEQDLPGIAIGGGSIGRNPEETSENVGWVSDLLPAQKPLYLMGVGVNPTDILAAVECGADIFDCVAPTRLARMGQLYSGRLTIIGGKWSFESEYRHGRLNISQARFKVDKAVVDHGCDCMTCVNGFSRAYLHHLFKSRELLYYRLASVHNVRIMVRLTEELRRNIQDVSEERRQNTPRI

SEQ ID NO: 53209 - protein, 398 aa, unidentified
  source 1..398: note = Chloroploca asiatica
  REGION 1..398: note = tr|A0A2H3KY98|A0A2H3KY98_9CHLR Queuine tRNA-ribosyltransferase OS=Candidatus Chloroploca asiatica; OX = 1506545 GN=tgt PE=3 SV=1
MFTITHRDPASQARSGLLTTAHGQVATPVFMPVGTRGTVKALTPHELHDHGASIILGNTYHLYLQPGHELLARRGGLHRFMGWDGPILTDSGGFQVFSLIYGGIADEVKGRRPQHAQRLPDMVKVTEDAVIFKSYLDGSRHIFTPERSIQVQHGIGGDIILAFDELPPFRAGYDYTRESLARTHRWAERCLTTHRERDPGALPNPDQRLFGIVHGGVFPDLRQASAEHIGAMGFDGLCIGGSLGADKSQIYEVVAMTVPHMPDGLARHLLGIGDVDDLFEGVARGIDMFDCVSPTRLGRHGTALIRDPSRRWKLNVLNAPLREDDAPLQEGCRCYACQHFSRAYIHYLYRAKEILGLRLVSLHNVAFLLDLMAEVRAAVAAGSFADLYAAWMGKALTL

SEQ ID NO: 53210 - protein, 377 aa, unidentified
  source 1..377: note = Chryseobacterium massiliae
  REGION 1..377: note = tr|A0A3D9AV76|A0A3D9AV76_9FLAO Queuine tRNA-ribosyltransferase OS=Candidatus Chryseobacterium massiliae OX=204089 GN=tgt PE=3 SV=1
MQKFFNIEKTSERKARAGELTTDHGTIQTPIFMPVGTVASVKTVHQRELKEDIKAQIILGNTYHLYLRPGMEVMQKAGGLHKFMNWDLPILTDSGGFQVFSLASSRKMSEEGARFKSHIDGSYHMFSPEKSMEIQRQIGADIFMAFDECVAYPCEYNQAKTSMELTHRWLKRCIEWTENNPELYGHKQRLFPIVQGSTFSDLRKISAEVIAEAGAEGNAIGGLSVGEPEEEMYRITDEVTDILPKEKPRYLMGVGTPWNILESIGLGIDMMDCVMPTRNARNAMLFTWKGVMNMKNEKWKKDFSPLDEFGTSFVDREYSKAYVRHLFVSKEYLAKQIASIHNLAFYLDLVKVAREHIMAGDFYQWKNSVVPILRQRL

SEQ ID NO: 53211 - protein, 356 aa, unidentified
  source 1..356: note = Cloacimonas sp.
  REGION 1..356: note = tr|A0A1V4RBR3|A0A1V4RBR3_9BACT Queuine tRNA-ribosyltransferase OS=Candidatus Cloacimonas sp. 4484_143 OX=1956164 GN=tgt PE=3 SV=1
MFEFKLEAASGNARAGTLKTPHGEIQTPIFMPVGTRATVKTMSPRDLHEIKAQIILGNTYHLYLRPGHELIKNAGGLHEFMGWHKPILTDSGGFQVMSLSGLRKITPEGVSFQSHIDGSYHMFTPEKVIEIQNAIGSDIMMSFDECPPYPATKEYVADSLKTTLDWARRGREAHKNTEKQALFGIVQGGIHEDLREESARKLMEMDFPGYSIGGLAVGENKSDMYRITNFLHDVLPKDKPRYLMGVGTPGDILQNIENGVDMFDCVMPTRNARKGTVFTRHGKLIIKAARYKEDLSPIDADCQCYTCRNFSRAYIRHLFNVDEFLGMRLATIHSLHFYLELVTLAREGAKLDTRIE

SEQ ID NO: 53212 - protein, 281 aa, unidentified
  source 1..281: note = Cloacimonas sp.
  REGION 1..281: note = tr|A0A3D3EZT8|A0A3D3EZT8_9BACT Queuine tRNA-ribosyltransferase (Fragment) OS=Candidatus Cloacimonas sp. OX=2053534 GN=DHW79_10395 PE=3 SV=1
MPFSFTLEATSGKARAGKINTNHGAIRTPVFMPVGTLGTVKAMSPKELMDADAQIILGNTYHLYMRPGHELIRKAGGLHKFINWPHPMLTDSGGFQVMSLAALRKITKDGVKFRSHIDGSLHYFTPEYVMEIQEALGADIIMSFDECPPYPATREYVEKSLTTTLRWAERGLRAFKNHQNQALFGIVQGGIYEDLREKSARALIEMGFPGYSIGGLAVGEEKPDMFRITEFLNDILPVNKPRYLMGVGTPSDLLNNIARGVDMFDCVMPTRNARKGSIFTR

SEQ ID NO: 53213 - protein, 371 aa, unidentified
  source 1..371: note = Cloacimonetes bacterium
  REGION 1..371: note = tr|A0A2N2KZS8|A0A2N2KZS8_9BACT Queuine tRNA-ribosyltransferase OS=Candidatus Cloacimonetes bacterium HGW-Cloacimonetes-2 OX=2013734 GN=tgt PE=3 SV=1
MFSFTLESTSSKARAGRISTNHGEILTPVFMPVGTVGSVKAMSPHELEEVQAQIILGNTYHLYLKPGHELIRNAGGLHKFISWNRPMLTDSGGFQVMSLAALRKITPEGVKFRSHIDGSLHMFTPERVIEIQEAIGADIIMSFDECPPLPSTRHYLEKSLKLTLDWAARGKAAFTNEANQALFGIVQGGTYEDLRQKCAEELMQMDFPGYSIGGLAVGESKDEMFKVTSFLNDILPKDKPRYLMGVGTPSDLLNNIARGVDMFDCVMPTRNARKGSIFTRYGKMIIKAARYKEDLRPIDEHCGCYTCTHFSRAYIRHLITMNEILGMRLTTIHSLWFYQELMQMARAAILEDRYDDFLAEQLPVLDRIVDQ

SEQ ID NO: 53214 - protein, 371 aa, unidentified
  source 1..371: note = Cloacimonetes bacterium
  REGION 1..371: note = tr|A0A523XC51|A0A523XC51_9BACT Queuine tRNA-ribosyltransferase OS=Candidatus Cloacimonetes bacterium OX=2030808 GN=tgt PE=3 SV=1
MKFEIIKEDKISEARVGKIRLPHGDVYTPVFMPVGTQGTVKSVAPLFLNQAGVQMIVANTYHLHLRPGESTVKKAGGLHSFIGWNKGILTDSGGFQVISLADLNKITDEGVRFQSHIDGTYIFFTPENVIEMQCALGADIIMSFDEPVLYPSSYALCEKAVQRTTEWASRGKLIFNRREDDEKALFGIVQGGTYKELRKRSIEELKSIGFDGYAIGGLAIGEPKSLQLETTEYTSQLLPSEKPRYLMGVGYPEDIIDAVAKGIDMFDCVLPTRNARTGTVFTSQGKVVIKNAPYTEDYIPVDEECDCYTCQNFSRAYIRHLFNAGEILGPVLATIHNIHFFMKLMQEIRESIKKDKFGSWSGGFLSKYMNS

SEQ ID NO: 53215 - protein, 379 aa, unidentified
  source 1..379: note = Collierbacteria bacterium
  REGION 1..379: note = tr|A0A3D4CMI0|A0A3D4CMI0_9BACT Queuine tRNA-ribosyltransferase OS=Candidatus Collierbacteria bacterium OX=2053540 GN=tgt PE=3 SV=1
MPFKFIKNSDGTGVLTTDHGEVQTPVFMPVGTAATVKALDGKDIRDTKAEIVLANTYHLFLRPGEKVVSKMGGVAKFMNWNGPTLTDSGGFQVFSLGLGAKGETLSKIDEDGVTFKSHLDGQMHRFTPEKSMDIQKDLGADIIMAFDECTPDKIEKKYVREALNRTHRWAEKCIKRWEENGKKSAQGTDQALFGIIQGSTDREMREESAKFISSMPFSGVALGGETIGYNMEATQEVIGWIKHLLPKGKPIYTMGLGRDPQNIVDIIKCGIDMFDCVAPTRLARNGALYHGELRGGNFESEFVNGRLNISNAQFVSDKNIILEGCDCFTCQSGYTRGYLNHLYRSKELTYYRLASIHNVRFMVRLVEQMREKMRNKKEG

SEQ ID NO: 53216 - protein, 387 aa, unidentified
  source 1..387: note = Collierbacteria bacterium
  REGION 1..387: note = tr|A0A352JM48|A0A352JM48_9BACT Queuine tRNA-ribosyltransferase OS=Candidatus Collierbacteria bacterium OX=2053540 GN=tgt PE=3 SV=1
MFKFTKNQDGTGKITTDHGEVQTPVFMPVGTAATVKALDGQDIRQTKAEIVLANTYHLFLRPGEKTVSNLGGVAKFMNWDGPTLTDSGGFQVFSLGLGAKGESLSKIDEEGVTFKSHLDGKSHRFTPETSMDIQRDLGADIIMAFDECTPDKAEKKYIREALDRTHRWAERSVKQWQNNGMKSIQGTNQALFGIIQGSMDMKMRKEAAEFITSLPFSGIALGGETVGYNMEGTLEVIGWIKHLLPRDKPIYTMGLGRDPQNIVEIIKAGIDMFDCVAPTRLARNGALYHGEIRGDKFESEFSNGRLNIGNAQFIGDKDIIMEGCDCYTCLSGYTRGYLNHLYRSKELTYYRLASIHNVRFMVRLVEQMREKMEKNCFSLRTFVIVTH

SEQ ID NO: 53217 - protein, 378 aa, unidentified
  source 1..378: note = Colwellbacteria bacterium
  REGION 1..378: note = tr|A0A1G1Z9E3|A0A1G1Z9E3_9BACT Queuine tRNA-ribosyltransferase OS=Candidatus Colwellbacteria bacterium RIFCSPLOWO2_12_FULL_43_11 OX=1797693 GN=tgt PE=3; SV = 1
MIGFKIIKKSKLSKARLGVLKTPHGEIETPAFVGVATQATIKILTTEEVLKTKTQILIANTYHLHQRPGEHIVAKSGGVHKFMNWPGALMTDSGGFQVFSLGFGSDHGVGKILKEKKDIVVKADMQPQKMRITEDGVHFRSPIDGREIFIGPKESIRIQEKLGADIIFAFDECTSPVADYEYTKRSLRKSHRWAKQCLEYQKTNQALFGITQGGKFKDLRIESAKFIGSLPFAGFGIGGEFGNDKKKMAAMIRWVVRELPENKPRHLLGIGHPEDIPKIIKEGIDTFDCIAPTHYARRGVAFTSEGRLDMNRRTFLQDKKPLDNSCDCTTCSNYSRSYITHLFKAKEITGMHLLTFHNLYFFNSLVAGIREKIKKGKI

SEQ ID NO: 53218 - protein, 378 aa, unidentified
  source 1..378: note = Colwellbacteria bacterium
  REGION 1..378: note = tr|A0A1G1Z3W0|A0A1G1Z3W0_9BACT Queuine tRNA-ribosyltransferase OS=Candidatus Colwellbacteria bacterium RIFCSPLOWO2_02_FULL_44_20b OX=1797691 GN=tgt; PE = 3 SV=1
MIDFKVLKQSKKSRARLGILKTPHGEIETPAFVGVATQAAVKTLFAHEAEHTNTQLLICNTFHLHLKPGEKIVKAAGGLHTFMQWKRPLMTDSAGFQVFSLGFGSDHGVGKILKEKRDIVIGEGAQPKKIKITRDGVWFRSPIDGVQVFIGPKESVKIQEALGADIILAFDECTSPVAGYEYTKQSLRRTHQWAEVCLAVKKSKQALYGITQGGKFKDLRIEGAKFIGSLPFDGFAIGGEFGDNKNAMIKMIEWTIRELPKEKPRHLLGIGHPEDIVKIIKAGIDTFDCIVPTHYARHGTAFTSKGRIDFKKSALVKDRRPLDSKCDCFVCTDYTRSYIAHLFKAKEITALSLLTFHNLYFFNKLVAKIRGDIKKGKV

SEQ ID NO: 53219 - protein, 375 aa, unidentified
  source 1..375: note = Competibacter denitrificans
  REGION 1..375: note = tr|W6M202|W6M202_9GAMM Queuine tRNA-ribosyltransferase OS=Candidatus Competibacter denitrificans Run_A_D11 OX=1400863 GN=tgt PE=3 SV=1
MRFDLLQTAGAARRGRLTFARGTVETPAFMPVGTYGAVKTLTPEEVRASGAEILLGNTFHLMLRPGTAIIGRHGDLHDFMQWDGPILTDSGGFQVFSLAAIRKITEAGVKFQSPVDGSTVFLGPEESMAVQRALGADIVMIFDECTPYPATETEARQSMELSLRWARRSQLAHGDNPAALFGIVQGGMYPHLRQISAQGLQELGFDGYAIGGLAVGEPPEERARILEHTAPLLPSAAPRYLMGVGKPEDLIEAVHRGIDLFDCVLPTRNARNGHLFTRQGDIRIRNSRYRNDNRPLDEHCTCYTCRHYSRAYLRHLDQCRETLGARLNTIHNLHYYQELMRDLRDAIVRQRFEAFAAEIYENRGQAPVAVYNDAL

SEQ ID NO: 53220 - protein, 375 aa, unidentified
  source 1..375: note = Competibacteraceae bacterium
  REGION 1..375: note = tr|A0A3C1SMT6|A0A3C1SMT6_9GAMM Queuine tRNA-ribosyltransferase OS=Candidatus Competibacteraceae bacterium OX=2053538 GN=tgt PE=3 SV=1
MNFEIFHTDGAARRGRLTFPRGTVETPAFMPVGTYGTVKTLTPEEVRASGAEILLGNTFHLMLRPGTAIIQQHGDLHDFMHWQGPILTDSGGFQVFSLAAIRKISEAGVKFQSPVDGGTVFLGPEESMAVQRALGADIVMIFDECTPYPASETEARQSMELSLRWARRSKLAHGDNPAALFGIVQGGMYPHLRQSSAEGLREIGFDGYAIGGLAVGEPPAERLHILDFTLPLLPQPAPRYLMGVGKPEDIVEAVRRGVDLFDCVLPTRNARNGHLFTHHGDIRIRNSRYRDDTRPPDERCGCYTCRHYSRAYLRHLDQCQETLGARLNTLHNLHYYQELMHGLREAIAERRLESFAAELYEKRGQMIAPVYNDAL

SEQ ID NO: 53221 - protein, 370 aa, unidentified
  source 1..370: note = Competibacteraceae bacterium
  REGION 1..370: note = tr|A0A433I3R8|A0A433I3R8_9GAMM Queuine tRNA-ribosyltransferase OS=Candidatus Competibacteraceae bacterium OX=2053538 GN=tgt PE=3 SV=1
MHFQLFQTDGAARRGQLHFPRGTVETPAFMPVGTYGTVKAMTPEELRASGAEIILGNTFHLMLRPGTTVIEQHGDLHGFMHWDGPILTDSGGFQVFSLAAIRKITEAGVKFRSPVDGGLVFLGPEESMAVQRALGSDIVMIFDECTPYPATETEARTSMALSLRWARRSKAAHGDNPAALFGIVQGGMYPPLRRISAEGLCEIGFDGYAIGGLAVGEPLAERLAMLDCTVPLLPANAPRYLMGVGKPEDIVEAVRRGIDLFDCVMPTRNARNGHLFTHYGDVRIRNSQYRDDTRPVDETCGCYTCQHYSRAYLRHLDQCREILGARLNTIHNLYYYQDLMRQLRAAIAENRFAGFMAKFYARRGRAAPPS

SEQ ID NO: 53222 - protein, 374 aa, unidentified
  source 1..374: note = Cryosericum hinesii
  REGION 1..374: note = tr|A0A398DE24|A0A398DE24_9BACT Queuine tRNA-ribosyltransferase OS=Candidatus Cryosericum hinesii; OX = 2290915 GN=tgt PE=3 SV=1
MAIFETTCQSSTGRERTGILTTAHGTVRTPVFMPVGTQATIKGLTPEQVREIGFEIILSNTYHLYLQPGDDVVHEAGGLHRFMHWDWSILTDSGGFQAMSLSRISKKSDEGIEFQSFIDGSRHMFTPERVIAIEKNLDSDVVMPLDICTQYPSERVTAEKDLARTVSWFGRAKKAMGESHQLLFGITQGGFYGDLREESTERIMELEPQGFAIGGLSVGEERQLTMDMLDHSLLHVPDDCPRYFMGMGDPIGILEIISRGVDMFDCVLPTRVARNQMVFTRDGVVKISKKIYERDFRPIDEDCSCYMCRNYTRAYLRHLFKANEMLAGTLATIHNLQFLQTMIGEIRDAIAAGTFAEYKHAFIERYTASSDRAW

SEQ ID NO: 53223 - protein, 374 aa, unidentified
  source 1..374: note = Cryosericum odellii
  REGION 1..374: note = tr|A0A398DD05|A0A398DD05_9BACT Queuine tRNA-ribosyltransferase OS=Candidatus Cryosericum odellii; OX = 2290917 GN=tgt PE=3 SV=1
MAIFETTCQSSTGRERTGILTTAHGTVRTPVFMPVGTQATIKGLTPEQVREIGFEIILSNTYHLYLQPGDDVVHEAGGLHRFMHWDWSILTDSGGFQAMSLSRISKKSDEGIEFQSFIDGSRHMFTPERVIAIEKNLDSDVVMPLDICTQYPSERVTAEKDLARTVSWFGRAKKAMGESHQLLFGITQGGFYGDLREESTERIMELEPQGFAIGGLSVGEERQLTMDMLDHSLLHAPDDRPRYFMGLGDPIGILEIISRGVDMFDCVLPTRVARNQMVFTRDGVVKISKKIYERDFHPIDEDCSCYMCRNYTRAYLRHLFKANEMLAGTLATIHNLQFLQTMIGEIRDAIAAGTFAEYKRAFIERYTASSDRAW

SEQ ID NO: 53224 - protein, 378 aa, unidentified
  source 1..378: note = Curtissbacteria bacterium
  REGION 1..378: note = tr|A0A0G0UZF0|A0A0G0UZF0_9BACT Queuine tRNA-ribosyltransferase OS=Candidatus Curtissbacteria bacterium GW2011_GWA1_40_24 OX=1618406 GN=tgt PE=3 SV=1
MLEFKILKKSKRSLARLGALKTSHGEVETPSLVPVATQAAVKTLTSEEVLLTKSQILIANTYHLHLKPGEKIVKAGGGLHRFMNWQKPLMTDSGGFQVFSLGFGADFGMSKILKFSAKEKIKLDTRPRFVKIVPEGVYFRSPLDGKELFLGPKESIKIQEDLGADIIFAFDECPPPLADYQYLKKSLALTHRWAKICLKSKKTKQALFGIVQGGKYKDLRIESAKFIGSLPFDGFGIGGEFGYDKKTMAKMLNWINKELPENKPRHLLGIGYLEDVENIVRSGVDLFDCTVPTHYGRRGIAFTSAGELNLGKSIFLKDKKLLDKNCDCSVCRNYRRNYISHLFRAKEITAMKMLTFHNLYFFNSFVEKIRNKIKDGRL

SEQ ID NO: 53225 - protein, 375 aa, unidentified
  source 1..375: note = Cyclonatronum proteinivorum
  REGION 1..375: note = tr|A0A345UJW8|A0A345UJW8_9BACT Queuine tRNA-ribosyltransferase OS=Candidatus Cyclonatronum proteinivorum OX=1457365 GN=tgt PE=3 SV=1
MFQLLKNDPKTKARLGRLTTDHGTIETPIFMPVGTLATVKAVEQQQLKDQVKAQIILGNTYHLYLRPGNGIMREAGGLHQFMKWDKPILTDSGGYQVFSLSDNRKLEERGVTFKSHLDGSKHQFTPESVIETERILGSDIMMVLDECPPYPSTYEYALNSMHLTHRWAARCKKAFDESEPLYGHRQFLFGIAQGSTYKDLRNASAEAIAALDFDGNAIGGLSVGEPNELMYEMTDHITDYLPPHKARYLMGVGTPADLLNGVARGVDMFDCVMPTRNARNGTVFTRNGIVNLRNAKWKNHHKPLDEDFPSDFCSKYTMAYLHHLVRCNEILGMTLASLQNLTFYLWLMEEVRRNLAEGTFADWYLPMIEKVKTRL

SEQ ID NO: 53226 - protein, 369 aa, unidentified
  source 1..369: note = Dactylopiibacterium carminicum
  REGION 1..369: note = tr|A0A272EQB0|A0A272EQB0_9RHOO Queuine tRNA-ribosyltransferase OS=Candidatus Dactylopiibacterium carminicum OX=857335 GN=tgt PE=3 SV=1
MKFELLSTSGQARRGRLHLAHGIVETPVFMPVGTYGTVKAMSPHELLDIGAQICLGNTFHLWLRPGMEVFKQFGGLHDFMGWSKPILTDSSGFQVFSLGALRKISEEGVKFSSPINGDKLFLTPEISMQIQHGLNSDVVMIFDECTPYPATRDEAAKSMRMSARWARRSRDEHDRLENRNALFGIVQGGMYEDLRDESQGVLEGIDFDGFAIGGLSVGEPKEDFYRVLAHTGPRLPAWKPHYLMGVGTPEDLVYGVSQGIDMFDCVMPTRNARNGWLFTRWGDLKIRNAKHKQDTRPIDESCECYTCRHFSRAYLHHLDRAQEMLGPRLMTIHNLHYYQHLMREIRAAIETDDYPAFQARFAIERQRGA

SEQ ID NO: 53227 - protein, 369 aa, unidentified
  source 1..369: note = Dadabacteria bacterium
  REGION 1..369: note = tr|A0A1F5ITU4|A0A1F5ITU4_9BACT Queuine tRNA-ribosyltransferase OS=Candidatus Dadabacteria bacterium RIFCSPHIGHO2_12_FULL_53_21 OX=1797756 GN=tgt; PE = 3 SV=1
MFRFEILKHDTGTGARLGRIHTAHGTVDTPAFMPVATQASVKALSPAEVESLGFEMVIVNAYHMYLRPGHKTIEKLGGLHKFMSWPRPITTDSGGFQVLSLSKTRKVKEEGIVFQSHLDGSSHVLTPEKCIEIQESLGVDIMMCLDECPPYPSTPEYMKKSVGLTTRWAKLCKEAQKKHDNALFGIVQGGVFPDLRRESAEGLTGIGFDGYSLGGLGIGEDSARTCEITESTLAHLPPEKPRYLMGIGKPGDIAQAVSAGVDLFDCVIPTRNARNGTLFTSHGKLVIKNARYAEDEGPIDDNCGCYTCGNFSRAYLRHLYMSKEILVLRLLTLHNLSYYGKLMTDIRESIARGGFSVLLNRVKSPGGKD

SEQ ID NO: 53228 - protein, 368 aa, unidentified
  source 1..368: note = Dadabacteria bacterium
  REGION 1..368: note = tr|A0A523I2V9|A0A523I2V9_9BACT Queuine tRNA-ribosyltransferase OS=Candidatus Dadabacteria bacterium OX=2080303 GN=tgt PE=3 SV=1
MFTFEILKSDESTDARLGKMTTAHGVVDTPAFMPVATQATVKSLSSEEIQDLGFEIIIVNAYHMYLRPGHRTVEKLGGLHKFMSWNKPIATDSGGYQVFSLSKTRKIKNEGILFRSHLDGSEHLFTPAKCIEIQEALGVDIMMCLDECPPYPSTEEYMKKSVELTTRWAKLSKESKSRTDNSLFGIVQGGVFDELREKSAGELTEIGFDGYAVGGLGIGEDQEKTYEITESTLFRLPKDKPRYLMGLGKPEDIVTAVSMGVDMFDCVIPTRNARNGTLFTSNGKLVIKNAQFAQDGRPIEEGCECYTCRIFSRAYLRHLYIAKETLVLRLLTLHNLFFYSELMKGIRDSIDSGDFPNFLTRVQSLGGK

SEQ ID NO: 53229 - protein, 392 aa, unidentified
  source 1..392: note = Daviesbacteria bacterium
  REGION 1..392: note = tr|A0A1F5JXQ1|A0A1F5JXQ1_9BACT Queuine tRNA-ribosyltransferase OS=Candidatus Daviesbacteria bacterium RIFCSPHIGHO2_02_FULL_41_10 OX=1797774 GN=tgt; PE = 3 SV=1
MKSFKILHKDGKARVGELTTQHGVIDTPNFIPVGTQATVKALGPRELSEIGAQIVLANTYHLMLRPGADLIESFGGLHKFMGWDKPIMTDSGGFQVFSLGVALEHGNSKVVAERGKRKRESNYVSKPRLNKITEEGVVFQSHLDGSKHILTPEKSIKIQRQLGADLIVAFDDHESSKHSKAQMLESIELTERWGLRSLEAYKRSCHDSSQILYGVIHGGTHKDLRIRSARFTDDNFDAIAIGGIYGDKRDLCRIVEWVVDEVSEDKPRHLLGIGEVEDLFNGVERGVDFFDCVAPMRRARFGSLYISPNSFINIRQSKFTADKKPIDPACGCLTCGNFSRAYLRHLYMADEILYHQLATLHNVYFIIHLVSAMRDSIKGNNFKKFKSGFLQD

SEQ ID NO: 53230 - protein, 392 aa, unidentified
  source 1..392: note = Daviesbacteria bacterium
  REGION 1..392: note = tr|A0A1F5NM23|A0A1F5NM23_9BACT Queuine tRNA-ribosyltransferase OS=Candidatus Daviesbacteria bacterium RIFCSPLOWO2_02_FULL_41_8 OX=1797798 GN=tgt PE=3; SV = 1
MTSFKILHKDGKARVGELTTQHGVIDTPNFIPVGTQATVKALGPRELSEIGAQIVLANTYHLMLRPGADLIESFGGLHKFMGWDKPIMTDSGGFQVFSLGVALEHGNSKVVAERGKRKRESNYVSKPRLNKITEEGVVFQSHLDGSKHILTPEKSIKIQRQLGADLIVAFDDHESSKHSKAQMLESIELTERWGLRSLEAYKRSCHDSSQILYGVIHGGTHKDLRIRSARFTDDNFDAIAIGGIYGDKRDLCRIVEWVVDEVSEDKPRHLLGIGEVEDLFNGVERGVDFFDCVAPMRRARFGSLYISPNSFINIRQSKFTADKKPIDPACGCLTCGNFSRAYLRHLYMADEILYHQLATLHNVYFIIHLVSAMRDSIKGNNFKKFKSGFLQD

SEQ ID NO: 53231 - protein, 365 aa, unidentified
  source 1..365: note = Deianiraea vastatrix
  REGION 1..365: note = tr|A0A5B8XE74|A0A5B8XE74_9RICK Queuine tRNA-ribosyltransferase OS=Candidatus Deianiraea vastatrix; OX = 2163644 GN=tgt PE=3 SV=1
MSFEFTLEKKTGNARCGTLNLAHGVVQTPVFMPVGTSASVKGLTNDMIKDTGAQIILGNTYHLMLRPGEEKMEKFGGMHKFMNWNLPILTDSGGFQVMSLSKIRKITEEGVTFRSHIDGTKYLLTPERSMDIQYKIGSDITMIFDECPAFPITHKKAKKSMELSLRWAQRSKDAYINRDGYGLFGIVQGSVFPDLREISAKSLIDIGFDGYAVGGLAVGEGQDEMLKTLDFTVPFMPEDKPRYLMGVGKPDDLIKAVARGIDMFDCVLPSRVARNGLAYTRNGEIRIKNAQYAISDRQLDEKCNCYTCKNHSLQYLHHLFKNQEILVATLMTIHNITFYQDLMKAIRSAIFAGNYSENTRLGDLF

SEQ ID NO: 53232 - protein, 374 aa, unidentified
  source 1..374: note = Delongbacteria bacterium
  REGION 1..374: note = tr|A0A2G6P356|A0A2G6P356_9BACT Queuine tRNA-ribosyltransferase OS=Candidatus Delongbacteria bacterium OX=2044594 GN=tgt PE=3 SV=1
MLTYELIKTDKKTGARAGIIHTDHGDIETPIFMPVGTIGNVKSMTNRDLEEARAQIILGNTYHLHMRPGKDLINRAGGLHKFMNWNKPILTDSGGFQVFSLAGLSKITDKGALIQSHIDGSKHFFNPELVMDIQRNIGSDIQMVIDECAPYPSTKEYALKALKRTTRWAKECRDIWVREEPLYGHYQSLFPIVQGSTYHDLRRISCNEIMELDPFEGYAIGGVSVGEPPELIKEITQVCTEILPKNKPRYLMGVGTPQDLLNCIEVGVDMFDCVMPTRNARNGTVFTSKGKLVLKGAKFKEDFNSIDKDCDCFTCRNYTRAYVRHLYNAKEMLSGQLASIHNIHFYLWLAREARKAIMEDRYYDFKKDIMSYYE

SEQ ID NO: 53233 - protein, 340 aa, unidentified
  source 1..340: note = Delongbacteria bacterium
  REGION 1..340: note = tr|A0A348P212|A0A348P212_9BACT Queuine tRNA-ribosyltransferase OS=Candidatus Delongbacteria bacterium OX=2044594 GN=tgt PE=3 SV=1
MPVGTLGNVKALTSRDLHEAQSQIILGNTYHLNNRPGMEIMMLAGGLHKFMNWDRNILTDSGGFQVFSLASLTKIKDEGVHFQSHLDGTKYFFTPESVVDIQRVIGSDIMMVLDECSHYPVEKIQAEKAVKRTTHWAKRSIEHFRSTSPLYGHDQTVFAIAQGSVFKDLRERSCNELAELDFPGYAIGGVSVGEPPEMIPEIAEVCTDILPKNKPRYLMGVGTPADILNCISVGVDMFDCVMPTRNARNGTVFTKNGKIILKGAKVKEDFTPIDDTCECYTCRNYTKAYVRHLFNAGEKLAGQLATIHNIYFYIWLTRESRKAIINGSYNKFKNSILENY

SEQ ID NO: 53234 - protein, 374 aa, unidentified
  source 1..374: note = Dependentiae bacterium
  REGION 1..374: note = tr|A0A3S0BT45|A0A3S0BT45_9BACT Queuine tRNA-ribosyltransferase OS=Candidatus Dependentiae bacterium OX=2030827 GN=EKK58_03530 PE=3 SV=1
MFLFELLYQSKRSKARVGVIHTPHGTIETPHFVPVATNGTMKAVDSVMLDPLQVQLMFCNTYHLMVQPGTDLIEKAGGLHAFMNRSKPVITDSGGFQVFSLLYGGVQNELKSSGQKKTGTMVIGISEEGVKFRSYRNGDYLLLTPESSVAAQKKLGADIIIPFDELPPFHIDQSKLEKSLHRTHRWEKRSLEAHLKDRRQQAMYSVVHGGIDQRLRTLSATLLDSLPFDGHAIGGSLGKNKQQMIDMLSYTVPLLAPEKPRHLLGIGDLASIEPILSLGIDTFDSSYPTKCARHGLLFTFQGSKKAVHKDLTTLFGPIDAGCVCYTCTHYTAAYVQHLFKAHEMIAYTLASIHNIAHMVERVNRYRQAILGGLL

SEQ ID NO: 53235 - protein, 376 aa, unidentified
  source 1..376: note = Dependentiae bacterium
  REGION 1..376: note = tr|A0A523RLX0|A0A523RLX0_9BACT Queuine tRNA-ribosyltransferase OS=Candidatus Dependentiae bacterium OX=2030827 GN=tgt PE=3 SV=1
MNAFSFELIHRSARSHARVGKIHTPHGTIDTPNFVAVGTNATIKALDSQQLENIGLQLMFCNTYHLLLQPGTQTIKKAGGLHKFMNRSMPIITDSGGFQVFSLMYGTVSDEIKSRGKKKLDNSVLKINEEGVLFRSYRDGTPILLTPESSVTAQKDLGADIIIPLDELPPYHVSQDKLRESLARTHRWEKRSFDTHMQNKNNQAMYAVIHGGLDKTLRKESCSYLTQLGFDGYAIGGSLGKTREQMFDLLSYTMPLLPENKPNHLLGIGDLDSLETCIKLGVDTFDSSHPTRCARHGLLFTKNGYKKILQANNKQCFSPIDEGCTCMTCKHYTIAYLHHLFKANELTGYMLATIHNLHFMVLLMAEYRQKILNDQL

SEQ ID NO: 53236 - protein, 370 aa, unidentified
  source 1..370: note = Desantisbacteria bacterium
  REGION 1..370: note = tr|A0A1J5EFN4|A0A1J5EFN4_9BACT Queuine tRNA-ribosyltransferase OS=Candidatus Desantisbacteria bacterium CG2_30_40_21 OX=1817895 GN=tgt PE=3 SV=1
MTAINFNIIKTSTQCRARVGKVITNHGVINTPAFMPVGTQATAKTMTPEELYEIGVEIILSNAYHLFLRPGSEIIKISGGFHRFMHWDKPILTDSGGYQIFSLNRLRKITEKGARFQSHIDGSYHLFTPESVIEFQMMLGSDIVMPLDECAPYPCGYEEARIAKDRTNRWAKRNKQTFLSINNNGSSLFGIVQGNMYPKLRHESIDELTDIGFDGYAIGGLSVGEPKELMYEMLKETVPHLPENSPHYLMGVGAPEDILEAVETGVDMFDCVMPTRHARTGEVFTSNGPLVIRNAPCATDTTPIDAECSCYVCRNYSRAYIRHLIHVNEILGVRLTTWHNLAFMMNLMRQIRESIQQERFMKFKKEFLAR

SEQ ID NO: 53237 - protein, 379 aa, unidentified
  source 1..379: note = Desantisbacteria bacterium
  REGION 1..379: note = tr|A0A2M7JDD3|A0A2M7JDD3_9BACT Queuine tRNA-ribosyltransferase OS=Candidatus Desantisbacteria bacterium CG_4_8_14_3_um_filter_40_12 OX=1974545 GN=tgt; PE = 3 SV=1
MTAINFNIIKTSTQCRARVGKVITNHGVINTPAFMPVGTQATAKTMTPEELYEIGVEIILSNAYHLFLRPGSEIIKISGGFHRFMHWDKPILTDSGGYQIFSLNRLRKITEEGARFQSHIDGSYHLFTPESVIEFQMMLGSDIVMPLDECAPYPCGYEEARIAKDRTNRWAKRNKQTFLSINNNGSSLFGIVQGNMYPKLRHESIDELTDIGFDGYAIGGLSVGEPKELMYEMLKETVPHLPENSPHYLMGVGAPEDILEAVETGVDMFDCVMPTRHARTGEVFTSNGPLVIRNAPCATDTTPIDAECSCYVCRNYSRAYIRHLIHVNEILGVRLTTWHNLAFMMNLMRQIRESIQQERFMEFKKEFLARWAIKEQVTC

SEQ ID NO: 53238 - protein, 389 aa, unidentified
  source 1..389: note = Desulfofervidus auxilii
  REGION 1..389: note = tr|A0A127ALE7|A0A127ALE7_9DELT Queuine tRNA-ribosyltransferase OS=Candidatus Desulfofervidus auxilii OX=1621989 GN=tgt PE=3 SV=1
MAMSCSSFNTPALEFAIQAQDGAARAGILKTQHGLIRTPVFMPVGTLASIKSLTSEDLKEIGVEIILANTYHLYLRPGIELIAKFEGLNHFMHWDGPILTDSGGFQIYSLAAKREIREEGATFRSHIDGSLHFLTPEKVTAFQEALGADIIMCFDECLPYPVDYDYAQKSLALTLRWAKRCKEAHCSSKQALFGIVQGSFYPNLRRQGAKLLTEIGFDGYAIGGLSVGEPKEKTWEAIEIANETLPQNQPRYAMGIGLPEDIIEAVWRGIDMFDCVVPTRHARTGTLFTSFGPLVIRHSCYADDKRPIDENCDCYVCRHYSRAYLRHLFITKELLAYRLNSYHNIYYFVSFMRQIRQAILSGCLAQFRKTFYERRNQLKEGNKYVDNLV

SEQ ID NO: 53239 - protein, 375 aa, unidentified
  source 1..375: note = Desulforudis sp.
  REGION 1..375: note = tr|A0A3A6MZX8|A0A3A6MZX8_9FIRM Queuine tRNA-ribosyltransferase OS=Candidatus Desulforudis sp.; OX = 2093368 GN=tgt PE=3 SV=1
MPVAISFELIKTDPETGARLGRLTTPHGVVDTPVFMPVGTQATVKTMTPEEVYDLGGRIILSNTYHLYLRPGHELIREAGGLHRFMHWDGPILTDSGGFQVFSLAALRKISDEGVMFQSHIDGSKHLFTPEKVADIEGVIGSDIAMVFDECAPYPCSYEDAVKAHERTVHWATRTRDHLAQIGSDQAFFGIVQGSVVRELREASARALVELDFPGYGIGGLSVGEPKPLMYDALDWTVPLLPPEKPRYLMGVGSPDCVLEAVARGVDMFDCVLPTRMARHGAVFTTTGRLNLRNAKNALDFGPLDPGCGCYTCRHFSRAYMHHMFKTGEILGLRLATIHNLRFLLDLTERIREALAENRFAFLKTQYMEAYLTGG

SEQ ID NO: 53240 - protein, 372 aa, unidentified
  source 1..372: note = Desulforudis audaxviator
  REGION 1..372: note = tr|A0A3S8S5K3|A0A3S8S5K3_9FIRM Queuine tRNA-ribosyltransferase OS=Candidatus Desulforudis audaxviator OX=471827 GN=tgt PE=3 SV=1
MGILFEVLKQDSRTRARLGRLTTPHGVVETPVFMPVGTQATVKTMTPEEVRDLGARIILSNTYHLYLRPGHELVREAGGLHRFMHWNGPILTDSGGFQVFSLAPLRKLSDEGVEFRSHIDGSRHFFTPEKVVAVQEALGSDIAMVLDECAPYPCSYKDARTATERTTRWAARARAAWNSDGATALFGIIQGSVYRDLREESTRALVDLDFPGYGIGGLSVGEPKPLMYEALEWVIPLIPEDRPRYLMGVGSPDCLFEGIARGVDMFDCVLPTRMARHGAVFTHTGRLVVRNAPNARDFGPLDPGCTCYTCRHFSRAYVHHLLRAGEVLGIRLTTIHNLHFLLDLARRIREAIAEDRFHSLKEQFLAACLTPA

SEQ ID NO: 53241 - protein, 394 aa, unidentified
  source 1..394: note = Desulfosporosinus infrequens
  REGION 1..394: note = tr|A0A2U3LJW7|A0A2U3LJW7_9FIRM Queuine tRNA-ribosyltransferase OS=Candidatus Desulfosporosinus infrequens OX=2043169 GN=tgt PE=3 SV=1
MTSDLKQRASTKATIIQKEVKGLTAVHLEIIKADSRTRARLGKLHTPHGVIDTPVFMPVGTQGTVKTITPEEIKEIGAGIILSNTYHLFLRPGQELIREAGGLHRFMNWDGAILTDSGGFQVFSLGDLRKIKEDGVEFRSHIDGSRQFLSPEIATQVQMALGSDIVMAFDECAPYPCTHEYAKDSLERTTRWLKRCKETLTTTDTQALFGIVQGGMYEDLRRQSAAEIMELDLPGYAIGGLSVGEPKELMYEVLDYTVSLLPKEKPRYLMGVGSPDALIEGVMRGIDMFDCVLPTRIARNGTAMTRYGKVIVRNAGSAHDFGPIDPSCDCYTCRNYSRAYIRHLIKADEILGLRLMTIHNLRYLQNLMREIREAIKCDRLPEYRKKCFEDYGYV

SEQ ID NO: 53242 - protein, 378 aa, unidentified
  source 1..378: note = Desulfovibrio trichonymphae
  REGION 1..378: note = tr|A0A1J1DRT4|A0A1J1DRT4_9DELT Queuine tRNA-ribosyltransferase OS=Candidatus Desulfovibrio trichonymphae OX=1725232 GN=tgt PE=3 SV=1
MTSTVFTLLQTDGTARAGLLQTAHGAVPTPVFMPVGTVGSVKCLAPDDLHAVGAPIILGNTYHLYLRPGDALVARCGGLHNFASWPGAALTDSGGFQIFSLSSLRKIQEEGVEFRSHLDGSRHFFTPENVVNIQRNLNADIMMVLDECLSYGTDYACTEKSLALTTRWAKRARAAYPAGAAGNLLFGIVQGGFFKDLRSRSAEEICTVDFDGFAVGGLSVGESKAEMYEMLSHTAPLLPRDKPRYLMGVGTPLDIVHGIHAGMDMFDCVLPTRNARNGTLYTSVGKINIKRREYAEDESPLDPDCGCYTCRTFSRAYLRHLFASREMLSFRLNSLHNLTYYLRLTREARRAILQNRFTAMLARMKALYPDEARAGCGA

SEQ ID NO: 53243 - protein, 339 aa, unidentified
  source 1..339: note = Dojkabacteria bacterium
  REGION 1..339: note = tr|A0A2N2F315|A0A2N2F315_9BACT Queuine tRNA-ribosyltransferase OS=Candidatus Dojkabacteria bacterium HGW-Dojkabacteria-1 OX=2013761 GN=tgt PE=3 SV=1
MNLETLKQKYFFMPDATRGAVRYLTTKQLKETGTEAIVTNTLHLLIHPGPDVIQELGGIKKMMGWDGIVFTDSGGFQVFSLIHSKKWKGKVHENGATFKSPREGNVYELTPESSIDIQIKIGSDVLVCLDDCRKTDLNRYEAEQSVERTIKWAKRCKDHFEKEYGGTAKTGKLLTCVVQGANFPDLREKCAKALVEIGFDGYNFGGFVVDSEGRLVEDEMSAVIENVPKDTIRYAMGVGKPEDILKAAKIGFNLFDTVLVTRNARHGTLYTSEGELRMGNSEMALDKRPVDSNCNCECCSNYTRAYIHHMMKNGEATALTLATIHNLTHYQSLISKLNS

SEQ ID NO: 53244 - protein, 374 aa, unidentified
  source 1..374: note = Doolittlea endobia
  REGION 1..374: note = tr|A0A143WRY1|A0A143WRY1_9ENTR Queuine tRNA-ribosyltransferase OS=Candidatus Doolittlea endobia; OX = 1778262 GN=tgt PE=3 SV=1
MEYQLLKTDGQARRGRLVFERGVVETPAFMPVGTYGTVKGITPEEAKETGAQILLGNTFHLWLRPGQTVIKLHGDLHDFMQWHGPILTDSGGFQVFSLKGIHKIAEEGVHFRHPINGSRIFLSPEKSMEIQYDLGSDIVMIFDECTPYPLDWSYAKQSMEMSLRWAARSRQRFDELDNPNMLFGIIHGGVYEDLRDVSVKKLVEIGFDGYAVGGLAVGEPKADMHRILSHLCPQIPADKPRYLMGVGKPEDLVEGVCRGIDMFDCVIPTRNARNGHLFVTDGVVKIRNIRYKDDVALLDAECDCYTCRNYSRAYLHHLDHCNEILGARLNTIHNLRYYQRLMADLRQTIDEGTLGYFVDAFYRRINKPNFIFNC

SEQ ID NO: 53245 - protein, 402 aa, unidentified
  source 1..402: note = Dormibacter sp.
  REGION 1..402: note = tr|A0A2W5YZC1|A0A2W5YZC1_9BACT Queuine tRNA-ribosyltransferase OS=Candidatus Dormibacter sp. RRmetagenome_bin12 OX=2599630 GN=tgt PE=3 SV=1
MSALTIDARDGSARTGRLRTAHGDVNTPAFMPVGTHATVKSLDPDEVRACGADIVLCNAYHLALRPGVDLIERAGGLHSFMAWDGPILTDSGGFQLVSLRTVTAVDDDAATFVSPYDGARLRVTPEEAVGLQARMNADIVMCLDQPVAWGADAAQAEAATKRTHRWAERCAAVHPGDGRLLFGICQGGFDEQARAASASRVAGLDFDGIAVGGLSVGEPLEVMEAMTAASVAELPVDRPRYFMGLGTDAELLTMVALGVDMFDCVAPTRLARTGAALTPDGRLPLRRAVYRDDLRPLVDGCPCPACRRFSRAYLRHLIGAGEILGHRLLTLHNVTHLSTLMAGAREAISAGRFGVFRAETEARLRAAGDGEEGADAADAGQPQRIGRTVESARIPGTLGPRG

SEQ ID NO: 53246 - protein, 395 aa, unidentified
  source 1..395: note = Dormibacteraeota bacterium
  REGION 1..395: note = tr|A0A2W6AKA7|A0A2W6AKA7_9BACT Queuine tRNA-ribosyltransferase OS=Candidatus Dormibacteraeota bacterium OX=2052315 GN=tgt PE=3 SV=1
MFEFQVLATDRAARRGVIRTDHGELETPAFFAVATRAALKGVSPDAAWEVGVRSLICNAYHLTVQPGPELVEAAGGLHRFMGWPGVLATDSGGFQIFSLRHGQVADEVKGRRRLPPAEGDPIDAVRVDEEGADFRSYLDGSRHRFTPENNMALQRSLGADLLFCLDECTPFHVPAEYTRAAMERNARWARRCLDAFHRLGMEERQALFGIVHGGVYPELRRISAAAMAALPFSGFGIGDCLGESKQDWYRLVELVCPLLPEERPRHLLGVGEPDDLVEGALRGIDTFDCAMPTRIARHGQALVQGMPRFRLDLAKAERRGEDRPIEEGCPCTACRRFGRAYLHHLFRAGEMLGIALAAEHNLAFTARLMARIREAISAGSLAELRAEQRMPAASG

SEQ ID NO: 53247 - protein, 410 aa, unidentified
  source 1..410: note = Dormibacteraeota bacterium
  REGION 1..410: note = tr|A0A2W5YFJ4|A0A2W5YFJ4_9BACT Queuine tRNA-ribosyltransferase OS=Candidatus Dormibacteraeota bacterium OX=2052315 GN=tgt PE=3 SV=1
MLEFSITAQDGAARRGVIRTEHGELETPAFFAVATQAALKGLDPAVAAAAGVHSAICNSFHLTLEPGPEVIRRAGGLHTYMGWPGVLATDSGGFQVFSLRHGQVADELKGRRRIPDFGREEDALDAVRVDEEGADFRSYVDGSRHRFTPENNMQLQQALGADILFCLDECTPFHVTREYTQIATERNARWAQRCLDAFRVLGPAAPQSLFGIVHGGVYPDLRRWSAERMAELDFDGYGIGDCLGESKSDWYSVVDLVRPLLPEARPRHLLGVGEPDDLVEGALRGIDSFDCAMPSRIARHGQALHLGLPRNRLDLAKADRKLEDQPIEEGCPCSACRRFGRAYLNHLVKAKEILGISLLTEHNLAFTNRLMRRIREAISAGRLAELRAEVRGMARPERGVVRRQDSSEVP

SEQ ID NO: 53248 - protein, 393 aa, unidentified
  source 1..393: note = Doudnabacteria bacterium
  REGION 1..393: note = tr|A0A1F5QAC7|A0A1F5QAC7_9BACT Queuine tRNA-ribosyltransferase OS=Candidatus Doudnabacteria bacterium RIFCSPLOWO2_02_FULL_48_13 OX=1817845 GN=tgt PE=3; SV = 1
MDFFQILKNDINSKARLGIINTAHGPVKTPAFLPIGTRGSVKAVTSEELRFWGAEMILANTYHLWMRPGDALINKAGGLHKFMGWDGPIFTDSGGYQVYSLGEKITESTSERKPTLKKITEKGVEFRNELDGALHVLSPEESIQIQSNLGSDIAVVLDDVPGLPATKTRLESSLELTLKWAERAKKQFEKITPESVNPGQKLFGVVQGGDREYLRKKSVRALQKIGFDGYGIGGLAIGAVADDPEIMYRVIDFTVPYLEDDKPRHLLGVGYPEQIIKSIALGMDTFDCVIPTRNARHGELFINQKNGNGAGYAALKILNKQYAEDFTPIDNTCSCYGCRHHNRAYLRHLFMSGEPLGIRLATMHNLRFYLDFMEKVRRSIEFESFSELLALYQ

SEQ ID NO: 53249 - protein, 380 aa, unidentified
  source 1..380: note = Doudnabacteria bacterium
  REGION 1..380: note = tr|A0A1F5PYB7|A0A1F5PYB7_9BACT Queuine tRNA-ribosyltransferase OS=Candidatus Doudnabacteria bacterium RIFCSPLOWO2_01_FULL_44_21 OX=1817841 GN=tgt PE=3; SV = 1
MFTITKKDQKTKARIGVLQTAHGNVHTPVFLPIGTKGAIKSIAAEELRFWGAEMILANTYHLWQRPGDALIAKAGGLHKFMNWKGGIFTDSGGFQAFSLAKLTKVSDQGVSFMSEIDGNTHFLTPELSVQIQLNLGSDIALVLDEFGEAEADKKSVAIMVLRTRAWAKRARLMHEKLIANSINPNQQLWGIVQGGVFRDLRHQSAEAIKEIGFLGYCIGGVANGGESEELMYQAVKFSNPHLEEDKPKHLLGVGLPEQIVKAVSLGCDSFDCVIPTREGRHGKFFVNLKPQDGEGYYTLNITAEKYKEDFEPIDNTCDCYGCQNYTKSYIRHLFMSEEPLGIRLATMHNLKFYLNLTQRIRDSIETGKFQEFSKKYQLVL

SEQ ID NO: 53250 - protein, 373 aa, unidentified
  source 1..373: note = Edwardsbacteria bacterium
  REGION 1..373: note = tr|A0A1F5RHT3|A0A1F5RHT3_9BACT Queuine tRNA-ribosyltransferase OS=Candidatus Edwardsbacteria bacterium GWF2_54_11 OX=1817851 GN=tgt PE=3 SV=1
MHFKLEHTSGRARKGTITTAHGEIPTPIFMPVGTQGTVKAMTPQDLEAAGARIILGNAYHLYLRPGQELVKKAGGLHKFMGWDRPILTDSGGFQVFSLADLRKIKEDGVEFQSHLDGSHHKFTPENVMQLEVDLGADIIMNFDECIPYPSTPEYTEDSTARTTRWAKRCREKFLELKEGDTDSQALFGIVQGGTHPELRQRSAREMLEIGFEGYAIGGLAIGEPKEATWEAIEAANQILPTNKPRYMMGVGFPEDIIKGVWLGVDMFDCVIPTRNARNGSLFTSSGKLAMKNAVHQNDLGPVDEGCDCYLCRNFSRAYLRHLFMSGEILAAHLATVHNLRFYLAMMENIRQAISDDKFDEWSRGFLDSYHSQQ

SEQ ID NO: 53251 - protein, 373 aa, unidentified; identical to SEQ ID NO: 53250
  source 1..373: note = Edwardsbacteria bacterium
  REGION 1..373: note = tr|A0A3B9E721|A0A3B9E721_9BACT Queuine tRNA-ribosyltransferase OS=Candidatus Edwardsbacteria bacterium OX=2053551 GN=tgt PE=3 SV=1

SEQ ID NO: 53252 - protein, 386 aa, unidentified
  source 1..386: note = Eisenbacteria bacterium
  REGION 1..386: note = tr|A0A1F5RGR3|A0A1F5RGR3_9BACT Queuine tRNA-ribosyltransferase OS=Candidatus Eisenbacteria bacterium RBG_16_71_46 OX=1817856 GN=tgt PE=3 SV=1
MALTFSLEATDRGAAARAGRMTTAHGEVLTPAFMPVGTAGSVKTLTPDEVAAAGADILLANTYHLWLRPGVETVRRMGGLHRFMGWPHAILTDSGGFQIMSLSPLRKISDEGVEFRSHLDGSTHRLTPEEAVRVQDGLGSDIAMSLDELVELPAEPEQLRVAADRTVAWAARGLAERERLRGEGRGGMALFGINQGGTDPERRRHCFERIGALPFDGYALGGLWVGEGRRLGLEMVEHDCARFPADRPRYLMGVGHPVDVIESVARGVDLFDCVLPTRNARRGTVFVSTGRLVVKNAAYAQDPRPLDPECDCYTCRRFTRAYLRHLFAAGELLGMRLASLHAVHHMTQLVRRARRAIVEGRFAAFRSDFLEKYHSGETLSPSLSPG

SEQ ID NO: 53253 - protein, 376 aa, unidentified
  source 1..376: note = Eisenbacteria bacterium
  REGION 1..376: note = tr|A0A538TMD9|A0A538TMD9_9BACT Queuine tRNA-ribosyltransferase OS=Candidatus Eisenbacteria bacterium OX=2212470 GN=tgt PE=3 SV=1
MTSFALERGGAVAPRSGLLHTAHGTVRTPAFMPVGTAGSVKGLSPAEIRAAGTQILLANTYHLMLRPGADVVRELGGLHRMMAWDGPILTDSGGYQIMSLRERVKVREEGVEFRSHLDGRTEFLTPERAMEIQADIGSDIAVTLDHAVLLPIDPAAAREAAERSLRWAERSLRRARECSTPTGAAQLLFAIAQGADDLTLRREMAERTASLPCDGFAIGGLSVGESKEATWELTRATNEALPSDRPRYLMGMGTPLDLLEAVARGVDLFDCVLPTRNARNGMAFTSEGPLNIRNAAHARDPRPLDPECTCEACLQFSRAYLRHLHQAGEILAHRMLTLHNVTFYQTLMSAARAAIERGAFDAFAGAFRARYRDRAG

SEQ ID NO: 53254 - protein, 375 aa, unidentified
  source 1..375: note = Electronema sp.
  REGION 1..375: note = tr|A0A521FZW6|A0A521FZW6_9DELT Queuine tRNA-ribosyltransferase OS=Candidatus Electronema sp. GS; OX = 2005002 GN=tgt PE=3 SV=1
MSFNSPYTLLHQSSQCPARCGQVATLHGTFNTPIFMPVGTLATVKAVTPENLLELGAQIILGNTYHLFIRPGHELIRSVFGGLHKFMHWDRPILTDSGGFQIFSLKELAKITELGAEFRSHLDGSKLFLSPEKAVEVQEALGSDIMMVLDTCIPYPASYDEAAKATALTSRWAKRCRDAQAETGQLLFGIVQGGMYPELRRQSAEELIDIGFDGYALGGLSVGEPKEQMHAMLDATVHLLPDSHAKYLMGVGTPEDLVEGVFRGVDMFDCVMPTRNARNGMLFTSSGRVVIKNSCYREDQGPVDERCNCYTCRNYSRAYLRHLFQCNEILAYQLNSIHNLHYYCSLMAEMRRAIAEDRFVEWRKGFYAQRGQSYY

SEQ ID NO: 53255 - protein, 381 aa, unidentified
  source 1..381: note = Electrothrix aarhusiensis
  REGION 1..381: note = tr|A0A444J2W1|A0A444J2W1_9DELT Queuine tRNA-ribosyltransferase OS=Candidatus Electrothrix aarhusiensis OX=1859131 GN=tgt PE=3 SV=1
MPIAMPIKNTSLSPYTLLHQSSECPARCGQVQTLHGTFDTPVFMPVGTLGTVKAVTPENLEELGAQIILGNTYHLFIRPGHELIRSFGGLHGFMHWDKPILTDSGGFQIFSLKELAKITEEGATFRSHMDGAKLFLSPEKAVEIQEALGSDIMMVLDTCIPYPATLDEAREATALTARWAKRCREAQSPTGQLLFGILQGGMYPELRKPAAEELIEIGFDGYAMGGLSVGEPKELMHEMLDASVHLLPDSHPKYLMGVGTPEDLVEGVYRGVDMFDCVMPTRNARNGMLFTSQGRVVIKNSRYREDQRPLDEQCTCYTCRNYSRAYLRHLFQCREILAYQLNSIHNLHYYCTLMAGMRQAIAEDRFLDFRRNFYAQRESPH

SEQ ID NO: 53256 - protein, 381 aa, unidentified
  source 1..381: note = Electrothrix marina
  REGION 1..381: note = tr|A0A444JD68|A0A444JD68_9DELT Queuine tRNA-ribosyltransferase OS=Candidatus Electrothrix marina; OX = 1859130 GN=tgt PE=3 SV=1
MPIAMPIKNTSLSPYTLLHQSTECPARCGQVRTLHGTFDTPVFMPVGTLGTVKAVTPENLEELGAQIILGNTYHLFIRPGHELVRSFGGLHGFMHWDKPILTDSGGFQIFSLKELAKITEEGAMFRSHMDGARLFLSPEKAVEVQEALGSDIMMVLDTCIPYPATLDEARKATALTARWAKRCREAQSDTGQLLFGILQGGMYPELRKPAAEELIEIGFDGYAMGGLSVGEPKDLMHEMLDASVHLLPDSHPKYLMGVGTPEDLVEGVYRGVDMFDCVMPTRNARNGMLFTSQGRVVIKNSRYREDQRPLDEQCTCYTCRHYSRAYLRHLFQCREILAYQLNSIHNLHYYCTLMAGMRQAIAEDRFLDFRRNFYAQRESPH

SEQ ID NO: 53257 - protein, 382 aa, unidentified
  source 1..382: note = Endobugula sertula
  REGION 1..382: note = tr|A0A1D2QNP5|A0A1D2QNP5_9GAMM Queuine tRNA-ribosyltransferase OS=Candidatus Endobugula sertula; OX = 62101 GN=tgt PE=3 SV=1
MQFELDTNDGHARRGRLCFPRGDVETPAFMPVGTYGTVKGMLPRDIEDIGAHIILGNTFHLMLRPGTDVIKSQFHVQSGTPETAPGTLHDFMHWQKPILTDSGGFQVFSLGKMRKITEEGVTFNSPIDGSRIFIGPEKSIEVQRDLGSDIVMIFDECTPYPATKEEAGASMQLSLRWAERSMKAHDNSPSALFGIIQGGMYEDLRKDSLDALEPMNFDGYAIGGLSVGEPKEDMVRILDALVHQMPVNKPRYLMGVGKPEDIVEAVRRGVDMFDCVMPTRNARNGHLFTFQGVVKIRNAKHRSSTKPLDSRCDCYTCTHFTRAYLHHLDKCREMLGAQLNTIHNLRHYQQLMAGLREAIAEQRLDVFIKAFYANLGKEVPPL

SEQ ID NO: 53258 - protein, 377 aa, unidentified
  source 1..377: note = Endolissoclinum sp.
  REGION 1..377: note = tr|A0A1Z9Y1C0|A0A1Z9Y1C0_9PROT Queuine tRNA-ribosyltransferase OS=Candidatus Endolissoclinum sp. TMED26 OX=1986636 GN=tgt PE=3 SV=1
MSEALTFEVLAEDGAARRGRLMTAHGSIETPTFMPVGTAGTVKAMTVEGVAATGAEIILGNTYHLMLRPGADVVAELGGLHEFSQWSGPILTDSGGFQVMSLAKLRKISEEGVRFNSHIDGTAMMLSPEESIKIQHKLGADITMVFDECTPFPASHEVADKSMALSLRWAERSKQAFVPRPGHGLFGIVQGSVYEDLRHRSIAGLTEIGFDGYAVGGLAVGEGQEMMFQTLDFTTPKLPIDRPRYLMGVGKPADIVGAVARGIDMFDCVMPTRSGRTGQGFTQRGVVNIRNARHQRDPRPLDESCACPTCQGYSRAYLNHLFKAGEVLGLMLLTQHNLQHYQDLMAGLRTAIAEGNLEAHIKQFHAQQARGDIPPLA

SEQ ID NO: 53259 - protein, 375 aa, unidentified
  source 1..375: note = Endolissoclinum sp.
  REGION 1..375: note = tr|A0A1Z8SS43|A0A1Z8SS43_9PROT Queuine tRNA-ribosyltransferase OS=Candidatus Endolissoclinum sp. TMED37 OX=1986638 GN=tgt PE=3 SV=1
MSISFSVDCKDGFARCGSLLTQHGKIDTPTFMPVGTAATVKAMMPASVKETGAQILLGNTYHLMLRPGASRIKDLGGLQKFMGWDGPILTDSGGYQVMSLSQLRKLDEDGVTFRSHIDGSYHKLTPEKSIEIQLDLGSNITMAFDECTPFPVSEEEAERSMLLSMRWAERSKQSFNDRDGFGLFGIVQGSIFESLRIQSAEKLKRIGFDGYAVGGLAVGEGHETMIKVLKMTVPCLPEDKPRYLMGVGKPRDLLAAVQNGVDMFDCVLPTRSGRTGQAFTRRGEVNLRNARHASDPRPLDAECNCPACQQFSRAYLHHLVKSGEILGAMLLTWHNLGYYQDLMRGLREAIKNGLLAEFTALFHEEQSLGDIASIK

SEQ ID NO: 53260 - protein, 386 aa, unidentified
  source 1..386: note = Endomicrobium trichonymphae
  REGION 1..386: note = tr|A0A1E5IJZ9|A0A1E5IJZ9_9BACT Queuine tRNA-ribosyltransferase OS=Candidatus Endomicrobium trichonymphae OX=1408204 GN=tgt PE=3 SV=1
MECGSYQLIKKSSECRARRGKVYTARGVIDTPVFMPVGTHGSVKGVAAEFLKSSGAQIILANSYHLYLRPGTEVIKKAGGIQKFNSWNSPMLTDSGGFQMFSLSDIRKITKDGAEFQSHIDGSKHFFSPEKSMQVQKDIGADIIMCFDDCAPYCSDYEYAKNSMELSLKWAKRCKEEFYKDDSYKTQSLFGIIQGSVYNDLRIRSAREMLNVGFTGYAIGGLSIGEPKKDMHSVLKNVLPVIPENKARYLMGVGMPEDLWECVERGIDMFDCVIPTRNGRNGQVFTSLGKINLRNAEFKKDFSSLDPNCACPACTGYSKAYLNHLIRSREILYLSLLSLHNIYFMVDLMLKIRKSLKNDTFFKSKKEFFEKYYSRDKFSRNLCSKK

SEQ ID NO: 53261 - protein, 338 aa, unidentified
  source 1..338: note = Enterovibrio escacola
  REGION 1..338: note = tr|A0A2A5T5T8|A0A2A5T5T8_9GAMM Queuine tRNA-ribosyltransferase OS=Candidatus Enterovibrio escacola OX=1927127 GN=tgt PE=3 SV=1
MPVGTCGTVKGMTPEEVVETGAQILLGNTFHLWLRPGQEVIRAHGDLHDFMNWQGPILTDSGGFQVFSLGKTSKITEEGVYFRNPINGNKVFMDAEKSMEIQYSLGSDIVMVFDECTPYPVTYEEAKKSTEMNLRWAQRSRDHFDSMGNNNALFGIIQGSVYEDLRDESFEGLSKIGFDGYAVGGLAVGEPKEYMHCILEHVCSKLPENKPRYLMGVGKPEDLVEGVRRGIDMFDCVMPTRNARNGHLFVTGGVIKIRNAMHKNDTSALDPECDCYTCHNYSKAYLHHLDRCNEILGARLNTIHNLRYYQRLMESLRNAIDQGTLNNFIREFYASRDM

SEQ ID NO: 53262 - protein, 375 aa, unidentified
  source 1..375: note = Enterovibrio luxaltus
  REGION 1..375: note = tr|A0A291BA47|A0A291BA47_9GAMM Queuine tRNA-ribosyltransferase OS=Candidatus Enterovibrio luxaltus OX=1927128 GN=tgt PE=3 SV=1
MKYELINKEGQARRGRLIFGRGTVETPAFMPVGTYGTVKGMTPEEVAETGAEILLGNTFHLWLRPGQEVIRAHGDLHDFMHWQGPILTDSGGFQVFSLGKICKITEKGVHFRSPVNGDCVFMDAEKSMEIQYDLGSDIVMIFDECTPYPASHDEAKKSMEMSLRWAQRSRNHFDQMGNKHALFGIAQGSVYESLRDASIMGLTKVGFDGYAVGGLAVGEPKADMYRILEHTCSRLPEDKPRYLMGVGTPENLVESVRRGVDMFDCVMPTRNARNGYLFVTGGVFKIRNAMYKNDTTALDPQCDCYTCLNYSKAYLHHLDRCNEILGVRLNTIHNLRYYQRLMKSLRNAIGEGKLGTFVEKFYARRGCEVPLLKED

SEQ ID NO: 53263 - protein, 263 aa, unidentified
  source 1..263: note = Entotheonella gemina
  REGION 1..263: note = tr|W4M9Z4|W4M9Z4_9BACT Queuine tRNA-ribosyltransferase (Fragment) OS=Candidatus Entotheonella gemina OX=1429439 GN=ETSY2_13780 PE=3 SV=1
LGQLARVTEEGARFQSHIDGSRHLISPERAMEIQVALGSDIIMALDECTPYPSTYDSARLSMELTCRWAERCVAAAEDRPGGLFGIVQGSIYPELRSRCADVLRELPFDGYAIGGLAMGEPQETMYDLVGHTASQLPAHQPRYLMGVGRPRDLLQSVRLGVDMFDCVMPTRNARNGFLFTSEGRVVIKNARYRDDDRPLDPACECYTCQHHSRAYLRHLFMAGEILGLHLNTVHNVTYYVQLMAQIRQAIRSGTLAEFTVPDV

SEQ ID NO: 53264 - protein, 364 aa, unidentified
  source 1..364: note = Entotheonella factor
  REGION 1..364: note = tr|W4LXR9|W4LXR9_9BACT Queuine tRNA-ribosyltransferase OS=Candidatus Entotheonella factor; OX = 1429438 GN=tgt PE=3 SV=1
MALSFELLQTDTASQARLGKLTTPHGMIETPVFMPVGTQATVKTLRTDDLVRCGASIILGNTYHLYLRPGHELIRQFGGLHGFMNWPHPILTDSGGFQIFSLGQLARVTEEGARFQSHIDGSRHLISPERAMEIQVALGSDIIMALDECTSYPSTYDSARLSMELTCRWAERCVAAAEDRPGGLFGIVQGSIYPELRSRCADVLRDLPFDGYAIGGLAVGEPQETMYDLVGHTASQLPERQPRYLMGVGRPRDLLQSVRLGVDMFDCVMPTRNARNGFLFTSEGRVVIKNARYRDDDRPVDPTCGCYTCQHHSRAYLRHLFMAGEILGLHLNTVHNVTYYVQLMAQIRQAIRDGTLANFTVPDV

SEQ ID NO: 53265 - protein, 368 aa, unidentified
  source 1..368: note = Eremiobacter sp.
  REGION 1..368: note = tr|A0A2W5XDR6|A0A2W5XDR6_9BACT Queuine tRNA-ribosyltransferase OS=Candidatus Eremiobacter sp. RRmetagenome_bin22 OX=2599629 GN=tgt PE=3 SV=1
MSCLTLAARDGAARAGTLHTAHGEIPTPVFMPVGTQASVKGLAPAELTRLNVRLILANAYHLYLRPGADLIAKAGGLHAFMSWPGTILTDSGGFQVFSLARLSTVDDEGYHFASHLDGSRHTFTPESVVRIQEQLRSDIAMVLDDCAPAGVDEAAARASANRTLSWARRACAAIQPSAQLTFAIVQGSTFAGLRREQCRALAELDFPGYALGGLWVGEGRSAGLSMVELCCAELPVDKPRYLMGVGTPEDLLDCIAAGVDMFDCVYPTRCARHALALTTRGRVNLRNASMRDDFRPLDADCACDVCAEFSRAYLAHCFRAEEALGPRLVSLHNIAYMSGLARAARAAIVEQRFEAWRATCSAALLDPV

SEQ ID NO: 53266 - protein, 369 aa, unidentified
  source 1..369: note = Erwinia haradaeae
  REGION 1..369: note = tr|A0A451CZB2|A0A451CZB2_9GAMM Queuine tRNA-ribosyltransferase OS=Candidatus Erwinia haradaeae; OX = 1922217 GN=tgt PE=3 SV=1
MKFILHSTDGFARRGCLIFDRGIVETPAFMPVGTYGSVKGVSPEELHNTGSQMILSNTFHLWLRPGTKIIKMHGDLHNFMKWQGPILTDSGGFQVFSLGSSNTISEEGVFFRNPINGSEVFLDAEKSMEIQYTLGSDVVMIFDECMSYPSSWKDAERSVKRSLNWAKRSRDRFESLGNKNALFGIIQGGIYTDLRDISVQGLLEIGFDGYAIGGLAVGEPKQDMKRILKHVCQKLSQDKPRYLMGIGRPEDLVEGVCCGIDMFDCVMPTRNARNGYLFVSDGIIKIRNTKYKEDTASLDSTCDCYTCLHYSRAYLHHLDRCKEMLGARLNTIHNLHYYQSLMSNLRQAITQGVLNQFVNDFYKKSLVYN

SEQ ID NO: 53267 - protein, 376 aa, unidentified
  source 1..376: note = Erwinia dacicola
  REGION 1..376: note = tr|A0A1E7YXX2|A0A1E7YXX2_9GAMM Queuine tRNA-ribosyltransferase OS=Candidatus Erwinia dacicola; OX = 252393 GN=tgt PE=3 SV=1
MKFELDTTDDRARRGRLVFDRGVVETPAFMPVGTYGTVKGMTSEEVQDTGAQIILGNTFHLWLRPGQEIMKLHGDLHDFMQWKGPILTDSGGFQVFSLGDIRKITEKGVHFRNPINGDAIFLDPEKSMEIQYDLGSDTVMIFDECTPYLADWDYAKRSMEMSLRWAQRSRDRFDFLGNKNALFGIIQGSVYEDLRDVSVKGLVEIGFDGYAVGGLAVGEPKEDMHRILEHVCPQLPQDKPRYLMGVGKPQDLVEGVHRGIDMFDCVMPTRNARNGHLFVTDGVVKIRNAKYKDDTSPLDAECDCYTCRNYSRAYLYHLERCNEILGARLNTIHNLRYYQRLMAGLRQAIEEGKLEHFVTEFYQRTGLAVPPLPSGN

SEQ ID NO: 53268 - protein, 363 aa, unidentified
  source 1..363: note = Evansia muelleri
  REGION 1..363: note = tr|A0A078KB76|A0A078KB76_9GAMM Queuine tRNA-ribosyltransferase OS=Candidatus Evansia muelleri; OX = 1495769 GN=tgt PE=3 SV=1
MRFRLLSKIGRARYGQLIFNRGIVDTPNFIPVGTYGAIKGLNHDDLNAGGVEIILSNTFHLLLRPGLNSIIKHGGLHNFIQWKKPILTDSGGFQVFSFVNMIKIIEEGVYFNINGKNIFIGPEESVLIQRILGSDIIMIFDYCPPYPMTYKNAKTSMELSLRWAKRSHYAHVGSRSALFGIIQGSIYRKLRERSLLGLMDIGFDGLAIGGLSVGEPKQEMIKVLNYLPMLMPDNKPRYLMGVGKPEDLVEGVCRGIDIFDCVIPTRNARNGHLYTFKGIINIRNSKHKHSNFTVEKYCDCYTCKYFSRSYLHHLYHCKDILGAKLNTIHNIRYYQRLMANLRNAIKNGTLDYFVSDFYKCRMH

SEQ ID NO: 53269 - protein, 385 aa, unidentified
  source 1..385: note = Falkowbacteria bacterium
  REGION 1..385: note = tr|A0A2M6WSR5|A0A2M6WSR5_9BACT Queuine tRNA-ribosyltransferase OS=Candidatus Falkowbacteria bacterium CG10_big_fil_rev_8_21_14_0_10_37_14 OX=1974561; GN = tgt PE=3 SV=1
MSLRMFKLIKKSNKNDARLGKLTTAHGVLATPFFMPVGTRAAVKYISSEDIRKLGSKIVLSNTYHLMLKPGEQLIKKLGGLHKFMDWNGSILTDSGGFQVFSLAGKNAKGQNLVKLTEEGVQFSSHIDGSKHFLTPESCYDIQRALGVDIAVCLDECVALPAKREYVAKSVELTSSWAKRAKDHYQKIKGAKPLLFAVVQGGLEKDLRLKSLSDLSALDFDGYNIGGLSVGESPIEMYKVLDYLVPEMPADKPRYLMGVGYPENIIEAVKRGVDMFDCVIPTREGRHGRVFAWAKNGEIKLAKTLFSSKISTGDFYEILNYKNAKFATDKSPISAQSKFVELRNYSKAYLHYLFKVEEPMSARLASLQNLEFYLELMSAIRHSLR

SEQ ID NO: 53270 - protein, 375 aa, unidentified
  source 1..375: note = Falkowbacteria bacterium
  REGION 1..375: note = tr|A0A2H0V5Q6|A0A2H0V5Q6_9BACT Queuine tRNA-ribosyltransferase OS=Candidatus Falkowbacteria bacterium CG10_big_fil_rev_8_21_14_0_10_39_11 OX=1974565; GN = tgt PE=3 SV=1
MSYKLLKQSKKSKARRGQVKTRRGILETPFFMPIATKASVKSLTFEDLKELEAQIVLSNTYHLMLKPGNKIIKRAGDLHEFMQWDRPILTDSGGFQVFSLSKIRKITEDGVQFRSHIDGSKQFMRPEDSIQIQLDLGSDIIMVLDECVELPAKREYLEKSVDMTTRWAARCKDYFGKSTIRELQGDKAMLFGIVQGGLDKDLRKKSAQGLTAIGFDGYAIGGLSVGESEKDMYEVLDYITDELPKDKPRYLMGVGRPENIINAVKRGVDMFDCVIPTREARHGRLYLWQPAAEKANYDVLANQNRCYRQINIKAEKFAQKFEPINANSRFPVLKKYSKAYLRHLFSVNEPLAIRLATLNNLEFYLNLMKKIRQAI

SEQ ID NO: 53271 - protein, 373 aa, unidentified
  source 1..373: note = Fermentibacter daniensis
  REGION 1..373: note = tr|A0A163VMI6|A0A163VMI6_9BACT Queuine tRNA-ribosyltransferase OS=Candidatus Fermentibacter daniensis OX=1729713 GN=tgt PE=3 SV=1
MRPETGFDLLRVSGRARRGRLHLAHGTVETPVFMPVGTQGTVKTARTTDLDGFGMILANTYHLYLRPGEDVIAAAGGLHAFTGYGGNILTDSGGFQIFSLSTLRKRTEDGYEFQSHVDGSRHLLTPEKVIRLQTVFGSDVMMVLDECLEQPSSRQRTEESLALTLRWAERARKVHPGGAAAMFGIVQGGGFGDLRAKAAKALVNMDFDGYAIGGVSVGEPRPLMEAAVESCVDLLPESGPRYLMGVGKPEDIVDFTAMGVDMFDCVVPTRNARGGDFFVPGGHICIRNSRFRNDHGPLQPDCGCFACTHHSRAYIRHLFMAREWLAPILATLHNLEYYRRLMAEIRNAVEDGTYMEWRRDWHARRASFDPGAF

SEQ ID NO: 53272 - protein, 373 aa, unidentified
  source 1..373: note = Fermentibacteria bacterium
  REGION 1..373: note = tr|A0A2G6LUK1|A0A2G6LUK1_9BACT Queuine tRNA-ribosyltransferase OS=Candidatus Fermentibacteria bacterium OX=2044591 GN=tgt PE=3 SV=1
MNRTPSFNLSCKSGKARAGTLNLRHGQVETPVFMPVGTQATVKTVRNSDLREDGWNIILGNTYHLYLRPGLELLEQAGGLHSFMNWERNILTDSGGFQLFSLSALRKVTEEGYNFQSHIDGSRHILTPEKVIEAQMVFGSDVMMVLDECLEQPSGEKVTEDSVGLTLRWAERARKLYPGNGQAMFGIVQGGGFPHLREKCARELVEMNFDGYAIGGVAVGEERLMMELAVKSCIDILPENRPRYLMGVGKPEDLIDFVAMGVDMFDCVVPTRNARGACFFVPEGRINIRNAKYRNDFRPVQEDCDCFVCTNHTRAYLRHLFVAKEWLAPIFATLHNLRYFARLTEQLREAIRKNRFENTSQELLKKMGKLDNC

SEQ ID NO: 53273 - protein, 372 aa, unidentified
  source 1..372: note = Fermentibacteria bacterium
  REGION 1..372: note = tr|A0A496UK72|A0A496UK72_9BACT Queuine tRNA-ribosyltransferase OS=Candidatus Fermentibacteria bacterium OX=2044591 GN=tgt PE=3 SV=1
MPSFNLLGKSGKARRGLLSLAHGTVETPVFMPVGTQASVKTVRNSDLLEDNWQIILSNTYHLYLRPGAAVIAEAGGLHKFMSWDGNILTDSGGFQLFSLSKLRKRSEEGYHFQSHIDGSSHLLTPEKVIELQTIFGSDIMMVLDECLEQPSDRDRTEESLGITLRWAERARRMHTGGSQALFGIVQGGAYPDLRRKSAEVLAGMEFDGYAIGGVSVGEPRNLMMRAVRSCIDYLPQDRPRYLMGVGKPEDLVDFVALGVDMFDCVVPTRNARGGAFFVPGGHINIRNARFRNDAAPVQPGCRCYACSTYSRSYIRHLFNAKEWLAPILATLHNLHYFSVLMGKIRMAVEERRFTTWRREWHRRRRSFDSGNF

SEQ ID NO: 53274 - protein, 387 aa, unidentified
  source 1..387: note = Filomicrobium marinum
  REGION 1..387: note = tr|A0A0D6JHN7|A0A0D6JHN7_9RHIZ Queuine tRNA-ribosyltransferase OS=Candidatus Filomicrobium marinum OX=1608628 GN=tgt PE=3 SV=1
MQHTTSKFEFRLLAQSGAARRGEILTPRGVIRTPAFMPVGTTATVKALYTDQVKAAGADIILGNTYHLMLRPGAERIHRLGGLHSFMRWEGPILTDSGGFQVMSLATIRKITEAGAEFSSHIDGSRHMLSPERSIEIQCLLGSDIQMQFDECIELPAERSEVERAMQLSLRWAERSKSAFEEARDNGLAGDGQALFAIVQGGTDAALRRVSAEALVDMDFPGYAIGGLAVGEGHELMLSTLEATLPFLPKAKPRYLMGVGTPLDLIEAVARGVDMFDCVMPTRNGRHGLAFTWNGRVNLRNARHAEDTSPLDPESSCPAARDYSRAYLHHLVKSGEYLGAMLISWANTWFYQELMQAMRDAISEGRFDEWAAETKARLGETPSKGTA

SEQ ID NO: 53275 - protein, 392 aa, unidentified
  source 1..392: note = Finniella inopinata
  REGION 1..392: note = tr|A0A4Q7DJZ2|A0A4Q7DJZ2_9PROT Queuine tRNA-ribosyltransferase OS=Candidatus Finniella inopinata; OX = 1696036 GN=tgt PE=3 SV=1
MFSFTYHETHQNKARLGTLTTPHGIIETPAFIFCATKAAMKGLTVDQMRQAGSQIILSNTYHLSLQPGAELVEKMGGLQKFTGWNGPMLTDSGGFQIFSLGHGSVASEIKGKRLGNRSKTLLKITEEGARFRSYWDGRLHLLTPEDSIRIQRSLGADLILVLDECTPYHVDKSYTAKSMELSHRWAVRSLDEFDRLDNNKQKLYGIIQGGVYPDLRQQSCDFVNSQPFFGHAIGGCLGGSKDQMQEVVDMAAPHLDRDRPIHLLGIGGVLDILKGVEKGIDTFDCVHPTRIARHGGALVRPIHNPKPHREHINLRNNQYLFDDTPIEPDCPCHTCTTYSKAYLHHLLKVQEMVAHTLISIHNVQFMNRLMAAIRQSLADDTFPDEKKQWALF

SEQ ID NO: 53276 - protein, 375 aa, unidentified
  source 1..375: note = Firestonebacteria bacterium
  REGION 1..375: note = tr|A0A1F5US74|A0A1F5US74_9BACT Queuine tRNA-ribosyltransferase OS=Candidatus Firestonebacteria bacterium RIFOXYC2_FULL_39_67 OX=1817861 GN=tgt PE=3 SV=1
MNFKLLKKEKHTKARHGIISTPHGDLETPVFMPVGTTGTVKAMTMRDMKEIGTEIMLGNTYHLYLRPGMDVIKNAGGLHKFIGWDRPLLTDSGGFQVFSLKGLRKVTEEGVLFQSFLDGSEHMFTPEKVMEIENTLGADIIMTFDECVSNPCEKEYAVKALARTTDWAKRCRNAHDSKDRALFGIIQGSVFEDLRIRSAKEITGIDFDGYAIGGLSVGESKDLMYGMVDVVEPFMPENKPRYLMGVGTPEDIWAAVERGVDMFDCVMPTRIARNGSIYTSGGRIIIRNSIYSNDLSPLDPECDCYTCKNFTKSYLRHLINMGEYTAKQLNTLHNLAFMIKLLATIKTAIKEDRFLEAKDAFFKKYESSKESKDSK

SEQ ID NO: 53277 - protein, 375 aa, unidentified
  source 1..375: note = Firestonebacteria bacterium
  REGION 1..375: note = tr|A0A1F5UGZ9|A0A1F5UGZ9_9BACT Queuine tRNA-ribosyltransferase OS=Candidatus Firestonebacteria bacterium RIFOXYA2_FULL_40_8 OX=1817859 GN=tgt PE=3 SV=1
MNFKLLKKEKHTKARHGIISTAHGDIETPVFMPVGTTGTVKAMTMRDMKEIGTEIMLGNTYHLYLRPGLEIIKNAGGLHKFIGWDKPLLTDSGGFQVFSLKGLRKVTEEGVLFQSFLDGSEHMFTPEKVMEIENTLGADIIMTFDECVPNPCEKEYAVKALERTTAWAKRCRDAHDSKNRALFGIIQGSVFEDLRVRSAKEITGIDFDGYAIGGLSVGESKDLMYGMIDVVEPFMPDNKPRYLMGVGTPEDIWAAVERGVDMFDCVMPTRIARNGSIYTSGGRIIIRNSTYSGDYSPLDPECDCYTCKNFTKSYLRHLANSGEYTGKQLNTLHNLAFMIKLLATIKTAIKEDRFLEAKDAFFKKYESSKESKDSK

SEQ ID NO: 53278 - protein, 359 aa, unidentified
  source 1..359: note = Fischerbacteria bacterium
  REGION 1..359: note = tr|A0A1F5VJG0|A0A1F5VJG0_9BACT Queuine tRNA-ribosyltransferase (Fragment) OS=Candidatus Fischerbacteria bacterium RBG_13_37_8 OX=1817863; GN = A2Y62_13355 PE=3 SV=1
RVGTLHTMHGEITTPAFMPVATVGSVKAITHKMLEELEADIILANTYHLYLRPGIDTIEKFHGLHNFMNWHKPLLTDSGGYQIFSMSQLHKIQDNGVLFQSHIDGSTHFFTPEKNIEVQQILGADIIMTIDECMPYPASYSDTKNSLEITLAWARQCKTAHNSSQQLLFGIAQGSVYKDLRARCIKELTEMNFDGYAIGGLSVGEPVEILLDIAAFCAELFPKNKPVYLMGSGTPTDIVHAVGAGIDMFDCVLPTRNARNGCLFTSTGRIIIKNQKYKYDEKPIDETCNCYTCKNFSRAYLRHLFLSKEYNSAILNSIHNLYFYLDLMKTIRNYIREGSFSHFAHSVVKSYEQEDTEET

SEQ ID NO: 53279 - protein, 373 aa, unidentified
  source 1..373: note = Fokinia solitaria
  REGION 1..373: note = tr|A0A2U8BRE9|A0A2U8BRE9_9RICK Queuine tRNA-ribosyltransferase OS=Candidatus Fokinia solitaria; OX = 1802984 GN=tgt PE=3 SV=1
MLNFSVFHKKESNASSQRILKMNGEAVSLKKGKARVGRIETAHGIIETPCFMPVGTKGTVKGLKKEDIEATGAQIILANTYHMMLQPSAERVQQFGGLHKFMNWNKPILTDSGGFQIMSLSGLCKLTDDAAIFRSHIDGAMHVLTPSRSIEIQHMLGSNITMVLDQCIHNPAAHKVAEAAMYRSTRWAELSKNSYKPRKGYGIFGIVQGGLYEDLRRESAKHLVDMEFDGYAIGGLAVGESQNEMFSVLDYITECLPENKPRYLMGVGTPSDIIGAVERGVDMFDCVMPSRCGRNGRAFTSAGQLNIRNAKYASDCNNLDSECDCYTCMHYTNGYLHHLFKAKEMLGGILLTIHNLHYYNSLMSIIREHIRNW

SEQ ID NO: 53280 - protein, 376 aa, unidentified
  source 1..376: note = Frackibacter sp.
  REGION 1..376: note = tr|A0A1H8B4A4|A0A1H8B4A4_9FIRM Queuine tRNA-ribosyltransferase OS=Candidatus Frackibacter sp. WG12 OX=2017977 GN=tgt PE=3 SV=1
MSFEYTLHKESSDTKARLGEFNTPHGKVETPIFMPVGTQATVKAMTPEELKELGSQIILSNTYHLYLRPGHDLIEEAGGLHEFMNWDRPILTDSGGFQVFSLADMRDITEKGVEFQSHLDGSKHFITPEKATEIQMALGADIIMAFDECPPYPAEKDYVKESLERTTRWAKRCKEAHTREDQALFGIIQGGMHQDLREQSAKEITELDFPGYAIGGLSVGEANELMYEVLDYAPELLPKDKPRYLMGVGTPEDLFEGVIRGVDMFDCVFPTRIARNGAVFTSQGRITIRNATYKRQFTTLDPECDCYVCRNYTRAYIRHLIKRNEILGLRLTTYHNLYFLCNLMTNIRKAIEEDRLLEYRAEFYQKYGLEVTDFNI

SEQ ID NO: 53281 - protein, 376 aa, unidentified; identical to SEQ ID NO: 53280
  source 1..376: note = Frackibacter sp.
  REGION 1..376: note = tr|A0A139CSD7|A0A139CSD7_9FIRM Queuine tRNA-ribosyltransferase OS=Candidatus Frackibacter sp. T328-2 OX=1785949 GN=tgt PE=3 SV=1

SEQ ID NO: 53282 - protein, 373 aa, unidentified
  source 1..373: note = Fukatsuia symbiotica
  REGION 1..373: note = tr|A0A2U8I3E6|A0A2U8I3E6_9GAMM Queuine tRNA-ribosyltransferase OS=Candidatus Fukatsuia symbiotica; OX = 1878942 GN=tgt PE=3 SV=1
MKFELQKTDGYARRGRLVFERGVVETPAFMPVGTYGTVKSMTPEEVKASGAQILLGNTFHLWLRPGQEVIKAHGDLHDFMQWHGPILTDSGGFQVFSLGAMRKIKEEGVHFSNPINGNTVFLSPEKSMEIQRDLGADIVMIFDECTPYPADWDYAKRSMELSLRWAARSHHQHFDKLNNKNALFGIIQGSVYQDLRDISLNGLQDIGFDGYAVGGLAVGEPKEEMHRILEHICPQIPQDKPRYLMGVGKPQDLVEGVRRGIDMFDCVMPTRNARNGHLFVTEGVVKIRNAQYKRDEFKLDKNCDCYTCCHYSRAYLHHLDRCKEILGARLNIIHNLRYYQRLMVALRQAIEEGTLDRVITEFYKRIEKPDLEV

SEQ ID NO: 53283 - protein, 367 aa, unidentified
  source 1..367: note = Gallionella acididurans
  REGION 1..367: note = tr|A0A139BSK3|A0A139BSK3_9PROT Queuine tRNA-ribosyltransferase OS=Candidatus Gallionella acididurans OX=1796491 GN=tgt PE=3 SV=1
MNFTLHNTDGLSRRGTLNLAHGSVETPAFMPVGTYGTVKAMSPLELNEIGAQIVLGNTFHLWLRPGLEVIAAHGGLHRFMGWDGPILTDSGGFQVFSLGALRKISEDGVKFQSPVNGDKCFLSPEESMRIQKVLNSDIAMIFDECTPYPADENTAGESMRLSLRWAERSKRAHQGNANALFGIVQGGMHEHLRDESLAGLTGIGFDGYAIGGLSVGEPKEDMLRILRHTAPQLPADQPRYLMGVGTPEDLVDAVSQGIDMFDCVMPTRNARNGMLFTRFGDIKIKNAQYRLDMSPLDEQCACYTCRNFTRAYLHHLHRLNEILGARLNTIHNLHYYQELMGGIRAAIEAGRFADFAGRFRLMRSGHG

SEQ ID NO: 53284 - protein, 376 aa, unidentified
  source 1..376: note = Gastranaerophilales bacterium
  REGION 1..376: note = tr|A0A292RF62|A0A292RF62_9BACT Queuine tRNA-ribosyltransferase OS=Candidatus Gastranaerophilales bacterium HUM_9 OX=1916320 GN=tgt PE=3 SV=1
MSYSNPEFEYFNYELVHTDKKTGARAGVLHTPHGDILTPIFMPVGTNSTVKLVTNHHLYESQAQIILGNSYHLYLRAGDELIAKFGGIHKWMNWDKPVLTDSGGFQVFSLAHLRKITEDGVEFRDPKDGKKHFINPEISMKIQQNIGADIIMAFDQCAPFPCEYNEAKKAMERTHRWLERCIKAKTNPKQALFPICQGAFYDDLRKESAEFVSQFDAVGYAIGGLSVGEDKETMNHFVNYTAPLLPANKPRYLMGVGTPEDLLDGIKGGVDMFDCVLPTRNARHGSFFTWNGKKQIKNAMYQEDPSPLDDKCDCYACRNHSKAYIRHLFKCNEGTAQALLSIHNITFLVKFSQLVRQAILEDRFEEFYEEHYHNFI

SEQ ID NO: 53285 - protein, 240 aa, unidentified
  source 1..240: note = Gastranaerophilales bacterium
  REGION 1..240: note = tr|A0A292SPX3|A0A292SPX3_9BACT Queuine tRNA-ribosyltransferase (Fragment) OS=Candidatus Gastranaerophilales bacterium HUM_21 OX=1916319 GN=tgt; PE = 3 SV=1
SMEIQQDIGADIAMAFDECAPYPCSYEEAKNAMERTHRWLERCFNAHTRDDQALFPIVQGAFYDDLRQESARVISSFDAVGYAIGGVSVGEPADVKNHFVGLTAPLLPRLKPRYLMGVGTPEDLLDGILRGIDMFDCVLPTRNARHGSFFTNDGRKIIKNKEFERESSPLDKECNCYTCRNHTKAYVRHLYRAGEATAAILMSIHNTQFLIDLVKEARKAILENRYEEFYREKMTRLFPL

SEQ ID NO: 53286 - protein, 383 aa, unidentified
  source 1..383: note = Gastranaerophilus sp.
  REGION 1..383: note = tr|A0A2L2X464|A0A2L2X464_9BACT Queuine tRNA-ribosyltransferase OS=Candidatus Gastranaerophilus sp. (ex Termes propinquus) OX=2029980 GN=tgt PE=3 SV=1
MSHPAFSYGVSATCPTTKARAGVFKTPHGEIKTPVFMPVGTNSAVKMLTGRDIIETGAQIILANSYHLHLNPGEKLIKKAGGIHSWMNFQKPMLTDSGGFQVFSLSNLRKITEEGVNFTDPKNGNKHFISPEISMQIQTDIGADIIMAFDECAPYPCDYEHAKSAMERTHRWLKRCIAAHSKLNEETKAQGRPPQALFPIVQGAFFDDLRTESAKTVSSFDTAGYAIGGVSVGEPLDVKNRVVELVAPLLPFNKPRYLMGVGTPVDLLEGVYRGVDMFDCVMPTRNARHGSFFTYSGNKIIKNKEFEEDFSPLDEKCNCRTCQNHTRAYIRHLYRSGEATAAILLSIHNIHFLINLMNDARNAILNGNFAEFYSEIIKTQAKN

SEQ ID NO: 53287 - protein, 378 aa, unidentified
  source 1..378: note = Giovannonibacteria bacterium
  REGION 1..378: note = tr|A0A0G1W254|A0A0G1W254_9BACT Queuine tRNA-ribosyltransferase OS=Candidatus Giovannonibacteria bacterium GW2011_GWB1_47_6b OX=1618655 GN=tgt PE=3 SV=1
MGFFRIIKESDKSHARLGILRTSHGIVETPAFVPVATQAVFKTLTSKQARETRSQLAIANTFHLHLKPGEKTIKRAGGLGAFMAWPKPLMTDSGGFQIFSLGFGSDFGTGKILKGKRAEKIGIEAQPRRVEITEAGAWFRSIVDGTRLFIGPKESMKIQSDLGADIIFAFDECTSPIAGKAYTKKSLERSHRWAELSLAYHSKKQKLFGIIQGGKYKDLRKKSARFIGALPFDGFGIGGEFGDSKKNMMGMISWVLNELPPEKPRHLLGIGHPDDIKKIIRAGIDLFDCIAPTHYARRGFAFTSRGRLDMRKISFLADRKPLDSRCKCDVCRNYSRAYITHLMRSGEITGMSLLTMHNLYYFNTFVEEIRRGIRAGRI

SEQ ID NO: 53288 - protein, 386 aa, unidentified
  source 1..386: note = Giovannonibacteria bacterium
  REGION 1..386: note = tr|A0A0G1T5N8|A0A0G1T5N8_9BACT Queuine tRNA-ribosyltransferase OS=Candidatus Giovannonibacteria bacterium GW2011_GWB1_47_6b OX=1618655 GN=tgt PE=3 SV=1
MLFRILKKAKNSRARLGIIKTKNGVIHTPAFVPVATQAAVKGLTVEQLKEIGAESVLCNTYHLYLRPGDKTVRKMGGLHQFMNWHKPIWTDSGGFQAFSLGAAISHGVSKIASIFPDEGEREHAPQKPKENFVKITEEGVRFRSHLDGSFHLLTPEKSMEIQKNLGADLIFAFDECTSPLHDYAYTKKSMERTHRWAVRCLASAKLKSKNEKVKTDGQALFGIVQGGAYKDLRVQSAKFIGSMDFDGFGIGGSLGKSKKDMYKVLDWTVPLLPEEKPKHLLGIGSADDIWEAVKRGVDTFDCVAPTRIARNGSALLAKTALNLKSGRYLRDKNPIDKKCGCYTCVNYTRAYVSHLFKAHEMLGPILTTIHNLSFMEALLREIRNRI

SEQ ID NO: 53289 - protein, 387 aa, unidentified
  source 1..387: note = Glassbacteria bacterium
  REGION 1..387: note = tr|A0A1F5YM22|A0A1F5YM22_9BACT Queuine tRNA-ribosyltransferase OS=Candidatus Glassbacteria bacterium RIFCSPLOWO2_12_FULL_58_11 OX=1817867 GN=tgt PE=3; SV = 1
MTAEIKEFGFELAARDGAARAGVLHTGNGTVHTPVFMPVGTQGTVKTLTPRDLEEIGVELVLSNTYHLYLRPGHELVRRAGGIQRFMGWRGPLLTDSGGYQVFSLLDLSRITEEGVTFQSHLDGSPHLFTPERVVEIQTALGADIIMAFDECVPYPAEEDYVRLACERTLRWAERCRDHLDALPAELRPGWPQALFGIVQGGMYRHLRQFSARATVELGFPGYAVGGLSVGEPKALMFEMLECALEHLPAECPRYMMGVGYPEDMVEAVRRGVDMFDCVVPTRLGRNGTVFTASGRLVVKNAPCADDLRPLDESCDCYVCANFSRAYIRHLLNSNEILGLKLTSYHNVRFMIRLMQQMRQAILQGEIDRWTDTFYNRYDPGHGDNGV

SEQ ID NO: 53290 - protein, 400 aa, unidentified
  source 1..400: note = Glomeribacter gigasporarum
  REGION 1..400: note = tr|G2JAK0|G2JAK0_9BURK Queuine tRNA-ribosyltransferase OS=Candidatus Glomeribacter gigasporarum BEG34 OX=1070319 GN=tgt PE=3 SV=1
MNSHRLSEVNAFATEIIQRARHNHARVLKITTPHGEVLTPAFMPVGTRAFVNHLSPEDLAAAGSQIILGGNTYHMLVNPGMEVIRAGGGMHRFMGWDGPMLTDSGGFQVFSLTRAKHCRIDETGAHFKHPGTGQPIHMTPQRSIETQQMIGADIIMAFDDCVAESAGKEAIMAGMQRTHRWLMQAKEMHSRSPYSAYGHRQALFGIVQGGYFRELREQSAHFIIEADMDGIGIGGESIGPIPEQTCTVIDWVRPLLPERKVRYPMGVGLAPQDLIDVVAHGADIFDCVAPTRNARHGALYCGEWRVIDGWLRFESVEPKGRILIKKAQYAYDETPVMAGCTCQTCQRYSRAYLHFLFKQKAAFYYPLACIHNVHVMQETCARMRHLVIHQRDESGNQVIA

SEQ ID NO: 53291 - protein, 368 aa, unidentified
  source 1..368: note = Goldbacteria bacterium
  REGION 1..368: note = tr|A0A2N1W3Z3|A0A2N1W3Z3_9BACT Queuine tRNA-ribosyltransferase OS=Candidatus Goldbacteria bacterium HGW-Goldbacteria-1 OX=2013807 GN=tgt PE=3 SV=1
MEFFKVLHKYKLARACEINTIHGTIKTPVFMPVGTQATVKLMTPEDMYDMGVDVILGNTYHLFLRPGMDIMKKAGGLHKFMNWKRPILTDSGGFQVFSLSQFRKITPEGVKFKSHIDGAEHFLTPETVIDIQTDLGSDIMMVLDECPPYPAERKYIEDSLDLTLAWAKRAREYHKSDTSFLFGIIQGGVHKDLREKSMEELFKMDFPGYSIGGVSVGEGKDLINQGVDWCAPFMPENKPRYLMGVGTPEDIWYAVEKGVDMFDCVFPTRIARNGAVYTKEGQISVRNGEYKEDFRPMDPGCGCYACKNYTRAYIRHLFNTHELLGMRLTTLHNIYFMIRLMDIIRKSIFEDRYEKAKEEFFSVYKLRS

SEQ ID NO: 53292 - protein, 391 aa, unidentified
  source 1..391: note = Gottesmanbacteria bacterium
  REGION 1..391: note = tr|A0A1F6AAE6|A0A1F6AAE6_9BACT Queuine tRNA-ribosyltransferase OS=Candidatus Gottesmanbacteria bacterium RIFCSPHIGHO2_02_FULL_40_13 OX=1798384 GN=tgt; PE = 3 SV=1
MASNYFSFKILSRDKKTKAKTGVINTPHGKINTPAFVPVGTAATIKSLTPEEIKNCGIEVFIVNTYHMIFRPGVETVKKGDGLHGFMNWKFPLMTDSGGFQAFSLGEYGPRNVSDKSENMVKITDQGIEFKSAWDGKKIFFGPHESILAQHKLGADLIMAFDECTFYPIKKSYAKRAMQRTHDWAKTCLQVKKQLNNKQTLYGIIQGSVFEDLRRNSANFFAGKPFEGFAVGSVANSREPRKKVFQVLDWTLPILLPVNKPIHFLGIGEVEDIFIAIEKGIDSFDCVIPTRLARMGWIFTKSAGLKNKFRFDITKSRYHSLKSPPDRSCRCYTCTNFTKSYLNHLFRCRELLGYRLATIHNLYFYANLMSQIRTAIENGEFLKLKQEWLKV

SEQ ID NO: 53293 - protein, 387 aa, unidentified
  source 1..387: note = Gottesmanbacteria bacterium
  REGION 1..387: note = tr|A0A1J4TRR1|A0A1J4TRR1_9BACT Queuine tRNA-ribosyltransferase OS=Candidatus Gottesmanbacteria bacterium CG1_02_37_22 OX=1805209 GN=tgt PE=3 SV=1
MSNQIFKVTSYDKKTNARRGIIFTNHGLIQTPAFVPVGTAATVKSLTPSEIKDCNIDVFFVNTYHMLFRPGLEVIKKYKNLHEFMNWKGPLMTDSGGFQAFSLGEHGPRNNPISQTDHLIQINDEGINCKSAWDGKNLFIGPQESIKAQKILGADILMSFDECTFYPITKKRALKALERTHKWARICLKQRLINQLLYGIVQGSVFHDLRMQSAKFISELPFAGFAIGSVANSKEPREKVFQVLDWTLPILLSYLKPIHFLGIGEIEDIFISVSKGIDSLDCVTPTRLARMGWIFNKEAGLKNKFRYDIGRSEYIGNKTSLEKGCKCFTCNNFTKGYLNHLFRCRELLYYRLATIHNLNFFGNLMKKIRQSISEGIFTDLKDNWLYG

SEQ ID NO: 53294 - protein, 381 aa, unidentified
  source 1..381: note = Gracilibacteria bacterium
  REGION 1..381: note = tr|A0A1J5F038|A0A1J5F038_9BACT Queuine tRNA-ribosyltransferase OS=Candidatus Gracilibacteria bacterium CG2_30_37_12 OX=1805211 GN=tgt PE=3 SV=1
MSFEFTLEATDGLARAGTLSTPHGDIQTPIFMPVGTHASVKGVHKDHILEIGTQIMLSNTYHLYLRPGDETIAHFGGLHEFMNINLPILTDSGGFQVFSLGQMKNSPGSKESGETKSLVKITEDGVEFRSHLDGSKHMFTPERAMQIQANLGADIIMAFDECAPGTSTHSYARAAMGRTHRWASRCVIEHTEQQKIRADKGLHPQALFPIAQGVIYDDLRVDSVKYISDLDMPGVAIGGISVGESKPDMIRILDAIAPHLPPSKPHYLMGLGTPEDLIEGIYRGIDMFDCVLPTRLGRHGVAYTSRGNIKVTNEKYKLEKEGIYTRPEYSTMVSRTYSLGYLRHLFKVGEMLAGQLVSLHNLEFLLNLSREARKAIMEGRY

SEQ ID NO: 53295 - protein, 392 aa, unidentified
  source 1..392: note = Gracilibacteria bacterium
  REGION 1..392: note = tr|A0A2U7PGJ3|A0A2U7PGJ3_9BACT Queuine tRNA-ribosyltransferase OS=Candidatus Gracilibacteria bacterium HOT-871 OX=1540872 GN=tgt PE=3 SV=1
MFEFKIKNTDGFARVGEFFTEHGSFETPVFMPVGTKATVKGVPKDWLDEMGAEIILNNTYHLYLRPGDELVKEFGGVHKFQNYEKPILTDSGGFQVFSLGQTSEVGFKNNESLVKITEEGVHFRSFLDGSKHYFDAETVMDIESNLGADIIMAFDECAPGKSDWNYAKSAMDRTHRWAERCVKRWKENNEKRKNNGEYLQALFPIVQGVTYDDLRIESAKFIGGLETPGVAIGGLSVGEPKADMYRVLDTIKTVLPENKPRYLMGVGTPEDLVEGIYRGIDMFDCVLPTRLGRHGTCFSYEGNIKIKNKKYELDTNPIDERCDCKVCKNYTKGYLRHLIQEEEILGMQLLSYHNLYFLINLAKQARKAILENKYEEFRENFWKNYPKDVLEK

SEQ ID NO: 53296 - protein, 379 aa, unidentified
  source 1..379: note = Gullanella endobia
  REGION 1..379: note = tr|A0A143WSG8|A0A143WSG8_9ENTR Queuine tRNA-ribosyltransferase OS=Candidatus Gullanella endobia; OX = 1070130 GN=tgt PE=3 SV=1
MEFQLLKTDGQARRGRLIFNRGVVETPAFMPLGTYGSVKGITPEEAKDNGAEIILSNTFHLWLRPGKAVIKLHGDLHDFMQWHGPILTDSGGFQIFSLSNIRKVTEKGVYFRSPINGDTIFLSPEKSMEIQYDLGSDIVMIFDECTPYPSDWYYAKQSMEMSLRWAVRSRHRFDELGNPNSLFGIIQGSIYEDLRDISLKRVVEIGFDGYAIGGLAVGEPKSDIYRILLHLCQKMPANKPRYLMGIGKPEDLIESVSYGIDMFDCAIPTRNARNGHLFVTNGVIKIRNAQYKDDINPLDDKCDCYTCRTYSRAYLHHLDRCNEILGSRLNTIHNLRYYQRLMANLRQAIYDNRLDHYISEFYRQTTGKPFSTFRYKIIQ

SEQ ID NO: 53297 - protein, 370 aa, unidentified
  source 1..370: note = Hamiltonella defensa
  REGION 1..370: note = tr|A0A2D3TB18|A0A2D3TB18_9ENTR Queuine tRNA-ribosyltransferase OS=Candidatus Hamiltonella defensa; OX = 138072 GN=tgt PE=3 SV=1
MKYQLQKTDGRARLGKLIFERGLVDTPAFMPVGTYGSVKSMTPDEITETGAQIILGNTFHLWLRPGQDVIKLHGDLHDFMQWQGPILTDSGGFQVFSLNSMRKIEEKGVSFRHPLNGSEIFLSPEKSMEIQLDLGSDIVMVFDECPPYPSDLSYMKSSMEMSLRWANRSREHFNNLNNKNALFGIIQGGLSLELRETSLQGLLQIGFDGYAIGGLAVGEPKEEMYRVLNFLCPRIPDNKPRYLMGVGKPENLVEGVRRGIDMFDCVMPTRNARNGHLFVTHGVIKIRNTRYKTDISPLDPDCDCYTCRHYSRAYLHHLDRCNEILGARLNSIHNVRYYQRLMADLRHAIYEERLECFVEEFYKKIGLSIS

SEQ ID NO: 53298 - protein, 370 aa, unidentified
  source 1..370: note = Hamiltonella defensa
  REGION 1..370: note = tr|A0A249DXH7|A0A249DXH7_9ENTR Queuine tRNA-ribosyltransferase OS=Candidatus Hamiltonella defensa (Bemisia tabaci) OX=672795 GN=tgt PE=3 SV=1
MKYQLQKTDGRARLGKLIFERGIVDTPAFMPVGTYGSVKSMTPDEITETGAQIILGNTFHLWLRPGQDVIKLHGDLHDFMQWQGPILTDSGGFQVFSLNSMRKIEEKGVSFRHPLNGSEIFLSPEKSMEIQLDLGSDIVMVFDECPPYPSNPSYMKSSMEMSLRWANRSREHFNNLNNKNALFGIIQGGLSLELRETSLQGLLQIGFDGYAIGGLAVGEPKEEMYRVLDFLCPQIPDNKPRYLMGVGKPENLVEGVRRGIDMFDCVMPTRNARNGHLFVTHGVIKIRNTRYKTDISPLDPDCDCYTCRHYSRAYLHHLDRCNEILGARLNSIHNVRYYQRLMANLRHAIYEERLECFVEEFYEKIGLSIS

SEQ ID NO: 53299 - protein, 393 aa, unidentified
  source 1..393: note = Harrisonbacteria bacterium
  REGION 1..393: note = tr|A0A1G1ZL73|A0A1G1ZL73_9BACT Queuine tRNA-ribosyltransferase OS=Candidatus Harrisonbacteria bacterium RIFCSPLOWO2_01_FULL_44_18 OX=1798407 GN=tgt PE=3; SV = 1
MNFKVLKKSKKSRARLGIIETPHGVIHTPAFVPVGTQATVKGLTVDQLKNIGVESLLCNTYHLYLRPGDKIIKKLGGLHEFMNWDRPIWTDSGGFQVFSLGAAIEHRVGKVASIFPKIGNQKSHRPIRANEPITDHHHEKFARIMEEGVEFRSHLDGSKHLLTPEKSMAIQKNLGADIIFAFDECTSPLHDYQYTKKSLERTHRWATRCLRTFEHRTSNLERQGLFGIVQGGVFKDLRVKSAKFIGALDFDGFGIGGSLGKSKKEMYKILDWTVPLLPEEKPKHLLGIGSAEDILEAVERGIDTFDCVLPTRLGRHGSTLLTASGVALDVKSGRYAKDKKPIDKKCGCYACQNFSRAYICHLFKAQEMLGPILATIHNLHFMEKLMERIRKTI

SEQ ID NO: 53300 - protein, 377 aa, unidentified
  source 1..377: note = Harrisonbacteria bacterium
  REGION 1..377: note = tr|A0A1G1ZTB6|A0A1G1ZTB6_9BACT Queuine tRNA-ribosyltransferase OS=Candidatus Harrisonbacteria bacterium RIFCSPLOWO2_02_FULL_45_10c OX=1798410 GN=tgt; PE = 3 SV=1
MRFTLLKKSKKSRARLGLLETAHGVVETPAFVPVATQAVIKTLTSEEVLQTGAQMLIANTFHLHLRPGEKIIKSHGGIHSFMNWPKPLMTDSGGFQVFSLGFGKDFGQGKILKQRSNEKIESDQQPKLLKITEDGVAFRSYIDGREVFLGPKESIKIQEAIGADIIFAFDECTSPIADHDYTKKSLLKTHRWAEICLKTKKSDQALYGVVQGGKFQDLREESARVLGKMDFNGFGIGGEFGDDKKSMSRMLYWVTDVLPESKPRHLLGIGYIEDMPWMAQAGIDTFDCIAPTHYARRGIAFTSKGRLDLAKSAMLKDKKPLDTACDCFVCRNYTRSYICHLLKAWEITPLKLLTFHNLHYFNQSVAQLREDIKNGKI

SEQ ID NO: 53301 - protein, 374 aa, unidentified
  source 1..374: note = Hoaglandella endobia
  REGION 1..374: note = tr|A0A143WTA7|A0A143WTA7_9ENTR Queuine tRNA-ribosyltransferase OS=Candidatus Hoaglandella endobia; OX = 1778263 GN=tgt PE=3 SV=1
MEYQLLNTDGQARCGRLVFDRGVVETPAFMPVGTYGTIKSMTPEEVKETGSQILLGNTFHLWLRPGQEIMKLQGDLHNFMQWHGPILTDSGGYQVFSLGDINKITEEIVHFRNPINGDLIFLSPEKSMEIQYDLGSDIVMIFDECTPYPSDWEDAKRSMEMSLRWAVRSRQRFDELCNPNALFGIIQGGVYEDLRDISVKRLIEIGFDGYAIGGLAVGEAKSDMYRILASLCPKMPVDKPRYLMGVGKPEDLVEGVCCGIDMFDCVMPTRNARNGYLFVTEGVVRIRNSRYKSDITPLDNECDCYTCRNYSRLYLHHLDRCNETLGARLNSIHNLRYYQRLMADLRQAINEGKLDQFVGKFYQRTGSQPYKEKI

SEQ ID NO: 53302 - protein, 375 aa, unidentified
  source 1..375: note = Hydrogenedentes bacterium
  REGION 1..375: note = tr|A0A3M2CJA7|A0A3M2CJA7_9BACT Queuine tRNA-ribosyltransferase OS=Candidatus Hydrogenedentes bacterium OX=2030809 GN=tgt PE=3 SV=1
MSYALKFEIECTATGSSARVGKLTTPHGEIETPVFMPVGTKATVKAMTPEELEEIGAQIILANTFHLFLRPGDEIVRELGGLHRFMHWSRAILTDSGGYQVFSLAKLNKITEEGVAFRSPIDGAALFLTPELSIRIQENLGADIIMCFDECTPYPATHDYAKSSAERTARWAERCKRAHQRDDQALFGIVQGGVYPDLREWSAQATVALDFVGYAIGGLSVGEPKEEMQLALEVMDRTLPRHKPRYLMGVGTPADFFMGVEQGVDMFDCVMPTRTARNGRLYTREGLLNIRNAKYTRDPRPVSESCRCYTCRHYSRAYLRHLMMSNEILGSRLATWHNLYYFVDLMRAIRQAIRENRLEALKRRALEPYSQPAEH

SEQ ID NO: 53303 - protein, 369 aa, unidentified
  source 1..369: note = Hydrogenedentes bacterium
  REGION 1..369: note = tr|A0A3M2F4E1|A0A3M2F4E1_9BACT Queuine tRNA-ribosyltransferase OS=Candidatus Hydrogenedentes bacterium OX=2030809 GN=tgt PE=3 SV=1
MLETGFTLVRCVGRARFGRLVTRHGVVETPCFMPVGTVGNVKGLTWEEVAGAGARMVLANTYHLLLRPGPEILEACGGLHRFADFDLPLLTDSGGYQVMSLSPFRKITEEGVHFSSPLDGSRFLLTPEEALRIQNAIGSDVQMVLDVCPSASEGPVAQRRANELTLCWARRSLEQPRTEGTLRFAIVQGGFDAEMRRDAAQNISSLPFDGFAIGGLSVGEEERVMMEMIEAVEPCLPKEKPRYLMGVGKPSQILKAIARGVDLFDCVLPTRVARHGTLWTSRGLIRINRAEFSADIRPVDALCRCRTCRDYSRAFLRHLYRLGDPLYVRLASLHNLTYLLEILAEVRRYLSDGEEGWVDLLHRNRMIAP

SEQ ID NO: 53304 - protein, 370 aa, unidentified
  source 1..370: note = Hydrothermae bacterium
  REGION 1..370: note = tr|A0A496U2C7|A0A496U2C7_9BACT Queuine tRNA-ribosyltransferase OS=Candidatus Hydrothermae bacterium OX=2250085 GN=tgt PE=3 SV=1
MVKFELIKIEKHTGARLGILHTPHGDVETPNFMPVGTQATVKTISPRELEEIGVQIIVSNTYHLHLRPGEDLIKEAGGLHKFMSWSGSILTDSGGFQVYSLADLRALKDEGVEFRSHIDGSKVFFTPEKVVDIQVTLGSDIAMILDWPTPYPATKKEALDHMKLTTKWAERAKEYRDRVAPEQALFGIVQGGTYIDLRKENAREMMEMDFDGYAIGGLALGEPKIERDKIVEVVTAILPEEKVRYLMGVGYPEDIISSVINGVDLFDCVLPTRNARTGTVFTSRGKLTIRNAEYRADFKPLDRECDCYTCRNFTRAYIRHLFNAGEILGPRLTTYHSLYFFMKLMREIREAIKGDYLLDWKEEFLKKYRS

SEQ ID NO: 53305 - protein, 386 aa, unidentified
  source 1..386: note = Ishikawaella capsulata
  REGION 1..386: note = tr|C5WCN8|C5WCN8_9ENTR Queuine tRNA-ribosyltransferase OS=Candidatus Ishikawaella capsulata Mpkobe OX=476281 GN=tgt PE=3 SV=1
MIMINEGNVKFELKATDGYARCGQIIINRGIIDTPAFAPVGTYGTVKSITSEEIIKSGAQFILANAFHLWLRPGEKIIQTHGNLHNFMNWQKPILTDSGGFQVFSLSKIRKVTKQGVYFRNPINGNPIFLTPEKSIDIQHTLGSDIVMIFDECISYPAEWDYAKFSVEMSLCWAERCYERFYSLENTNALFGIIQGGIYKDLRDISIKGLMNLGFDGYAIGGLAVGETKQELYEILKHVCGQIPFNQPRYLMGVGKPEDIVESVRLGIDLFDCVLPTRNARNGHLFVSNGIIKIRNSKYKYDTSPLDEECDCYTCSNYSKSYLHHLDKCNEILGARLNILHNLRYYQRLMDNLREMISNHQLEIFVNEFYQKIGKVAPSLLIRERT

SEQ ID NO: 53306 - protein, 370 aa, unidentified
  source 1..370: note = Izimaplasma sp.
  REGION 1..370: note = tr|A0A088TNU2|A0A088TNU2_9BACT Queuine tRNA-ribosyltransferase OS=Candidatus Izimaplasma sp. HR1; OX = 1541959 GN=tgt PE=3 SV=1
MAIKYELIHEDKQTGARLGILHTPHGSFETPIFMPVGTKATVKTLENSEIKEVSDGLILGNTYHLWLEPGDEIVKDHGGIRGFSKWDGALLTDSGGFQVFSLSDIRKITEEGVEFRHHKSGAKLFMSPEDSISVQNNLGADIMMSFDECPPFSSTYEYMKESVERTIRWAKRGKDAHKNTETQALFGIVQGGPYMDIRKMCAEELIKMDFPGYSIGGLSVGETKEEMYTVLDGLKDIMPKNKPRYLMGVGTPDDLIEGVIRGIDMFDCVNPTRMARHGSAMTSEGRIPIKNKTYQKDMTPLDANCTCKVCTTYTRSYIRHLFKAEEYLGPRLVSYHNLFFLKNLMKNVRNAIRNDRLLEFKEEFFSKYYK

SEQ ID NO: 53307 - protein, 371 aa, unidentified
  source 1..371: note = Izimaplasma sp.
  REGION 1..371: note = tr|A0A094IP65|A0A094IP65_9BACT Queuine tRNA-ribosyltransferase OS=Candidatus Izimaplasma sp. HR2; OX = 1541960 GN=tgt PE=3 SV=1
MAIKYELKHICKQTGARYGILHTKHGSFETPIFMPVGTKATVKTLENSEIKEASDGLILGNTYHLWLEPGDEIVKNHGGIRGFSKWDGALLTDSGGFQVFSLSDIRKIKEEGVEFRHHKSGAKLFMSPEDSIRIQNNLGADIIMSFDECPPFNSTYEYMKESVERTLRWAKRGQIEHKNTADQALFGIVQGGPHKDLRIMCAEALKEMDFPGYSIGGLSVGESKEEMYKVLDYLKDVMPEDKPRYLMGVGTPDDIIEGVIRGMDMFDCVNPTRLARHGSAMTSLGRIPIKNQLYAKNMESLDPNCDCKVCTTYTKSYIRHLFKSEEYLGQRLVSYHNLYFLKDLMKNIREAIQNDSLLDFRKNLYKKYYKR

SEQ ID NO: 53308 - protein, 386 aa, unidentified
  source 1..386: note = Jacksonbacteria bacterium
  REGION 1..386: note = tr|A0A1G2A715|A0A1G2A715_9BACT Queuine tRNA-ribosyltransferase OS=Candidatus Jacksonbacteria bacterium RIFCSPLOWO2_02_FULL_44_20 OX=1798460 GN=tgt PE=3; SV = 1
MSNFQIIQEDLSARARLAYLRTDHGVIETPVFMPVATQAVFKGGLDSDDARSIGAPIILANTYHLYLRGAVPIIKRAGGLHKFMNWDRPILTDSGGFQVWSLGKGARKNSLCKIDDDGATFVSHLDGNAHRFTPEIAVQIQHDLGADIIMAFDEASDEASSYSYTKEAMDRTHKWAERCIAAMSNYKSQITNRQLLFGIIQGGRFKTLRKKSARIISSMNFDGVAIGGESIGYNMKRTAEILEYLAPQIPKEKPIYAMGVGFSPADFFTVIERGVDMFDCVAPARIARHGLLYSKGAGSKRGHRINLMNARYKDDFSRVCDWCDCRVCVTYTRAYLRHLFKADEMTAFRLATIHNLRFMLKVMEEIRASLKDREFARLKREWILRA

SEQ ID NO: 53309 - protein, 386 aa, unidentified; identical to SEQ ID NO: 53308
  source 1..386: note = Jacksonbacteria bacterium
  REGION 1..386: note = tr|A0A3D0PG27|A0A3D0PG27_9BACT Queuine tRNA-ribosyltransferase OS=Candidatus Jacksonbacteria bacterium OX=2053562 GN=tgt PE=3 SV=1

SEQ ID NO: 53310 - protein, 367 aa, unidentified
  source 1..367: note = Jettenia caeni
  REGION 1..367: note = tr|I3III5|I3III5_9BACT Queuine tRNA-ribosyltransferase OS=Candidatus Jettenia caeni; OX = 247490 GN=tgt PE=3 SV=1
MDFKVLAHDKQTKARCGEIRIANHRIPTPVFMPVGTQGTVKTLTPLHLKEVNTKIILCNAYHLCLRPGEQVIKRVGGLHKFIGWDGAIITDSGGYQVFSLAKLTKVSDNGVEFQSPIDGTKLFLTPERMTQIQNDIGADIIMAFDECVPYPCEQDRASVAVKRTLSWAERCLNTHKNKQQILFGIVQGSVFRELRIECARNLVEMGFDGYAIGGLSVGEGAFLMNEVLEYTGNYLPQDKPRYLMGVGFPGDILDAIEQGIDMFDCVVPTRNGRNGCAFTSTGKVKILNNQYKEDLKPLDEMCNCYTCQNFTKSYLRHLFLANEILGLTLMSLHNIYYFQNLMQQARESIRKGEFKDFKANFLGRQSQ

SEQ ID NO: 53311 - protein, 367 aa, unidentified
  source 1..367: note = Jettenia ecosi
  REGION 1..367: note = tr|A0A533QE22|A0A533QE22_9BACT Queuine tRNA-ribosyltransferase OS=Candidatus Jettenia ecosi; OX = 2494326 GN=tgt PE=3 SV=1
MDFKVLTYDKKTKARCGEIRIANHRIPTPVFMPVGTQGTVKTLTPLHLKEVNTKIILCNAYHLCLRPGEQIIKRMGGLHKFIGWDGAIITDSGGYQVFSLARLTKVSDNGVEFQSPIDGTKLFLTPERMTQIQNDIGADIIMAFDECVPYPCEQDRASVAVKRTLRWAERCLNTHKNKQQTLFGIVQGSVFRELRIECARNLVEMGFDGYAIGGLSVGEGAFLMNEVLEYTGDCLPRDKPRYLMGVGFPGDILDAIEQGIDMFDCVVPTRNGRNGCAFTSTGKVKILNNQYKEDLKPLDEMCNCYTCQNFTKSYLRHLFLANEILGLTLMSLHNVYYFQNLMQQARESIQKGEFKDFKANFLVRQSE

SEQ ID NO: 53312 - protein, 364 aa, unidentified
  source 1..364: note = Jidaibacter acanthamoeba
  REGION 1..364: note = tr|A0A0C1QIN9|A0A0C1QIN9_9RICK Queuine tRNA-ribosyltransferase OS=Candidatus Jidaibacter acanthamoeba OX=86105 GN=tgt_2 PE=3 SV=1
MSLKYKVLAKDGNARLGVLETAHGEVRTPAFMPVGTAATVKAMFPEDIKATGADIILGNTYHLMLRGAAERIHKFGGLRKFMNWHGPILTDSGGFQVLSLTKLRKITEEGVTFRSHLDGTKYELTPERSMEIQYFLGSNVTMILDECPPYPISYMKAKKSMELSLRWAERSKAAFIKREGHGIFGIVQGSVFEDLRAKSAQTLVDMDFDGYALGGVAIGEMQELMFQTLEFTVPLLPQEKPRYLMGIGKPKDIVGSVMRGVDMFDCVLPSRSGRNGQAFVRGGTINIKNAKYSEDTKPLDDKCECYTCKNYSRAYLYHLVRCKEILGAMLVTMHNLTYYQDLMQALRKAIEEKRLSSFESQGFI

SEQ ID NO: 53313 - protein, 395 aa, unidentified
  source 1..395: note = Jorgensenbacteria bacterium
  REGION 1..395: note = tr|A0A0G1UCG8|A0A0G1UCG8_9BACT Queuine tRNA-ribosyltransferase OS=Candidatus Jorgensenbacteria bacterium GW2011_GWA1_48_11 OX=1618660 GN=tgt PE=3 SV=1
MFQVIKSADDSRARLGLLKIGHGVVETPAYVVVGTHAAVRTLAPADLVATKIQVVIANTYHLWRTLGDELDRFEGLHKKMDWPGPIMTDSGGFQVFSLGFAREHGVGKIANIFPAEGDRVMRMSPAANLVRITDEGVYFRDGGEELFLDAEKSIRIQERLGADIVLAFDECTSPTVSYEYQKEALDRTHRWAQRSLEAHLKNKESSSKQGLFGIVQGGQYEDLRQESAKFLAEMDDLAGFGIGGSFSKNDLGQAIKVVTEILPENKPRHLLGIGEPEDIFLGVEAGMDTFDCVAPTRIARNGTLYTKAGKINILNNKFKTDFTKVETDCTCYTCSNYTAAYLAHLFRSHEMLGATLASVHNLHFLVSLVDNIRQSILDDNFEGYKKEFLGLYLTK

SEQ ID NO: 53314 - protein, 393 aa, unidentified
  source 1..393: note = Jorgensenbacteria bacterium
  REGION 1..393: note = tr|A0A1F6BQ50|A0A1F6BQ50_9BACT Queuine tRNA-ribosyltransferase OS=Candidatus Jorgensenbacteria bacterium RIFCSPHIGHO2_02_FULL_45_20 OX=1798470; GN = A3D55_03100 PE=3 SV =1
MFCITHKDSDSRARAGVLETKSGKKLETPAYAIVGTNAEVRCIDAREAERAGTRLIIANTYHLWRELGDSLNSFEGLPARIDMPGSIIMTDSGGFQVFSFGFGREHNTGKVGILRTADFPRAAASQENLVRVTENGAFFTDGRDERFLGPEESMKIQERLGADIMFAFDECTSPWSDYEYTKKAMNRTHRWAEVCLSKKTNASQMLYGIVQGGVFSDLRAESAKFIGSLPFDGFGIGGSFGENGMGGMVAAVNDLLPEQKPRHLLGIGTVRDVFKGVDAGVDTFDCVVPTREARHGALWTRDGRIDLKKSGYVNSTEPLEMECSCEACSSRISRGELRKMFKLKDRRAGKLATIHNVFFFNNLMCKIRKAIKEGKYKEFKSEFLGIISRYGIV

SEQ ID NO: 53315 - protein, 385 aa, unidentified
  source 1..385: note = Kaiserbacteria bacterium
  REGION 1..385: note = tr|A0A1F6DEI1|A0A1F6DEI1_9BACT Queuine tRNA-ribosyltransferase OS=Candidatus Kaiserbacteria bacterium RIFCSPHIGHO2_01_FULL_56_24 OX=1798487 GN=tgt; PE = 3 SV=1
MLREMFKFEILKQSKKSRARLGVISTPHGEIETPSFIPVATRATIRTLDSNEVAEAGSQALIANTYHLHLAPGEDIVKKAGGIHGYMQWKKPLMTDSGGFQVFSLGFGRDHGIGKILKDEKERSITEGAQPVAVKITEEGVHFRSPIDGKQHFLSPKVSTYIQEKLGADIIFAFDECPSPLANEEYMRISLEKTHRWAAESLKSRTNQKKQAMYGIVQGGAFKDLRIESAKIIGAMEGFEGFGFGGEFGYNKAQTKKGISEVSDVLPYEKPRHVLGIGHPEDFPIIASAGGDTFDCIAPTHYARRGIIFTSKGRLDLRKPRFLKELKPLDPKCACEICKTYTRSYISHLIRGKELSGLKLATYHNLYFFNELAARMRKRIKNGDL

SEQ ID NO: 53316 - protein, 378 aa, unidentified
  source 1..378: note = Kaiserbacteria bacterium
  REGION 1..378: note = tr|A0A1F6DWT3|A0A1F6DWT3_9BACT Queuine tRNA-ribosyltransferase OS=Candidatus Kaiserbacteria bacterium RIFCSPHIGHO2_02_FULL_55_20 OX=1798497 GN=tgt; PE = 3 SV=1
MFEFRILKRSKKSRARLGVISTPHGEIETPAFVTVATRATVRTLESDEVAAAGSQVLICNTYHLHTAPGEKNVKRAGGLHEFMQWKRPLMTDSGGFQVFSLGFGKDHGVGKILKEEQERRIPEGTQPTHIKITDDGVHFRSPIDGTELFLNPKESIRIQEALGADIMFAFDECPSPLADEDYLRTSLDRTHRWAAQCLKVRKTSQALYGIVQGGCFKNMRIESARLIGALPFEGFGIGGEFGYDKRSLKKMLEHVHDELPENKPRHVLGVGHPEDFPYIASAGGDTFDCIAPTHYARRGTVFTSKGRFQIRNQRYLTDQRPLDPSCKCDICKTYSRAYISHLMRAYELTGMKLVSFHNLHFFNAQASLLRKRIKNGEI

SEQ ID NO: 53317 - protein, 380 aa, unidentified
  source 1..380: note = Kapabacteria sp.
  REGION 1..380: note = tr|A0A1M3L2P9|A0A1M3L2P9_9BACT Queuine tRNA-ribosyltransferase OS='Candidatus Kapabacteria' thiocyanatum OX=1895771 GN=tgt PE=3 SV=1
MHERPFFTLDHVDADGRARAGTIETDHGSIPTPIFMPVGTQGAVKAIDHRSLVELDSKIILGNTYHLYLRPGTETLRTMGGLHRFANWERPILTDSGGFQVFSLRELRKMSEKGVEFRSHLDGSKHLFTPESVVDAQRAIGSDIFMVLDECTPHPATYTEARTSMELTMRWAERSMTHHRANPFLYGHRQFQFAIGQGSTYPDLRMACMEHLVGMDFDGYAIGGLAVGEPADSMYSMIETSTAVMPASKPRYLMGVGTPENILRAIDLGVDMFDCVMPTRNARNGTIYTTKGKLNIKNARYKVADEALDDGLDTYVGHNVSLAYLRHLFQAGEILGLMIATMQNLALYLWLTKMARRKILEGTFRPWALATIEQLNQSRQ

SEQ ID NO: 53318 - protein, 404 aa, unidentified
  source 1..404: note = Kentron sp.
  REGION 1..404: note = tr|A0A451C9G6|A0A451C9G6_9GAMM Queuine tRNA-ribosyltransferase OS=Candidatus Kentron sp. G; OX = 2126341 GN=tgt PE=3 SV=1
MNPDENPAQFGIFFFANRLISCGAPNSIPDMIPDFHFQLLATDGPARRGRIHLARGTVETPVFMPVGTYATVKAMTPEELRGIGTRLIVANTFHLLLRPGTQVIAAHGGLHGFMHWAGPILTDSGGFQVFSLGDRRTIGEEGVHFRSPIDGASVFLDPEGSLRIQRALAADINMVFDDCTPYPATQDEARRSMELSMRWAARSKAAHAGAPSALFGIVQGGMYPALRADSLAKLVDLGFHGYAIGGLSVGEPPEERRAILGQLLPLMPRDRPRYLMGVGTPADIVNAVQDGVDMFDCVLPTRNARNGHLFVSHGVIRIRNSQYKTDTRPLDAACSCYTCRHYTRAYLHHLDRTREILASRLNTLHNLHYYQTLLSGLRKAIETGVLGEFVEEFHRRTTTARDDE

SEQ ID NO: 53319 - protein, 383 aa, unidentified
  source 1..383: note = Kentron sp.
  REGION 1..383: note = tr|A0A451A9Z7|A0A451A9Z7_9GAMM Queuine tRNA-ribosyltransferase OS=Candidatus Kentron sp. UNK; OX = 2126344 GN=tgt PE=3 SV=1
MQNPFDFQVLATDGPARRGRMRLEHGVVETPVFMPVGTYATVKAMTPEELTDLGTRLIVANTFHLLLRPGTQVIADHGGLHGFMHWNAPILTDSGGFQVFSLGKRRAISEEGVHFRSPIDGASLFLDAEGSIRVQRALQSDINMVFDDCTPYPATKDEARRSMELSMRWAERSYRAHAGSSSALFGIAQGGIYPDLRAESLDSLMAIGSGALDGYAIGGLSVGEPPAERRVVLQDLLPRMPRDKPRYLMGVGTPEDIVAAVLLGVDMFDCVLPTRNARNGHLFVSTGVIRIRNSQYKTDTRPLDEACSCYTCRHYSRAYLHHLDRAHEILASRLNTVHNLAYYQSLLSGLRRAIADGSIADFAADFYRTRGTEPRSELGSNLD

SEQ ID NO: 53320 - protein, 379 aa, unidentified
  source 1..379: note = Kerfeldbacteria bacterium
  REGION 1..379: note = tr|A0A1G2B2G3|A0A1G2B2G3_9BACT Queuine tRNA-ribosyltransferase OS=Candidatus Kerfeldbacteria bacterium RIFCSPLOWO2_01_FULL_48_11 OX=1798543 GN=tgt PE=3; SV = 1
MIRFHITKKSKKSNARLGLLKTPHGAIETPALIPVATQAVVKALTTEEVVQTGTQALIANTFHLHLKPGEKIVKRHGGLHRFMRWQRPLMTDSAGYQVFSLGFGMDHKVGKILKKRSENKVSHPSAQPQNVKITETGVHFRSPVDGSPLFIGPKESIRIQESLGADIIFAFDECTPPTASHAYTEKSLERTHRWAEQCLEYKKTKQALFGIVQGGRFKDLRVESAKMVAGLPFDGFGIGGEFGGDKKRMMHMIRWVIDELPEDKPRHLLGIGYLEDIPKVIKSGVDTFDCIVPTHFARHGAAFTSVGQLDMRKKIFLNDTKPLDPRCACEVCQTYSRGYITHLLRAKEITPLRLLTSHNLFFFNTFVARIREGIRQGII

SEQ ID NO: 53321 - protein, 379 aa, unidentified; identical to SEQ ID NO: 53320
  source 1..379: note = Kerfeldbacteria bacterium
  REGION 1..379: note = tr|A0A3D3HV97|A0A3D3HV97_9BACT Queuine tRNA-ribosyltransferase OS=Candidatus Kerfeldbacteria bacterium OX=2053565 GN=tgt PE=3 SV=1

SEQ ID NO: 53322 - protein, 379 aa, unidentified
  source 1..379: note = Kinetoplastibacterium galatii
  REGION 1..379: note = tr|M1LTI1|M1LTI1_9PROT Queuine tRNA-ribosyltransferase OS=Candidatus Kinetoplastibacterium galatii TCC219 OX=1208921 GN=tgt; PE = 3 SV=1
MTNNLNFKIINTDGRARNGLLHLNHGTLKTPTFMPVGTGGCVKAMLKRDLEEIGAHIILGNTFHLWMRPGIDIINHHEGLHNFIKWQKPILTDSGGFQVFSLKELCKITEEGVRFSSPINGSKLFLTPEKSIQIQSILNSDITMIFDECTPYQIGSHIINREEARSSMHLSLRWAKRSLDEFKRQENKNSMFGIVQGGIYEDLREESINGLLDIGFNGYAIGGLSVGEPKEYLHKILEFVSPKIPDNFPKYLMGVGTPEDIVNAVSNGIDMFDCVMPTRNARNGWLFTRYGNIKIKNSRYKNDTNGLDPTCACYTCRNFTRSYLHHLQITKEINSSILNTIHNLHFYLNMMKEIRESINEKKFDIWKNNFLEDRSSNSY

SEQ ID NO: 53323 - protein, 376 aa, unidentified
  source 1..376: note = Kinetoplastibacterium desouzaii
  REGION 1..376: note = tr|M1L1P1|M1L1P1_9PROT Queuine tRNA-ribosyltransferase OS=Candidatus Kinetoplastibacterium desouzaii TCC079E OX=1208919 GN=tgt; PE = 3 SV=1
MNFKILNTDNNARTAIISLLHGEIKTPVFMPVGTYGSVKSIMPNELKDIGAQIVLGNTFHLWLRPGTDIIKLHNGLHNFMHWDKPILTDSGGFQVFSLSKKRKITEEGVAFSSPINGAKMFLTPEKSMQIQNILNSDIVMAFDECTPFKIADTIITKKEVYNSMTLSSRWAKRSFDEFQYQKNMNMLFGIVQGGMHEDLRDESIDKLLNIGFNGYAIGGLSVGEPKEDMIRILKHTARNLPKYSPRYLMGVGTPEDIVNGVENGIDMFDCVMPTRNARNGWIFTRYGNIKIRNSAYKKDLLPLDEECTCYTCNNFSRSYLHHLQIIKEINGARLNTIHNLHFYLTIMNEMRDAINNNEFNAWKTKFIIDRQQLNKK

SEQ ID NO: 53324 - protein, 368 aa, unidentified
  source 1..368: note = Komeilibacteria bacterium
  REGION 1..368: note = tr|A0A1G2BY23|A0A1G2BY23_9BACT Queuine tRNA-ribosyltransferase OS=Candidatus Komeilibacteria bacterium RIFOXYC1_FULL_37_11 OX=1798555 GN=tgt PE=3 SV=1
MFELLKKSKKSKARLGVLNTARGKVDTPFFMPIATKAAIKSMEASEVKNLGAQIILSNTYHNLLRPGLDVIKKFGGLHKFMDSDLPILTDSGGYQVFSLAKLRKIIGNDIKFQSHIDGSTHILNPRRVIDIQVVLGSDIMMVLDECVGLPTTWDKALEALERTSRWAQLAVDYKNKLNKKSTKIKKQLIFGIVQGADFKDLRLRSAKELVAMNFDGYAIGGLAVGETAKVMYQVLDYTVDQLPENKARYLMGVGYPENIIEAVKRGIDMFDCVIPTREARHGKLYIWRTQPNVSKKNFYTTININNAKFRKDKTPINNTTLKNYSRAYLHHLFKTGEPLSLKLATLNNLEFYLTLMAQIRQAIRANKL

SEQ ID NO: 53325 - protein, 389 aa, unidentified
  source 1..389: note = Komeilibacteria bacterium
  REGION 1..389: note = tr|A0A1G2BTR5|A0A1G2BTR5_9BACT Queuine tRNA-ribosyltransferase OS=Candidatus Komeilibacteria bacterium RIFCSPLOWO2_01_FULL_53_11 OX=1798552 GN=tgt PE=3; SV = 1
MSFKLLKTSKKSRARTGILTTAHGAIRTPFFMPIATKGAVKGLEAHEVADLGAEIILSNTYHLYLQPGLSVLKKYGGVRNFMKATLPILTDSGGFQIFSLSKLRLVDEHGVTFRSHIDGSKHRLTPKKAIAIQAALGSDIMMVLDYFPGYPATEKQTAEAVRLTTAWAKQCFEYKKVLSKKYTAVRKQMLFGIVQGSTFRELRKRSASELTALPFNGYAIGGLAVGEPAAEMYKVLDHTVPLLPTDKPRYLMGVGYPEQIVEAVKRGIDMFDCVIPTREGRHGRLFVWKRKDKNPLALALSHPRKLPLGKGEGEGVRTFYDTLNIRNSEFRSDTRPVDPSCDCQLCKNYSRAFLYQMFKTEDWLGPRLATIHNLRFYLVLMERVRSGIR

SEQ ID NO: 53326 - protein, 381 aa, unidentified
  source 1..381: note = Kryptonium thompsoni
  REGION 1..381: note = tr|A0A0P1LJT5|A0A0P1LJT5_9BACT Queuine tRNA-ribosyltransferase OS=Candidatus Kryptonium thompsoni; OX = 1633631 GN=tgt PE=3 SV=1
MFKFELVALDSKTSARAGLIYTDHGVIETPVFMPVGTQGTVKAVEQRELVEIGAQIILGNTYHLYLRPGTDVIFKAGGLHKFIGWERGILTDSGGFQIFSLAQFRKISKEGVKFQSHIDGSYHFFTPESIIDIQRILGSDIMMCLDECTPYPCDYDYAFKSNQLTIEWAKRSRERFDNTKPLYGHTQAIFGIVQGSIYPEIRAKSVEELVKLDLDGYAIGGLAVGEPIETMYQIAEFTASLLPVDKPRYLMGVGTPENILEAISRGIDMFDCVIPTRNGRNATLYTREGKFSIKNAIYKEDFTPVDKDCDCYTCRSFTRAYLRHLFNADEILALQLASIHNLAFYLWLVREARSHIIQGDFLEWKDKMLQKIGEKAKIANH

SEQ ID NO: 53327 - protein, 372 aa, unidentified
  source 1..372: note = Kuenenbacteria bacterium
  REGION 1..372: note = tr|A0A1F6GKJ8|A0A1F6GKJ8_9BACT Queuine tRNA-ribosyltransferase OS=Candidatus Kuenenbacteria bacterium RIFCSPHIGHO2_12_FULL_42_14 OX=1798563; GN = A3E04_03755 PE=3 SV=1
MTLSRRKIIATPHGKISTPFFMPDATQGAVKLIESAKIKTIGVPAMVVNTLHLYLQPGLHIIKKASGIHQFMNWPGPLLSDSGGYQVFSLIYKTKGRAGKVYEDKVVFRSPIDGSRHELTPEKSIQIQFALGTDMLVCLDDVRPNDTDRGEAEAAVERTLKWARRCKKEYEKKVKSQKSKVKNYNRPLLFGVVQGGVFPDLRQHCAEELVKIGFDGLGFGARPIDEQGKFLTEVLKATTAAIPENYLRFALGVGAPEDIVYFARLGWDMFDCVIPTREGRHGRLYQMQKSKAQSQKFGKDFYIILNITNAKFAKDFSPINADSKLPELREHSKAYLHHLFKVSESLGQRLASLNNLEFYARLMKTVRQKPNQ

SEQ ID NO: 53328 - protein, 431 aa, unidentified
  source 1..431: note = Kuenenbacteria bacterium
  REGION 1..431: note = tr|A0A2N1UND1|A0A2N1UND1_9BACT Queuine tRNA-ribosyltransferase OS=Candidatus Kuenenbacteria bacterium HGW-Kuenenbacteria-1 OX=2013812 GN=tgt PE=3 SV=1
MMNLYKILFQHPMTKFQLIKKSKKSKARLSLFKTSHGDIEGPFFMPIATRGAIKNLTPDEMKSLKNQIILSNTYYLMLRPGMKVIKKAGGLHKFMNWNGPILTDSGGYQAYSLGSLKFKVQSSKLQIENNKFQSKSPSEVLQMGQGIFKERNPLNIPLQRDLSVKFSEQGVEFYSEVDGEKIFLSPEKAVEIQIILGSDIIMVLDQCVALPCDYKKIKQALELTTRWAKRSNEYFLKNKKEHQMLFGIVQGGTYKKLRLQSAKELVNIDFDGYAIGGLAVGEPRKKMFDVLNCTVPILPENKPHYLMGVGKPEEIIEAVKRGIDMFDCVIPTRNARHGTLYKFKVKSVKLKVKEEDFYEIIRITNAKFEYDLQPIDSNCSCYTCQNYSRAYLRHLFMTNESLGFRLATIHNLAFYLELMEKIRKGILEGRI

SEQ ID NO: 53329 - protein, 381 aa, unidentified
  source 1..381: note = Lambdaproteobacteria bacterium
  REGION 1..381: note = tr|A0A1F6GBG2|A0A1F6GBG2_9PROT Queuine tRNA-ribosyltransferase OS=Candidatus Lambdaproteobacteria bacterium RIFOXYD2_FULL_50_16 OX=1817772 GN=tgt PE=3 SV=1
MNQPLTFDLLKTDPSGARRGRMTTAHGVIETPIFMPVGTAAAMKALTPAQVGEAGAQIILSNAYHLENQPGSELIEKLGGIHKFMNWNGPILTDSGGYQVFSLDKKTVHEDGVTFRYSKGGQEVKLNPELSMAIQNRLGADIIMAFDECVEFPTTHTYARESLERTLRWAKRCKAAHQNPNQALFGISQGALYEDLRKRSFEGLIELDFPGYAIGGLSVGEGLEHMKRALDFTTPLMPVEKPRYLMGIGLPEDIIEAIERGIDMMDCVIPTKFARSGVLFTHVGRIRVTDTKFRRDKFPVDTNCDCYCCKNYSRAYLHHLFAGNEILGATLTSIHNVHFYMNLTAKIRDAIEQGEFLKFKGEFLETYQRAEGKKQKSSRPR

SEQ ID NO: 53330 - protein, 368 aa, unidentified
  source 1..368: note = Lambdaproteobacteria bacterium
  REGION 1..368: note = tr|A0A1F6GBA9|A0A1F6GBA9_9PROT Queuine tRNA-ribosyltransferase OS=Candidatus Lambdaproteobacteria bacterium RIFOXYD2_FULL_50_16 OX=1817772 GN=tgt PE=3 SV=1
MGRLKFQLEAEDGQARAARFWLGPKQIQTPLFMPVGTAATVKAMTSEELTQIGFPLILGNTYHLFLRPGDSLIKELGGLHKFMNWPGAILTDSGGFQVFSLAKLTKITEAGVTFQSHLDGTKLAFTPESVIQTQENLGSDIMMVLDECLPIPSEREQVKESIALTHRWAERSLKARRSENAMFGIVQGADFEELRRESALGLVDLGFDGYAIGGLSVGESKSIMAEVCGYTTPLLPKDKPRYLMGVGDPVDLLNGIEAGIDLFDCVLPTRNARNGGLFTSLGKINIKHSSHRTNPGPLDPNCGCSVCQNYSRAYLRHLFQSGEILASRLNTYHNLHFLHDLMNQARQAILANRFAQFKRDWLARYLGD

SEQ ID NO: 53331 - protein, 356 aa, unidentified
  source 1..356: note = Latescibacteria bacterium
  REGION 1..356: note = tr|A0A3D2RHP8|A0A3D2RHP8_9BACT Queuine tRNA-ribosyltransferase OS=Candidatus Latescibacteria bacterium OX=2053570 GN=tgt PE=3 SV=1
MPDRLTHISTPHGALQLPAFLPDATRGVVRTLDANDARSCGVECLMVNTLHLSMQPGTTVIRDAGGIHKFAGWAGPIVSDSGGFQVYSLATGGAKGVSISSEGVTFKIQAQKKKRALTPEKCIQYQVQMGSDILFSLDDCPPDNADFSALEESVYRTLGWGRGCRDAFDRMTDSMDTAPLLYGVIQGGSDLDLRRRCIEGLLEIGFDGFGFGGWPIADDGSLVDEVGRVAEMIPDGKPLHGLGIGKPNNLVQAYHLGYDTFDCTIPTRDARRGRLYVEKEDGVAGDFDYVRIEREAYARDNEPVEAGCDCSTCGRYSRAYLHHLFRIGESAGHRLATIHNLRFFTRVINSLRASDA

SEQ ID NO: 53332 - protein, 384 aa, unidentified
  source 1..384: note = Latescibacteria bacterium
  REGION 1..384: note = tr|A0A3D2Z3H6|A0A3D2Z3H6_9BACT Queuine tRNA-ribosyltransferase OS=Candidatus Latescibacteria bacterium OX=2053570 GN=tgt PE=3 SV=1
MSEGAPFRFELVAEDPASGARAGVLHTPHGAIETPVFMPVGTQATVKALSQQDLLTLDADIILGNAYHLYLRPGHERIERFGGLHGFMNWPRPILTDSGGFQVFSLQELRKITEEGVQFRSHLDGSAHLFTPESVMEIEHALGADIIMAFDECTPYPATEEYARESMERTQRWAQRCLSRHEQLQSAQVAAGRPPQALFGIVQGGVYRQLRQRSARDLVGLDLPGYAIGGLAVGESRAERLATIEDTVPELPAHKPRYLMGVGLPQDLIDGVVGGIDMFDCVIPTRNARNSTLFTSTGRVRMKNAIHADDDSPLDAACECITCTQYHRGYLRHLFQTNELLALHLATYHNIHFYLRLMRSMRAAIIDGDFTDWQQAFFATYQDG

SEQ ID NO: 53333 - protein, 426 aa, unidentified
  source 1..426: note = Levybacteria bacterium
  REGION 1..426: note = tr|A0A0G0K1A5|A0A0G0K1A5_9BACT Queuine tRNA-ribosyltransferase OS=Candidatus Levybacteria bacterium GW2011_GWB1_37_8 OX=1618463 GN=tgt PE=3 SV=1
MNKIQDFKFKFEILKKDKKSKARVGKITTAHGIIETPAFVAVGTQATVKGLSPKDLQETGVQVLFGNTYHLHLRPGEDLVKDFGGLAKFMSWNGPTITDSGGFQVFSLGQRKIKILQGDEEANLVKITEDGVEFRSHIDGSKHFFTPEISIEIQKKLGADIILAFDECAPQPSDHDYTKEAMERTHKWALRSLAAFKSEIRSTKSETNSNVQNPNNKTVSNFDIRYSNFYHNWQQALYGIIQGGVYRDLREESAKFISALPFDGIAIGGVAVGESKKEMREAVDWSYPFLPEDKPRHLLGIGEIDDIFDVIERGMDTFDCVIPTRFGRYGIVFVDPPVGNLKNRFRIDLNKVVFAKDAGPISKTCSCYVCTNFTKGYIHHLVRAQELLAYRLASYHNMFFINNLVKKIRESILEDKFQELKRNWLG

SEQ ID NO: 53334 - protein, 443 aa, unidentified
  source 1..443: note = Levybacteria bacterium
  REGION 1..443: note = tr|A0A1F6KMF3|A0A1F6KMF3_9BACT Queuine tRNA-ribosyltransferase OS=Candidatus Levybacteria bacterium RIFCSPLOWO2_01_FULL_39_10 OX=1798622 GN=tgt PE=3; SV = 1
MKPSFKVLVKDKNARAGVIKTSHGDIETPAFIPVGTKATVKSLTSEQIREIGPQVVLVNTYHLHLQPGEDVIKKLGGLHSFMNWDKPMMSDSGGFQVFSLGIGLEKPGVKFLKDLDDGRSKVESRNLKIEDRKLIHRPSSIINNLSSTIYPLSSNDEPRPRLNKITEEGVEFQSHIDGSRRKLTPESSIAIQEKLGADLIIAFDDLESPTYSYEQTKKSLDLTNRWELRSLKAHLTFQGEAFQGEALRGKRPNQLLYGVTHGGEFEELRRKSAKFVNSNFDAVALGGAHKNKKNLYEVVEWTVCELDEDKPRHLLGVGEVDDIFESVARGIDTFDCVIPTRLGRMGHVFAGPPLGNIRNRFRYDITKSKFVSDEKSIDPKCQCWVCQNFSRAYVNHLFRSRELLAYTLATYHNVYFMVNLTNQIRDSILNSQFEKLKKVWIKS

SEQ ID NO: 53335 - protein, 377 aa, unidentified
  source 1..377: note = Liberibacter solanacearum
  REGION 1..377: note = tr|A0A424FLI1|A0A424FLI1_9RHIZ Queuine tRNA-ribosyltransferase OS=Candidatus Liberibacter solanacearum OX=556287 GN=tgt PE=3 SV=1
MDKNFCFNIKAKSGNARLGEIITPRGIIKTPAFMPVGTSGAVKAMYFDQVRDLGADVILGNAYHLMLQPGADRIARLGGLHQFIRWFKPILTDSGGFQVMSLSKLCSIDEQGVSFRSHIDGSLHRVSPEDSIEIQNLLGSDIQMQLDECLALPADEKELKRAMELSLRWAERSLVAFGNQPGKALFGIVQGGDNISLRSFSAARLKELDLKGYAIGGLAVGEPQEVMLHILSNILPILPVEKPHYLMGVGTPDDILKSVSYGVDMFDCVMPTRAGRHGLSFTRFGKINLRNARHTDDMRPLDAESNCPALRDYSRAYLHHLLHVNESLAGMILSWANLFYYQDLMREIRNAIAQDCFADFMMQTQENWRKGDIPPLF

SEQ ID NO: 53336 - protein, 379 aa, unidentified
  source 1..379: note = Liberibacter europaeus
  REGION 1..379: note = tr|A0A2T4VYJ5|A0A2T4VYJ5_9RHIZ Queuine tRNA-ribosyltransferase OS=Candidatus Liberibacter europaeus OX=744859 GN=tgt PE=3 SV=1
MDLDKVFCFKIQSRSDSARLGNITTSRGSIRTPAFMPVGTCGAVKAMYFDQVRNLGTDVILGNAYHLMLRPGAERISRLGGMHKFIRWPRPILTDSGGFQVMSLSKLCSVDEQGVSFRSHIDGSLHYMSPEDSIDIQNLLGSDIQMQLDECLALPANYKEIKRAMELSLRWAERSLVAFGNQPNKAMFGIVQGGDNIELRSFSAERLKELDLKGYAIGGLAVGEPQHVMLHILSNVVPILPVEKPRYLMGVGTPDDILKSVSYGIDMFDCVMPTRAGRHGLSFTRFGKINLRNARHADDMRPLDETSDCPALCDYSRAYLHHLLRVNESLAGMIISWANLAYYQDLMANIRHAIAEDRFAEFMIQTQENWLKGDIPPLV

SEQ ID NO: 53337 - protein, 360 aa, unidentified
  source 1..360: note = Lindowbacteria bacterium
  REGION 1..360: note = tr|A0A1F6LV56|A0A1F6LV56_9BACT Queuine tRNA-ribosyltransferase OS=Candidatus Lindowbacteria bacterium RIFCSPLOWO2_12_FULL_62_27 OX=1817870 GN=tgt PE=3; SV = 1
MKFQVLQTSGRARLGRLEIAGQVIETPAFMPVGTLGTVRTLEAEEVLELGYRLILGNTYHLWLRPGLEVISRFGGLKRFMGWPGALLTDSGGFQIFSLSKIRKLDDDGVTFSAPEDGGDVHRLTPERALEIQRDLGADIAMVLDECPPFPCEAEALRKAVERTIDWARRSARWLGENPLGGCVFAITQGSTDLDLRRQCLDALQSLKFSGYAVGGLAVGEPNEVMYETLDRILPDYPADRPRYLMGVGAPADLETCARLGVDLFDCVLPTRNARRGQLLTSQGPVNIRNSEHERSESPPDPACACRVCRKYSRAYLRHLFQCDEILGLKLATYHNLFYVQSVMESVRNGIRSGGSAGAAQ

SEQ ID NO: 53338 - protein, 406 aa, unidentified
  source 1..406: note = Liptonbacteria bacterium
  REGION 1..406: note = tr|A0A1G2CKL3|A0A1G2CKL3_9BACT Queuine tRNA-ribosyltransferase OS=Candidatus Liptonbacteria bacterium RIFCSPLOWO2_01_FULL_53_13 OX=1798651; GN = A2946_04230 PE=3 SV=1
MTLVFELVHKDTRSRARIGRITTPHGVIETPSYVIVGTDAAVRCLEPEDIPKTNTQAIIANTYHLWRSLGDEGLANFPGVHKEMQWNGPIMTDSGGFQVFSMGASREHGVGKKPQIADRKSLIADEPVEKGVVRVTESGVYFDDPSTSSGNNNGEEVYLDAELSMKIQEQLDADIVFAFDEPSSPLHDKEYTRDAMERTHRWAVRSLEAKTSLQKIYGIVQGGTFEDLRKESAEYIGALPFDGIGIGGSFGSSFGSSTENTLKELEWTIPFLPERKPRHLLGMGKIADLFYGVEAGIDTFDCVIPTREARHKSLWTSRGRMDIGKGVHGTDGGVIAEDCGCPVCADLRVERRELHQMFKIKNPEAGRLATIHNVYFFNDLMSQMRDALREGRFGEFKGEYLGRLAK

SEQ ID NO: 53339 - protein, 398 aa, unidentified
  source 1..398: note = Liptonbacteria bacterium
  REGION 1..398: note = tr|A0A1G2CSV6|A0A1G2CSV6_9BACT Queuine tRNA-ribosyltransferase OS=Candidatus Liptonbacteria bacterium RIFOXYD1_FULL_36_11 OX=1798656 GN=A2604_02465; PE = 3 SV=1
MFEFKEEKRSKFCGARVGIIKTEYGEFETPLYVFAGTDAEIRTLDKKSLKEVKALVANTYHLGVRTNKIKEMEKSGGLHKYMNFKGLIMTDSGGFQVFSYGFSREHGIGKIGFFPGKSKVKTVKEENLAQITEKGVFFKDESGKKKFLGPEESIKIQEKLGADIILAFDECTSPFHEYEYTKKSLERTNRWAKKCLKIKKSGQALYGIIQGGFFKDLREESARFINSLDFQGIAVGGPLGKDRSDMIQVLDWIQPFLEEKPELPRHMLGIGKPEDLFCGIERGMDTFDCVIPTREARHGSVYTKNRRIDLTRGSMKFKKGERIEKKCLCQTCLDFSVLELREMIKSENPRKTEVAKLLTVHNIFWFQNLMDKIRKSILEGKFKEFKKEFLKEYIRKII

SEQ ID NO: 53340 - protein, 406 aa, unidentified
  source 1..406: note = Lloydbacteria bacterium
  REGION 1..406: note = tr|A0A1G2CTQ9|A0A1G2CTQ9_9BACT Queuine tRNA-ribosyltransferase OS=Candidatus Lloydbacteria bacterium RIFCSPHIGHO2_01_FULL_41_20 OX=1798657 GN=tgt; PE = 3 SV=1
MQFKIEKKLKGSLGRVGIIKTVHGTINTPAFAVVGTKATVKALSPEQVRDLGAQVVLANTYHLYLQPGSKLVEKAGGFSKFMRWNGPTITDSGGFQVFSLGSAYGKTVSKISNSESDYSSILQNTRIGNDEEGITEKLVKINNDGVTFKSYIDGSEHRFTPESSMKIQKELGADIIFAFDECTTPYASYEYQKEAMERTHEWARRSLAEHERLSGKRHLKQALFGIVQGGRFKDLREESARVISKMPFDGFGIGGSFDKEDMYSVVGWVNQILPEDKPRHLLGIGEPADLFGGVENGADLFDCVAPTRIARNGTLYTENGRINILNAKFIEDFTPIDETCECYTCKNYTRAYLSHLFRAKEMFAATLASIHNLYFIVNLMKRIRQSILDEKFFEFKEEFLASYYSK

SEQ ID NO: 53341 - protein, 385 aa, unidentified
  source 1..385: note = Lloydbacteria bacterium
  REGION 1..385: note = tr|A0A1G2DFN9|A0A1G2DFN9_9BACT Queuine tRNA-ribosyltransferase OS=Candidatus Lloydbacteria bacterium RIFCSPHIGHO2_02_FULL_51_22 OX=1798663 GN=tgt; PE = 3 SV=1
MIRFRITKKSERSRARLGILETPHGTVETPAFVPVATAASLRTLTSEEAAEAGSQLFIANTFHLHVRPGEEIVRNAGGIHRFMNWKRPLMTDSGGFQVFSLGFGRDFDTGKFSKDRTAQGGLPEIKRGRNPSSLKITDDGAEFRSPLDGRKLFIGPRESIAIQEAIGADMIFAFDECTPAHASRGYIEHSLARTHRWAKDCLAAKKSEQALFGIVQGSHFEDLRKESAGFIGALPFDGFGIGGDLGDIKESKREMFQILEWTVPLLPDEKPRHLLGIGYPEDMEPIITHGIDLFDCITPTHFARRGVAFTREGRLNLRQKRFLSEFQALDDTCACGVCGAYSRAYIAHLIRAREITGLRLLTYHNLFFWNTLVARLREKIARGEL

SEQ ID NO: 53342 - protein, 371 aa, unidentified
  source 1..371: note = Macondimonas diazotrophica
  REGION 1..371: note = tr|A0A4Z0FAH4|A0A4Z0FAH4_9GAMM Queuine tRNA-ribosyltransferase OS=Candidatus Macondimonas diazotrophica OX=2305248 GN=tgt PE=3 SV=1
MKFELLGQSGAARRGRVTLAHGQVETPAFMPVGTYGTVKSLTPEEVADCGAKIVLGNTFHLWLRPGLDVIAAHGGLHGFMNWSGPILTDSGGFQVFSLAELRRLTEEGVHFRSPIDGDAVFLSPERSMEIQRVLNSDIVMVFDECTPYPADPDQARRSMELSLRWAARSRAAHEGNPNALFGIVQGGMYPDLRYESLQGLQAIGFDGYAIGGLSVGEPLVERLAVLEALLPEMPTDRPRYLMGVGTPSDLVDAVARGVDLFDCVMPTRNARNGHLFTHEGVVRIRNQVHRLDTGPLDPLCECMTCRNYSRAYLRHLERSQEILFARLASYHNTYYYQNLMARMRAAIAEHRFDAFRREFAAREGRMAAAVP

SEQ ID NO: 53343 - protein, 412 aa, unidentified
  source 1..412: note = Magasanikbacteria bacterium
  REGION 1..412: note = tr|A0A2H0N309|A0A2H0N309_9BACT Queuine tRNA-ribosyltransferase OS=Candidatus Magasanikbacteria bacterium CG11_big_fil_rev_8_21_14_0_20_43_7 OX=1974654; GN = tgt PE=3 SV =1
MSMNFFDIISKSTECAARTGVIHTDHGDIETPCFMPVGTQATVKTLDSEDLKTLDPEVILANTYHLHLRPSEDLIEKFGGLHKFMNWDGPILTDSGGFQVFSLGLQKTKKQESKKANAHSTLVEIDDNGVTFRSHIDGSIHRFTAESAIETQRKLGADIIMAWDECTPDDADEVYARQALDRTHRWAKESLHAHQKNTTYQGYNQYLFGIIQGAGHRDLREESARVISAMDFDGIAIGGESVGYNMNATKEILEWVMPLIPEDKPHYTMGVGYSPMDLFTVVENGIDMFDCVAPTRIARNGTLYTSEKKVAENVSILTKEGLEEVPIQNKYTLNINNAQFREDKSPIDPTCACHTCKNYSRAYLHHLFKVQEMLAYRLATIHNVHFMLELMREMRVAIREDRFFGLKQSWTQ

SEQ ID NO: 53344 - protein, 423 aa, unidentified
  source 1..423: note = Magasanikbacteria bacterium
  REGION 1..423: note = tr|A0A0G1MWE9|A0A0G1MWE9_9BACT Queuine tRNA-ribosyltransferase OS=Candidatus Magasanikbacteria bacterium GW2011_GWC2_45_8 OX=1619050 GN=tgt PE=3 SV=1
MQKRPIVILKLTQKIILFKALPFLTNLLQSRHKTMNIFSPFKLIKKDPHTRARLGRITTAHGVIETPEFMPVGTQATVKTLDVHDLYSSGAQVILGNTYHLHLRPGEKIIKKLGGLHKFMNWHKPILTDSGGFQVFSLKNGEHTNKQLVTIDEDGVNFRSYINGSLHRFTPESAIKIQHDLGADIIMAFDECTSDTVPHAIALAAMERTHRWAVRCIAAHKKLKKGGSAGPLLFGIIQGGSHQDLRVKSAQFITSLPFDGIAIGGESIGYNMEATGTIMEYLAPYLPENKPRYTMGLGASPGDFFKAVAAGADMFDCVAPTRIARNGGLFIHPRNGGAPANKYRLCITNAAYLTDKKPIDVWCDCFTCTHHSRAYLHHLFKADEILGLRLASIHNVHFALKVMREIRESIANGTFVALYKKWK

SEQ ID NO: 53345 - protein, 364 aa, unidentified
  source 1..364: note = Magnetobacterium bavaricum
  REGION 1..364: note = tr|A0A0F3GW22|A0A0F3GW22_9BACT Queuine tRNA-ribosyltransferase OS=Candidatus Magnetobacterium bavaricum OX=29290 GN=tgt PE=3 SV=1
MKCFSLLNVTGNARAGMLQVGQWSLPTPMFMPVATQGTVKAMTPLALREVGAEIILCNTYHLYLRPGHDVVEAAGGLRGFTSWDGPILTDSGGFQVYSLSPLRKIKEAGVQFKSHIDGSTHFIGPKEAMQIQRALGADIVMAFDECPPYPATYEYVLGSLQLTTRWAKQCKEVHDGQQMLFGIIQGGQYKDLRLQSASELKALDFDGYALGGVSVGEPKDMMYDIVGYMASELPQDKPRYLMGVGFPQDILHAVEAGFDMFDCVIPTRTARHGTILTHSGRITIKAQRYKTDPAPLDPQCGCYTCKNFSRAYLNHLFRAKEILAITLNSIHNLHFYFEFMRDIRAAITQGRFKEFKDRWLKNCG

SEQ ID NO: 53346 - protein, 376 aa, unidentified
  source 1..376: note = Magnetoglobus multicellularis
  REGION 1..376: note = tr|A0A1V1P637|A0A1V1P637_9DELT Queuine tRNA-ribosyltransferase OS=Candidatus Magnetoglobus multicellularis str. Araruama OX=890399 GN=tgt PE=3 SV=1
MFINQQVEDKYMFTINKTCPKTGARAGTLTTLHGTIETPVFMPVGTAGTVKSLCPRDLTNLEVQILLGNTYHLYLRPGCNVIELFGGLHEFMQWHGPILTDSGGFQVYSLAKLRKVTSQGVIFQSHIDGSKHMLSPQSVIDTQTCLGSDIMMCLDDVVPYPCENSQIKAALDRTHQWAKECKIIWQNSDSENILFGIVQGGMIKSYRKQSIQVLSDLDFPGYAIGGLSVGEPSEMMYDIGAYCLDLLPSEKPRYIMGVGTPADLIQLVASGCDMFDCVMPTRNARNGQLFTSQGTINIKNADYRNDMAPVDSSCTCYTCEQFSRAYLNHLYRSRELLAYRLNSIHNIHFYIQLMKQMRRAILSGCFDRFVADRLLL

SEQ ID NO: 53347 - protein, 381 aa, unidentified
  source 1..381: note = Magnetomorum sp.
  REGION 1..381: note = tr|A0A0N0D3S1|A0A0N0D3S1_9DELT Queuine tRNA-ribosyltransferase OS=Candidatus Magnetomorum sp. HK-1 OX=1509431 GN=tgt PE=3 SV=1
MVKTEDYFQQFQFNLDKKCQKTNARAGTLNTSHGVVETPIFMPVGTAGTVKSLCPRDLVDLKVQLLLGNTYHLYLRPGCDIIRIFGGLHEFMQWHGPILTDSGGFQVFSLAKLRKVNDDGVIFQSHIDGSKHILNPQSVIDIQDCLGSDILMCLDDVVPYPCDEKRIKEALYRTHKWAKECKDAWQEKNTHNALFGIVQGGMFKDLRKQSIQALCEIDFPGYAIGGLSVGEPQNLMYEIGSYCLELLPQDKPRYIMGVGTPADLVHLVSAGCDMFDCVMPTRNARNGQLFTSKGTINIKNAHFREDPNPIDPECNCYTCLQFSRAYLNHLYRSRELLAYRLNTIHNIHFYIQLMKGMREAILEDRFESFSKSLLSIYEGHK

SEQ ID NO: 53348 - protein, 355 aa, unidentified
  source 1..355: note = Margulisbacteria bacterium
  REGION 1..355: note = tr|A0A1F6QJ37|A0A1F6QJ37_9BACT Queuine tRNA-ribosyltransferase OS=Candidatus Margulisbacteria bacterium GWE2_39_32 OX=1817872 GN=tgt PE=3 SV=1
MKFEIIKKSKHSNARIGKLETAHGIINTPVFMPVGTQATVKTLTPEMLHNTQAQIILSNTYHLYLRPGVDIIKAAGGLHRFMNWKKPILTDSGGFQIFSLEGLRNINDNGVIFSSHHDGSKHLLTPESVLQLQLDFGSDIIMQLDECVPANAEYDKTLEALKRTTNWARRTKKYFLESGRQNQEVFAIIQGGMFSDLRKKSAEELGELDFFGYAIGGLSVGEEKPLMYDLMASTSLILPEQKPKYLMGVGGPEDIAWGIQCGIDMFDCVLPTRLARHGTLLTNNGKINIKKQLYAKDFTPIDESCDCYTCQNYTKGYLRHLFRAKEILGLTLMTIHNIRFLVKLTEEIKRNIELE

SEQ ID NO: 53349 - protein, 355 aa, unidentified
  source 1..355: note = Margulisbacteria bacterium
  REGION 1..355: note = tr|A0A2W4I5N2|A0A2W4I5N2_9BACT Queuine tRNA-ribosyltransferase OS=Candidatus Margulisbacteria bacterium OX=2053573 GN=tgt PE=3 SV=1
MKFEIIKKSKHSNARIGKLETAHGIINTPVFMPVGTQATVKTLTPEMLHNTQAQIILSNTYHLYLRPGVDIIKAAGGLHRFMNWKKPILTDSGGFQIFSLEGLRNINDNGVIFSSHHDGSKHLLTPESVLQLQLDFGSDIIMQLDECVPANAEYDKTLEALKRTTNWARRTKKYFLESGRQNQEVFAIIQGGMFSDLRKKSAEELGELDFFGYAIGGLSVGEEKPLMYDLMASTSLILPEQKPKYLMGVGGPEDIAWGIQCGIDMFDCVLPTRLARHGTLLTNNGKINIKKQLYAKDFTPIDECCDCYTCQNYTKGYLRHLFRAKEILGLTLMTIHNIRFLVKLTEEIKRNIELE

SEQ ID NO: 53350 - protein, 276 aa, unidentified
  source 1..276: note = Marinamargulisbacteria bacterium
  REGION 1..276: note = tr|A0A328RJR5|A0A328RJR5_9BACT Queuine tRNA-ribosyltransferase (Fragment) OS=Candidatus Marinamargulisbacteria bacterium SCGC AG-439-L15; OX = 2184346 GN=tgt PE=3 SV=1
FMNWDKPILTDSGGYQVFSLETNRTISKEGVTFKSHLDGSLHMFTPKSVVDLQLGFNSDIMMPLDICTPYPSEKEQVDQDLEQTYLWERDAREYWDQTDQKNLLFGLVQGGAFKDLRQKSAEQLIGLDFPGYAIGGLSVGEPRPILEEMTEYTTALLPKEKPRYLMGVGLPENMKKSIDSGVDMFDCVAPTRLARHGQFFLGLDRINIKKAEFREDKEPLDPHCSCYACQNFSRSYIRHLFVANELLSHILLSTHNLHALIHLVKGYRQAILDGSD

SEQ ID NO: 53351 - protein, 358 aa, unidentified
  source 1..358: note = Marinamargulisbacteria bacterium
  REGION 1..358: note = tr|A0A328QZL0|A0A328QZL0_9BACT Queuine tRNA-ribosyltransferase OS=Candidatus Marinamargulisbacteria bacterium SCGC AG-333-B06; OX = 2184342 GN=tgt PE=3 SV=1
MIHYSFTIKQRCSKTNARLGELRTPHGILETPVFMPVGTQATIKSLTPDQIISTKSQILLANTYHLSLRPGIDIIKKHGGLHSMMNWHGPILTDSGGYQVFSLAKRRQVDPNGITFQSHIDGSLVRFTPKHVIDLQCGFNSDIMMVLDICTAYGKTKEQTARDLILTHQWAKESQQYWFDKHIANWCFAIVQGGFYMDLRKESADFLSSLNFPGYAIGGLSVGEPQALLHDYITNCAPLLPDNKPRYVMGIGLPENIKVAIENGIDMFDCVIPTRIARHGQFFHENERINIKKEMFKDDLAPLSDHCSCYTCQHFSRSYIRHLFIAKEMLAATLLTIHNIFYLNHYVEMIKNKIFNNS

SEQ ID NO: 53352 - protein, 369 aa, unidentified
  source 1..369: note = Marinimicrobia bacterium
  REGION 1..369: note = tr|A0A2M7U5Q3|A0A2M7U5Q3_9BACT Queuine tRNA-ribosyltransferase OS=Candidatus Marinimicrobia bacterium CG_4_10_14_0_2_um_filter_48_9 OX=1975522 GN=tgt; PE = 3 SV=1
MQFKLHAVDRSGARRGEFKTAHGIVQTPTFMPVGTAGFIRSTTPRDIAETGAEVILANTYHMSLGDRLQTVVRAGGLHNFMGWQKTILTDSGGFQVFSLPDTTITDDGVSFSFEESGERIELTPEKSMLIQRELGSDIVMAFDECVGFPADEAEVRKSIHHTTEWGKRCREVELQDHQFLFGIVQGGTYQALRRQSAQEIAKIDFDGFAIGGVSVGEGHQLLREITGMTAPLLPPKKPRYLMGVGLPEDILAAVHRGVDMMDCVIPTRYARQGTLFTRTGKLRIMDKTFRKDKYPLDTKCQCYTCQTYTRMVLRYLFFTKDPLAETLATIHNVTFYEDLMGDIRKAIENNDYENFQSRWLNAYLKKGQK

SEQ ID NO: 53353 - protein, 260 aa, unidentified
  source 1..260: note = Marinimicrobia bacterium
  REGION 1..260: note = tr|A0A4Y8I1V0|A0A4Y8I1V0_9BACT Queuine tRNA-ribosyltransferase (Fragment) OS=Candidatus Marinimicrobia bacterium MT.SAG.3 OX=2552982 GN=tgt PE=3; SV = 1
HVDGTKHRFTPSIVMNVERTIGADIIMAFDECAPYPSSLDYVSKAERRTAKWAALSKESFESSKPFYGDEQFLFGIVQGGTYKDLREKSAKEIVSLGFDGYAVGGLAVGEPEDIMYEICGFNTSLLPNDKPRYLMGVGRPKDLIECVARGIDMFDCVIPTRNGRKGTVYTKSGKLNLNNSKYKTDKDPIEEGCTCSSCKSYSKGYLRHLFRMKETLAGRAATLHNLHYFNTLMRDMRKAIVGGNFDDFRAEFYSEIGEKE

SEQ ID NO: 53354 - protein, 375 aa, unidentified
  source 1..375: note = Melainabacteria bacterium
  REGION 1..375: note = tr|A0A1F6RB55|A0A1F6RB55_9BACT Queuine tRNA-ribosyltransferase OS=Candidatus Melainabacteria bacterium RIFOXYA2_FULL_32_9 OX=1801611 GN=tgt PE=3 SV=1
MLSQQKYFDYQLLKKCSNSHARAGVFQTPHGVINTPVFMPVGTNSAVKMMTQDHLYATQAEIILSNSYHLFLRPGHKLIEKAGGLHKWMNWNKPILTDSGGFQVFSLSDLRNLTEEGVTFKDPKDGRSYFMSPEISMEVQNSLGADIIMAFDECAPYPCDYAQAKEAMERTHRWLERCLKSHKREDQALFPIVQGSVYDDLRAESARVIASVNSHGYAIGGVSVGEPKELKNRIVEITAPLLPENKPRYLMGVGTPEDLLDGVLRGIDMFDCVMPTRIARHGSFFTPWGRGVIKNKEFEEDFSPLVEGCDCYACQNHSKAYIRHLFRVKEATASILMTIHNIHYLVKLMHDARSAILNDEFAEFYKEKMSLIESK

SEQ ID NO: 53355 - protein, 383 aa, unidentified
  source 1..383: note = Melainabacteria bacterium
  REGION 1..383: note = tr|A0A431LDI8|A0A431LDI8_9BACT Queuine tRNA-ribosyltransferase OS=Candidatus Melainabacteria bacterium OX=2052166 GN=tgt PE=3 SV=1
MSTALKFELEAVCPWSGARAGRFTTPHGVVETPVFMPVGTNGALKAVTFDQVRNCDAQIVLSNSYHLYLRPGHELVREAGGLHKFISWDKPILTDSGGFQVFSLDMLRRITEDGVFFKDHRTGREHFIGPAKSMEIQNYIGADIIMAFDDCVKNPATYDEALASMERTHRWLEKCVEHHARKDDQALFGIVQGSMYEELRARSVDAVTGFDLPGFAIGGVAVGEDRSTIERIVKYTTPLLPTDKPRYLMGVGTPWDISYAIRCGIDMFDCVSPTRLARHGAAFTRQGRISLRTSKYNKDFTPLEDDCECFTCKMHTKAYLHHLFRVREQAGGTLLSIHNIHHLIRQAVECREAILNGTFKEYFEKQIVLHEQDQEARAAAQTR

SEQ ID NO: 53356 - protein, 376 aa, unidentified
  source 1..376: note = Methylomirabilis oxyfera
  REGION 1..376: note = tr|D5MIU8|D5MIU8_9BACT Queuine tRNA-ribosyltransferase OS=Candidatus Methylomirabilis oxyfera OX=671143 GN=tgt PE=3 SV=1
MTFDLLKTDPTTGARRGRLTTPHGTVETPVFMPCGTGGAVKALTPYELEVEGVQLALCNTYHLYLRPGHRLIEELGGLHRFMAWSGSILTDSGGFQVYSLARLRQISEEGVRFRSHLDGSLHFLSPELAIQVQESLGADIIMPLDECAPYPSTTDYLQRSLELTLTWAERSRTAHSDGQSGLFGILQGGTDKALREQAATALQKIGFDGYALGGLAVGEPKAVMYETVAHVTPLLPADQPRYLMGVGTPEDLVENVMRGVDMFDCVMPTRHGRTGSLFTSQGRINIKGAAYTSDERPADPACDCYTCRHFSRAYLRHLFMTGEILGLRLNTLHNLHFYVTLMRQIRQAIEAGDLAAFRTRFLEQIGTLNHDNTIVS

SEQ ID NO: 53357 - protein, 375 aa, unidentified
  source 1..375: note = Methylomirabilis lanthanidiphila
  REGION 1..375: note = tr|A0A564ZGB5|A0A564ZGB5_9BACT Queuine tRNA-ribosyltransferase OS=Candidatus Methylomirabilis lanthanidiphila OX=2211376 GN=tgt PE=3 SV=1
MTFELLKIDTATGARRGRLTTPHGTVETPVFMPCGTGGTVKALTPHELEIEGVQLALCNTYHLYLRPGHRLIEKLGGLHRFMAWSGSILTDSGGFQVYSLAQLRRISDEGVSFRSHLDGSLHVLSPELAIQIQQSLGADIIMPLDECAPYPSTIDYLQRSLELTLQWAERSRAAHPNGQPALFGIVQGGTDKALREQAATALQQIGFDGYALGGLAVGEPKAVMYETVAHVTPLLPADRPRYLMGVGTPEDLVENVMRGVDMFDCVMPTRHGRTGSLFTSLGRINIKGAVYASDERPPDLDCDCYTCRHFSRAYLRHLFMAGEILGLRLNTLHNLHFYVTLMRQIRQAIEDGSLAAFRTRFLEKTKTSNHNDTAA

SEQ ID NO: 53358 - protein, 368 aa, unidentified
  source 1..368: note = Methylopumilus rimovensis
  REGION 1..368: note = tr|A0A5B8DF79|A0A5B8DF79_9PROT Queuine tRNA-ribosyltransferase OS=Candidatus Methylopumilus rimovensis OX=2588535 GN=tgt PE=3 SV=1
MQFNLIQKDGEARRGELKLQHGTVQTPVFMPVGTYGAVKSLSPQDLESIGFEIILGNTFHLWLRPGLETISTFKGLHDFIQWRRSILTDSGGFQVWSLGKMRKITEEGVEFKSPINGDSCFLSPEESMRIQKALNSDIVMIFDECTPYPASYEEAKTSMQLSLKWAYRSKVAHESNQNALFGIIQGGMFEDLREHSLDELKKINFDGYAIGGLSVGEPKEEMQKVIAFIAPKMPEDKPRYLMGVGTPEDIVEAIAHGIDMFDCVMPTRNARNGWLFTRYGDLKLKNTQYKNDTNPIDSDCDCYTCQNFSRAYLHHLFRLGEMLGSRLNTIHNLFYYQKIVQEARLAIETGTFETYRKIFHQNRKRGIQ

SEQ ID NO: 53359 - protein, 368 aa, unidentified
  source 1..368: note = Methylopumilus universalis
  REGION 1..368: note = tr|A0A5B8CYD6|A0A5B8CYD6_9PROT Queuine tRNA-ribosyltransferase OS=Candidatus Methylopumilus universalis OX=2588536 GN=tgt PE=3 SV=1
MQFKLIKKDGEARRGELKLQHGTVQTPVFMPVGTYGAVKSLSPQDLESIGFEIILGNTFHLWLRPGLETISAFKGLHDFIQWHRSMLTDSGGFQVWSLGKMRKITEEGVEFKSPINGDTCFLSPEESMRIQKTLNSDIVMIFDECTPYPASHEEAKASMELSLKWAYRSKVAHETNKNALFGIIQGGMFEDLREHSLDELKKINFDGYAIGGLSVGEPKEEMRKVISFIAPKMPEEKPRYLMGVGTPEDIIEAIAHGIDMFDCVMPTRNARNGWLFTKYGDLKLKNTQYKNDTNPIDSDCGCYTCQNYSRAYLHHLFRIGEMLGSRLNTIHNLSYYQKIIQEARVAIENGTFETYRKIFHQNRQRGIQ

SEQ ID NO: 53360 - protein, 370 aa, unidentified
  source 1..370: note = Methyloumidiphilus alinensis
  REGION 1..370: note = tr|A0A2W4R3K8|A0A2W4R3K8_9GAMM Queuine tRNA-ribosyltransferase OS=Candidatus Methyloumidiphilus alinensis OX=2202197 GN=tgt PE=3 SV=1
MQYHLTNTDGKARLGELVFPRGKVATPAFMPVGTYGTVKALTPEEVRSIGAEIILGNTFHLMLRPGMEVIRAHGGLHGFMHWGGPILTDSGGFQVFSLGGMRKITEAGVKFRSPVDGSPIFMGPEESMAVQRDLGSDIVMIFDECTPYPATYAEARASMELSLRWAERSKAAHSDNLSALFGIVQGGVYDDLRLESSNGLQQIGFDGFAIGGLSVGEPKEDRRRVLETLLPHLPNDKPRYLMGVGTPEDIVEAVCLGLDMFDCVMPTRNARNGHLFTRQGVIRIRNSQYQNDTRPLDETCGCYTCRNYSRAYLRHLDKCGEMLGARLNTIHNLYYYQWLMAGLREAIGSGELKEFAVDFYQQRRNVAPDV

SEQ ID NO: 53361 - protein, 395 aa, unidentified
  source 1..395: note = Microgenomates bacterium
  REGION 1..395: note = tr|A0A3A4Z808|A0A3A4Z808_9BACT Queuine tRNA-ribosyltransferase OS=Candidatus Microgenomates bacterium OX=2093373 GN=tgt PE=3 SV=1
MGKFSFEVLKEDKNSRARTGIIKTLHGQIETPAFVPVGTQATVKSIDNRELKEIGVQLFFVNTYHLYLRPGLEMIKNFGSLHEFIGWKGPLITDSGGFQVFSLGRRNTKRRLGIIHEETEPALVKITEDGVSFRSHLDGSKHFFSPEFSIEAQSILGADLIIAFDECTYYPATKEYAKSAMERTHRWALRSLEAYKKVGRDYQALYGVIQGGVYRELREQSAKYIVSLDFPGIAIGGVSVGESKKEMQEVLDWTVPYLPDKKPRHLLGVGEIDDIFALVERGIDSFDCVMPTRLGRMGHLLCRPYKDTKNEVKYSYDVTKPAFKASKEPLEKDCGCAVCRNYSRGYLNHLFKSNELLAYKLATYHNLSFMEKLVRKIRESINQGSFHKLKSEWVL

SEQ ID NO: 53362 - protein, 455 aa, unidentified
  source 1..455: note = Microgenomates bacterium
  REGION 1..455: note = tr|A0A3A4VTK4|A0A3A4VTK4_9BACT Queuine tRNA-ribosyltransferase OS=Candidatus Microgenomates bacterium OX=2093373 GN=tgt PE=3 SV=1
MDSFKFKILKKDTRSKARVGEIHTAHGVINTPAFVAVGTRATVRGLTPEDLKEVGVELLFGNTYHLHLTPGEETVKNFGGLGKFMNWNGPTITDSGGFQVFSLGRKSFGRLSHVADDARLGDYNSQTQTRSLNESRLQTKTLSGEESGSTFSSSASGQAPNGEGELNLVKIKDDGVDFRSHIDGSLHTFTPEVSIGIQQKLGADIILAFDECAPHPSTYEYTKEAMERTHGWAVRCLTQHHSQNSKLKTQKSKMQVKTQNFEQALYGIIQGGIYKDLREESAKFISALDFDGIAIGGVSVGESKKEMRDVIDWVWPYLPENKPRHLLGIGEIDDIFDAVSGGMDTFDCVIPTRFGRYGIILASPPEGNAGNRFRFDINKSIYAKDQSTIAKGCGCYVCKNFTRAYLHHLFRTKELLAYRLASYHNLYFTINLVKEIREAIMDDSFEKMRKDWLGN

SEQ ID NO: 53363 - protein, 378 aa, unidentified
  source 1..378: note = Micropelagos thuwalensis
  REGION 1..378: note = tr|U2WV75|U2WV75_9PROT Queuine tRNA-ribosyltransferase OS=Candidatus Micropelagos thuwalensis OX=1397666 GN=tgt PE=3 SV=1
MDFILHSKDKNARRGKVITPRGEIRTPAFMPVGTAGTVKAMYMEQVKDLGADIVLGNTYHLMLRPGAEEVAELGGLHDFMKWEGPILTDSGGFQVMSLSKLRKMSEEGVNFQSHIDGKSYMLTPERSIEIQTLLGANIRMILDECTPFPATEKQARDSMALSTRWAERSKKAFQLYDKGEGDALFGIVQGGVYENLRLESVSNLLDIGFDGYAVGGLAVGEGQEEMLKVLEFTVPALPEDKPRYLMGVGTPEDLVLSVAKGIDMFDCVMPTRAGRHGLAYTRKGKVNLKNARHANDPRPLDEECDCPAASQYSRAYLHHLVRCGEYLAAMLLTWNNLHYYQSLMQEMRQNIEAGSFEAFVAAFYRDQNEGDIPPFEKA

SEQ ID NO: 53364 - protein, 365 aa, unidentified
  source 1..365: note = Microthrix parvicella
  REGION 1..365: note = tr|A0A359A5F5|A0A359A5F5_9ACTN Queuine tRNA-ribosyltransferase OS=Candidatus Microthrix parvicella OX=41950 GN=tgt PE=3 SV=1
MRLQLDIAATDGAARTGRVATAKGGFQTPVFMPVGTRGTIRAATTAQLADLGAEFMLGNTYHLMLRPGADVVAELGGLGRFAGWDGHLLTDSGGFQVFSLSPKVTDEGVRFKSVYDGSAVHCTPESIVSTQELLGADIQMVLDVCLPLPAERGDLARAVRRTAEWAARARSAHSRREDQALFGIVQGGVDADLRRESAQRTVALDFDGYAIGGLSVGEERGLMMHGLEAAIAELPADQPRYLMGVGDPLSMVEAVARGVDMFDCVLPTRLGRHGTLLTGRGRVNAKRAEFARRDDPVDPECPCKVCGTYSAGYLRHLLVVGEPAGRTLCVLHNLAWMLGFVDRMRTSISRGEFGALRAEVANFWA

SEQ ID NO: 53365 - protein, 365 aa, unidentified; identical to SEQ ID NO: 53364
  source 1..365: note = Microthrix parvicella
  REGION 1..365: note = tr|R4Z2L4|R4Z2L4_9ACTN Queuine tRNA-ribosyltransferase OS=Candidatus Microthrix parvicella RN1 OX=1229780 GN=tgt PE=3 SV=1

SEQ ID NO: 53366 - protein, 374 aa, unidentified
  source 1..374: note = Mikella endobia
  REGION 1..374: note = tr|A0A143WQA0|A0A143WQA0_9ENTR Queuine tRNA-ribosyltransferase OS=Candidatus Mikella endobia; OX = 1778264 GN=tgt PE=3 SV=1
MNYKLLKTIGQARRGRLIFDRGLVETPAFMPVGTCGTIKGITPEELKEIGAQIILSNTFHLWIQPGQEVIKLHDNLHNFMNWHSPILTDSGGFQVFSLSKLRKITEDGVYFRNPINGNAIFLNPEKSMEIQYDLDSDIVMIFDECTSYPSNCSYVKQSMERSLRWAVRSHQRFKELKNTNALFGIIQGGIYEKLRDLSVENLVNIGFDGYAVGGLAVGEPKEDMYRIIAHICLQIPVNKPRYLMGVGKPEDLVEGIRRGIDIFDCVIPTRNARNGYLFVTNGILKIRNAMYKHDRAPLDVECDCYTCHNYSRAYLHHLNRCHEMLGARLNTIHNLRYYHRLMANIRHALDEDKLDDFIVEFYHRKGKLVSSFSY

SEQ ID NO: 53367 - protein, 366 aa, unidentified
  source 1..366: note = Moanabacter tarae
  REGION 1..366: note = tr|A0A2Z4AH70|A0A2Z4AH70_9BACT Queuine tRNA-ribosyltransferase OS=Candidatus Moanabacter tarae; OX = 2200854 GN=tgt PE=3 SV=1
MSGLEARAGRLQTQHGDVATPIFMPVGTQASVKSLTPVHLHEVGARVILGNTYHLNLRPGSDTIHKLGGLHQFMGWGGPILTDSGGYQVFSLSRLRKITDQGVFFRSHIDGEVVFLGPVEVMNIQRNLGSDIAMVLDECSPSQSKRDVCAQAVERTVYWADRCLTIANETGFRKEGGQVFGIVQGSVFEDLRTECSKALVSMGFDGFAIGGVSVGESESKMFKQVKWVSSQVPKDYPLYVMGVGTPPQMLRMVAMGVDMFDCVMPTRAARHGMVFTPSGPINISNSKYREDDRPLVDGVDNYTCRNFSRSYLRHLVTSKELLAHTLLSIHNLHFYIEIMRQARQHIIEGDFDLWHKEWISIYEGNK

SEQ ID NO: 53368 - protein, 368 aa, unidentified
  source 1..368: note = Moduliflexus flocculans
  REGION 1..368: note = tr|A0A081BR13|A0A081BR13_9BACT Queuine tRNA-ribosyltransferase OS=Candidatus Moduliflexus flocculans OX=1499966 GN=U14_05118 PE=3 SV=1
MKFTINAEAKNSLARAGEFETTRNVLHTPCFMPVGTHGAVNGMLPSALLDMGAEIIVSNAFRLSEHPGKAIISKYEGLHEFMGWPRTILTDSGGFQSRLREHAINEKGIQFYDENAEEIWTPEDAIAMQIVLNSDFVMPLDICVELPTTYPQAKDAMERTLRWAKRCKHAFQGRTGQILFGIVQGAIYPDLRQKCVDALEQLGFPAYAIGGLNVGESPEDYRNALTITSEMLPREKLRYIMGVGRPEAMLEAVNGGVDIMDSIIPTKYAREKTLFTYRGTINLGKKKQYRKDKYPIDPNCQCYTCRTVSRAYLYHLYHTTTTTAIIYAGIHNTTFCVRLLQDARQAILEDRFDRFYRDFMANYTKNDA

SEQ ID NO: 53369 - protein, 382 aa, unidentified
  source 1..382: note = Moduliflexus flocculans
  REGION 1..382: note = tr|A0A081BNW4|A0A081BNW4_9BACT Queuine tRNA-ribosyltransferase OS=Candidatus Moduliflexus flocculans OX=1499966 GN=tgt PE=3 SV=1
MTTFRVTQTDAHSHARLGTFTTAHGDIPTPIFMPVGTAGTVKAMLPTMLKEIDAKIILGNTYHLYLRPGHELVRQLGGLHKFMVWDRPILTDSGGFQVYSLGDLRKITDEGVTFRSHLDGSLHTLSPEISIEIQQALGSDIMMCFDECTPYPADRGYAAKSLALSMAWAARCKRCHGEAQQTPERLVNQGQLLFGIAQGGMYADLRKQSVEQLAEIGFDGYAIGGLSVGEPKPLMFEVLEQTTPLLPQDAPRYLMGVGTPLDLVRGVAMGVDMFDCVLPTRNARNGALFTRRGQLSIKQAQYRDDPRPIDEACVCYTCRNFSRAYLRHLFMSKEILSSMLNTIHNLHFYLDLMSRIRNAITESAFHEFHAAFTREYVEEEGA

SEQ ID NO: 53370 - protein, 386 aa, unidentified
  source 1..386: note = Moranbacteria bacterium
  REGION 1..386: note = tr|A0A0G0T8N0|A0A0G0T8N0_9BACT Queuine tRNA-ribosyltransferase OS=Candidatus Moranbacteria bacterium GW2011_GWC2_40_12 OX=1618699 GN=tgt PE=3 SV=1
MHGTVKTPFFLPIATKGAVKNLSPEELRDLGAEIILGNTYHLWLRPGEKIVKKAGGLHRLMNWDRPILTDSGGYQVFSLSNKKGVRPSKSAGVGGKRSASPLNGVKISEKGVEFRDPLDGKKYFMTPEKSIDIQLALGSDVIMVLDECPPYPCSREYARMSLERTTRWAERCKKYFDKNFHKSSAFSFRERSSRNSSKPSFRPLLFGIVQGSVYKDLRQESARQLLKLGFDGYAVGGVAVGEPREKMKNILEWILPMLPKEKPRYLMGLGKPEEIVFAARLGIDMFDCVIPTRNARHGSLFIWSKKYDKSRALVRRFYRTINITNQKFKKDFSPVDMICKCHTCRNYSRAYLRHLFSVGEPLAGRLATIHNLKFYLDLMKILQNRN

SEQ ID NO: 53371 - protein, 387 aa, unidentified
  source 1..387: note = Moranbacteria bacterium
  REGION 1..387: note = tr|A0A349PIH5|A0A349PIH5_9BACT Queuine tRNA-ribosyltransferase OS=Candidatus Moranbacteria bacterium OX=2045217 GN=tgt PE=3 SV=1
MFKLISETNTRRKGVIKTKNGEIKTPFFMPDATRGFVKSISGEDLKKSGVQPMVVNTYHLYLNPGMETIKKSGGINNFMNWSYPLLSDSGGYQVFSLIHKNPKLGKITEDEVIFRSPVDGAKHILTPEKAIQIQFDLGVDMMVCLDDVPPNNYPEEKIKEAVERTIIWAQRCKIEYEKQIKKRKISDSERPLLFGVIQGGKYGDLRKYCADELVRLDFDGYGFGARHVDENGVFMEDMIRETAQMIPKDKLRFALGVGTPEDIARCVKMGWDIFDCVIPTREGRHGRLFVWDKQSEFSIFNFQFSNNFEISNSKIQKFYNTININNEKFKEDFSSLDTHCDCELCENHSKSYLHHLFAIKDPLAQRLASMHNLKFYMDLMKELRYEK

SEQ ID NO: 53372 - protein, 373 aa, unidentified
  source 1..373: note = Muproteobacteria bacterium
  REGION 1..373: note = tr|A0A1F6TPJ2|A0A1F6TPJ2_9PROT Queuine tRNA-ribosyltransferase OS=Candidatus Muproteobacteria bacterium RIFCSPHIGHO2_01_FULL_65_16 OX=1817764 GN=tgt; PE = 3 SV=1
MKFDLLNTDGAARRGRMTFDRGAVETPAFMPVGTYGTVKAMTPEELRECGAEIILGNTFHLMLRPGVEVIKAHGGLHRFMHWDGPILTDSGGFQVWSLGKLRKLTEQGVWFQSPVDGARIFLGPEESIAVQQAFAADIIMVFDECTHHPATEPEARASMELSLRWAERSKIAHGAHPSALFGIVQGGMYEHLRDISLTGLKQIGFDGYAVGGLSVGESKDEMFRIVAHIAPRMPADRPRYLMGVGTPEDLVEAVKRGMDMFDCVLPTRNARNGWLFTHRGSLKIRNSAHARDTAPVDDRCGCYTCRNYSRAYLRHLQRANEILGARLATIHNLYYYQSLMRGLREAIAEKRLDDFSEKFYRMRRPDGRAELEI

SEQ ID NO: 53373 - protein, 417 aa, unidentified
  source 1..417: note = Muproteobacteria bacterium
  REGION 1..417: note = tr|A0A1F6V948|A0A1F6V948_9PROT Queuine tRNA-ribosyltransferase OS=Candidatus Muproteobacteria bacterium RBG_16_60_9 OX=1817755 GN=tgt PE=3 SV=1
MKFELLATDGAARQGRMIFDRGAVQTPAFMPVGTYGTVKGMTPEELRAIGAEIILGNTFHLMLRPGVDVVRSHGGLHGFMHWDGPILTDSGGFQVFSLGAPRAAQGRTSVAEGSAPMATKITEEGVHFQSPVDGAPVFLGPEQAIAVQQGLGADIIMVFDECTPYPATEAEARASMELSLRWAQRCRAAHGNGAGALFGIVQGGMYTQLRDASLAGLTQIGFDGYAIGGLSVGEPKAEMFRMIAHIAPRMPADRPRYLMGTGTPEDLVEAVRGGMDMFDCVLPTRNARNGWLYTAGGDLKIRNSRYARDVGPIDPSCQCYTCRNYSRAYLRHLQQANEILGARLATIHNLHYYQALMRDLRAAISQKTLDDFVEKFYRMRRRGFPADNGRSPSDSGSDPDGAAEPAPDAEPPLGLPS

SEQ ID NO: 53374 - protein, 405 aa, unidentified
  source 1..405: note = Nanopelagicus limnes
  REGION 1..405: note = tr|A0A249JX23|A0A249JX23_9ACTN Queuine tRNA-ribosyltransferase OS=Candidatus Nanopelagicus limnes; OX = 1884634 GN=tgt PE=3 SV=1
MSFSFKVEKTLKGALGRSGVITTPHGQIKTPAFIPVGTKATLKSVLPESLKDLGAQAVLANSYHLYLQPGPEIVDQAGGLAKFMNWQGPTFTDSGGFQVLSLGVGFKKVIAMDENTFQADDVIADDKERLAHVDDDGVTFKSHLDGSLHRFTPEVSMQVQHQIGADIIFAFDECTTLHNTRSYQEKALERTRLWAIRCLKEHDALTKKREGKPYQALFGVLQGAQYEDLRRKAAKDLALMNVDGVTFDGFGIGGALDKQTLGDILKWVNEELPVEKPRHFLGIGEPDDLFVGVENGADTFDCVAPSRQARTSSVFTKDGRLNISNAPHKNEFFPIEKDCTCYTCRNYTRAYLCHLFRAKEMVAATLATIHNQHFIVGLVDQMRLSIEDGTFFDFKAQFMARYYGK

SEQ ID NO: 53375 - protein, 407 aa, unidentified
  source 1..407: note = Nanopelagicus abundans
  REGION 1..407: note = tr|A0A249L3N9|A0A249L3N9_9ACTN Queuine tRNA-ribosyltransferase OS=Candidatus Nanopelagicus abundans OX=1884916 GN=tgt PE=3 SV=1
MGSEFKFKVGTSLKNRLGRTGQISTPHGVIKTPAFIPVGTKATLKSVLPESLKELGSQAVLANAYHLYLQPGSELIDRAGGLAKFMNWNGPTFTDSGGFQVLSLGVGFKKVIAMDENTFQADDVIADDKQRLAHVDDDGVTFKSHLDGSLHRFTPEVSMQVQHHIGADIIFAFDECTTLHNTRSYQEKALERTRLWAQRCLSEHDRLTKARSDKPYQALFGVIQGAQYEELRRKSAKDLATMSQSGISFDGFGIGGALDKQTLGDILKWVNEELPADKPRHFLGIGEPDDLFVGVENGADTFDCVAPSRQARTSSVFTKDGRVNISNAPHKDEFFPIEKDCTCYTCRNYTRAYLCHLFRAKEMVAATLATIHNQHFIVGLVDQMRESIEKGTFFEFKDAFMARYYKK

SEQ ID NO: 53376 - protein, 382 aa, unidentified
  source 1..382: note = Nealsonbacteria bacterium
  REGION 1..382: note = tr|A0A2M7UVC2|A0A2M7UVC2_9BACT Queuine tRNA-ribosyltransferase OS=Candidatus Nealsonbacteria bacterium CG_4_10_14_0_2_um_filter_39_15 OX=1974681 GN=tgt; PE = 3 SV=1
MVNFKVIKKAKNSQARLGVLKTSHGLVETPALVPVATQAVVKTLTAEEVKETKSQILICNTYYLHLRPGEDVVAKVGGLHQFMNWRGPLMTDSGGFQVFSLGFGKDFGVGKILKERRKEEIGYGQQPKLLKITDRGVVFRSLLDGKKTFLGPKESIKIQEKLRADIIFAFDECTSPIADYKYTKKSLERTHQWAIKSLETLNFKPKTQSLFGIVQGGRYKDLRIESAKFIGALPFDGFGIGGEFGADKKKMIQMLNWTTKELPVDKPRHLLGIGYLEDIPKIIKTGIDLFDCNVPTHYARRGVAFTSQGELDLSKTRFLKDKAPLDKKCSCSVCQNYSRAYIAHLFRAKEITALKLLTFHNLYFFNAFVEKIREKIKNGKLS

SEQ ID NO: 53377 - protein, 402 aa, unidentified
  source 1..402: note = Nealsonbacteria bacterium
  REGION 1..402: note = tr|A0A1G2EQB4|A0A1G2EQB4_9BACT Queuine tRNA-ribosyltransferase OS=Candidatus Nealsonbacteria bacterium RIFCSPLOWO2_12_FULL_39_31 OX=1801676 GN=tgt PE=3; SV = 1
MIDFKILKKSKKSKARLGILRTKHGVVETPCLVPVATQAVVKTLNSEEVLKTKTQILIANSFHLHLKPGEKIVEKSKGLHKFMNWPKPLMTDSGGFQVFSLGFGRDFNIGKIMAPPATFRKRASSLAPLPASLRVATRAGDLPLIKEGGHPKSLRINNDGVFFKSPIDGREIFLGPRESIKIQEALGADIIFSFDECTPPNADYDYTKKSLLKTHKWAEICIKTKESEQSIFGIVQGGKYYDLREESARFIASLDFDGFGIGGEFGDDKKIMKNMIARVVNNLPQERPRHLLGIGHLEDIENIIRSGVDFFDCTVPTHYARRGIAFTKTGKLNLSQAKFLNDEKPLDLTCSCSVCWNYKRNYISHLMKAKEITGLALLTFHNIYFFNSFVEGIRKKIKTGKI

SEQ ID NO: 53378 - protein, 396 aa, unidentified
  source 1..396: note = Neoehrlichia lotoris
  REGION 1..396: note = tr|A0A0F3NLT4|A0A0F3NLT4_9RICK Queuine tRNA-ribosyltransferase OS=Candidatus Neoehrlichia lotoris str. RAC413 OX=1359163 GN=tgt PE=3 SV=1
MYKNFSFTISCQVNNSRVGIINTPHGQIHTPAFTFCATKAAIKSLDIRTVKECNTQIILSNTYHLMLQPGENIIQKLGGLHKILGWNKPILTDSGGYQIFSLGYGSVSDEIKGKRNNKRPKTLLEINENGAIFRSYINGQKYYLTPEKSINIQKKLGADLIIVLDECTPFNINYEYTKQSMHMSNRWAIRSFEEFKKNYHGTQALYGVVQGGIYQDLRKTSCDFLNNMSFFGYAIGGSLGASKQQMYNTVSFTMEHLNKNKPIHLLGIGNINDIFYGVKHGIDTFDCVHPTRIARHGAALVKVKNRCENTKHKEYINLYNSKFQEDLSPIEDDCLCFTCLNHSRGYIHHLLKAQELLAYSLITAHNIYFMNNLMQNIRNAIINNTFEQEKNNWVYM

SEQ ID NO: 53379 - protein, 371 aa, unidentified
  source 1..371: note = Nitrosoglobus terrae
  REGION 1..371: note = tr|A0A1Q2SLL1|A0A1Q2SLL1_9GAMM Queuine tRNA-ribosyltransferase OS=Candidatus Nitrosoglobus terrae; OX = 1630141 GN=tgt PE=3 SV=1
MKFELLAKSRAARRGRLSFPRGTIETPAFMPVGTCGTVKAMTPEELIAGGAEIVLGNTFHLMLRPGVDVIMEHGGLHGFMHWDRPILTDSGGFQVWSLGKMRNITEHGVSFRSPIDGRLVFLGPEESMAIQRGLGADIVMIFDDCTAYPVDEKVARYSMDLSLRWAARSQEAHGDCQAALFGIIQGGMYEHLRDQSLQGLITFGFDGYAIGGLSVGEPKEDMLRILTHITPQMPVDKPRYLMGVGRPEDIVEAVWRGIDMFDCVMPTRNARNGHLFVQEGIVRIRNSRYRNDVRPLDDSCTCYTCRHYSRAYLHHLDKSREILGARLNTIHNLYYYQQLMNQLGKAIEENRLEEFVTEFYAMRVPSLLPVT

SEQ ID NO: 53380 - protein, 399 aa, unidentified
  source 1..399: note = Nitrospira inopinata
  REGION 1..399: note = tr|A0A0S4KWU3|A0A0S4KWU3_9BACT Queuine tRNA-ribosyltransferase OS=Candidatus Nitrospira inopinata; OX = 1715989 GN=tgt PE=3 SV=1
MIQYRLQQQDRQSKARVGRLCTARAVIDTPTFMPVGSLGPVKGLAPDDLQLMGFRLLLNNAYHLYLRPGHKIVAEMGGLHAFTGWPGAILTDSGGFQVFSLAKLCKVTDEGVVFQSHIDGSSHFITPEIAVEIQEALGADIIMAFDHCVALPASREAVVDSVRRTKLWAERCLAGRRRNDQALFGIVQGGLDADLRVRSARDLTAMGFDGYAVGGLSVGESKAEMYAMLDATVPELPENKPRYLMGVGYPEDLIEGVFRGIDLFDCVAPSRHGRTGSLFTTAGRVVIKQARYARDERPVDPDCGCPVCGRYSRAYLHHLFSVKEMLASRLNTIHNLWYFSDLMRRVRAAVEQGTFSEFRAAFYRSHAQEPSSAAAREDPEVVAAGDSVHNKERGDRSLC

SEQ ID NO: 53381 - protein, 392 aa, unidentified
  source 1..392: note = Nitrospira nitrosa
  REGION 1..392: note = tr|A0A0S4LD02|A0A0S4LD02_9BACT Queuine tRNA-ribosyltransferase OS=Candidatus Nitrospira nitrosa; OX = 1742972 GN=tgt PE=3 SV=1
MMQYHIHQRDSHSKGRIGRLTTGHGTIETPAFMPVGSLGPVKGLEPQDLQELGFGLMLNNAYHLYLRPGHKIVADMGGLHAFTGWSGAILTDSGGFQIFSLAKLCAITDDGVTFQSHIDGSTHVITPEKAIEIEEALGADIMMVLDQCVALPAGREVVQEGVRRTRLWAERCQAARRRTDQALFGIVQGGLEADLRVLSARDLVTLGFEGYAIGGLSVGESKADMYRMLDVTVPELPESKPRYLMGVGLPEDLVEGVARGVDLFDCVVPSRHGRTGSLFTTSGRVVIKQAKYAGDERPIDSDCGCPVCARYSRAYLHHLFMVKEMLGARLNTIHNLWYFAELMRGIREAVRENKFPAFREAFYHHRDRQAAGERSGEGEPNTHQECENSYQT

SEQ ID NO: 53382 - protein, 367 aa, unidentified
  source 1..367: note = Nitrotoga sp.
  REGION 1..367: note = tr|A0A3E1DAP5|A0A3E1DAP5_9PROT Queuine tRNA-ribosyltransferase OS=Candidatus Nitrotoga sp. MKT; OX = 2184311 GN=tgt PE=3 SV=1
MKFCLNATDGSARRGTLSLAHGIVETPAFMPVGTYGTVKAMSPIELREIGAQIVLGNTFHLWLRPGLDVIEAHGGLHGFMGWDGPILTDSGGFQVFSLGTLRKITEEGVRFQSPVNGDKCFLTPEESIRIQKVLNSDIVMIFDECTPYPADENRAADSMHLSLRWAERSKHAHQGNINALFGIVQGGMFESLRDESLRELVNIGFDGYAIGGLSVGEPKEDMLRILKHTSPQLPIDKPRYLMGVGTPEDLVAAVAYGIDMFDCVMPTRNARNGMLFTRHGDIKIKNAKYCLDIQPVDKQCSCYTCRNFTRAYLHHLHRIGEILGARLNTIHNLHYYHELMSEIRAAIMIRQFDEFVTRFRQARASSC

SEQ ID NO: 53383 - protein, 367 aa, unidentified
  source 1..367: note = Nitrotoga sp.
  REGION 1..367: note = tr|A0A3E1DJM9|A0A3E1DJM9_9PROT Queuine tRNA-ribosyltransferase OS=Candidatus Nitrotoga sp. SPKER; OX = 2184312 GN=tgt PE=3 SV=1
MKFCLNTTDGFARRGTLSLAHGIVETPAFMPVGTYGTVKAMSPMELREIGAQIVLGNTFHLWLRPGLEVIEAHGGLHGFMGWDGPILTDSGGFQVFSLGALRKITEEGVRFQSPVNGDKCFLTPEESIRIQKVLNSDIVMIFDECTPYPADENRAADSMHLSLRWAERSKHAHAGNTNALFGIVQGGMFENLRDESLRELVNIGFDGYAIGGLSVGEPKEDMLRILKHTSPQLPVDKPRYLMGVGTPEDLVAAVAHGIDMFDCVMPTRNARNGMLFTRHGDIKIKNAKYRLDTQPLDQQCICYTCRNFTRAYLHHLHRIGEILGARLNTIHNLHYYHELMSEIRAAITIHQFDQFVTRFRQARASSC

SEQ ID NO: 53384 - protein, 381 aa, unidentified
  source 1..381: note = Niyogibacteria bacterium
  REGION 1..381: note = tr|A0A1G2EUJ0|A0A1G2EUJ0_9BACT Queuine tRNA-ribosyltransferase OS=Candidatus Niyogibacteria bacterium RIFCSPLOWO2_01_FULL_45_48 OX=1801724 GN=tgt PE=3; SV = 1
MEFKVLKKSKKSKARLGILETEHGVVETPALVPVATQAAVKTLTSEDAVAAGCQILITNTFHLHLKPGEGIVKSAGGLHEFMSWPRSLMTDSGGFQVFSLGFGHDLGVGKKIKFFPKEKEILVSEHSQPKSVKITDDGVRFRSPFDGRSLFLGPKESIKIQEALGADIIFAFDECTAPLSSKEYIKKSLARTHGWAKICLESKKNKKQSLFGITQGSNFKDLRQESAKFINSLGFDGFGIGGDLGTSKKTTRDILSWTLPHLDEKKPRHLLGIGKLEDMELIIKSGVDTFDCTVPTHYARSGVVFTSSGPLNLRQSVFLKDKKPIDANCPCFVCEKYARNYISHMLRAKEITPLRLLTFHNLFYFNGFIRKIRLKIKNGTL

SEQ ID NO: 53385 - protein, 381 aa, unidentified; identical to SEQ ID NO: 53384
  source 1..381: note = Niyogibacteria bacterium
  REGION 1..381: note = tr|A0A1G2EZZ4|A0A1G2EZZ4_9BACT Queuine tRNA-ribosyltransferase OS=Candidatus Niyogibacteria bacterium RIFCSPLOWO2_02_FULL_45_13 OX=1801725 GN=tgt PE=3; SV = 1

SEQ ID NO: 53386 - protein, 452 aa, unidentified
  source 1..452: note = Nomurabacteria bacterium
  REGION 1..452: note = tr|A0A1F6X312|A0A1F6X312_9BACT Queuine tRNA-ribosyltransferase OS=Candidatus Nomurabacteria bacterium RIFCSPLOWO2_01_FULL_41_21 OX=1801776 GN=tgt PE=3; SV = 1
MQFKIEKKLKGFLGRAGVLETLHGVILTPAFVPVGTKATVKALIPEQVAELGAEVVLGNTYHLYLQPGDEIVRDAGGLGKFMNWQGPTMTDSGGFQVFSLGVAFGKDPEGKQASYGAGISKIMKTAEIEKSISERPAPYQAKGFGSGFDDSDAPRLAKIGADGVSFKSHLDGTLHYITPEKSIEIQHNLGADIIFAFDECTSPAEDLRYQEEALERTHRWAERSLMEHQRLSIGAKYFSAGSLSGSTEPALPLGASACETPRIENFAPMLFGIVQGGRNERLRKKSAEFVGSLDFDGFGIGGSFAKEDMSTAVKWVNETLPEGKPRHLLGIGEPEDLFMGVENGVDLFDCVAPTRNARNGTLYTKEGKINISNAKYKSDHSPIEKNCECYTCKNYTTSYLNHLFRGKEMLAGTLATIHNLYFIINLVKKIRQSIIEENFFEFKKSFLNKYNT

SEQ ID NO: 53387 - protein, 475 aa, unidentified
  source 1..475: note = Nomurabacteria bacterium
  REGION 1..475: note = tr|A0A352BU96|A0A352BU96_9BACT Queuine tRNA-ribosyltransferase OS=Candidatus Nomurabacteria bacterium OX=2052152 GN=tgt PE=3 SV=1
MQFKIEKKLENSLARAGTITTSHGVIHTPAFVAVGTKATVKSLNPEQVKDIGVEMVLGNTYHLYLQPGDETVREAGGIGKFMNWPGPTMTDSGGFQVFSLGAAYGKGVSKITTITTPEPLLRKEGRNSSRPAKGEWPEAEGVGSLAKVDDDGVSFKSHLDGSIHYITPEKSIQIQYNLGADIIFAFDECTSPAEDLKYQAEALERTHRWAERSLAEHQRICSAEENIFSRSSLTPSLRDGTPPPVASQKIFSSAAKPVTDFFERRVGERERQGEKISNGVAIFGIVQGGREESLRKKSAKIIAKTNVDGKYFDGFGIGGSFAKKDMSSAVKWVNEILPEDKPRHLLGIGEPEDLFMGVENGVDLFDCVAPTRLGRNGTLYTKSGKIIIMNKQYRNDYSPVEKDCGCYTCSPRLGGAGYTKAYLAHLFHGKEMLAGTLASIHNLYFIVNLVKNIRQSILDGTFFDFKNKFLYNYRN

SEQ ID NO: 53388 - protein, 402 aa, unidentified
  source 1..402: note = Nucleicultrix amoebiphila
  REGION 1..402: note = tr|A0A1W6N307|A0A1W6N307_9PROT Queuine tRNA-ribosyltransferase OS=Candidatus Nucleicultrix amoebiphila FS5 OX=1414854 GN=tgt PE=3 SV=1
MNSLYPRFSFQTQYQDKFSKAKVATLVTPHGAVTTPNFIFCATKAAIKGLTPAQMKEAGTEIILSNTYHLMLQPGGKRVERRGGLHRFMGWDGPMLTDSGGFQIFSLGHGSVANEIKGKRLTHRQKTLLKISEEGAVFKSYLDGALHTLTPESSIEIQRQLGADLIVVLDECTPFHVDKSYTEKSMHLTHRWGLRSLEEFKRTNSGQQAIYGIVQGGVYPDLRKIAAAFVNSHPFFGIAVGGSLGATKEQMAEVVNSVMNEISPQRPVHLLGIGGISDIFNGVREGIDTFDCVHPTRLARHGGALVRPDFWLKNDGSGGEHISLKGSRFKDDDLPIDESCPCSTCKTFSRAYLHHLIKAQELLVYQALTIHNVTFMNRLMRAIRTAIIENRLEEEQKNWMQV

SEQ ID NO: 53389 - protein, 380 aa, unidentified
  source 1..380: note = Omnitrophica bacterium
  REGION 1..380: note = tr|A0A419DXQ8|A0A419DXQ8_9BACT Queuine tRNA-ribosyltransferase OS=Candidatus Omnitrophica bacterium OX=2035772 GN=tgt PE=3 SV=1
MFELIKKDKNTKARLGKIKTAHGSIDTPCFMPVGTQATVKGLSPEELTLSGAQIILSNAYHVFLRPGMELIKKAGGLHNFMSWKGPILTDSGGYQVFSLALLRKLNDNGVEFQSHIDGLRHVFTPEDIMDIQYILGSDIIMPLDECVHYPASRDNALVAMQRTIDWARRSKIKKAELDRANKGYERLLFGIIQGSTYQDLRITCANKLTEIGFDGYAIGGVSVGEPWDLVYNIVSLTADVLPETCPRYVMGVGTPSDIIEAIDLGIDMFDCVIPTRYGRNGTAFSRQGKLVIRNAAFSQDFSPIDSGCACYACRNFSRAYIRHLFNTEEILGLRLVSLHNIYFYLDLMRQARKAIAEGSFPEFKRCFLSTYQNGGIQNAR

SEQ ID NO: 53390 - protein, 373 aa, unidentified
  source 1..373: note = Omnitrophica bacterium
  REGION 1..373: note = tr|A0A496SBT3|A0A496SBT3_9BACT Queuine tRNA-ribosyltransferase OS=Candidatus Omnitrophica bacterium OX=2035772 GN=tgt PE=3 SV=1
MFDVLKEDSATKARLGLLKTPHGKVTTPAFFPVATQGTIKGLSSKEIEEIGIEGILVNAYHLFLRPGTKIIKEAGGIHKFMDFHKSIASDSGGYQIFTLEGLRKVREEGVEFQSHLDGRKFFLTPQEVVKIQLEIGSDIILPLDECVKFPTPFDYARLASYRTVQWARKSKCFWENSGKKNSLFFGIVQGATYPSLREYSLKEILNIGVDGVAIGGLSVGEPQNLRYNILSFITKILMKEKKNYLVYFMGYGKPQDILDAISLGADLFDCVVPTRFARTGTAFTNQGKIVVRNAVYSEDYSPLDRECDCFVCKRFTRAYLRHLFNAKEMSAAYLLTYHNLWWYNKFMEKIRESIKEGSFLAFKEEFLKEFEES

SEQ ID NO: 53391 - protein, 406 aa, unidentified
  source 1..406: note = Omnitrophus magneticus
  REGION 1..406: note = tr|A0A0F0CV19|A0A0F0CV19_9BACT Queuine tRNA-ribosyltransferase OS=Candidatus Omnitrophus magneticus OX=1609969 GN=tgt PE=3 SV=1
MTNNTNFWDLSSFAARLTRDKNDCPMEDILNKNFFVIDHKSSSSKARAGRALTAHGEFLTPVFMPVATQATVKSLSSEELENAGVNMIISNAYHLFMRPGGDIIKKAGGLHKFMNWTRPITTDSGGFQVFSLALLRKIHNEGVEFRSHLDGTSHFFTPENIVDFQLVLDSDILMPLDECVKYPADEKYVEKSVDITCAWAKKSKDRFNEIQNNSFLFGIIQGSTYHNLRKKCANFLVELNMDGYALGGIGVGEGRELMDEITDYTCAILPENKIRYLMGVGTPSDILSAISRGVDMFDCVVPTRNARNGQAFTFDGELQLRNANFKEDFNPIEKDCACNACKNYSRAYIRHLFNTGEILAIRLITEHNIFFYAKLMNSAREAILRDNFEIYKKDFLTRFNANKTLG

SEQ ID NO: 53392 - protein, 384 aa, unidentified
  source 1..384: note = Ornithobacterium hominis
  REGION 1..384: note = tr|A0A383TZ11|A0A383TZ11_9FLAO Queuine tRNA-ribosyltransferase OS=Candidatus Ornithobacterium hominis OX=2497989 GN=tgt PE=3 SV=1
MNSLNLRYMNFKIEATDALSAARAGELITAHGKVKTPIFMPVGTVASVKSVHQRELKEDIQAQIILGNTYHLYLRPGIEILNAAGGLHRFMNWDAPILTDSGGFQVYSLSDIRKVSEEGVRFQSHIDGSYHLFSPEYSMEIQRNIGADIIMAFDELTGIPATYQNAKKAMEVTHRWLERCRNWLRENPPLYGYPQTLFPIVQGNSYKDLRTESAKYIADFNADGNAIGGLSVGEPEEMMYEITDLVCGILPQEKPRYLMGVGTPWNILECISLGVDMFDCVMPTRNARNGMLFTWNGVINIKNARWKDDFSPLDENGTSYVDQQYSKAYLRHLFIAKEYLAKQIASIHNLAFYLDLVRTARQKIMEESFEAWKNQVIPQLKNRL

SEQ ID NO: 53393 - protein, 379 aa, unidentified
  source 1..379: note = Ozemobacter sibiricus
  REGION 1..379: note = tr|A0A367ZPN1|A0A367ZPN1_9BACT Queuine tRNA-ribosyltransferase OS=Candidatus Ozemobacter sibiricus OX=2268124 GN=tgt PE=3 SV=1
MTEPFFSFHLEYESRECLARVGVLRTRRGEVRTPVYMPVGTAGSVKTLSPEEVRAAGASIILGNTYHLYLRPGTEVLERFGGLHRFMAWDRPLLTDSGGFQVFSLKKLNKITDEGVLFASHLDGARHWLTPEESMRIQRAIGAEIMMVLDECCPYPADEATARSALERSARWAARCRRDHPPGRNGQALFGIVQGSTYLPLRLESLARTAELGFEGLAIGGLSVGEPKAEMIRILDGLMPAMPRELPRYLMGVGSPEDLFYGVARGIDMFDCVLATRIARHGAVFTRRGRIDLTALPWRMSDEPIDPRCACYACRTFSRGYLRHLFKAKELLALRMASLHNLTFLINLMEEIRAAIVQGNFLTLQREFLAGYLNQEDLS

SEQ ID NO: 53394 - protein, 396 aa, unidentified
  source 1..396: note = Pacebacteria bacterium
  REGION 1..396: note = tr|A0A2H0T124|A0A2H0T124_9BACT Queuine tRNA-ribosyltransferase OS=Candidatus Pacebacteria bacterium CG10_big_fil_rev_8_21_14_0_10_40_26 OX=1974767; GN = tgt PE=3 SV=1
MANKEFSFKLLKTKGKMRAGTMTTPHGVVQTPIFMPVGTVGSVKALDSADVKNTQAHIILGNTYHLYLRPGMQTMQEMGGLHAFMQWDKPILTDSGGFQVLSLGDAIAHKQDGSSQKSGPSVKISDDGVEFRSHLDGSKHTFTPEKSIQIQREIGSDIMMAFDEALPDSKPHEYAVDSLAKTNRWATACYEYWEKHDRRSVYGTYQSLFGIIQGGLFEDLRREAVEHIVSLDFDGVALGGETVGYDLDGTRRVMEWIEPLMPKEKPRYAMGMGMNPIDLVDGVKMGFDMFDCVAPARLARNGSLYVGSLEIENGEPVFQSEFKNGRMSIGAAAYTTDSGLIQEGCDCETCKAGYTRGYLRHLYKTKELSYFRLATQHNLRFMIRLTEQLRSYILEQ

SEQ ID NO: 53395 - protein, 445 aa, unidentified
  source 1..445: note = Pacebacteria bacterium
  REGION 1..445: note = tr|A0A2M7MC92|A0A2M7MC92_9BACT Queuine tRNA-ribosyltransferase OS=Candidatus Pacebacteria bacterium CG_4_10_14_3_um_filter_34_15 OX=1974761 GN=tgt; PE = 3 SV=1
MTKKNFSFTLEATKGKMRAGVIKTQRGEIKTPMFMPVGTLATVKSLDTKDIKDLQAPIILANTYHLYLRPGMERLQAMGGVHKFMGWNRPMLSDSGGFQVFSLGRQQLHSRAKKKSEQDELAVKKEFTAQGEFTANKKASRLNKAGYSSKFDTAPQKQPKQITRSLGVRISEKGAEFVSHLDGSKHFFSPEISIEIQRQIGADIVMALDECVSDSESKEYVKNSIDRTHRWAKRCYDYWIKNKRLSVYGEYQALFGIIQGAMYEDLRKESAEFISSLDFDGIAVGGETTGYNMSGTREMMGWIEKILPADKPRYAMGLGRDPQDLLDAVSVGFDMFDCVGPTRLARNGALYYGQLVEKNGKPEFKSEYKNGRLNIGNQKFFTDEKVIQEGCDCYTCENRYSRGYLNHLYRTKELAYYRLASIHNVRFMVRLAENLRIMIFNAQET

SEQ ID NO: 53396 - protein, 375 aa, unidentified
  source 1..375: note = Pandoraea novymonadis
  REGION 1..375: note = tr|A0A2P6UX15|A0A2P6UX15_9BURK Queuine tRNA-ribosyltransferase OS=Candidatus Pandoraea novymonadis OX=1808959 GN=tgt PE=3 SV=1
MLKFELITTDGQARRGRITLNHGIVETPIFMPVGTYGSVKAMSPTELRENKAQIILGNTFHLWLNPGLKTIATHGGLHKFIGWNYPLLTDSGGFQVFSLGNLRKISEEGVKFASPVNGDSLFLSPEISIQIQHVLDSDIVMQFDECTPYKIEGRTATEDEAEKSMRMSLRWAKRSLEEFSRLQNTNSLFGIVQGGMYEHLRYESLQGLTNLNFDGYAIGGLSVGEPKEEMLRVLKYIAPYLPTNKPHYLMGVGTPEDLVAGVSASIDMFDCVMPTRNARNGWLFTRFGDLKIRNAVHKNDTRPLDETCDCYACLNFSRAYLHHLQRAGEILGARLNTIHNLHYYLTLMQEIRTAIEAHQFSSFKVKFHAERARGV

SEQ ID NO: 53397 - protein, 380 aa, unidentified
  source 1..380: note = Pantoea carbekii
  REGION 1..380: note = tr|U3U8F6|U3U8F6_9GAMM Queuine tRNA-ribosyltransferase OS=Candidatus Pantoea carbekii; OX = 1235990 GN=tgt PE=3 SV=1
MKFELDNTDGYGRRGRLIFNCGIVDTPVFIAVATYGSVKSISPEELENSGTKIILGNTFHLWLRPGEKTIKLHGGLHDFMHWKGPILTDSGGFQIFSLNTISQVNEAGVHFRNPINGDTVFLDPEKSMEIQHNLNSNIVMILDECIPYQTNWQHAKNSMEMSLRWAKRSREHFDYLNNKNTLFGIIQGSVYTDLRDISLKGLLKIGFDGYAIGGLAVGEPKEHMHKILDFICPKMPYNKPRYLMGVGKPEDLIEGVRRGIDMFDCVMPTRNARNGHLFVTNGVVKIRNSKYKYDLSPLDYQCDCYTCCHYTRAYLHHLDRCNEMLGARLNTIHNLRYYQRLMIGLREAIEKKRLQNFINTFYQQRRININNLNKVPSSSN

SEQ ID NO: 53398 - protein, 387 aa, unidentified
  source 1..387: note = Paraburkholderia kirkii
  REGION 1..387: note = tr|G4M2N4|G4M2N4_9BURK Queuine tRNA-ribosyltransferase OS=Candidatus Paraburkholderia kirkii UZHbot1 OX=1055526 GN=tgt PE=3 SV=1
MTAGHFTPPDNGLKFELLTTDGQACRGRLTLNHGVVETPIFMPVGTYGTVKAIQPRELEEIRAQIILGNTFHLWLRPGLETIGAHGGLHQFMGWKRPILTDSGGFQVFSLGDLRKITEDGVTFASPINGDKLFLSPEVSMQIQKVLNSDIVMQFDECTPYATNGVPTSHKDAADSMRTSMRWAKRSIDEFNRLGNPNALFGIVQGGMFEDLRDESLAGLSEIGFHGLAIGGLSVGELKEDMMRVLNHIGPKLPAGKPHYLMGVGTPEDLVAGVAAGVDMFDCVMPTRNARNGWLFTRFGDLKIKNATHKNSMKPLDESCGCYTCQNFTRGYLHHLHRVCEILGAQLNTIHNLHYYLQLMSEVRESIETHSFDAFRKTFGENRARGVD

SEQ ID NO: 53399 - protein, 399 aa, unidentified
  source 1..399: note = Paraburkholderia sp.
  REGION 1..399: note = tr|A0A4R5M854|A0A4R5M854_9BURK Queuine tRNA-ribosyltransferase OS=Candidatus Paraburkholderia sp. 4M-K11 OX=2528715 GN=tgt PE=3 SV=1
MTDGHQNNARAEHGAYLGERPQNGLKFELLGTDGLARRGRVTLNHGVVETPIFMPVGTYGTVKATQPRELEEMHAQIILGNTFHLWLRPGLETIEAHGGLHRFMGWNRPILTDSGGFQVFSLGDLRKISEDGVRFASPVNGDKLFLSPEVSMQIQKVLNSDIVMQFDECTPYATNGVPTTHKEAADSMRMSMRWAQRSIDEFNALGNPNALFGIVQGGMFEDLRDESLAGLSQMPFHGYAIGGLSVGEPKEDMMRVLEHIAPKLPADKPHYLMGVGTPEDLVAGVASGVDMFDCVMPTRNARNGWIFTRFGDVKIRNAVHRNSLRPLDEQCGCYTCRNFTRGYLHHLHRVGEILGAQLNTIHNLHHYLELMSEMRTAIETKTFGAFRKRFAEQRARGVD

SEQ ID NO: 53400 - protein, 397 aa, unidentified
  source 1..397: note = Paracaedibacter acanthamoebae
  REGION 1..397: note = tr|A0A077AWH4|A0A077AWH4_9PROT Queuine tRNA-ribosyltransferase OS=Candidatus Paracaedibacter acanthamoebae OX=91604 GN=tgt PE=3 SV=1
MTKFSFTFHRPDPNSRARLGRLETPHGVVETPAFIFCATKAAIKGVTSEQMQAEGTQFILSNTYHLMLQPGSDIIHKAGGLHKFMGWKGPMLTDSGGFQIFSLGHGSVAEEIKGRRNSNRPRTMLKITEEGAKFKSYINGQTYLLTPERSVQIQRELGPDFVVVLDECTPFHVDKRYTARSMHMSHRWAVRSLEEFRRHDDDTQKLYGILQGGVYEDLRLEACDFVNNQDFFGHAVGGSLGASKSQMYDVVAMTMANLREDRPVHLLGIGGVQDIFNGVRHGIDTFDCVHPTRLARHGGALVRPENNPKPAREHIVLTNSQFREDYTPIEPDCSCHTCRNYTKAYLHHLLKAQELAAYTLITLHNVNFMNRLLAAVRQGIADKNLDTVEKSWVPEKT

SEQ ID NO: 53401 - protein, 381 aa, unidentified
  source 1..381: note = Parcubacteria bacterium
  REGION 1..381: note = tr|A0A1W9QMG6|A0A1W9QMG6_9BACT Queuine tRNA-ribosyltransferase OS=Candidatus Parcubacteria bacterium 4484_255 OX=1970769 GN=tgt PE=3 SV=1
MFKIIKKSNISQARLAELKTKHGIINTPFFMPIATQGTIKGLTISQIKDLNAQILLSNTYHLFLRPGLSVIKKAGGLHRFMGWRGPILTDSGGYQVFSLSKKRKVSDMGVEFQSDIDGKTVFLSPSRAIKIQNILGSDIVMSLDECPVWPCPKAQAEKAVRRTSAWAKICKATYNQQLTINNQQLLFGIVQGSIYKDLRAQSAKRLVNIGFDGYAIGGLMLGESIKETYKAIQSAVQELPLSKPRYLMGAGKPEQIIEAVKMGIDMFDCVIPTRNARHGVLYINSKSEILNPKQYQNSKFQILNKNFYKKIHITNAKYKNDFKPLDANCSCYACQNFSRAYIRHLFMAKEQLGKTLATIHNLAFYLSLMKDIRIMIKKGKL

SEQ ID NO: 53402 - protein, 378 aa, unidentified
  source 1..378: note = Parcubacteria bacterium
  REGION 1..378: note = tr|A0A3A4UYW6|A0A3A4UYW6_9BACT Queuine tRNA-ribosyltransferase OS=Candidatus Parcubacteria bacterium OX=2053309 GN=tgt PE=3 SV=1
MIEFKVIKKSNKSRARIGILKTTFGEIETPSLVTVATQGVVKTLDSREVKETKTQVLISNTFHLHLRPGEDVVKKNGGLHKFMNWDGPLMTDSGGFQVFSLGFGKDFGIGKILKEKPQTEIKIQKQPKMVKIMEDGVSFRSPIDGKLLFLGPKESIKIQEKLGADIIFAFDECPPPNASYDYMRESVARTHRWAKASLDSKKTKQALYGIVQGGEFKDLRIESANFLSALPFDGFGIGGEFGYEKEKMSNMLGWVTDKLPENKPRHLLGVGYLEDIPTIVTGGMDTFDCTVPTHFARHGVAFTSEGRIDMGKSKFLNDLEPLDKNCKCMVCQYYKRSYIAHLFKAREITALKFLSFHNLFYFNTVVEQTREDIKRGKI

SEQ ID NO: 53403 - protein, 368 aa, unidentified
  source 1..368: note = Pelagibacter sp.
  REGION 1..368: note = tr|A0A2D7TVV9|A0A2D7TVV9_9PROT Queuine tRNA-ribosyltransferase OS=Candidatus Pelagibacter sp.; OX = 2024849 GN=tgt PE=3 SV=1
MSAKFSLINEDRGARLGQIITPRGVIDTPAFMPVGTAATVKALTVEQINQTNSQIILCNTYHLHLRPGIERIQRVGGLHNFMNFQKPILTDSGGFQVMSLSKNTKITEDGAIFNSHVDGKKIFISPEISIDIQKKLNSDIIMVFDECPKYSKEKRMIKDSMNLSTRWAIRSKKEFGINSNKMLFGIVQGGIFNDLRLESLNKLKEIEFDGYALGGLAVGEPQVEMFNTVEAISSLMDKNKPRYLMGSGTPGDLLGAIKRGIDMFDCVLPTRSGRNGLAFTWEGKINLRNAKYQNDDTPLDKNIHCPASNLYSKNYLNHLINCNEILASTLITWHNVAFFQDLMKKIRNAIKNSKFIEFHNQHFKRLNA

SEQ ID NO: 53404 - protein, 370 aa, unidentified
  source 1..370: note = Pelagibacter sp.
  REGION 1..370: note = tr|A0A3R7VZB6|A0A3R7VZB6_9PROT Queuine tRNA-ribosyltransferase OS=Candidatus Pelagibacter sp. TMED165 OX=1986804 GN=tgt PE=3 SV=1
MKIKEFSFELKTQDEEARLGKILTPKGCIDTPAFMPVGTQGTVKGVFTDDLLDTGSQIILGNTYHLMIRPGVNIIKKFNGLHKFMNWKKPILTDSGGYQIMSLSKLNKIDKDIGAIFRSHIDGKKIILSPEKSIKVQKALNSDIIMVLDECPKLTNDKKILSNAIDTSIKWASRCKVEFGNNKSKALFGITQGGLYKDLRKDSIERLKEINFDGYAMGGLAVGESQSEMFKILSETVYLLPKNKPRYLMGVGTPSDILGAVKYGIDMFDCVLPTRSGRTGVAFTWDGKLNLKNSKYQNDKSPLDQNCKIRGLNQFSKSYLNHLIKSNEMMASMLISLHNIYFYQQFMLKIRGSIRSGTFSSFYKKYIDYF

SEQ ID NO: 53405 - protein, 371 aa, unidentified
  source 1..371: note = Peregrinibacteria bacterium
  REGION 1..371: note = tr|A0A0G0C6Z9|A0A0G0C6Z9_9BACT Queuine tRNA-ribosyltransferase OS=Candidatus Peregrinibacteria bacterium GW2011_GWC2_33_13 OX=1619061 GN=tgt PE=3 SV=1
MFKFEISSKCSKTLARTGSFTTPHGVIKTPTFMPVGTKATVKTLDSKDLNDLNAEIILANTYHLAMRPGEDLIKKMGGLHKWMNFNKPILTDSGGFQVFSLKDKLKITDDGVEFQSHLDGNKHFFTPEKAMEIQNKLGADIIMAFDECAPADSDQSYAKKAMERTHDWVLRCKKFHKNESQALFPIIQGVIYKDLRVESTKFMTELDLPGIAIGGLSVGEGKKTMYEILETIAPLLPENKPHYLMGVGTPEDLFECISRGMDMFDCVLPTRLARHGSFYGDNQVEHLKNLKNRDNENPLRKDCTCETCQNFTRSYLRHLIIENEITGLRLLTIHNIYFLFELIKKIRKSIKENQFPHFKKEFLNNWIGMEK

SEQ ID NO: 53406 - protein, 375 aa, unidentified
  source 1..375: note = Peregrinibacteria bacterium
  REGION 1..375: note = tr|A0A2H0C8D2|A0A2H0C8D2_9BACT Queuine tRNA-ribosyltransferase OS=Candidatus Peregrinibacteria bacterium CG22_combo_CG10-13_8_21_14_all_49_11 OX=1974796; GN = tgt PE=3SV=1
MFSLYTSSLAGRRGQLCTAHGTIETPFFFPVATAGAMKGISHQELLDLGAEVLLCNTYHLHLRPGEHVVADAGGLHKFIGWEKPILTDSGGFQVFSLRKIRSLDDSGVTFQSHLDGKELFLGPREAMEIQHALGADIIMVLDECPPSTADRSEIEQAVERTLRWAKECKRVHEELCRSVALRQAQCDTPLLFGIVQGGLEKDLREYCARELIAMDFDGYAIGGLAVGESEEEMYQVLDWVCPLLPEDKPRYLMGVGKLSQLPVCVSKGIDMFDCVLPMREARHGTVYVQEAKDSKDCVSFMYDTIRITNEKYMNDHSLIDPQSPSLLSRKHSKSYLCHLLRSGERYGETIACMQNMGMTLKVMKDVRENIRHPVE

SEQ ID NO: 53407 - protein, 369 aa, unidentified
  source 1..369: note = Peribacter riflensis
  REGION 1..369: note = tr|A0A0S1SGP3|A0A0S1SGP3_9BACT Queuine tRNA-ribosyltransferase OS=Candidatus Peribacter riflensis; OX = 1735162 GN=tgt PE=3 SV=1
MDEFRKAKSSSLWPMFTCKTLGNLGRRGVLKTPHGVIETPFFLPVGTAGAMRGITHTDLLDLQAQVLLCNTYHLHLHPGEDTVQQAGGLHRYIGWEKPILTDSGGYQVFSLRGLRHISERGVEFRAHTDGSRHVLGPQEATEIQWKFGSDIIMCFDECPPSTASRREIETAVDRTLRWAKICKTTHDQLKQSANGPLLFGIVQGGLHFDLRKKCAEELRAIGFDGYALGGLAVGESEEEMLGILREVAPLLPEEYPRYLMGVGVLHQLRACVALGIDMFDCVLPMRIARHGTILLSDGSEIRITNAEFKQAHVPLDPDSPSDLSRTHLKSYLHHLFKVNERLAETIACKQNLGVTLKMMRDLRTKMDTP

SEQ ID NO: 53408 - protein, 301 aa, unidentified
  source 1..301: note = Peribacteria bacterium
  REGION 1..301: note = tr|A0A1F7D9B6|A0A1F7D9B6_9BACT Queuine tRNA-ribosyltransferase (Fragment) OS=Candidatus Peribacteria bacterium RIFOXYB1_FULL_57_12 OX=1801935; GN = A2398_03795 PE=3 SV= 1
CNTYHLHLHPGEDTVQQAGGLHRYIGWEKPILTDSGGYQVFSLRGLRHISERGVEFRAHTDGSRHVLGPQEATEIQWKFGSDIIMCFDECPPSTASRREIETAVDRTLRWAKICKTTHDQLKQSANGPLLFGIVQGGLHFDLRKKCAEELRAIGFDGYALGGLAVGESEEEMLGILREVAPLLPEEYPRYLMGVGVLHQLRACVALGIDMFDCVLPMRIARHGTILLSDGSEIRITNAEFKQAHVPLDPDSPSDLSRTHLKSYLHHLFKVNERLAETIACKQNLGVTLKMMRDLRTKMDTP

SEQ ID NO: 53409 - protein, 365 aa, unidentified
  source 1..365: note = Peribacteria bacterium
  REGION 1..365: note = tr|A0A1F7BE34|A0A1F7BE34_9BACT Queuine tRNA-ribosyltransferase OS=Candidatus Peribacteria bacterium RIFCSPHIGHO2_01_FULL_51_35 OX=1801914 GN=tgt; PE = 3 SV=1
MFQLLKETPIGRRGVLTTPNGAIQSPFFMPVGTAGAMKGITHEDLVTLGAEILLCNTYHLHLQPGEKIVEEAGGLHSFVGWNKPILTDSGGFQVFSLRNISKITDEGVNFRSHLNGDPLFLGPEEAMRIQHALGADIIMCFDHCPPSTAPRSEIEKAVDRTIRWAAECKKHHKQLSSASSESSASSDSSPFLFGIIQGGLERDLREKCAEELIAMGFDGYAIGGLAVGETEDEMYDILDCVCPLLPKDKPRYLMGVGRLEQLKTAVAKGIDMFDCVSPMREARHGTLYLSDGSKIRIDSNPYTTDHSVIDANSPSPLSRTHLKSYLSHLLRAHERLGETIACMQNLGITLECMRNLQNEIEKFAG

SEQ ID NO: 53410 - protein, 379 aa, unidentified
  source 1..379: note = Phaeomarinobacter ectocarpi
  REGION 1..379: note = tr|X5MND8|X5MND8_9RHIZ Queuine tRNA-ribosyltransferase OS=Candidatus Phaeomarinobacter ectocarpi OX=1458461 GN=tgt PE=3 SV=1
MTSFDFHLDATDGEARTGRIETPRGTIRTPAFMPVGTAGTVKAMTTDTVKSTGADIVLGNTYHLMLRPGAEEVAALGGLHRFMNWDKPILTDSGGFQVWSLAKLRKMTDEGVTFQSHIDGSTHSLTPERSIEIQCLLGADIQMILDECTDYPATREQAQSSMDLTTRWAKRSKQAFADQPHRKEGQALFGIVQGSTYPDLRLQHAQALVDIGFHGYALGGLSVGEEQGAMLETVEAVAPALPKQQPRYLMGVGTPEDLVEAVRRGIDMFDCVMPTRSGRHGQAFTRHGRVALKNARHGADPRPLDADSPCEASNLYSRAYLHHLYKSGEYLAAMLITWNNVAYYQWLMAQMRAAIAEGRFEAFVADFYAQREASDIDPI

SEQ ID NO: 53411 - protein, 375 aa, unidentified
  source 1..375: note = Photodesmus blepharus
  REGION 1..375: note = tr|A0A084CPC9|A0A084CPC9_9GAMM Queuine tRNA-ribosyltransferase OS=Candidatus Photodesmus blepharus OX=1179155 GN=tgt PE=3 SV=1
MKFKYELRKKNDGARCGQLVFERGVVKTPAFMPVGTYGTVRGITPDEVKSTGAAMLLANTFHLWLRPGEEVVKMHGDLHNFMNWHHPILTDSGGFQVFSLGATCKVSEEGVRFCNPVNGDKVFMTAEKSMEIQKDLGSDIVMVFDECTSYPAAYNEANKSMQMSLRWAERSREHFDKLGNVNSLFGIVQGSMYKDLRDASVKGLIEIGFDGYAIGGLAVGESKKDMYSILKHTCHQLPEDKPRYLMGVGKPEDLVEGVRRGVDMFDCVMPTRNARNGNLFITDCVIKIRNAQHKTDTTQLDSHCDCYTCQNYSKSYLHHLDRCNEILGVRLNTIHNLRYYQRLMQSIRTAIRENCFELFVKKFYTCRNKAVPPLG

SEQ ID NO: 53412 - protein, 344 aa, unidentified
  source 1..344: note = Photodesmus katoptron
  REGION 1..344: note = tr|S3DJQ3|S3DJQ3_9GAMM Queuine tRNA-ribosyltransferase OS=Candidatus Photodesmus katoptron Akat1 OX=1236703 GN=tgt PE=3 SV=1
MPVGTYGTVKGVTPEEIKNTGAEILLGNTFHLWLRPGQDVIKMHGDLHHFMNWKRPILTDSGGFQVFSLSAIRKVTEDGVYFRNPVNGNKIFLSAEKSMEIQKNLGSDIVMIFDECTPYPTTYEDANNSMRMSLRWAQRSRIHFNKIGNTNSLFGIVQGSIYNELRDISVKELVKIGFDGYAIGGLSVGESKSVMYRVLDHTCTLLPENKPRYLMGVGKPEDLVEGVRRGVDMFDCVIPTRNARNGHLFIDTGIIRLRNAKHKMDNKPIDPNCDCYTCQNYSISYLHHLDRCKEILGMRLNTIHNLHYYQRLMKDIRRAINENYFNLFVENFYLSQNKNVPEFN

SEQ ID NO: 53413 - protein, 359 aa, unidentified
  source 1..359: note = Phycorickettsia trachydisci
  REGION 1..359: note = tr|A0A2P1P8M8|A0A2P1P8M8_9RICK Queuine tRNA-ribosyltransferase OS=Candidatus Phycorickettsia trachydisci OX=2115978 GN=tgt PE=3 SV=1
MFNFQVLKTHNKSRRGVITTAHGKIQTPAFMPVGTYGSVKAMLPEQVDETGADIILSNTYHLMLRPGEELIAKMGGLHKFMNWDKPILTDSGGFQVMSLANLRKVEEQGVAFRSPFDGSSYFLTPEKATYIQYLLGSTITMAFDECLEFPASYERSNESMELSMRWAERSRNSFIKRAGYGQFGIMQGGVYDDLRQISAKQLVDMDFEGYAIGGLAVGEGQEIMFKTLDTATSYLPDHKPKYLMGVGKPDDIIGAVARGVDMFDCVLPTRSGRNGQAFTKQGAINIRNAKYKEDPAPIEEDCACYTCKNFSKSYIHHLVRVKEITGSILMTWHNLHYFQDLMHRIRTYIEKGKDFDFTA

SEQ ID NO: 53414 - protein, 374 aa, unidentified
  source 1..374: note = Phycosocius bacilliformis
  REGION 1..374: note = tr|A0A2P2E7Q3|A0A2P2E7Q3_9PROT Queuine tRNA-ribosyltransferase OS=Candidatus Phycosocius bacilliformis OX=1445552 GN=tgt PE=3 SV=1
MRFTFTCHATDGHARTGVLSTPRGDIRTPAFMPVGTAATVKAMSIDQVKSTGADILLGNTYHLMLRPGGERLARLGGLHHFMGWDKPILTDSGGFQVWSLAGLRKMTEAGVEFRSHIDGSRHMLTPERSIELQADLIGSDIIMQLDECTTFGSSHEEALVSLELSARWGERSKVAFGGTRATQALFGIVQGSVFPDLRKRSADALKSIGFDGYAIGGLAVGEGHQLMCQTLDVTVPELPMDRPRYLMGVGKPIDLVEAVHRGVDMFDCVLPTRAGRHGQAWTWDGPINIRNARFAEDPDPIDPTSTCPASSRPSKAYLHHLFKAEEILGQTLLSWHNLGFYQDLMAAMRAAIAKGQFQDLRARLRQRWGFAPLD

SEQ ID NO: 53415 - protein, 405 aa, unidentified
  source 1..405: note = Planktophila sulfonica
  REGION 1..405: note = tr|A0A249KIJ9|A0A249KIJ9_9ACTN Queuine tRNA-ribosyltransferase OS=Candidatus Planktophila sulfonica OX=1884904 GN=tgt PE=3 SV=1
MTHAAESGLARAGVITTPHGKIHTPAFIPVGTKANVKTVLPEAMEELGAQALLANAYHLYLQPGPSVLDEAGGLGKFMNWDKPTFTDSGGFQVLSLGVGFKKVLAMDAQTFRSDQVIAKNKERLAHVDDEGVTFKSHLDGSMHRFTAEVSMQIQHQLGADIMFAFDECTTLHNTRPYQELAMSRTYDWAIRCLDEHKRLTESRAEKPYQALFGVIQGAQYEDLRKKASSDLGSMSSSGIEFDGFGIGGALDKDSLGTIVGWVNSTLPENKPKHLLGIGAPEDLFVGVENGVDTFDCVLASRIARTSSVYTMTGRFNVSNAPFVRDFNPIDDECDCYTCKNYTRAYLCHLFRGKEMLAGTLATIHNERFIVRLVDQMRQALVDGTFQEMKTEFMGRYKHKSGQARD

SEQ ID NO: 53416 - protein, 397 aa, unidentified
  source 1..397: note = Planktophila vernalis
  REGION 1..397: note = tr|A0A249KUX4|A0A249KUX4_9ACTN Queuine tRNA-ribosyltransferase OS=Candidatus Planktophila vernalis OX=1884907 GN=tgt PE=3 SV=1
MARVGTITTPHGAIQTPAFIPVGTKATVKAVLPEAMADLGAQALLANAYHLYLQPGSDVLDEAGGLAQFMNWPGPTITDSGGFQVLSLGVGFKKVLAMDAQTFRRDDVIADNKERLAHVDDEGVTFKSHIDGSMHRFTPEVSMKVQHEIGADIIFAFDECTTLHNTRRYQELAMDRTLAWAVRCLDEHKRLTDERTTKPYQALFGVIQGAQYEDLRKKAAGDLGGLESSGQSFDGFGIGGALDKDSLGTIVSWVNQMLPENKPKHLLGIGAPEDLFVGVENGIDTFDCVLASRIARTSAVYTMEGRFNLSNSAYKRDFTAIDDECDCYTCTHYTRAYMHHVFRGKEIIAATLATIHNERFIVRLVDQMRQALLDGNFTEMKHDFLGRYKHRSGQAND

SEQ ID NO: 53417 - protein, 380 aa, unidentified
  source 1..380: note = Poribacteria bacterium
  REGION 1..380: note = tr|A0A2E3HWG7|A0A2E3HWG7_9BACT Queuine tRNA-ribosyltransferase OS=Candidatus Poribacteria bacterium OX=2026781 GN=tgt PE=3 SV=1
MAQNKFRLIKEDEETCARLGQLRTAHGVVNTPIFMPVGTRATVKTCSPRTLIEMGTEIILGNTYHLYLRPGHQIIQRAGGLHKFMGWKKPILTDSGGFQVFSLGERRKITEKGVEFQSGIDGSKHMISPERAIEIQNALGADVIMTFDECPAHTTDREYIEKSMHMTLRWAKRCKETHKNANQLLFGIIQGGFFHDLRRESAEKTVEMGFPGYAIGGLSVGEEKELMYQTVAYTAPLLPKEKPRYLMGVGTPQDLVYSVSCGIDMFDCVMPTRNARNGSLFTSTGTVKIRNAKYRSDFTPLDPNCNCYTCQNFTSAYLRHLDSENEMLGHHLKTVHNLHFYISLMRGIRQSIKIGTFSKLKNDIPMLFQTGQNRSVADSA

SEQ ID NO: 53418 - protein, 380 aa, unidentified
  source 1..380: note = Poribacteria bacterium
  REGION 1..380: note = tr|A0A2D6RZD0|A0A2D6RZD0_9BACT Queuine tRNA-ribosyltransferase OS=Candidatus Poribacteria bacterium OX=2026781 GN=tgt PE=3 SV=1
MAQNKFRLIKEDEKTCARLGQLRTAHGVVNTPIFMPVGTRATVKTCSPRDLIEMGVEIILGNTYHLYLRPGHQVIQRAGGLHKFMGWKKPILTDSGGFQVFSLGERRKITESGVEFQSGIDGSKHMISPERAIEIQNALGADVIMAFDECPAHTTDREYIENSMKMTLRWAKRCKETHKNANQLLFGIVQGGFFNDLRKESVERTVEIGFPGYAIGGLSVGEEKELMYQTTAYTAPLLPKEKPRYLMGVGTPQDLIYSVSCGIDMFDCVMPTRNARNGTLFTSFGTVKIRNAKYRSDFTPLDPNCNCYTCQNFTSAYLRHLDSENEMLGHRLKTVHNLYFYISLMRGIRQSIKIGTFSKLKNDILMLFQTGQNRSVADSS

SEQ ID NO: 53419 - protein, 382 aa, unidentified
  source 1..382: note = Portnoybacteria bacterium
  REGION 1..382: note = tr|A0A2M7UHP1|A0A2M7UHP1_9BACT Queuine tRNA-ribosyltransferase OS=Candidatus Portnoybacteria bacterium CG_4_10_14_0_2_um_filter_44_20 OX=1974799 GN=tgt; PE = 3 SV=1
MSIEFKILKKSKKSRARLGILKTEHGIIETPSLVPVATQATLKALTSEEALETKSQILIANTFHLHLKPGEKIVKAAGGLHKFMNWSGPLMTDSGGFQVFSLGFGKDFQVGKILKYFPGSKKEVIMPKANPKSLKITPDGVRFKSFLGGHELFIGPRESIKIQEALGADIIFTFDECTAPLVSFKYAKEAIERTHRWAKICLETRKTRQALFGIVQGSRFKSLREESAKFINSLDFDGFGIGGDLGSTKEQMNKILDWVLPHLDEQKPRHLLGIGRLEDLKNNVQNGMDLFDCTAPTQYGRHGVAFTSFGKLNLRQTKFLKDKKPLDSKCHCSVCQTYKRNYLAHLIRAGEITGLRMLSFHNLHFFNTIVENLRKEIKRENI

SEQ ID NO: 53420 - protein, 382 aa, unidentified
  source 1..382: note = Portnoybacteria bacterium
  REGION 1..382: note = tr|A0A1G2FNV6|A0A1G2FNV6_9BACT Queuine tRNA-ribosyltransferase OS=Candidatus Portnoybacteria bacterium RIFCSPLOWO2_02_FULL_40_15 OX=1802002 GN=tgt PE=3; SV = 1
MPSFLKIIKKSKKSAARLGILKTSHGLIHTPAFLPCATQAAVKTLTPKEIKEIGFEGVLCNTYHLYLRPGEKNIKKLGGLHKFMNWFGPIATDSGGFQVFSLGFGLEHRVGKVLKGRDENNFNEEKAKGQQAKLAEIDENGVSFISHLDGSIHRFTPEKSIRIQEDLGADIIFAFDECTSPLASYGYTKKAMIRTHRWAKRCLKAKKRKDQLLFGVVQGGPFKDLRKESAKFISDLPLDGIGIGGSFGKDEMKKTLDWIRPYLPENKPRHLLGIGYLDDLKQAIKRGMDLFDCVYPTRLARHGTFLTNEREMNIFKAVYRLDKAPIVKNCACYTCQNFSRAYLRHLFKAGEILGSRLATFHNLWFMRQFIEEIKQAIKDNKF

SEQ ID NO: 53421 - protein, 377 aa, unidentified
  source 1..377: note = Profftella armatura
  REGION 1..377: note = tr|S5R3Y8|S5R3Y8_9PROT Queuine tRNA-ribosyltransferase OS=Candidatus Profftella armatura; OX = 669502 GN=tgt PE=3 SV=1
MLNFKILTTSGNARSGIIKLNNFFVKTPIFMPVGTYGSVKAISPLELIEMKYNIILNNSFHLWMRPGLDVISKFGGLHKFINWNRLILTDSGGFQVFSLSKRNKITEKGIYFFSPINGDKLFLSPEISMKIQKILNSDIVMQLDECTPYKIYNRILSENEVENSMKMSLRWAQRSKEEFYKINNKNSLFCIVQGGMFKNLRDESLEKLKEIGFDGFAIGGLSVGEPKKKMIKILQYIGPKLPIDKPHYLMGAGTPEDIIMAVSNGIDMFDCIIPTRNARNGLLFTNFGNIKIKNARYKFDKNPLDYSCNCYTCKNFSRSYLHYLHRKGEILGSRLNTIHNLYYYFQLMRKIRLSINNNIFEKFVKDFCENRKYENKF

SEQ ID NO: 53422 - protein, 377 aa, unidentified
  source 1..377: note = Promineofilum breve
  REGION 1..377: note = tr|A0A1A9C9B6|A0A1A9C9B6_9CHLR Queuine tRNA-ribosyltransferase OS=Candidatus Promineofilum breve; OX = 1806508 GN=tgt PE=3 SV=1
MSFEFTLLAQDGAARLGRFDTPHGPLETPVFAPVGTAATVKAMRPRDLVELGASLVLANTYHLYLRPGDELIRDLGGLHRFMGWDGPILTDSGGFQVFSLSDARRIDDDGVTFKSHLDGSSHRFTPEKSIAVQENLGADVIMVFDECPPPNDYDYVRQSLGRTHAWAARCLAAKTRADQALFGIVQGGIFRDLREASARFLLDLDLPGYAIGGLAVGETKPEMHAVLEWLHPLLPADKPRYLMGVGAPEDLVNGVLRGIDIFDCVLPTRIARNGAALLLGGRINLRNAQYAADPLPIDPACTCYACAHFSRAYIRHLVKADEILASILLTTHNLHFLLHLMDDLRKAIRKGTLAEYADEFLSHYPVGGAGEQERTDH

SEQ ID NO: 53423 - protein, 365 aa, unidentified
  source 1..365: note = Promineofilum breve
  REGION 1..365: note = tr|A0A160T6Q5|A0A160T6Q5_9CHLR tRNA-guanine transglycosylase, various specificities OS=Candidatus Promineofilum breve OX=1806508 GN=CFX0092_A3080 PE=4 SV=2
MTNVKTLSLPHGDLPLPAFLPDGTQGVVRAVSAEDLEAVGVRAVQMNVYHLMQRPGTSTIQALGGLHRLAGWSRPIFTDSGGFQVYSLIRGNPKAGSITDRGATFRPGGDRKYILTPEKSIQLQFAYGSDMLICLDDCTGPDDPPARQADSVRRTIRWAAECKRAYLRLVEQKRLGEAQRPRLMAVIQGGLSPELRRECATALLDIGFDAYGYGGWPLDAGGNLLTEMVSLVRELVPPAYPVHALGIGHPANVVACVGMGYELFDSTMPTRDARHGRLLLFTRDPAAAPLGPGGDWFAYVYPGDDKHVKTAAPVSAYCDCPACARYSLAYLHHLFKLNDSLYFRLATLHNLRFMTMLMERLKNNN

SEQ ID NO: 53424 - protein, 392 aa, unidentified
  source 1..392: note = Protochlamydia amoebophila
  REGION 1..392: note = tr|A0A0C1HC33|A0A0C1HC33_9BACT Queuine tRNA-ribosyltransferase OS=Candidatus Protochlamydia amoebophila OX=362787 GN=tgt PE=3 SV=1
MNCNFLFYSFCKVGQYMTYFKFELIHRSKKSRARVGRIHTPHGIIDTPNFVAVGTNGTVKALNNTMLHDIGLQLMFCNTYHMMLQPGTDIVRQAGGLHSFIQRKLPIITDSGGFQVFSLAYGSVADELKSRGTKKQGGCVLKITEEGVLFRSYRDGSKVLLTPESSIKAQKDLGADIIIPFDELPPYHIARDALKKSLDRTHRWEKRSLEAHLKNPQEQAMYAVVHGGIDPDLRKESCAILTELPFDGFAVGGSMGKTKDEMHTLLSLTLPLLPEDKPNHLLGIGDLPSIERSVPLGIDTFDSSYPTRAARHGILLTKQGPLNITKSEYATNFNSIEKGCLCPACHHFSLAYIHHLFKARELTCMSLATVHNLYFMVQLMEKYRKQIQEDLI

SEQ ID NO: 53425 - protein, 376 aa, unidentified
  source 1..376: note = Protochlamydia naegleriophila
  REGION 1..376: note = tr|A0A0U5JF92|A0A0U5JF92_9BACT Queuine tRNA-ribosyltransferase OS=Candidatus Protochlamydia naegleriophila OX=389348 GN=tgt PE=3 SV=1
MKSFHFELIHRSKRSRARVGRIHTPHGIIDTPNFVAVGTNGTVKALDNSMLHDIGLQLMFCNTYHLLLQPGTETVRQAGGLHQFIHRKLPIITDSGGFQVFSLAYGGVADELKSRGTKKQGGCVLKITEEGVLFRSYRDGSKVLLTPESSIKAQKDLGADIIIPFDELPPYHIAPEALKKSLARTHRWEQRSLEAHLKNPQQQAMYAVIHGGVDPELRQASCSFLTGLPFDGFAIGGSMGKTKDEMHTLLSHTLPLLPQEKPNHLLGIGDLPSIDRSIPLGIDTFDSSYPTRAARHGILLTSQGGLNITKSEYAKNFSPIEKDCGCPACAKFTLAYIHHLFKARELTSMSLATIHNLYFMVQLMQKYREDIMEDKV

SEQ ID NO: 53426 - protein, 374 aa, unidentified
  source 1..374: note = Pseudomonas adelgestsugas
  REGION 1..374: note = tr|A0A481QMN5|A0A481QMN5_9PSED Queuine tRNA-ribosyltransferase OS=Candidatus Pseudomonas adelgestsugas OX=1302376 GN=tgt PE=3 SV=1
MSHMSFKLLAVDGKARRGRLTFPRGNVETPAFIPVGTYGTIKGILPRDIVTTGTEIILSNTFHLWQRPGTAVIKRHGDLHDFMKWQGPILTDSGGFQVFSLGAIRKIKEEYVTFISPVDGSKVFISPEESMQVQRDLGSDIVMIFDECTMYPADEGVARISMELSLRWAQRSKSAHGDNIAALFGIVQGGMHENLRKLSLEGLDKIGFDGLAIGGLSVGEPKHEMIAVLDYLPGLMPANKPRYLMGVGKPEDLVEGVRRGIDMFDCVIPTRNARNGYLFIDTGVLRIRNALHRHDDSLLDSSCDCYTCQNFSRAYLHHLNKCGEILGSMLNTIHNLRYYQVLMASLRDAIQQGTLTAIVAAFYAKRGLTVPPLD

SEQ ID NO: 53427 - protein, 379 aa, unidentified
  source 1..379: note = Puniceispirillum sp.
  REGION 1..379: note = tr|A0A1Z8UVC2|A0A1Z8UVC2_9PROT Queuine tRNA-ribosyltransferase OS=Candidatus Puniceispirillum sp. TMED52 OX=1986639 GN=tgt PE=3 SV=1
MTNPDFQFSLLNSDGGARRGRLNTAHGVIETPVFMPVGTAATVKAMTVDDVWATGAMIILANTYHLMLRPGAERVERLGGVRRMMGWDGPLLTDSGGFQVMSLGNLRKIDEDGVTFKSHLDGSKHRLTPERSTDIQRMLDATITMAFDECTPFPAEHDVAATSMRLSMDWAERCRAAFVKRQGYGQFGIVQGSIYPDLREESVKRLEQIDFDGYAVGGLAVGEGQDAMFATLDVTTPMMRADKPRYLMGVGKPDDIVGAVARGIDMFDCVLPTRSGRTGQAFTPRGTVNMKNARHADDPRPLDETCACSACRRYSRAYLHHLFKADEVLGLMLLTQHNITYYQHLTAAIRTAIDHGQFADFADQFYETKALGDIPPLDG

SEQ ID NO: 53428 - protein, 380 aa, unidentified
  source 1..380: note = Puniceispirillum sp.
  REGION 1..380: note = tr|A0A3R7ZJV2|A0A3R7ZJV2_9PROT Queuine tRNA-ribosyltransferase OS=Candidatus Puniceispirillum sp. TMED213 OX=1986634 GN=tgt PE=3 SV=1
MTKNDRPAFGFEVLQQDGAARRGRVTSGFGVVDTPAFMPVGTAASVKAMMPEQVASTGAQIILSNTYHLMLRPGPERVERLGGVRKLMGWDGPLLTDSGGFQVMSLGPLRNISEQGVSFKSHLDGSIFDLTPERSTQIQHMLDATITMAFDECTPFPATYDEARASMELSMRWAARSRSAYVARTGYGQFGIVQGSVFEDLRHHSIKALTDIGFEGYAIGGLAVGEGQEAMFSTLNATCPAMPPDKPRYLMGVGKPADIVGAVQRGVDMFDCVMPTRSGRTAQGFTRRGPVNIRNARHAEDMRPLDESCSCPACMKFSRAYLHHLFKADEIQGLMLLTWHNLQHYQDLMAGLRSAIDTGLLDDFAAGFAEEQARGDIPPF

SEQ ID NO: 53429 - protein, 378 aa, unidentified
  source 1..378: note = Raymondbacteria bacterium
  REGION 1..378: note = tr|A0A1F7FFE5|A0A1F7FFE5_9BACT Queuine tRNA-ribosyltransferase OS=Candidatus Raymondbacteria bacterium RIFOXYD12_FULL_49_13 OX=1817890 GN=tgt PE=3 SV=1
MDAETFKFKLEGQDPATSARAGKITTSRGEIETPVFMPVGTAGAVKTLCSEDLLALDAKIILSNTYHLVVRPGLDVIEKAGGLHKFMNWNRPILTDSGGYQVFSLKETRKVTDEGVEFRSHVNGDKLMFTPESVIAAQKTIGSDIIMPFDECVMHPCPKDDAAKAMVRTHEWLARSMAAHEKNNGSQALFGIVQGSVHPDLREESAKFIAAADVAGSAIGGLSVGEPAETMYAMLDCICPHLPQDKPRYLMGVGTPENIVEAVSRGVDMFDCVIPTRNARNGQVFTSRGRVHYKAGEYKNSADIALDPDCGCFVCKNYSRAYLRHLFNANEITALRLATYHNLYFYLNMMQEIRAAIVAGNFAAWRKTFLAGVTEENH

SEQ ID NO: 53430 - protein, 673 aa, unidentified
  source 1..673: note = Raymondbacteria bacterium
  REGION 1..673: note = tr|A0A1F7F3M2|A0A1F7F3M2_9BACT Queuine tRNA-ribosyltransferase OS=Candidatus Raymondbacteria bacterium RIFOXYD12_FULL_49_13 OX=1817890 GN=tgt PE=3 SV=1
MIDTNNRLKFTIDAEADNSSARACTFTTLHNTVQTPVFMPVATFASLRNQTLDIPREIGYTVLLANTYHLLLRPGTEVFRKIGGIHRFMNWNRSVLTDSGGFQLFSLSESSVISEEGARFKSYVNGDTLLLSPESSIETQKIISSDIMMALDQCISSASNEKQCRESVDITARWAERSLIARGDSSQSVFGIIQGACFQNLRKISAQQITSLPFDGFAIGGLAVGESADERNDITELTAQLMPANRPRYLMGVGTPIDLLEAVHRGVDMFDCIVPTAMAQQGVAYTSTGKIKLHRSVYKLADEPLDGICDCPACKNYTRAYLHHLVRINEYLGGYLIGQHNLTYYHRLMNDMRNHIISGDFRSFYNRKKEELILSDDVNPKTVPTKKFRKNIRELGNYEVIQQEAGFHSIYDKVSGETMHSVIDPMIESKVLYVDQSDLNQHLSKDLCEPLVIWDVGLGAATNAMAAVREIERLRKECGFKRAVQIISFENDLDSIRLALQNPFHFLHIKHAAPFSIAKTGYWENSASGIQWTLVVGDFAESHKKAPAPDIIYYDMYSQKTNKSLWSLQLFKKTFDHCQGKNARLITYSASTRVRAALLAAGFFVCYGTGTGFIADTTIAFTSFEEVKSHPKPIGKEWLARWERSTAKTDSNLSEEENETFNQKVLNHRQFVS

SEQ ID NO: 53431 - protein, 377 aa, unidentified
  source 1..377: note = Regiella insecticola
  REGION 1..377: note = tr|G2GWK8|G2GWK8_9ENTR Queuine tRNA-ribosyltransferase OS=Candidatus Regiella insecticola 5.15 OX=1005043 GN=tgt PE=3 SV=1
MKFELLNTDGNARRGRLVFDRGTVETPAFMPVGTYGTVKGMTPEEVKTSGAQILLGNTFHLWLRPGEQIIKKHGDLHNFMQWQEPILTDSGGFQVFSLGAMRKIKEEGVHFNSPIDGSKVFLSPEKSMEIQTALGSDIVMIFDECTPYPADWDYAKKSMELSLRWAQRSRQRFNELNNQNALFGIIQGGIYPGLRDTSLNRLLEIGFDGYAVGGLAVGEPKADMHRILEHICRQIPQEKPRYLMGVGKPEDLVEAVRRGIDMFDCVMPTRNARNGHLFVTEGVIKIRNAKHKEDDSTLDKDCDCYTCRHYSRAYLHHLDRCNEMLGARLNTIHNLRYYQRLMTALRQAIENKKLEDFVKEFYYQIGISTVLEISDTV

SEQ ID NO: 53432 - protein, 367 aa, unidentified
  source 1..367: note = Regiella insecticola
  REGION 1..367: note = tr|E0WS92|E0WS92_9ENTR Queuine tRNA-ribosyltransferase OS=Candidatus Regiella insecticola LSR1 OX=663321 GN=tgt PE=3 SV=1
MKFELLNTDGNARRGRLVFKRGTVETPAFMPVGTYGTVKGMTPEEVKTSGAQILLGNTFHLWLRPGEQIIKKHGDLHDFMRWQSPILTDSGGFQVFSLGAMRKIKEEGVYFNSPIDGSKVFLSPEKSMEIQKELGSDIVMIFDECTPYPADWDYAKKSMELSLRWAQRSRQRFDELNNQNALFGIIQGGIYPDLRDISLNQLLEIGFDGYAVGGLAVGEPKAEMHRILEHICPQIPQEKPRYLMGVGKPEDLVEGVCRGIDMFDCVMPTRNARNGHLFVTEGVIKIRNAKHKEDDSTLDKNCDCYTCCHYSRAYLHHLDRCNEMLGARLNTIHNLRYYQRLMAALRQAIEDKKLEDFVKEFYYQIGI

SEQ ID NO: 53433 - protein, 375 aa, unidentified
  source 1..375: note = Rhabdochlamydia sp.
  REGION 1..375: note = tr|A0A486XJS9|A0A486XJS9_9BACT Queuine tRNA-ribosyltransferase OS=Candidatus Rhabdochlamydia sp. T3358 OX=2099795 GN=tgt PE=3 SV=1
MTFRFELLHTSTKSKARVGKIYTPHGVIDTPNFVGVGTNGTIKALDNQSVHEIGLQLMFCNTYHLLLQPGTSIVKQAGGLHSFINRSLPIITDSGGFQVFSLAYGSIADELKGKGTKKQAGHVLKISEEGVVFRSYRDGKKVLLTPESSIEAQKDLGADIIIPLDELPPYHIEKKALEDSLARTHRWEERSLHTHLKNPNNQAMYAVIHGGVDAALREKSCRYLTKLPFDGFSIGGSMGRTKQEMFEVLRSTMSHLPLEKPNHLLGIGDLTSIEMCIPMGIDTFDSSYPTRAARHGILLTQEGHLKIGKSSHAQMFSPPEKNCSCSTCSRFSLAYLHHLFKAKEATCMILATIHNLHFMVQLMQRYRTKILHNDI

SEQ ID NO: 53434 - protein, 335 aa, unidentified
  source 1..335: note = Rhodobacter lobularis
  REGION 1..335: note = tr|A0A0J9H011|A0A0J9H011_9RHOB Queuine tRNA-ribosyltransferase OS=Candidatus Rhodobacter lobularis OX=1675527 GN=tgt PE=3 SV=1
MKAMLPESVRATGADILLGNTYHLMLRPTAERIARLGGLHGFMNWDRPILTDSGGFQVMSLADLRKLTEEGVSFKSHIDGSKHMLSPERSMEIQRLLGSDIVMCFDECPALPAERAQIAESMRLSMRWAQRSRDAFGDRPGHALFGIQQGGLEQDLRAESAEALRGIGFDGYAIGGLAVGEGQEAMFGCLDYAPDQLPSDKPRYLMGVGKPDDIVGAVKRGVDMMDCVLPSRSGRTGQAWTRRGPVAIKNARHADDPRPLDETCTCPACTGYSRAYLHHVFRAGEMISGMLLTWHNLHYFQELMSGMRAAIASGTFEAWEAEFHAQRALGDIERV

SEQ ID NO: 53435 - protein, 383 aa, unidentified
  source 1..383: note = Rickettsiella isopodorum
  REGION 1..383: note = tr|A0A1J8NJK2|A0A1J8NJK2_9COXI Queuine tRNA-ribosyltransferase OS=Candidatus Rickettsiella isopodorum OX=1225476 GN=A1D18_01400 PE=3 SV=1
MNNQFNCELLKSSKNSQARVTKITTAHGSVLTPAFMPVGTRAFVNHMMPQDLRDAGSQIILGGNTYHMLLNPGMEVILASGGMHRLMAWDKPMLTDSGGFQVFSLSKNSKICHIDAKGAHFKHPTTGKVIHLTPKSSIEAQRIIGADIIMAFDECTPENGGRDAALAAMDRTHRWLLTSKETYLVSDSVYGHQQALFGIIQGGSFRDLRELSTQFILAAELDGIAIGGEVIGFDMQKTVEVIDWIRPLLPDNKVRYTMGVGLNPQDLIDVAAKGIDLFDCVAPTRNARHGALYHGNVIKKDNGLEFVSEENQSRILIKKSIYAKDETPILAGCLCYTCRHFTRAYLHFLFKQGSSLYNQLACIHNLYIMHHVCEQIRRLIFDE

SEQ ID NO: 53436 - protein, 388 aa, unidentified
  source 1..388: note = Rickettsiella viridis
  REGION 1..388: note = tr|A0A2Z5UW57|A0A2Z5UW57_9COXI Queuine tRNA-ribosyltransferase OS=Candidatus Rickettsiella viridis OX=676208 GN=tgt PE=3 SV=1
MNNQFSSRLIKASKATSARVMEITTPHGILTTPTFMPVGTRAFVNHMTPDDLIHAGSQIILGGNTYHMLLNPGMDVIKASGGMHRLMAWNKPMLTDSGGFQVFSLSKNSKICRIDSEGAHFKHPINGKVIHLTPKSSIETQKIIGADIIMAFDECTPEQGGREAALPAMERTHRWLLESKETYLASPYSAYGYKQALFGIVQGGSFQDLREQSARFIVDADLEGIAIGGEVIGFNMQKTGEVIDWVRPLLPANKVRYTMGVGLNPQDLIDVVKKGIDLFDCVAPTRNARHGGLYHGKISKTADWITFLSEEQNGRLFIGKAIYAKDDRPILEGCLCYTCLHFSRAYLRFLFKQGSSLYSQLACIHNIFIMQTVCEQLRALILAERTEE

SEQ ID NO: 53437 - protein, 676 aa, unidentified
  source 1..676: note = Riflebacteria bacterium
  REGION 1..676: note = tr|A0A2N1TI05|A0A2N1TI05_9BACT Queuine tRNA-ribosyltransferase OS=Candidatus Riflebacteria bacterium HGW-Riflebacteria-1 OX=2013829 GN=tgt PE=3 SV=1
MTRLNFTIDKSAHGSRARAARFTTLHSEVITPVFMPVGTRATVKGMTVESLVENGSQVLLANTYHLLLRPGPEVFKKIGGIHRFMNWKGSVLTDSGGFQIFSLPHSREMTEDGARFTSYVDGKTFMLTPELSIEMQKAIGSDIMMVLDQCINSTSGYDEAKAAMELTHRWALRSLAARGDSKQAMFGIVQGACHPELRQQSAEFLRAQPFDGLAIGGLAVGETHSERYDFTELVTGYLPENLPRYLMGVGTPIDILEAVHRGVDMFDCIIPSQLAHRGVVFTSHGKLQFRRTVYRFSEEPIDAECDCYACKNYSRAYVHHLVKAEEPLAWRLLTCHNIRFYHQLMARIRDAIMHDRFVEFYEKMRHELVRHDGDNPQNPPKRRTANPPTLGDYEIVKFAQGFSSIRQRSSGEIMHSVNKPAEEAEKLYVEQSHLAERLLKTPGNDSELIVWDVGLGAATNAMAAVHCFEKTLAEHGSEKMRSMRLISFECDLDPLTLACRDNANFHYLRHGAPHHILRSGQWQHHSKLLLWELIKGDFLELFDKSPAPDLIYYDPFSAKTDSALWTSEAFTRLFKSCGGRSVELYTYSAATAVRVAMLRAGFFVAEGMATGPKSATTVAFNQASGAGEHPEKPNLLDERWLERWRRSGSRFPPDISQHEKDQITQVIEQHPQFKTA

SEQ ID NO: 53438 - protein, 377 aa, unidentified
  source 1..377: note = Riflebacteria bacterium
  REGION 1..377: note = tr|A0A3B9I0A0|A0A3B9I0A0_9BACT Queuine tRNA-ribosyltransferase OS=Candidatus Riflebacteria bacterium OX=2053586 GN=tgt PE=3 SV=1
MNTSEFTFTVEHKSEECLGRAGVINTRRGQIETPVFMPVGTAGTVKTLSPQELRESDTSIILGNTYHLMLRPGTPVLDHFGGLHNMMGWDRPMLTDSGGFQVFSLKKLNKISDDGVEFASHIDGSKHWLSPEESMRIQRSIGAEIMMVFDECCPYPSEESLARRAMERSVAWAKRCRADHPRMRNGQALFGIVQGSMYLPQRLESIERTAEVGFEGLAIGGLSVGEPKPLMIEILDGMMPHMPTHLPRYLMGVGTPEDLLTGVERGVDMFDCVHPTRIARHATVFTRNGRISLLNARWQISDQPIDESCTCYACRTFSRGYLRHLFKAREILGLRMASLHNVTFMVNLMSEIRQALIAGRFIEFRDRFLANYLSKEI

SEQ ID NO: 53439 - protein, 404 aa, unidentified
  source 1..404: note = Roizmanbacteria bacterium
  REGION 1..404: note = tr|A0A1F7GG03|A0A1F7GG03_9BACT Queuine tRNA-ribosyltransferase OS=Candidatus Roizmanbacteria bacterium RIFCSPHIGHO2_01_FULL_39_12c OX=1802031 GN=tgt; PE = 3 SV=1
MIKFFKVLKKSKKSKARLGLISTPHGKIQTPAFVPVATKGTLKSLIPYQLKKIGIQAAFVNTYHLVSHPGADVIAAAGGIHNFSRLDIPLMSDSGGFQVFSLAKRNPQGSGNPEGSLIKKADIRGEEQPLIVKISDGGVKFRSLYDGRLIEFTPEKSMQFQQKIGADIIMAFDECTYYPAAHAYSRMAMIRTHNWLNRCIAQNQNLKIKNQNDKSKLKNNQFLYGIIQGGTYEDLRKGSAKFVTSQGVDGVAIGGVSVGETKKEMRNQVKWVSEYLPEDKPVHLLGVGHIDDIADLVKYGIDTFDCVEPTRLARLGQLYRISNAQIPASNLKEIDILTGKYKFDLSPVDEDCACYTCKNFTKAYLHHLFKQKELTAYTLATVHNLCVMERLMTNLRKAIAENKI

SEQ ID NO: 53440 - protein, 416 aa, unidentified
  source 1..416: note = Roizmanbacteria bacterium
  REGION 1..416: note = tr|A0A2M7QCQ7|A0A2M7QCQ7_9BACT Queuine tRNA-ribosyltransferase OS=Candidatus Roizmanbacteria bacterium CG_4_10_14_0_8_um_filter_39_9 OX=1974829 GN=tgt; PE = 3 SV=1
MSQFFKVTSRSKKACLPAGRSKARLATITTDHGVIQTPAFVPVGTKGTIKALPQSFFKDIGIQLSFVNTYHLVTHPGVEVFKKAGGIHNLADYNIPLMSDSGGFQVFSLAKNEKRRAAVRGDEQPLVEKISDDGVKFRSVYDGQLIEFTPEKSMEYQKIIGADMNMAFDECTYYPATHEYTEKAMKRTHEWLKRCISYRMSNHQLQITNQSQISKSQPPTTNYQLPTINQYLYGIIQGGTYEDLRLASAKFIQTQDVSGVAIGGVSVGETKSEMRDQVRWVAPYLPQDKPVHLLGVGQVDDIIDLVKYGIDTFDCVEPTRVARMGSIYQLRSILLQLEDKKEPYEIDIQKSVYKTDVSSLDEDCDCYVCKNYTKAYLHHLFKQREIIGYTLATYHNLWVMERLMEKIREMITENLL

SEQ ID NO: 53441 - protein, 375 aa, unidentified
  source 1..375: note = Rokubacteria bacterium
  REGION 1..375: note = tr|A0A1Q7IJI9|A0A1Q7IJI9_9BACT Queuine tRNA-ribosyltransferase OS=Candidatus Rokubacteria bacterium 13_1_40CM_4_67_11 OX=1805361 GN=tgt PE=3 SV=1
MTFALLATDGAARRARLTTAHGAVDTPAFMPVGTRGTVKALGPDDLIAAGAQIVLANTYHLLLRPGHDLIRDLGGLHRFMAWDGPILTDSGGFQVFSLAKIRTMSENGVEFRSPIDGSTHLLTPERSIEIQHALGADIIHPLDECLAYPATREATERSLALTLRWARRAQAAHAEGASQAALFGIVQGGAWDDVRERAVAETVALGFDGYAIGGMAVGEPKPLMYTLTASVAARLPAAQPRYLMGVGKPEDLIEAVSQGVDLFDCVLPTRNARNGQCFTTEGPLVIKHAEYARDARPLQDDCGCYACRRFSRAYLRHLFLSEELLAFRLLSLHNVHFFLGLMASLRSAIAERRLEAFKTRFFDRYPVPAAERSSD

SEQ ID NO: 53442 - protein, 386 aa, unidentified
  source 1..386: note = Rokubacteria bacterium
  REGION 1..386: note = tr|A0A2V6SJD6|A0A2V6SJD6_9BACT Queuine tRNA-ribosyltransferase OS=Candidatus Rokubacteria bacterium OX=2053607 GN=tgt PE=3 SV=1
MTAPVSFELLARDGAARAGRLATPHGTVETPAFMPVATVGSVKSLSPADVRVSGGQIVLANTYHLSLRPGHEVIRELGGLHRFMGWDGPVLTDSGGFQVFSLSKLRRLGEEGVEFRSHIDGSLRLLTPESCVEIQHALGVDILHPLDECLPYPATETDTERSLGLTLRWLARAVATHAKGDGGRALFGIVQGGTSSVLRRSAVEAVCAYDLPGYSIGGLAVGEDIGRLYDVAELTATLLPSDRPRYLMGVGKPRDLVEAVARGIDLFDCVLPTRNARNGQAFTADGPLTITHARYARDPAPLDADCPCEACRLFSRAYLRHLFASRELLAYRLLTLHNLTFYHGLLTGARRAISEGRFSSFRSRLLERYGVESVGGSDPISTATEA

SEQ ID NO: 53443 - protein, 380 aa, unidentified
  source 1..380: note = Ryanbacteria bacterium
  REGION 1..380: note = tr|A0A1G2GAQ6|A0A1G2GAQ6_9BACT Queuine tRNA-ribosyltransferase OS=Candidatus Ryanbacteria bacterium RIFCSPHIGHO2_02_FULL_45_13b OX=1802117 GN=tgt; PE = 3 SV=1
MLAFTILKKSKKSRARLGLLATKHGMVETPAFVGVATQAVVKTLSSEEAEAMGCQMLIANTYHLHIRPDEKIVKAHGGLHAFMNWRHPLMTDSGGFQVFSLGFGKDLGMSKMLKHKVGKREELDAKAKPTSLRITEDGVVFRSYVDGKEIFLGPKESMNIQGALGADIIFAFDECPPPVASHEYMKQSVERTHRWAEICLREKKKTQALYGIVQGGKHADLRTMSATFFASKPFDGYGIGGEFGVGGAERSRMLRLTIDTLPDEKPRHLLGTGYIEDIARLIKEGVDTFDSIVPTHYARHGTAFTSAGKLDLGKSVFLKDTSPLDPTCACPICKHYSRGYIAHLFRAHEITPLKLLTMHNLWFFNAYVASLREKIKKGQM

SEQ ID NO: 53444 - protein, 378 aa, unidentified
  source 1..378: note = Ryanbacteria bacterium
  REGION 1..378: note = tr|A0A1G2G646|A0A1G2G646_9BACT Queuine tRNA-ribosyltransferase OS=Candidatus Ryanbacteria bacterium RIFCSPHIGHO2_01_FULL_48_27 OX=1802115 GN=tgt; PE = 3 SV=1
MIHFSILKKSKKSRARLGLLETPHGVVETPAFVGVATQATVKAMTMDQVRSTGMQLLIANTYHLHIRPGEDVVKKGGGLHKFMDWDRPLMTDSGGFQVFSLGFGKDRGTGKILKEKSDEKIREGEQPRTVRITEDGVEFRSYVDGRKLFIGPRESMRIQEKLGADIIFNFDECTSPIADHAYTKKSLDKTHRWARVCIDSKKSKQALYGVVQGGKFKDLRIESAEFMNKLPFAGFGIGGEFGDDKRQMTKMIDWVVSELDEARPRHLLGIGYLEDMPKIIASGIDTFDCIVPTHYARRGVAFTSRGRLDIGRTEFLSDKKPLDPKCSCFVCQNHTRSYLSHLLRAHEITPLTLLSFHNMHYFNAYVSMLREDIKKGNL

SEQ ID NO: 53445 - protein, 402 aa, unidentified
  source 1..402: note = Saccharibacteria bacterium
  REGION 1..402: note = tr|A0A1F7Q1Y8|A0A1F7Q1Y8_9BACT Queuine tRNA-ribosyltransferase OS=Candidatus Saccharibacteria bacterium RIFCSPHIGHO2_01_FULL_46_30 OX=1802133 GN=tgt; PE = 3 SV=1
MKKALEFTIHHRLDGTLARTGTITTPHGVIETPAFIPVGTKATLKALTPEQLEEVGAQAVLANAYHLYLRPGHEIIDKAGGLGQFMHWNKPTFTDSGGFQVMSLGVGFKKIIDMDGKTDERPLSKKEKLAWIDNDGVTFKSHLDGSYHKFTPELSMQIQHGIGADITFAFDELTTLHHDYNYQVESLHDRTHPWAVRSLEEHKRLNEERSHRPPQALFGVVQGANYEDLRRECSRFLGAMDFDGFGLGGAFTKENIGEITGWMCQELPEDKPRHMLGISEPDDIFDCIENGADTFDCVSPARVGRNGALYTKFGRVNVTRLQYKEDFTSFDETCDCYTCQNYTSAYLHHLFKAGELLANTLATIHNERFIIKLVDDIRGSIADGSFYEFKKEFLDNYYSKKQ

SEQ ID NO: 53446 - protein, 400 aa, unidentified
  source 1..400: note = Saccharibacteria bacterium
  REGION 1..400: note = tr|A0A1F7QUQ1|A0A1F7QUQ1_9BACT Queuine tRNA-ribosyltransferase OS=Candidatus Saccharibacteria bacterium RIFCSPHIGHO2_12_FULL_44_22 OX=1802140 GN=tgt; PE = 3 SV=1
MKKALEFEIHDRLPGALARTGTITTPHGIIQTPAFIPVGTKATLKALTPEQLSETGAQAVLANAYHLYLRPGHDIIDQAGGLNEFMHWDKPTFTDSGGFQVMSLGVGFKKIIDMDGKTDERPLGKKEKLAWIDNDGVKFKSHLDGSMHKFTPELSMQIQHGIGADITFAFDELTTLHHNYEYQVESLHERTHPWAVRSLVEHQRLNEVRTHRPPQALFGVVQGANYEDLRRECSKFLGAMDFDGYGLGGAFTKENIGEITGWMCQELPENKPRHMLGISEPDDIFDCIENGADTFDCVSPARVGRNGALYTKFGRVNVTRAQYATDFTSFDADCDCYTCQNFTSAYLHHLFKSGELLSNTLATIHNERFIIRLVDDIRRSISDGTFYDFKQVFLNNYYSK

SEQ ID NO: 53447 - protein, 372 aa, unidentified
  source 1..372: note = Saccharicenans subterraneum
  REGION 1..372: note = tr|A0A3E2BLB9|A0A3E2BLB9_9BACT Queuine tRNA-ribosyltransferase OS=Candidatus Saccharicenans subterraneum OX=2508984 GN=tgt PE=3 SV=1
MSNSFTITARDSSCQARTGILETLHGQIETPVFMPVASQGTVKALTHDILNQLDCQIILVNSYHLFLRPGVELIRKMGGLHRFISWPKAILSDSGGFQVYSLSPLVKISEEGVQFSSHLDGKKIFLTPEEAVRIQAGLGTDIMMCLDYFPSFPYTEEQVAYSVGLTGRWARRCREEYDHLQPGTQLWGITQGGVFWSYREKSIEEIVSCDFHGYALGGLGIGEPKSQLYEILEESNRLLPQDRPRYLMGMGYIEDILEAVERGVDFFDCVLPTRNARNGTLFTSQGRIVIKNQKYADDPRPPDENCSCYTCRNFSRAYLRHLYERNEISSAILNTIHNLYYYLDMFKKIRQSIQSNSFRSFKKAIIEKILSE

SEQ ID NO: 53448 - protein, 415 aa, unidentified
  source 1..415: note = Saccharimonas aalborgensis
  REGION 1..415: note = tr|R4PX68|R4PX68_9BACT Queuine tRNA-ribosyltransferase OS=Candidatus Saccharimonas aalborgensis OX=1332188 GN=tgt PE=3 SV=1
MKHALTFEITDRLEGTLARAGIIHTPHGAIETPAFIVGGTKATVKAITPEQIKEYGGQAVLANTYHLMLRPGTAIIKQAGGLSKFMNWNGPTFTDSGGFQVFSLGVAYKKGIDAVAHTERGDAAKAVKSSDQLVKITERGAHFRSHYDGQKLLMTPESSMELQHEIGADIHMAFDECPAPLAPPYYLVEALERTHAWAERCLTRHQELNKEHEKNGEPLQALYGVVQGARDEKPRKQSAAFLGARDFDGYGIGGVFETSEIPTVVKWVDETLPDDKPRHLLGMGAQPADLFLGVEYGVDTFDCVAPTRQARNGALYTYDGRINIINTRYKTDFAPIDGECDCYTCLHYTRAYINHLFKSDEILGATLASIHNERFVVRTVDQIRQSLKDKTFFELKKRFLHRYYGDTPPVGVIVE

SEQ ID NO: 53449 - protein, 370 aa, unidentified
  source 1..370: note = Scalindua brodae
  REGION 1..370: note = tr|A0A0B0EJQ6|A0A0B0EJQ6_9BACT Queuine tRNA-ribosyltransferase OS=Candidatus Scalindua brodae; OX = 237368 GN=tgt PE=3 SV=1
MQFRLLANDNKTKARCGEITTNHGIIPTPAFMPVGTQATVKALTPCQLKETNAHALLCNAYHLYLRPGEDIVKKLGGLHKFMNWDGAIITDSGGYQVFSLARLTKVTDDGVEFQSPIDGSRRFLDPEKVMKIQHSLGADIIMAFDECLPYPCERDRVKQSMHRTVKWANRCLNAHNSEDQDLFAIVQGSVFKDIREECADRLVEIGFNGYAIGGLSVGEGNHLMNEVLEYTVPRLPADKPRYLMGVGFPLDILDGIEHGIDMFDCVIPTRNGRNGCAFTMDGKLKIRNSCYKEDERPLDKDCHCYTCKNFSRGYIRHLLTANEILGLSLMSFHNIYFFENMMEKARKSIIEGNFSNFKSHFLSLTVEKSC

SEQ ID NO: 53450 - protein, 367 aa, unidentified
  source 1..367: note = Scalindua sp.
  REGION 1..367: note = tr|A0A523CUQ3|A0A523CUQ3_9BACT Queuine tRNA-ribosyltransferase OS=Candidatus Scalindua sp. AMX11; OX = 2555784 GN=tgt PE=3 SV=1
MRFRLLASDKNTNARCGELVTNHGLVETPVFMPVGTQATVKSLTPEQLKGAGVSALLCNAYHLHLRPGEEIVRDHGGLHDFMNWDGMIVTDSGGYQVFSLASLTCVTDDGVEFKSPVNGSKIFFSPEKVIEIQRSLGADIVMVFDECLPYPCEKDRAYLSMKRTVEWARRCRDVLLNESQSLFCIVQGSVFQDIRQECVHRLVDMGFDGYAVGGLSVGEGNSLMNEVLEYTVPHLPEEKPRYLMGVGFPKDILDGIEHGIDMFDCVIPTRNGRNGCVFTSEGKINILNSRFKVDKGPLDDSCHCYTCRNFSRAYVKHLFAANEILGLNLVSFHNICFFQELMKKARQAIMDGVFKGFKTSFLSKLEN

SEQ ID NO: 53451 - protein, 375 aa, unidentified
  source 1..375: note = Schekmanbacteria bacterium
  REGION 1..375: note = tr|A0A1F7RNX4|A0A1F7RNX4_9BACT Queuine tRNA-ribosyltransferase OS=Candidatus Schekmanbacteria bacterium RBG_16_38_10 OX=1817879 GN=tgt PE=3 SV=1
MFKFNVLKKDKNSRARLGKISTPHGEIQTPAFMPVGTQGTVKAVCSEDLLEAGAEIILSNTYHLYLRPGHELIKEFGGLHKFMNWGKPLLTDSGGFQIYSLARFRKIQDEGVMFQSHIDGASHFITPEKAVEIQEAIGADIIMVFDECIPYPAEYEYCKSSTEMTLRWALRCLKAQKRNDQALFGIVQGGMYEDLRKYCAEELGEMGFAGFAIGGLSVGEPKEIMWDIVNYTEEYLPEDRPRYLMGVGTPEDILDAVAKGMDMFDCIIPTRQARNGSLFTSKGKVVIKNSKYVKDESPADIDCSCYTCRNYSRAYLRHLYMSKEILSLRLNTIHNLHFYLGLMKEIRSAIKKDSLESMVKEYKKAYETEITEIVN

SEQ ID NO: 53452 - protein, 371 aa, unidentified
  source 1..371: note = Schekmanbacteria bacterium
  REGION 1..371: note = tr|A0A1F7RDF9|A0A1F7RDF9_9BACT Queuine tRNA-ribosyltransferase OS=Candidatus Schekmanbacteria bacterium GWA2_38_11 OX=1817876 GN=tgt PE=3 SV=1
MFKFGVLKTDKSSKARLGRLLTPHGEISTPAFIPVGTQGTVKALCSKDLVDLDAEIILSNTYHLYLRPGDELIKELGGLHKFMNWERPILTDSGGFQVYSLAQFRRINEEGVMFQSHIDGSSHFITPEKAVEIQEFLGADIIMAFDECIPYPAEYDYCKKSTEMTLRWAERCLKAQKRDDQVLFGIVQGGMYNDLRKICAEELCNLGFSGFAIGGLSVGEPKEIMWDIADYTASILPEDKPKYLMGVGTPEDIIDGAMRGIDMFDCIIPTRQARNGSLFASTGKVVIKNSKYTRDENPVDPECDCYTCRNYSRAYLRHLFMAKEILSLRLNTIHNLHFYLNLMKRIRQAIENDSLESLVKEYKEIYGKVMC

SEQ ID NO: 53453 - protein, 380 aa, unidentified
  source 1..380: note = Schmidhempelia bombi
  REGION 1..380: note = tr|A0A484GBN7|A0A484GBN7_9GAMM Queuine tRNA-ribosyltransferase OS=Candidatus Schmidhempelia bombi str. Bimp OX=1387197 GN=tgt PE=3 SV=1
MKFELDNTDGMARRGRMKFDRRGIECTVETPAFMPVGTYGTVKGMTPEEVAATGAQILLGNTFHLWLRPGQAIMRQHGDLHDFMQWSGPILTDSGGFQVFSLGDIRKIKEEGVYFRNPINGDSIFLSPEISMEIQKDLGSDIVMIFDECAPYPADWDYVKKSMEMSLRWAKRSRQRFDELQNPNALFGIVQGGVHQELRDISIKGLTEIGFDGYAVGGLAVGEPKEDMHRILEGTCPQLPADKPRYLMGVGKPEDLVEGVRRGIDMFDCVMPTRNARNGHLFVTNGVIKIRNAKYKDDITPLDPECDCYTCQHYTKAYLHHLDKCGEILGARLNTIHNLRYYQRLMAEIREAVADQRYEEFVTEFYQRMGRTPAPMQLKK

SEQ ID NO: 53454 - protein, 332 aa, unidentified
  source 1..332: note = Shapirobacteria bacterium
  REGION 1..332: note = tr|A0A2M6YRJ2|A0A2M6YRJ2_9BACT Queuine tRNA-ribosyltransferase (Fragment) OS=Candidatus Shapirobacteria bacterium CG07_land_8_20_14_0_80_39_18; OX = 1974882 GN=tgt PE=3SV=1
MSKFNFEILGKDVKSDARAGVIHTVHGDIKTPSFVPVGTQATVKSMSNEDLQEIGVQVFFVNTYHLYLRPGLEAIEKGNGLHSFIGWGKPLMTDSAGFQIFSLGDVNRQRKLCLQGDPLEIPLVKISEEGVKFRSHLDGSEHLFTPEKSIEVQRILGADIMIAFDECCYYPATHDYAKKAMERTHRWALRCLERSSKFHLEEIPQGGQVQSSKLGKSPQALYGVVQGGVFEDLRKESAKFISNLPFEGVAIGGVAVGESKKEMEKVLDWVVPLLPKEKPRHLLGVGEIDDIFTLVEKGIDSFDCVMPTRLGRMGHLLVRKVENREWKLDITK

SEQ ID NO: 53455 - protein, 381 aa, unidentified
  source 1..381: note = Shapirobacteria bacterium
  REGION 1..381: note = tr|A0A2M7BF19|A0A2M7BF19_9BACT Queuine tRNA-ribosyltransferase OS=Candidatus Shapirobacteria bacterium CG03_land_8_20_14_0_80_40_19 OX=1974880 GN=tgt; PE = 3 SV=1
MERKFNFKITARDKKTQARIGIIYTAHGKIKTPAFVPVGTQASVKSLDNRDLAEIGSQLFFANTYHLYLRPGIEAIKRLGGLHSFTGWTKPLISDSAGFQVFSLNKKENTSLVKIKEDGVSFRSHLDGSSHFFTPEKSIKVQIILGADIMIAFDECTFYPASHEYSLLAMERTHRWAVRSLKEAEKRHDVQALYGVVQGGVYKDLRQNSAEYINGLPFEGTAIGGVSVGESKKEMVKVLDWTIPKLSPEKPRHLLGVGEISDIFELVQRGIDSFDCVMPTRLGRMGFCLTKIKKDGEFLIDLNKSAFAFDEKPIEKDCKCFVCKSYCRAYLHHLFRTRELLAYRLASYHNLWFIERLVDNIREAIDRGEFLNLKKQWLGSL

SEQ ID NO: 53456 - protein, 382 aa, unidentified
  source 1..382: note = Staskawiczbacteria bacterium
  REGION 1..382: note = tr|A0A1G2HLY0|A0A1G2HLY0_9BACT Queuine tRNA-ribosyltransferase OS=Candidatus Staskawiczbacteria bacterium RIFCSPHIGHO2_01_FULL_36_16 OX=1802200; GN = A2812_02705 PE=3 S V=1
MYLMQFKILKKSKNSRARLGFLETEHGVVETPCLVPVATQAVVKTLTSEEAAETKSQILIANTFHLHLKPGEKIVEKAGKLHKFMNWKKPLMTDSGGFQVFSLGFGKDYGVSKFLGKGMSDKKIIGESGRPKSLKITQDGVFFKSFVDGSELFLGPKESIKIQEKLGADIIFAFDECTAPLASYDYVKKSLERTHKWAEISLKTKKSKQAIFGIIQGSEFKDLREESAKFIDSLDFDGFGIGGDLWRERGGTKKILDWFIPSINEKKPRHMLGVGYLENIEDIIKSGIDLFDCTVPTHYARRGIAFGSEGKLDLKNKKFFKKHEPLDKGCICEVCLNYKKDYIAHLLRAGEITALKLITFHNLWYFNTFVEGLRMKIKNGKM

SEQ ID NO: 53457 - protein, 382 aa, unidentified; identical to SEQ ID NO: 53456
  source 1..382: note = Staskawiczbacteria bacterium
  REGION 1..382: note = tr|A0A1G2IHW4|A0A1G2IHW4_9BACT Queuine tRNA-ribosyltransferase OS=Candidatus Staskawiczbacteria bacterium RIFCSPLOWO2_01_FULL_37_25b OX=1802213; GN = A2998_01585 PE=3 S V=1

SEQ ID NO: 53458 - protein, 389 aa, unidentified
  source 1..389: note = Stoquefichus sp.
  REGION 1..389: note = tr|A0A139TDB8|A0A139TDB8_9FIRM Queuine tRNA-ribosyltransferase OS=Candidatus Stoquefichus sp. KLE1796 OX=1574263 GN=tgt PE=3 SV=1
MYNGGWLKRGEKMEGFWYELKHVCKQSGARYGILHTPHGDVETPMFMPVGTLATVKGISPEQLKEMNSQVILANTYHLWLRPGEDVVKQAGGLHKFMNYDGPILTDSGGFQVFSLGKTRKIEEEGVTFKSIVDGKKLFLSPEKAIQIQNDLGADIIMSFDECAPYPCTHDYMKQSVERTLRWAKRGKDAHQRDDQALFGIVQGGEYEDLRELSAKELVKMDFPGYSIGGTSVGEPKDVMYKMIDDAIKWLPEDKPRYLMGVGNPIDLIEGAIRGIDMFDCVLPTRVARHGALMTHSGRMNINNEKYKYDFTPVDDKCHCYTCRNYTRAYLRHLHKCDEIFGKSLLSIHNVAFLLQLSEDIRTAIKEDRLLDFKEEFSNSYGRDVYERAF

SEQ ID NO: 53459 - protein, 371 aa, unidentified
  source 1..371: note = Sulfobium mesophilum
  REGION 1..371: note = tr|A0A2U3QF10|A0A2U3QF10_9BACT Queuine tRNA-ribosyltransferase OS=Candidatus Sulfobium mesophilum; OX = 2016548 GN=tgt PE=3 SV=1
MDFKVINTDGKARRCSIGTKRGSIDTPAFMPVGTNGTVKAMSPDEMKDIGAEILLGNTYHLYLRPGTDVISKLGGLHKFMNWEKPILTDSGGFQVFSLSTLRKIEEKGVQFRSHIDGSPHFIGPKEAMKIQGLLGSDIAMTFDECIPYPSTYEYAVKSVELTTTWAKRCRELQNEGQALFGIVQGGMFKDLRHKSAEEILGIGFDGYAIGGVSVGETKEEMHEIIDYSAPLLPSGRPRYLMGIGDLGDMLRAVDAGFDMFDCVMPTRNARNGTLFTSAGRISIKREEFKYDDRPLDPDCSCYACRNFSRGYLRHLFLSREILSMRLNTYHNLCFYLDFFRKMRTAIEEGGFNQFKDRWQPVFDKSYPDNGS

SEQ ID NO: 53460 - protein, 385 aa, unidentified
  source 1..385: note = Sulfopaludibacter sp.
  REGION 1..385: note = tr|A0A2U3KX44|A0A2U3KX44_9BACT Queuine tRNA-ribosyltransferase OS=Candidatus Sulfopaludibacter sp. SbA4 OX=2043165 GN=tgt PE=3 SV=1
MSPVSFEVVAECPHTRARAGLLHTAHGAIETPVFMPVGTQATVKGLTQRDLAEDLGVKILLANTYHLYLRPGHELIRKMGGLHRFMSWPNAILTDSGGFQVFSLSGLRKIAEHGVVFQSHLDGDLHTFTPESTVDAQLAFGSDILMVLDECTEYPVSHESARESMHRTLRWARQADAHFRRRMAECPAPHALFPIVQGSMFPGLRRECAAALADLDSDGYAIGGLSVGEPRPLSMEMVEATETILPRSKPRYAMGVGMPAELPEYVARGVDMMDCVLPSRNARNGCLFTSQGRLIIKHARYKDDERPLDEKCRCYTCSRYSRAYLRHLFQSGEILYAVLATRHNIRRYLDIMAEIRSAIISESFPEYLRCVRSVSVSGVEADDAG

SEQ ID NO: 53461 - protein, 145 aa, unidentified
  source 1..145: note = Sulfopaludibacter sp.
  REGION 1..145: note = tr|A0A2N9MT34|A0A2N9MT34_9BACT tRNA-guanine transglycosylase OS=Candidatus Sulfopaludibacter sp. SbA6; OX = 2043166 GN=SBA6_910004 PE=4 SV=1
MSPVSFEVVAECPHTRARAGLLHTAHGTIETPVFMPVGTQATVKGLPHRDLAEELGVRILLANTYHLYLRPGHELIRKMGGLHRFMSWPNAILTDSGGFQVFSLSGLRKITEHGVVFQSHLDGSLHTFTPESTVDVQLAFGSEIT

SEQ ID NO: 53462 - protein, 407 aa, unidentified
  source 1..407: note = Sulfotelmatobacter kueseliae
  REGION 1..407: note = tr|A0A2U3KVA5|A0A2U3KVA5_9BACT Queuine tRNA-ribosyltransferase OS=Candidatus Sulfotelmatobacter kueseliae OX=2042962 GN=tgt PE=3 SV=1
MSFSFNIEKASGRARAGRLVTPHGEIETPVFMPVGTLASVKGVPQDTLEELGTQIILGNTYHLYLRPGVETVRRMGGLHGFMAWPRAILTDSGGFQVFSLNQLRKVTEEGVDFRSHLDGSSHFFSPESAMDAQIGLGADIIMAFDECTEYPADHDRMRASMELTLRWAARSKKCFEAHKSEVPWSRPRTSDVGPQQERIPRFARNDNEEGQNELRTGNWQLATGGCSTQSLFGIVQGGMDRELRKESAERTIEIGFPGYAIGGLSVGEPRALTREIVESTLEHLPADRPRYLMGVGTPEEIVEYASLGVDMMDCVLPTRAARHGLLFMSEGKISIKQARYAQDQGPLDPNCGCRVCRRYSRAYLRHLYASNEVLAQVLNTIHNLSFYLDTMRRVRHSISLGEVRFPF

SEQ ID NO: 53463 - protein, 396 aa, unidentified
  source 1..396: note = Sulfotelmatobacter sp.
  REGION 1..396: note = tr|A0A2N9N8F5|A0A2N9N8F5_9BACT Queuine tRNA-ribosyltransferase OS=Candidatus Sulfotelmatobacter sp. SbA7 OX=2043160 GN=tgt PE=3 SV=1
MSVHLQIEATRGSARAGKLLTPHGEVETPVFMPVGTLGSVKGVSQDVLEELGVEILLSNTYHLYLRPGVETVRQMGGLHRFMAWDRAILTDSGGFQVFSLNDLRKVSEEGVAFRSHLDGSPHFLSPEKAMEIQIGLGADIIMAFDECTEYPADAQRARASMELTLRWAGRCKNYFEEHKGEVPWASGRQPSALDKETQVLRFAQDDNLGIGHSRTQSLFGIVQGGMDRDLRRESAERTIDIGFPGYAIGGLSVGEPRELTRDIVESTLEHLPSNQPRYLMGVGTPEEIAQYAQAGVDMMDCVLPTRAARHGLLFTSEGKVSIKQVRYAQDDNALDPACDCRVCQRYSRAYLRHLYASNELLAQVLNTVHNLHYYLATMRTVRAWIRAGSGTAPQVS

SEQ ID NO: 53464 - protein, 411 aa, unidentified
  source 1..411: note = Sulfotelmatomonas gaucii
  REGION 1..411: note = tr|A0A2N9LAG6|A0A2N9LAG6_9BACT Queuine tRNA-ribosyltransferase OS=Candidatus Sulfotelmatomonas gaucii OX=2043161 GN=tgt PE=3 SV=1
MTPSFQLIAQTAAGGRRGRLHLPHATVETPVFMPVGTAGSVKAVAQETLESLGAEIILGNTYHLYLRPGHEAIRRMGGLHKFMSWPRALLTDSGGFQVFSLNELRKVSEEGVHFRSHLDGSSHFFSPEHSIEVQIALGADIIMAFDECTEYPADRNRAEESLRFTMAWARRSLDYFRAHKDEVPWHAQGEFHQQGVPHPRGPRGQVLARGVDPSSAWVGSRNPQQLSARTQSLFGIVQGGMYPDLRRQCTEQLIEMEFDGYAIGGLSVGEPRDLTLEMISEVLPLLPQDKPRYVMGVGYPDEIEMYARMGVDMMDCVLPTRAARHALLFTSEGRLNIKNKQYAEDQSPPDPVCDCPVCRRYTRAYLRHLVQAGEPLAATLNSIHNLAFYLGIMQRVRGSLESAAAPMTSDH

SEQ ID NO: 53465 - protein, 373 aa, Sulfuricurvum sp.
  REGION 1..373: note = tr|K7S449|K7S449_9HELI Queuine tRNA-ribosyltransferase OS=Candidatus Sulfuricurvum sp. RIFRC-1 OX=1249480 GN=tgt PE=3 SV=1
MEFKVDATCGKARACTITTAHSTIQTPIFMPVGTVGSVKALDMADMTELLDTQIILANTYHMYLRPGDETVAKLGGLHGYTTYPNSFLTDSGGFQAFSLSDISKPTESGIEFRSHIDGSKHFFTPEKVIDIQNNLNSDIMMILDDLVALPATQERIKTSIQRTTQWAQQSIDYHRNNQTKGIGVNQNIFAIIQGGTDFNFRTQSAEELCAMDYDGFAIGGLSVGEANNLMYDTVEHTTPLMPADKPRYLMGVGTPEDLVENIERGVDMFDCVMPTRNARNGTLFTTFGKVNIKGARYKFDAEPIDPECQCYTCRRYSRAYLHHLFRSKELTYFRLASLHNLHYYLWLVKQARVAILSGQFIQFKKDFYARRQS

SEQ ID NO: 53466 - protein, 375 aa, unidentified; identical to SEQ ID NO: 53302
  source 1..375: note = Sumerlaea chitinovorans
  REGION 1..375: note = tr|A0A2Z4Y595|A0A2Z4Y595_9BACT Queuine tRNA-ribosyltransferase OS=Candidatus Sumerlaea chitinovorans OX=2250252 GN=tgt PE=3 SV=1

SEQ ID NO: 53467 - protein, 386 aa, unidentified
  source 1..386: note = Sungbacteria bacterium
  REGION 1..386: note = tr|A0A1G2K5P2|A0A1G2K5P2_9BACT Queuine tRNA-ribosyltransferase OS=Candidatus Sungbacteria bacterium RIFCSPHIGHO2_01_FULL_47_32 OX=1802264 GN=tgt; PE = 3 SV=1
MDKFSFSITQTSKKSRARTGTLRTPHGSVETPSFVAVGTHASVKALGPDDVHMADSSIVLANTYHLFLSKTHAVIKKTGGLSRFMRWDGPTMTDSGGFQVFSLGFAKDHDIGRNSSIFPGENLKKISKAKDIKESQHVKILDEGAVFRLPDGTRTVLTPEKSISIQEDIGADIMFAFDECTSPLATWEYSKEAMERTHQWATRSLEAKKRGDQALYGIVQGGEWDDLREESAQKISSLPFDGFGIGGSLGKTKKRMFELIGFVHERLPEQKPRHVLGVGYPEDIPELIRLGADTFDCVAPTREARNGTLYIKEGRLSVEKAENREDFSPIDSSCVCFTCQNFTRAYLHHLFRSRELLYFRLASIHNLSYINAITRDIREKIKQGRF

SEQ ID NO: 53468 - protein, 383 aa, unidentified
  source 1..383: note = Sungbacteria bacterium
  REGION 1..383: note = tr|A0A1G2L7E0|A0A1G2L7E0_9BACT Queuine tRNA-ribosyltransferase OS=Candidatus Sungbacteria bacterium RIFCSPLOWO2_01_FULL_47_10 OX=1802276 GN=tgt PE=3; SV = 1
MKFIITHKSKSSMARVGVLETAHGRIETPAFVTVGTKASVKSLGPDDLEMVGTSVVLANTYHLYAAKTYDVIRKAGGLSRFMNWNGITMTDSGGFQVFSLGFSKDHDIGRSSTLFPGEDLQKMVRAEAVKESQYIKIMDEGVVFRMPDGTRTVLTPEKSIQIQEAIGADIIFSFDECTSPLASKEYSAEAMGRTHRWAERCLEAKTREDQAIFGIIQGGEWDDLKEESVRAISGMPFDGFGLGGALGKTKERMWELVDFINKRLPEEKPRHLLGVGYPEDIPKAIRRGVDTFDCVAPTREARNGTLYVKNGRISIQKAEYREDFSPIEEGCDCYTCKNFTRTYLWHLAREKELLFYRLASIHNLYFTNNCVREIRERIKRGEV

SEQ ID NO: 53469 - protein, 408 aa, unidentified
  source 1..408: note = Symbiobacter mobilis
  REGION 1..408: note = tr|U5N7S4|U5N7S4_9BURK Queuine tRNA-ribosyltransferase OS=Candidatus Symbiobacter mobilis CR OX=946483 GN=tgt PE=3 SV=1
MHGTNVCVDGTPLRFDIQATDPLQATDTGSQARAGVLTLRRGVVHTPAFMPVGTYGTVKGVLPNALEAMGAEIILGNAFHLWLRPGLEVIERFGGLHAFEGWHRPILTDSGGFQVWSLGAMRKLTEEGAHFASPINGDKLFLSPEVSIRIQTVLDADICMQLDECTPYRDPQAPERLTTERQARTSMELSLRWARRSQDAFRALENPNALFGIVQGGMYENLRSASVDALIAMDFPGYAIGGVSVGEPKEEMLRILAHTPRLLPAHKPRYLMGVGTPEDLVEGVLQGVDLFDCVLPTRNARNGTLLTRYGNLKIRNARYKSDPAPIDEGCTCYACAGRTALDSSVRGGFSRAYLHHLDRCGEMLGPMLASIHNLHYLVQLMREMRTAILESRVESFRTRFAQDRLRGV

SEQ ID NO: 53470 - protein, 367 aa, unidentified
  source 1..367: note = Synechococcus spongiarum
  REGION 1..367: note = tr|A0A0G2HLS6|A0A0G2HLS6_9SYNE Queuine tRNA-ribosyltransferase OS=Candidatus Synechococcus spongiarum SP3 OX=1604020 GN=tgt PE=3 SV=1
MRHRCPVTQARLGHLQTPHGPVDTPRFMPVGTRATVKGLTTEQLGQTQAQMVLANAYHLHLQPGEDCVAAAEGLHRFMAWDGPILTDSGGYQVFSLAGCNRVDDHGVTFRSPRDGRTIRMTPERSMAIQNRLGADVIMAFDQCPPAQASRQEVEAATDRTHRWLERCIAAHSNRDQALFGIVQGGRHGELRRWSAATVCSHDLPGFAIGGVSVGESTADIHQVVRLVSPLLPEHKPRYLMGVGSLAEMAQAVAQGVDLFDCVLPTRLGRHGTALVQGDTWSLKRAGFRNDHRPLDGSCPCWTCRHHSRAYLHHLIHSQELLAASLLSLHNLTHLQRFCNAMGQAIVEGTFAERFTPWDSASPAANTW

SEQ ID NO: 53471 - protein, 373 aa, unidentified
  source 1..373: note = Synechococcus spongiarum
  REGION 1..373: note = tr|A0A171DHW1|A0A171DHW1_9SYNE Queuine tRNA-ribosyltransferase OS=Candidatus Synechococcus spongiarum OX=431041 GN=tgt PE=3 SV=1
MGFCFAVRHRCPVTQARRGHLQTRHGPVDTPRFMPVGTSATVKGLTTEQLGRTRAQMVLANAYHLHLQPGEDRVAAAGGLHRFMAWDGPILTDSGGYQVFSLAGCNQVEDHGVTFRSPRDGRTIRMTPERSMAIQNRLGADVVMAFDHCPPAQASRQEVETATDRTHRWLERCIAAHNNRDQALFGIVQGGRHGDLRRWSAATVCSQDLPGFAIGGVSVGESTAHIHQVVKLVSPLLPEHKPRYLMGVGSLAEMAQAVAQGVDLFDCVLPTRLGRHGTALVQGDTWSLKRACFRDDHRPLDDSCPCWTCRHHSRAYLHHLIHSRELLAASLLSLHNLTHLQRFCNAMGQAIVEGTFAERFTPWDSASPAANTW

SEQ ID NO: 53472 - protein, 369 aa, unidentified
  source 1..369: note = Syntrophonatronum acetioxidans
  REGION 1..369: note = tr|A0A424YHC6|A0A424YHC6_9FIRM Queuine tRNA-ribosyltransferase OS=Candidatus Syntrophonatronum acetioxidans OX=1795816 GN=tgt PE=3 SV=1
MAVTYQLIKRCSKTGARVGKLHTPHGTVDTPVFMPVGTQGTVKAMTPEELESLGIQIILSNTYHLYLRPGHQVIEEAGGLHNFMNWKHPILTDSGGFQIFSMGNLRKLTEEGALFRSHIDGSEHFLSPELAVEIQNSLGSDIAMVLDECPPYPCDYEYLQKSLERNNRWAERCIKAHKRKDQALFAIIQGGVYRELRRESAQALLKLDLPGYALGGLSVGEPKDLMYQVLEDTVPLLPDNKPRYLMGVGTADCLVEGVARGVDMFDCVMPTRIARNGRVMTREGYLTVRNAEYARDHTPLEEDCDCYTCRNYTRAYIRHLIKAGEILGLRLTTLHNLHYLNTLMFQARKAIIEDRFDKFKESFFSYYKC

SEQ ID NO: 53473 - protein, 369 aa, unidentified
  source 1..369: note = Syntrophosphaera thermopropionivorans
  REGION 1..369: note = tr|A0A4R5JSA3|A0A4R5JSA3_9BACT Queuine tRNA-ribosyltransferase OS=Candidatus Syntrophosphaera thermopropionivorans OX=2593015 GN=tgt PE=3 SV=1
MFKFQLEKVSNKARAATITTSHGKIKTPVFMPVGTVGTVKAMSPEELEKCHTQIILGNTYHLYMRPGYELIQQAGGLHKFIAWKHPILTDSGGFQVMSLAGLRKITNEGVKFQSHLDGSTHFFTPESVIAIQEALGADIIMSFDECPPFPSTREYVEKSLQRTLKWAERGKAAFHNYKNQALFGIVQGGIYEDLREKAAKTLMEMDFPGYAIGGLAVGEDKADMFRITNFLNDILPADKPRYLMGVGTPSDLLLNIANGVDMFDCVMPTRNARKGSIFTRQGKMIIKAARYKDDFQPIDKQCGCYTCKHFSRAYIRHLITMNEILGMRLTTIHSLYFYNELMEMARQAIMEDRYEEFLAEMLPVLDRVI

SEQ ID NO: 53474 - protein, 370 aa, unidentified
  source 1..370: note = Tachikawaea gelatinosa
  REGION 1..370: note = tr|A0A090AM67|A0A090AM67_9ENTR Queuine tRNA-ribosyltransferase OS=Candidatus Tachikawaea gelatinosa OX=1410383 GN=tgt PE=3 SV=1
MKFKIDAICGKARCGRLIINNNVIDTPTFMPVGTYGTIKSLSIDEITNTGSQIILCNALHLFLRPGTKIIKSYNGLHNFIQWKKPILTDSGGFQVFSLKKFRRINEKGVKFKSPINGEYFFLNPEKSISIQNDLGSDIFMIFDECTSYPVTWKDAKKSMERSLKWAERSKICFQTITTKKKLLFGIIQGSIYKDLRLFSLKELLDINFDGYAIGGLSVGEPKKDINNILSYICSKIPSKKPRYLMGIGKPEDIITAVLNGVDMFDCVIPTRNARNGYLFTNKKIIKIRNTKYKTDLRPLDYECLCYTCQNYSRGYLHHLDKCNETLGMRLNTIHNLHYYQFFMRNIRMAIINNNLEKFINDFYIKNNILR

SEQ ID NO: 53475 - protein, 423 aa, unidentified
  source 1..423: note = Tagabacteria bacterium
  REGION 1..423: note = tr|A0A2M8L8G5|A0A2M8L8G5_9BACT Queuine tRNA-ribosyltransferase OS=Candidatus Tagabacteria bacterium CG10_big_fil_rev_8_21_14_0_10_40_13 OX=1975022; GN = tgt PE=3 SV=1
MTRLWRLKKLWRAKKFPKRRQIVNIAPTAKKPTGLNMIEFKILKRSKKSRARLGLLKTAHGEVETPSLVPVATQAAVKTLTSEEAVKAGCQILIANTFHLHLKPGEKIIKSGGGIHKFMNWPHPLMTDSGGFQVFSLGFGKDTGVGKIVRDRISNKIEKGDKSKGVKITDKGAWFRSPLDGSKLFLGPEESMKIQQAIGADIMFSFDECTSPLATRGYIEKSLERTHRWAQICLKENEKPPSPRLRRSKQALFGIVQGSYYKDLRRRSAEFINSLGFDGFGIGGDLGKTKTDSRNILRWTIPYLDKNKPRHLLGIGHPEDIEPIIKEGIDTFDCIAPTHYGRRGIAFVKNGRLNLNQSKFLRDKKPLDSNCDCFVCRNYKRNYICHLFRAKEITAMSLLTFHNLHFFNNYVAGVRKKIRQEKI

SEQ ID NO: 53476 - protein, 381 aa, unidentified
  source 1..381: note = Tagabacteria bacterium
  REGION 1..381: note = tr|A0A1G2LRS5|A0A1G2LRS5_9BACT Queuine tRNA-ribosyltransferase OS=Candidatus Tagabacteria bacterium RIFCSPLOWO2_01_FULL_39_11 OX=1802295 GN=tgt PE=3; SV = 1
MIKFEILKKSKISGARVGILKTPHGEIETPSLVPVATRAAVKTLSSEEVKKTKSQMLIANTFHLHLKPGEKIIKQAGGIHKFMNWQGPLMTDSGGFQVFSLGFGHDLQIGKILKYFPGNSEKLIQEDNRPKFLKITEEGVYFRSPLDGRKLFLGPKESIKIQEKVGADIIFAFDECTAPLVSFRYAEKSLERTHDWAKICFKTKKSGQAIFGIIQGSRFKVLREKSADFINFLGFDGFGIGGDLGADKQTMGNILKWVVPRLEESKPRHLLGIGYLEDIEMIIKNGIDLFDCTVPTHYARRGIAFTGPGKLNLKQSDFLKDKKPLDSRCACFVCKNYKRNYISHLFRAKEITALKLLTFHNLFFFNSFVENIRKKIKQGKI

SEQ ID NO: 53477 - protein, 397 aa, unidentified
  source 1..397: note = Taylorbacteria bacterium
  REGION 1..397: note = tr|A0A1G2M6H9|A0A1G2M6H9_9BACT Queuine tRNA-ribosyltransferase OS=Candidatus Taylorbacteria bacterium RIFCSPHIGHO2_01_FULL_46_22b OX=1802301 GN=tgt; PE = 3 SV=1
MGNSFRIESSTDGSLARAGVIETAHGAIETPAFIPVGTKATVKAVTPEALGTLRTQAVLANTYHLYLQPGPELLESAGGLGKFMGWHGPTMTDSGGFQVFSLGAAFGKRLSKFGNRKEESEKIEESLPLAKVDDEGVTFRSHRDGSEHRFTPERSIEIQHAIGADIIFAFDECPSPETDHDYQREAMERTHRWALRSLARHKELGEGSAGDQLLFGIVQGGRFEDLRRESAKAIGEMGFDGFGIGGTFLKEDMGNAVRWVNELLPKDKPRHLLGIGEPLDVLIAIENGCDTFDCVAPTRAGRTGTIYTGEGKINIGNAKFEKDFSALEVGCDCYTCKNFTRAYLHHLFDAHEMLAATLASIHNLRFIVRLVENAREAIVRGEFKKFSEEFLSRYIKI

SEQ ID NO: 53478 - protein, 395 aa, unidentified
  source 1..395: note = Taylorbacteria bacterium
  REGION 1..395: note = tr|A0A1G2P5I2|A0A1G2P5I2_9BACT Queuine tRNA-ribosyltransferase OS=Candidatus Taylorbacteria bacterium RIFCSPLOWO2_12_FULL_47_20 OX=1802335 GN=tgt PE=3; SV = 1
MIFEVKERLRGSMARAGVIKTAHGVIETPAFVAVGTKATVKALTPREIADCGANVVLANTYHLYLEPGIEILKSAGGLGKFMGWGGPTMTDSGGFQIFSLSGKNRGLKVSSKSGESLEDGEESKTAGGGRSENLVKVSEDGVKFRSFIDGSEHFFTPEKSIEIQNAIGADIIFAFDHFEYPDAPYDKHEASLERTSRWAKRCLERHSAALEKKEAPEDQALFGIVQGGRHEALRKRSAREIAGLEFSGFGIGGSFDKEDMGTAVRWVNEILPEDKPRHLLGIGEPQDIVEAVKNGCDTFDCVAPTRAGRTGTLYTSKGKINIKNAAFRNSFERIDPACDCYTCSNFTRAYLSHLYRNGEMLAGVLGTIHNLKYIIGVTKSLRESILKGDESIFSN

SEQ ID NO: 53479 - protein, 401 aa, unidentified
  source 1..401: note = Tectomicrobia bacterium
  REGION 1..401: note = tr|A0A1F7T619|A0A1F7T619_9BACT Queuine tRNA-ribosyltransferase OS=Candidatus Tectomicrobia bacterium RIFCSPLOWO2_12_FULL_69_37 OX=1802343 GN=tgt PE=3; SV = 1
MSAPVRFQVRASEPGGLARCGRLETPHGAFETPAFLAVGTQATVKTLDPRDLREAGCRIILANAYHLALRPGAERISRLGGLHRFMGWEGPILTDSGGYQLFSLAPLARATDEGVDFQSHLDGARQTLTPERAVEIQEALGPDIAMVLDEPLGFPHTREEAEAALARTTAWARRSRSAQRRSDQALFGIVQGGAFEDLRRRSAEELVPLDFPGYAVGGLCLGENKRETDALLAAAADVLPEEKPRYVMGMGTPADLIRSVRLGADMFDCVMPTRHARRGNLFTWGGRLSIKRNEFAEDPSPIDPACGCPACRGGFSRAYLRHLFQAEETLGQRLMTLHNVFFYQELAGRMRERIRAGGFASWAAETLAGPLGQDPEGPPRGQGLRRGPAGKLLRPTPPGED

SEQ ID NO: 53480 - protein, 401 aa, unidentified; identical to SEQ ID NO: 53479
  source 1..401: note = Tectomicrobia bacterium
  REGION 1..401: note = tr|A0A1F7T531|A0A1F7T531_9BACT Queuine tRNA-ribosyltransferase OS=Candidatus Tectomicrobia bacterium RIFCSPLOWO2_02_FULL_70_19 OX=1802342 GN=tgt PE=3; SV = 1

SEQ ID NO: 53481 - protein, 368 aa, unidentified
  source 1..368: note = Tenderia electrophaga
  REGION 1..368: note = tr|A0A0S2TBN3|A0A0S2TBN3_9GAMM Queuine tRNA-ribosyltransferase OS=Candidatus Tenderia electrophaga OX=1748243 GN=tgt PE=3 SV=1
MKFDLLTSDGAARRGTLNFARGTVQTPAFMPVGTYGTVKAMTPEELSELGAEIILGNTFHLMLRPGTEIIRAHGDLHDFMHWQGPILTDSGGFQVFSLGEMRKITEAGVTFRSPVNGDKVFLDPERSMQVQRALGADIVMIFDECTPYPASEQQARASMELSLRWAARSRTAHGDNPAALFGIIQGGMYPELRAVSLDGLVEIGFDGYAIGGLSVGESEAERIMILDHLQPRLPLDKPRYLMGVGRPEDIVEAVRRGVDMFDCVMPTRNARNGHLFTQQGEIRIRNARYEHDTRPLDEACGCYTCRNYSRAYLRHLDKCREILGSRLNTIHNLYYYQELMRDLRDAIEAGELEDFVTRFYAKRLAGMS

SEQ ID NO: 53482 - protein, 376 aa, unidentified
  source 1..376: note = Terasakiella magnetica
  REGION 1..376: note = tr|A0A1C3RLG6|A0A1C3RLG6_9RHIZ Queuine tRNA-ribosyltransferase OS=Candidatus Terasakiella magnetica OX=1867952 GN=tgt PE=3 SV=1
MTTDFNFELLGTDGTARRGRVHTAHGAINTPAFMPVGTAATVKAMMPESVAETGAEILLGNTYHLMLRPGAERIEKLGGLHKFMNWDKPILTDSGGFQVMSLAQLRKITEEGVRFRSHIDGAYYDLTPESSTEIQRQLDADITMCFDECPALPASKERVNEAMQLSMRWAKRSRDAFVERQGYGQFGIVQGGTEEDLRKESVEKLVDIGFEGYAIGGLAVGEGQELMFQTLDYTTPVMPVDKPRYLMGVGKPDDLVGAVARGVDMFDCVLPSRSGRTAEAWTRRGSVNLRNARHKDDPRPLDEHCTCPCCKSYSRAYLYHLTKTKEILGLMLLTWHNLHYYQELMAGMRTAIEEGTFEKFVVDFHALREQGDIERV

SEQ ID NO: 53483 - protein, 359 aa, unidentified
  source 1..359: note = Termititenax persephonae
  REGION 1..359: note = tr|A0A388TES5|A0A388TES5_9BACT Queuine tRNA-ribosyltransferase OS=Candidatus Termititenax persephonae OX=2218525 GN=tgt PE=3 SV=1
MKFTVVKKSVKSAARAGLLETAHGVIETPVFMPVGTLGTVKSLTPDLVAEQGAQIILANTYHLFLRPGADLIARAGGLHQFMHWDKPLLTDSGGFQVFSLAKLRRIDRDGVEFQSPLDGGARHKFTPELVVDIQRQLGSDIMMPLDVCSNPHDPKEKIAEDLQITLAWARRARLAARNGEAAGRPALFGIVQGGLHEDLRQEAAARLRELDFPGYAVGGVSVGEPEEDLYRIAQSTAALLPVEKPRYLMGVGLPQNLLQCVPFGIDMFDAVLPTRLARHNSFFTPLGLASILNAAYAEDWAPLVDGCDCYACRHFSRAYLRHLARAKEILAIVLLTMHNIRYLVNLMRDLRQKILCGEV

SEQ ID NO: 53484 - protein, 356 aa, unidentified
  source 1..356: note = Termititenax aidoneus
  REGION 1..356: note = tr|A0A388T7E3|A0A388T7E3_9BACT Queuine tRNA-ribosyltransferase OS=Candidatus Termititenax aidoneus OX=2218524 GN=tgt PE=3 SV=1
MKFTLVHKSARSGARAGLLETVHGAIETPVFMPVGTLGAVKALTPELTAEQGAQIILSNTYHLFLRPGADLIARAGGLHKFMHWDKPILTDSGGFQVFSLAKLCKITQDGVEFRSPFDGGVKHKFTPELVVDIQRQLGSDIMMPLDVCSPHTAAKEKVAEDLRLTLDWEKRALEHFAQNQVQAFFGIVQGGLHEDLRQESAEYLRGLDFAGYAIGGVSVGEPEADLYRVAQYTAALLPPDKPRYLMGVGLPQNLQQCVPFGIDMFDAVLPTRLARHNTFFAPDGLENILNAKSAADFAPLVETCDCYACRHFSRAYIRHLAQAKEILAIILMTIHNIRYLVNLTRDLRRKILNDEI

SEQ ID NO: 53485 - protein, 350 aa, unidentified
  source 1..350: note = Terrybacteria bacterium
  REGION 1..350: note = tr|A0A2M8L9Z2|A0A2M8L9Z2_9BACT Queuine tRNA-ribosyltransferase (Fragment) OS=Candidatus Terrybacteria bacterium CG10_big_fil_rev_8_21_14_0_10_41_10 OX=1975026 GN=tgtPE=3; SV = 1
GFIKSLDDKEHKLATPEITISNTFHLYVTGKVNEVKKAGGLHKRFKIKNPIMTDSGGFQVFSLGWGKIHKIGKISSTILLSTSNVDSSKNPVKITSNGAMFTYDGKKYALNPKKSIKIQEDLGADIIFAFDECTSPLHDYEYNKKSLIKTHKWAAECLKAKKKNGQMLFGIVQGGIYEDLRKESSKAIGEMSFDGFGIGGSFGEKQMGKVIEWALSGLPEDKPKHLLGIGAIEDIFIGVKKGIDTFDCVIPTREARHGALYSKAGRLDIKKGLFAKDRKAVEKGCECFACAKGLKRKDFHLLFNADKEKARKLATLHNIFFYKTLFARIREAINSGKKNALDKLEKEYRV

SEQ ID NO: 53486 - protein, 385 aa, unidentified
  source 1..385: note = Terrybacteria bacterium
  REGION 1..385: note = tr|A0A1G2PFM9|A0A1G2PFM9_9BACT Queuine tRNA-ribosyltransferase OS=Candidatus Terrybacteria bacterium RIFCSPHIGHO2_01_FULL_43_35 OX=1802361 GN=tgt; PE = 3 SV=1
MSMISFQIIKKSKRSRARIGILETEHGFVETPSLVPVATQAAVKTLSSQEVLQTRSQMLIANTFHLHLKSGEKYVKQAGGLHKFMNWTRPLMTDSAGFQVFSLGFGSDLQVGKVTKYFPRDRNKRDVITKNSQPKTVKITPDGVFFRSPLDGRQLFIGPKESMAIQQALGADIIFAFDECTSPFSTPAYVKDALKRTHKWAKTCLESKKSRQALFGIVQGSKYKELRIQSAKYISSLPFDGFGIGGDLGDSKETMKKILNWTIPYLSDRKPRHLLGIGYLEDMENIIKAGIDLFDCTVPTHYGRRGIAFTSVGKLNMRQVRFLTDKKPLDPKCSCVVCQEYRRNYISHLFRAGEISGMKFLTLHNLYYFNTFVENIRENIKNGKI

SEQ ID NO: 53487 - protein, 380 aa, unidentified
  source 1..380: note = Thermochlorobacter aerophilum
  REGION 1..380: note = tr|A0A395LZX9|A0A395LZX9_9BACT Queuine tRNA-ribosyltransferase OS=Candidatus Thermochlorobacter aerophilum OX=1868324 GN=tgt PE=3 SV=1
MQFELQKKDLHSAARAGKIITAHGEILTPVFMPVGTRGAVRAVEPRELVEIGAQIILANTYHLYLRPSTDLLFKAGGLHKFMSWSKPILTDSGGYQVFSLSELRQVSEEGVIFKSHLDGSKHIFTPESVIETQRYIGSDIMMVLDECPPYNAEREYIKASSELTLRWAARAQAHLMKTAPLYGYEQTLFAITQGGTFDDLRQESTKRLVEMDFEGYAIGGLAVGEPEEAMYRMLELSHPLLPEHKPRYLMGVGTPINILNAIERGIDMFDCVMPTREGRNGRVYTRYGTLNIRAAKYADDFRSLDEGFENYVCQNFSRAYIRHLLNVNEILGLQLCSLQNLSFFLWLTRTAREHILNGTFKAWKEEFIEQFQSGEKVGMI

SEQ ID NO: 53488 - protein, 380 aa, unidentified
  source 1..380: note = Thermochlorobacteriaceae bacterium
  REGION 1..380: note = tr|A0A081SJ32|A0A081SJ32_9BACT Queuine tRNA-ribosyltransferase OS=Candidatus Thermochlorobacteriaceae bacterium GBChlB OX=1519464; GN = tgt PE=3 SV=1
MSFDLIATDAQSDARAGKLTTAHGEILTPIFMPVGTRASVRAIEQRELHEMGAQIILGNTYHLYLRPSTQILHKAGGLHKFMSWTKPILTDSGGYQVFSLSDLRHIDEQGVVFKSHLDGSKHHFTPESVVDIQRLIGSDVMMVLDECPPHDAPKEYIKQSNDLTIRWAARAQHHAANTTPHYGYDQTLFAITQGGTFDDLRADSTKRLVGMNFDGYAIGGLAVGESEDAMYRMIELSHPLLPQTKPRYLMGVGTPTNILNAIERGVDMFDCVLPTREGRNGRVYTRYGAINIRAAKYADDFRPLDDGFENYVCQQFSRAYIRHLLNVDEIFGLQLCSLQNISFFLWLTREARAQILAGRFKAWKEEFLERYRSGEKLGVI

SEQ ID NO: 53489 - protein, 380 aa, unidentified
  source 1..380: note = Thermofonsia Clade
  REGION 1..380: note = tr|A0A2M8PF35|A0A2M8PF35_9CHLR Queuine tRNA-ribosyltransferase OS=Candidatus Thermofonsia Clade 1 bacterium OX=2364210 GN=tgt PE=3 SV=1
MFKFELQAQSGQARAGIFHTPHGAIPTPVFAPVGTQATVKAMQPRELYELGATLILANTYHLYLRPSDTLIARLGGLHRFMAWERPILTDSGGFQVFSLDGLRRIDEDGVTFRSHLDGSIHRFTPEKSIQIQHNLGADVIMCFDECPKPHNRAEVRAACDRTHAWAVRCLEAHLRHGDPNRQALFGIVQGGIFPDLRAESVAFLTALDFVGYAIGGLAVGETKSEMLATLDYTVPLLPADRPRYLMGVGSPEDLVNGVARGVDIFDCVLPTRMARHGTALTRQGRLNLRNLEHAEDSRPLEADCACYTCTHFSRAYLRHLVKANELLGHQLLTLHNLHLLLTLMREMRAAILGGTFEAYAANFLAAYRPKSKEASAPPSL

SEQ ID NO: 53490 - protein, 373 aa, unidentified
  source 1..373: note = Thermofonsia Clade
  REGION 1..373: note = tr|A0A2M8QAL0|A0A2M8QAL0_9CHLR Queuine tRNA-ribosyltransferase OS=Candidatus Thermofonsia Clade 3 bacterium OX=2364212 GN=tgt PE=3 SV=1
MCFSFALTCTDGRARAGVLHTPHGAVRTPAFMPVGTQATVKAIPPRDLEELGAQIILANTYHLYLRPGDELIARRGGLHRFMSWPHPILTDSGGFQVFSLSEMRKIDDDGVTFKSHLDGSMHRFTPEKSIRIQENLGADIIMCFDECPPPTDREYNAIALARTHAWAARCREAHTRTDQALFGIAQGGIFRDLREQSARFLTSLDFPGYAIGGLAVGEEKADMFQVIAWMDDALPAHKPRYLMGVGEPTDLIRAVQRGVDMADCVLPTRLARHGAAFTRDGRINMRNRIYAEDERPIDPECDCYTCRNFSRAYIRHLLQAGEILGLYLMSVHNIAFLLNLMRAAREAIVQQRFAAFAQNWLARYERTENPTHL

SEQ ID NO: 53491 - protein, 381 aa, unidentified
  source 1..381: note = Thermokryptus mobilis
  REGION 1..381: note = tr|A0A0S4ND72|A0A0S4ND72_9BACT Queuine tRNA-ribosyltransferase OS=Candidatus Thermokryptus mobilis OX=1643428 GN=tgt PE=3 SV=1
MLKFELVAVDGKTSARAGLIYTDHGIIETPVFMPVGTQATVKAVEQRELIEIGAQIILGNAYHLYLRPGIEVIRKAGGLHKFMNWERAILTDSGGFQIFSLAQFRKITKEGVRFQSHIDGSYHFFTPESVIEIQRVLGSDIMMCLDECTPYPCDFEYAFKSNQLTIEWAKRAKEKFEKTEPLYGHSQFLFGIVQGSVYPEIRAKSAEELIKLDFDGYAIGGLAVGEPVDVMYQITEFTASLLPVNKPRYLMGVGTPENIIESISRGIDMFDCVIPTRNGRNATLYTRNGKFSIKNAVYKDDFSPVDPECDCYTCKNFTRAYLRHLFNADEILALQLASIHNLAFYFWLVQEARRHIISGDFAEWKNHFLVRSQNKTNSKTD

SEQ ID NO: 53492 - protein, 368 aa, unidentified
  source 1..368: note = Thiodiazotropha endoloripes
  REGION 1..368: note = tr|A0A1E2UQV8|A0A1E2UQV8_9GAMM Queuine tRNA-ribosyltransferase OS=Candidatus Thiodiazotropha endoloripes OX=1818881 GN=tgt PE=3 SV=1
MKFSIFQTDGAARRGQLSFPRGSIETPAFMPVGTYGTVKAMTPEELVDLGAEIILGNTFHLMLRPGTEVIRAHGDLHDFMHWQKPILTDSGGFQVFSLGDMRKITEKGVDFRSPIDGSKVFMGPEESMQVQRKLGSDIVMVFDECTPYPATEEEAKQSMELSLRWAGRSRDAHGDNPSALFGIVQGGMYEGLREASLEGLKQIGFDGYAVGGLSVGEPPADRWRVLDHLSSRLPGDKPHYLMGVGTPEDIVESVARGIDMFDCVMPTRNARNGHLFTHQGAVRIRHAAHQYDNSPVDPLCECYTCRNYSRSYLRHLDKCNEILGARLNTIHNLHYYQKLMRDIRGAIESGRFEAFRREFYEMRTGDGA

SEQ ID NO: 53493 - protein, 371 aa, unidentified
  source 1..371: note = Thiodictyon syntrophicum
  REGION 1..371: note = tr|A0A2K8UFU3|A0A2K8UFU3_9GAMM Queuine tRNA-ribosyltransferase OS=Candidatus Thiodictyon syntrophicum OX=1166950 GN=tgt PE=3 SV=1
MEFDLLATQDLARRARLSFPRGVVETPAFMPVGTYGTVKAMTPEELIALGAQIVLGNTFHLMLRPGVEVIRRCGDLHRFMHWEGPILTDSGGFQVFSLGELRKITEAGVRFRSPVDGSPVFLGPEESMAVQRALGSDIVMIFDECTPYPADFDTAGASMELSLRWAARSRAAHADNPAALFGIVQGGMHESLRERSLAGLVEIGFDGYAIGGLSVGEPEADRLRVLDFLADRLPADRPRYLMGVGTPEDIVAAVCRGIDMFDCVMPTRHARNGWLFTHQGTVKIRNAVHRTDEGPLDPRCDCTTCRNYSRAYLYHLDKCHEILGARLNTIHNLHYYQALMRGLRDAIAAGTLEGFIAEFRDLRAPRAAAPG

SEQ ID NO: 53494 - protein, 167 aa, unidentified
  source 1..167: note = Thioglobus sp.
  REGION 1..167: note = tr|A0A432TXJ9|A0A432TXJ9_9GAMM tRNA guanosine(34) transglycosylase Tgt (Fragment) OS=Candidatus Thioglobus sp. OX=2026721 GN=tgt PE=4 SV=1
LVDMDFDGYAIGGLSVGEPKDEMIKVLDYLPEQLPDDKPRYLMGVGTPKDLVEAVERGIDMFDCVMPTRNARNGYLFTSVGVVKIRNAQYKLDTRPLDENCGCYTCQNYSRSYLHHLQRKNEILGARLSTIHNLYYYQDLMQQMRDAIEHNAFSEFKQNFYALQEGK

SEQ ID NO: 53495 - protein, 368 aa, unidentified
  source 1..368: note = Thioglobus sp.
  REGION 1..368: note = tr|A0A432U9I0|A0A432U9I0_9GAMM Queuine tRNA-ribosyltransferase OS=Candidatus Thioglobus sp.; OX = 2026721 GN=tgt PE=3 SV=1
MKFKLNNTDQKARRGQMTFERGEVETPAFMPVGTYGTVKAMTPEEVHEIGAQIILGNTFHLDITPGTQVIEAHGDLHDFMHWQGPILTDSGGFQVFSLGDMRKISEKGVDFRSPKNGDKIFMGPEESMQIQKKLGSDIVMIFDECTPFPADKATADQSMQLSLRWAKRSKAEHEKLDNKNALFGIVQGGMFEDLRRESSQALVDMDFDGYAIGGLSVGEPKEEMIKVLDYLPGQLPNDKPRYLMGVGTPKDLVEAVERGIDMFDCVMPTRNARNGYLFTSVGIVKIRNAQYKLDTQPLDENCDCYTCQNYSRSYLHHLQRKNEILGARLNTIHNLYYYQDLMAQMRDAIECNTFSKFKQNFYALQEGK

SEQ ID NO: 53496 - protein, 363 aa, unidentified
  source 1..363: note = Thiomargarita nelsonii
  REGION 1..363: note = tr|A0A176S5Y2|A0A176S5Y2_9GAMM Queuine tRNA-ribosyltransferase OS=Candidatus Thiomargarita nelsonii OX=1003181 GN=tgt PE=3 SV=1
MQFKIFATDGYARRAQLDFPRGTVETPAFMPVGTYGTVKAMTPQQVDATGAEIILGNTFHLMLRPGTQVIKAHDSLHKFMQWHKPILTDSGGFQVFSLGELRKISEQGVTFRSPIDGAKVFLGPEESMAVQRALGADIVMIFDECTPYPATEQQALDSMALSLRWAARSKAAHDDNPAALFGIVQGGMYEHLRQASLAGLIDIGFDGYAIGGLSVGEPKEEKQRILAALAPQLPPNKPHYLMGVGTPADIVEAVRYGIDMFDCVMPTRHARNGHLFTSVGVVRIRNSQYRHDIAPLDPDCDCYTCQNYTRAYLHHLDKAREILGAHLNTVHNLRYYQNLMQGLRKAIVKHRLEDFVRDFYLAN

SEQ ID NO: 53497 - protein, 364 aa, unidentified
  source 1..364: note = Thiomargarita nelsonii
  REGION 1..364: note = tr|A0A0A6P7K3|A0A0A6P7K3_9GAMM Queuine tRNA-ribosyltransferase OS=Candidatus Thiomargarita nelsonii OX=1003181 GN=tgt PE=3 SV=1
MQFKIFATDGYARRAQLYFPRRGTIETPAFMPVGTYGTVKAMTPQQVRATGAEIILGNTFHLMLRPGTQVIKAHGSLHKFMQWHKPILTDSGGFQVFSLGELRKISEQGVTFRSPIDGAKVFLGPEESMAVQRALGADIVMIFDECTPYPATEQQALDSMALSLRWAARSKAAHDDNPAALFGIVQGGMYEHLRQASLAGLIDIGFDGYAIGGLSVGEPKEEKHRILAALAPQLPPNKPHYLMGVGTPADIVEAVRYGIDMFDCVMPTRHARNGHLFTSVGVVRIRNSQYRHDTAPLDPHCDCYTCQNYTRAYLHHLDKAREILGAHLNTVHNLHYYQNLMQRLRKAIVKHRLEDFARDFYSDY

SEQ ID NO: 53498 - protein, 379 aa, unidentified
  source 1..379: note = Tokpelaia sp.
  REGION 1..379: note = tr|A0A367ZYL5|A0A367ZYL5_9RHIZ Queuine tRNA-ribosyltransferase OS=Candidatus Tokpelaia sp. JSC189; OX = 2079010 GN=tgt PE=3 SV=1
MMTENFAFRLLACERNARHGEILTSRGIVRTPAFMPVGTTGTVKAMYMEQVRELGTDIILGNTYHLMLRPGAERITRLGGLHKFIRWNGPILTDSGGFQVMSLAGLRKLNENGVIFQSHIDGAYYEMTPERSIEIQGLLDSDIQMQLDQCIALPASLDEMQRAMEMSLRWAERCKIAFGLQSGKAMFGIVQGGDDEKLREYSAQALKMMDLKGYAIGGLAVGESQEVMLRVLDFICPLLPNKKPRYLMGVGTPDDILRSVACGIDMFDCVMPTRAGRHGLAFTRFGKINLLNVRHAEDPRPLDEQSSCPAARGYSRAYLHHLVKSGETLGGMLLTWNNLAYYQQLMQGIRDAIEEGRFAAFDTEVRTLWTKGDIPVYCG

SEQ ID NO: 53499 - protein, 375 aa, unidentified
  source 1..375: note = Tokpelaia sp.
  REGION 1..375: note = tr|A0A367ZZL4|A0A367ZZL4_9RHIZ Queuine tRNA-ribosyltransferase OS=Candidatus Tokpelaia sp. JSC085; OX = 2079008 GN=tgt PE=3 SV=1
MTENFTFKLIARDGMARCGKITTPRGVVCTPAFMPVGTGGTIKAMYLNQVRDLGTDIILSNTYHLMLRPGAERTARLGGLHKFICWDRPILTDSGGFQIMSLAGLLCKLNENGVTFRSHIDGVYHEMTPERSIYIQNLLDSDIQMQLDQCIALPASFYEMAKAVELSLCWAERCKNAFGVQPGKAMFGIVQGGDNQRLREHSAEALSMMDLKGYAIGGLAVGEPQDVMLRMLDCVCPVLPDEKPRYLMGVGTPDDLLQSVARGIDMFDCVMPTRAGRHGLAFTKFGKINLRNARYAEDLHPLDAESSCPAAYDYSRAYLHHLVKSREALGAMLLTWNNLSYYQQLMQGVRDAIEKGCFAAFNTAVRIRWSKGETT

SEQ ID NO: 53500 - protein, 453 aa, unidentified
  source 1..453: note = Uhrbacteria bacterium
  REGION 1..453: note = tr|A0A1F7UNL7|A0A1F7UNL7_9BACT Queuine tRNA-ribosyltransferase OS=Candidatus Uhrbacteria bacterium RIFCSPLOWO2_01_FULL_47_24 OX=1802401 GN=tgt PE=3; SV = 1
MMNPFRVLHQSKKSRARVGELRTAHGKVRTPFFMTIATRGAVKTLAAEDMREIGALARRDAGATEPKRSGGMSGGGRGGPILLSNTYHLYVRPGMEVIKKAGGLHKFMGWNGPILTDSGGYQVFSLANKNRNPSPVLRTPSPAGRGGSNQFPSPRGRGEGEGQDYDVRITKDGAEFIDRISGRKDMFTPERVLEIQKVIGSDIAMVLDVCAPYPISKEGAREAMERTTSWAERSMKVLKHESIKTLVFGIVQGSVYKDLREQSARDLVALDFDGYAIGGVAVGEPQKEKYQVVDWVAPMLPEDKPRYLMGLGQPEELVEAVRRGIDMFDCVLPTRNARHGNLYVWRHNPPQPSLTLREGDRPLLPLRVRGSERGLRGNFYDTMRITNEKYRADFKPIDPYCECFTCTHHSRAYLRHLFKINEPLALRLATIHNVKFYLDFMVGLQNAVVEGTL

SEQ ID NO: 53501 - protein, 380 aa, unidentified
  source 1..380: note = Uhrbacteria bacterium
  REGION 1..380: note = tr|A0A1F7TK41|A0A1F7TK41_9BACT Queuine tRNA-ribosyltransferase OS=Candidatus Uhrbacteria bacterium RIFCSPHIGHO2_01_FULL_63_20 OX=1802385 GN=tgt; PE = 3 SV=1
MFKVKNKVGKARRGRLTLAHGIVETPAFMPIATRGAVKSITLPEVKALGAQIILNNTYHLLLRPGLEAMKKLGGSHKLMNWDKPILTDSGGFQVFSLSKLNRIGEDGVEFQSHIDGAKITITPESSMEMQRAIGSDIVMQFDDVADGQSTRERFEDAMERSLRWARRCRVAFDTAHTNSQLPTPNSQNLFGIVQGGIHEDLRERSAKGLMDIGFDGYAIGGLSVGEPREDMYRIVEKTCAVLPEDKPRYFMGGGMPEEIVRNVFAGVDMFDCVLPTRNARHGTLFTWNKDPKEFGRELVSGSWELGSSDFYQKLNITSERFAFDQTPIDPHCDCSTCKTVSRAYLRHLFAVGEPVAQHLATIHNLRFYLRLMEELRSVLE

SEQ ID NO: 53502 - protein, 375 aa, unidentified
  source 1..375: note = Veblenbacteria bacterium
  REGION 1..375: note = tr|A0A1G2Q5B9|A0A1G2Q5B9_9BACT Queuine tRNA-ribosyltransferase OS=Candidatus Veblenbacteria bacterium RIFOXYA2_FULL_43_9 OX=1802425 GN=tgt PE=3 SV=1
MAYFEITNIDKTTQARVGRINTAHGVVNTPAFMPIGTKGAVKAITPQELKDNGADIILANTYHLWQRPGDDLIKRAGGLHKFMGWDGPILTDSGGFQVFSLAKTRKITEEGVNFRFDMDGRQELLSPEKSIDIQANLGSDIALILDSFPGYPFEYQKSEESVALTKRWAERAIKQHKKIMSHGKTVNPGQKLWGIVQGANFTELREQSARGMVELGFPGFAIGGVAVGESPEEMLKAVDKAVPYLPAEAPRHLLGVGKPQDIVEAVARGCDTFDCVIPTREARHGRLYIDGLTTLDIRLEKFREDFTPPDENCDCYMCRHFTKAYMRHLFAMAEPLAIRLFTMHNLMFYLKLMADIRRAISSGTFTDILQSYAAL

SEQ ID NO: 53503 - protein, 285 aa, unidentified
  source 1..285: note = Veblenbacteria bacterium
  REGION 1..285: note = tr|A0A3D0FV71|A0A3D0FV71_9BACT Queuine tRNA-ribosyltransferase (Fragment) OS=Candidatus Veblenbacteria bacterium OX=2053636 GN=tgt PE=3 SV=1
TDSGGFQVFSLAKTRKITEEGVNFRFDMDGRQELLSPEKSIDIQANLGSDIALILDSFPGYPFEYQKSEESVALTKRWAERAIKQHKKIMSHGKTVNPGQKLWGIVQGANFPELRERSARDMVELGFPGFAIGGVAVGESPEEMLKAVDKAVPYLPAEAPRHLLGVGKPQDIVEAVARGCDTFDCVIPTREARHGRLYIDGLTTLDIRLEKFREDFTPPDENCDCYMCRHFTKAYMRHLFAMAEPLAIRLFTMHNLMFYLKLMADIRRAISSGTFTDILQSYAAL

SEQ ID NO: 53504 - protein, 367 aa, unidentified
  source 1..367: note = Vecturithrix granuli
  REGION 1..367: note = tr|A0A081C1B4|A0A081C1B4_9BACT Queuine tRNA-ribosyltransferase OS=Candidatus Vecturithrix granuli; OX = 1499967 GN=U27_05343 PE=3 SV=1
MQFTITAESQGSRVRAAEFQTSRNVLHTPCFMPVGTHGAVNGITPQILLDMGAEILVSNAFRLSEHPGKAILSKFENLHEFMAWPYTILTDSGGFQSRLREHAITEKGIQFYDEKAHEIWTPEDAIDMQSVLGSDFVMPLDICADLPTTYPIAREAMERTLRWAVRCKKAFKARPGQILFGIVQGAVYPDLRQQCVDALEQIGFPAYAIGGLNVGETPQEYLATLTTTTALLPREKLRYIMGVGRPEAMLEAVNAGVDIMDSIIPTKYAREKTLFTYRGTINLGKNRKYRKDKYPIDPNCDCYTCRHVSRAYLHHLYQTTTTTAHVYAAIHNIHFCVRLLQNARKAIVEQRFEQFYAEFMNNYTNDD

SEQ ID NO: 53505 - protein, 377 aa, unidentified
  source 1..377: note = Vecturithrix granuli
  REGION 1..377: note = tr|A0A081BYR9|A0A081BYR9_9BACT Queuine tRNA-ribosyltransferase OS=Candidatus Vecturithrix granuli; OX = 1499967 GN=tgt PE=3 SV=1
MSFEILAKDARTLARAGKLTMTHGEVLTPIFMPVGTQGTVKGMTPEVLYAIDAQILLGNTYHLYLRPGHELIQSFGGLHRFMGWDRPILTDSGGFQVYSLGDLRKISEEGVTFRSHLDGSLHTLSPEKSIEVQQGLGSDVMMCFDECAPYPASHEYVTHSMDMSMLWAERCKIAHEQAKERKIALINPAQHLFGIVQGGMYPDLRARSVERLQAIGFDGYAIGGLSVGEPKPLMFEMLEQTAPLLPENAPRYLMGVGTPLDLVRGAALGIDMFDCVMPTRNARNGSLFTKQGKMTIKQAQYRDDQRPIEPDCQCYTCRNFSRAYLRHLFISKEILASILNTIHNLYFYLDLMSRIRKAIAENRFDEFKVRFEREYVE

SEQ ID NO: 53506 - protein, 409 aa, unidentified
  source 1..409: note = Viridilinea mediisalina
  REGION 1..409: note = tr|A0A2A6RNC8|A0A2A6RNC8_9CHLR Queuine tRNA-ribosyltransferase OS=Candidatus Viridilinea mediisalina OX=2024553 GN=tgt PE=3 SV=1
MPPAFHVIARDPVSRARAGVVTTAHGSVATPVFMPVGTRGTVKSLTPSELSDHGAQIILGNTYHLYLQPGHELLARRGGLHRFMGWDGPILTDSGGFQVFSLIYGGIADELKGRRPQHAERMPDMVRVTEDAVIFKSYLDGSRHVFTPERSIQVQHGIGADIMVCFDELPPFRAGYDYTAQSMERTHRWAARCLAAHHERDPATLPNPHQLLFGIVHGGVFPELRQTSAEVISTMGFDGLCIGGSLGADKPQMYAVVEMTVPHLPDGLARHLLGVGDVDDLLEGVARGIDMFDCVSPTRLGRHGTALVRDPARRWKLNVSNAALREDDRPLQPDCPCYACRHFSRAYIHYLYRAKELLGIRLVSLHNVAFLLNLMAEVRNAIVEGRFAACYAEWLGKPLEVYSPSDKES

SEQ ID NO: 53507 - protein, 400 aa, unidentified
  source 1..400: note = Viridilinea halotolerans
  REGION 1..400: note = tr|A0A426TQ74|A0A426TQ74_9CHLR Queuine tRNA-ribosyltransferase OS=Candidatus Viridilinea halotolerans OX=2491704 GN=tgt PE=3 SV=1
MPPAFQITARDSASCARAGVVTTAHGPVMTPVFMPVGTRGTVKSLTPHELRDHGAQIILGNTYHLYLQPGHELIARRGGLHHFMAWDGPILTDSGGFQVFSLVYGGIADEIKGRRPQHAERLTDMVRVTEDAVIFKSYLDGSRHVFTPERSIQVQHGIGADIMVCFDELPPFRAGYDYTAQSMERTHRWAARCLAAHHERPRATLPNRDQLLFGIVHGGVFPALRQASAEHISSMGFDGICIGGSLGADKPQMYDVVAMTVPHLPENLARHLLGVGDVDDLFEGVARGIDMFDCVSPTRLGRHGTALVRDPARRWKLNVSNAALREDDGPLQSDCPCYTCRTFSRAYIHYLYRAKELLAIRLLSLHNVAFLLNLMAEVRQALAEGRFADCYAAWLGKPLG

SEQ ID NO: 53508 - protein, 396 aa, unidentified
  source 1..396: note = Vogelbacteria bacterium
  REGION 1..396: note = tr|A0A352JLE7|A0A352JLE7_9BACT Queuine tRNA-ribosyltransferase OS=Candidatus Vogelbacteria bacterium OX=2053638 GN=tgt PE=3 SV=1
MHFTVEKRDSNSLARAGILKTPHGNIKTPAFVAVATKATVKSLTPEMLTELGAQMVLGNTYHLYFEPGEGVVKAAGGLGKFMHWDGPTMTDSGGFQAFSLGAAYKKGVSKIAREMTEVRLQSDAEPALAVITEDGVTFKSHLDGSEHLFTPERSIQIQHDIGADIIFAFDECTSPHASDSYQREALARTHRWATRSLVQHRMLDNAQLLFGIVQGGRVQELREESARVIGGICPPAGGFDGFGIGGSFTKDDVHTAVGWVNTLLPEDKPRHLLGIGEPEDIVLAVEQGCDLFDCVTPTRNARNGSLYTREGKMNIGNARYRKDFFPIQQDCDCYTCNNFTKSYLAHLFRAHEMLAGTLATIHNLRFIIHLTEELRAAILDGTLSEYKNKFLTRYKK

SEQ ID NO: 53509 - protein, 433 aa, unidentified; identical to SEQ ID NO: 52256
  source 1..433: note = Vogelbacteria bacterium
  REGION 1..433: note = tr|A0A2H0RI31|A0A2H0RI31_9BACT Queuine tRNA-ribosyltransferase OS=Candidatus Vogelbacteria bacterium CG10_big_fil_rev_8_21_14_0_10_49_38 OX=1975043; GN = tgt PE=3 SV=1

SEQ ID NO: 53510 - protein, 384 aa, unidentified
  source 1..384: note = Wallbacteria bacterium
  REGION 1..384: note = tr|A0A352M134|A0A352M134_9BACT Queuine tRNA-ribosyltransferase OS=Candidatus Wallbacteria bacterium OX=2053640 GN=tgt PE=3 SV=1
MHKNNHFEILRKAENGIAARAGVLKTWRGDIQTPVFMPVGTCATVKAQTSRDLKLAGAQIILANTYHLFIRPGHELIREAGGLHEFMRWDRPILTDSGGYQVFSLSGTRKITDEKVVFKSFKDGAKMEFSPEKVIRIQQAFGSTIMMVLDECVKYPETEKKAEIAVERTFRWAKRSYDEYLKIMEETEGGHKDMVFGIVQGSTYRNLRKRSAEQITSIPFHGYAIGGLSVGEPNEMMYEMLDYMKEFMPVEKPRYLMGVGEVNDIIEGIKNGVDMFDCVIPTRLGRHGVLMTPYTKLLIKNAGYRKDFTPPMANCSCYTCSNFTRAYLHHLFRSEEILSPILNSIHNVHFLIKLAALCREAILEGRYGEFYSDYKTGNLTKYQF

SEQ ID NO: 53511 - protein, 265 aa, unidentified
  source 1..265: note = Wallbacteria bacterium
  REGION 1..265: note = tr|A0A1F7WXI4|A0A1F7WXI4_9BACT Queuine tRNA-ribosyltransferase (Fragment) OS=Candidatus Wallbacteria bacterium GWC2_49_35 OX=1817813; GN = A2008_01460 PE=3 SV=1
SFKDGAKMEFSPEKVIRIQQAFGSTIMMVLDECVKYPETEKKAEIAVERTFRWAKRSYDEYLKIMEETEGGHKDMVFGIVQGSTYRNLRKRSAEQITSIPFHGYAIGGLSVGEPNEMMYEMLDYMKEFMPVEKPRYLMGVGEVNDIIEGIKNGVDMFDCVIPTRLGRHGVLMTPYTKLLIKNAGYRKDFTPPMANCSCYTCSNFTRAYLHHLFRSEEILSPILNSIHNVHFLIKLAALCREAILEGRYGEFYSDYKTGNLTKYQF

SEQ ID NO: 53512 - protein, 389 aa, unidentified
  source 1..389: note = Wildermuthbacteria bacterium
  REGION 1..389: note = tr|A0A1G2QWQ7|A0A1G2QWQ7_9BACT Queuine tRNA-ribosyltransferase OS=Candidatus Wildermuthbacteria bacterium RIFCSPHIGHO2_01_FULL_48_27b OX=1802447 GN=tgt; PE = 3 SV=1
MKFFEVKNPPAGGKKSKARVGVIHTAHGDIHTPAFVPVATKGTLKTIPPREFQEIGVEVAFVNTFHLVAHPGAKVIQKFGGIHAYAKLGIPLMSDSAGFQVFSLGGGDSQKRIKTHEGEEVPVKKISEEGVLFRAPRDGKEILFTPELSMKYQQQIGADLIMAFDECIYHGADYQYTKQATERTHRWLQRCIKAQKKSASAKGYGEAKQYLYGIIQGGTFKDLRQESAKFVAEQATPGVAIGGVAIGETKKEIREQLRWVAPYLPEDKPVHLLGIGQSDDILDAVRYGVDTFDCVEPTRLARNGIVYCSKSDFEQFARVDLGASKYLKEKGPIQKGCRCYTCQNFSLSFIHHLFKERELLGYYLATWHNLYSFAEFFRNLREQIAAGKI

SEQ ID NO: 53513 - protein, 373 aa, unidentified
  source 1..373: note = Wildermuthbacteria bacterium
  REGION 1..373: note = tr|A0A3D3G4P2|A0A3D3G4P2_9BACT Queuine tRNA-ribosyltransferase OS=Candidatus Wildermuthbacteria bacterium OX=2053642 GN=tgt PE=3 SV=1
MTFFQIERRSKKTRARLGKITTPRGEILTPAFVPVATKGTLKAIPPKDIKELGVQVAFVNTFHLVDDPGLEVIEKFGGIHKYAKLDIPLMSDSGGFQVFSLGGKKIGVPRSEEKGTPVLEIDEQGVCFRSPKNGEEVLFTPEFSIQAQKDIGADIIMAFDECIFYGADKKYTEKATERTHRWLLRCIKAKKRKDQTLYGIIQGGVFKDLRIDSAKFVAKQNIDGIAIGGVSVGETHKELRDQVKWVALYLPEHLPCHLLGVGRIEDITEFIKLGIDTFDCAEPTRIARHGQVFRRQGQKIMRLDAMKGSLRGDKNPIDKNCVCYTCQNFSLSFLHHLFQERELIAYYLASYHNLFFFEQIFRELRRQIATGKI

SEQ ID NO: 53514 - protein, 376 aa, unidentified
  source 1..376: note = Wirthbacteria bacterium
  REGION 1..376: note = tr|A0A1J5IXV7|A0A1J5IXV7_9BACT Queuine tRNA-ribosyltransferase OS=Candidatus Wirthbacteria bacterium CG2_30_54_11 OX=1817892 GN=tgt PE=3 SV=1
MPFELLKTDTNTKARLGRISTPHGDVLTPAFMPDATRGAVQTISSRQLRDTGTPMLVSNTVHLYLKPGHELIGSFGGLHKFMQWDGPILTDGGGFQIYSLIHSSNLKGKVTEQGMYFQSPSDGSSHLLTPELSQEVQFALGADIKMAFDDCVHTDVTSKKNRESVELTTLWSRRARKRFDELSEATGQTSEIYAIVQGGADLELRKKSFDELHAIGFDGYAYGGWPVDSEGNFLEDLIGYTADLMPLKKPRYAMGVGTPSDVVRSVALGYDLFDCVLPTRNARHGYFYTSEGILRIKKQEYREDQRPLDSECDCYTCRTYSRAYLRHLYNVGEHLAGTLGTIHNLRYYARLMERIRFAIQDGTYERLTRQIRAWAI

SEQ ID NO: 53515 - protein, 385 aa, unidentified
  source 1..385: note = Woesebacteria bacterium
  REGION 1..385: note = tr|A0A1F7X7Q1|A0A1F7X7Q1_9BACT Queuine tRNA-ribosyltransferase OS=Candidatus Woesebacteria bacterium RBG_13_46_13 OX=1802479 GN=A2Y68_02785 PE=3 SV=1
MDFSFEVSKKDKKSLARAGVIHTSHGDILTPAFSPVATKASVKTLTPDDLRAAKTQVVLGNTYHLYLKPGTETLKKFGGFGPFMRWHGPTISDSGGYQVSFLRSKSEDGRLVKITDKGAIFSSYLDGSRHLITPEKSMEIQKILAADIIMAFDQPLGSDYSPLKKKEAFERTMKWEERSFSAWKKLKSNQALYGIVQGDIDRSLRRKSLKFVLSLGFPGIAMGGESIGVSPKITAETLDAVADILPLDKPLHALGLGGGPEGIFTAVQRGVDTFDNTSITRMARTGLLFIYPEDGGSISNKFRIDIEKSKFKNARAPISNKCSCYTCKNFSAAYLHHLFLTRELLGLRLASIHNVFFVNDLMERIRNSILEGDFRAFKKYWLNRG

SEQ ID NO: 53516 - protein, 389 aa, unidentified
  source 1..389: note = Woesebacteria bacterium
  REGION 1..389: note = tr|A0A1F7YYY8|A0A1F7YYY8_9BACT Queuine tRNA-ribosyltransferase OS=Candidatus Woesebacteria bacterium RIFCSPHIGHO2_01_FULL_44_21 OX=1802503; GN = A2803_04620 PE=3 SV=1
MQKFSFELIKKDNKTKARAAIIHTPHGDIETPAFSVVGTKASVKGLDETDLKNAGSQVVLANTYHLYLRPGVDVIKKFGDLRNFMKWDGPMITDSGGYQVSYLWTKGEEVGQSVKITDKGAKFRSHIDGSIHEITPEKSMQIQKILGADIIMAFDQPIKLANSDRKNKEALRRTFDWEERSFKEHKKLKSDQALYGILHGGLNKKIRKNFLDYILTAGFDGIAFGDETIGADPNFTAKGMDTVSEFLPDDKPVHALGLGGGPEGIFVAVERGMDTFDNTGITRMARTGLLFTYPEDGGLSLNKFRIDINKSKFKDVKKPISKTCNCHTCNNYSSAYIHHLLVSGEPLGVRLTTIHNVYFINDLMREVRRSIINGHFNALKKHWLGERKY

SEQ ID NO: 53517 - protein, 435 aa, unidentified
  source 1..435: note = Wolfebacteria bacterium
  REGION 1..435: note = tr|A0A2M8DAI3|A0A2M8DAI3_9BACT Queuine tRNA-ribosyltransferase OS=Candidatus Wolfebacteria bacterium CG_4_9_14_0_8_um_filter_39_46 OX=1975064 GN=tgt; PE = 3 SV=1
MFEFKIKNSYKKARSGFFNTPHGKLETPNLAIVATHGKIKLLNKTEHLRANPDLIIANTFHLFVNNKVKEIKGSGGLHQWSSFQKPIMTDSGGFQVFSLGWGKIHGIGKVLEQKNFFSLNPLRSPQRGELTCSPACAEASAGRSARSSIFGGHRARSPAQVSDKRNFSVPEKLVKISEDGVIFDFNGKNFELTPEKSIKIQKDLGADIIFTFDECTSPFNSYAYTKKAMERTHRWAIRCLNFFHSHSHGHSQSLFGIVQGGIFEDLRKKSSKFIGSLAFNGFGIGGSFGEKQMRKVLNWSLSGLAEDKPRHLLGIGKIKDIFIAVKQGIDLFDCVVPTREARHAVLYTKAGKLNIEKEIFVKDKKMIEKNCQCWVCRQEISRQEIRHYFKTERIYGQRLATLHNIYFFKNLFREIREAIIDKRLEKLEEEYYNYR

SEQ ID NO: 53518 - protein, 378 aa, unidentified
  source 1..378: note = Wolfebacteria bacterium
  REGION 1..378: note = tr|A0A1F8DQW0|A0A1F8DQW0_9BACT Queuine tRNA-ribosyltransferase OS=Candidatus Wolfebacteria bacterium RIFCSPLOWO2_01_FULL_38_11 OX=1802556 GN=tgt PE=3; SV = 1
MFEFKISKKSKKNNARLGILKTAHGEIETPAFVPVATQAAIKTLDSQEVLKTKSQILICNTFHLHLKPGEKIIKSSGGLHKFMNWPKPLMTDSAGFQVFSLGFGRDFGMGKILKEKNGGKIKSGQQPKLLKITSEGVLFRSPNDGRKIFIGPKESIKIQESLGADIIFAFDECTPPIANYAYTKKSLKLTHQWAQICLNAKKSKQALFGIVQGGKFKDLRIESAKFIGNLPFDGFGIGGEFGDDKKIMEKMINWVNKELPENKPRHLLGIGYLEDIPKIIKAGVDTFDCIVPTHYGRRGIAFTSSGELDLNKSKFLQDKKALDKKCPCFVCQNYSRSYLCHLFRAKEISALKFLTFHNLYFFNSFVENIRNAIKKGKF

SEQ ID NO: 53519 - protein, 408 aa, unidentified
  source 1..408: note = Woykebacteria bacterium
  REGION 1..408: note = tr|A0A1G1WS67|A0A1G1WS67_9BACT Queuine tRNA-ribosyltransferase OS=Candidatus Woykebacteria bacterium RIFCSPHIGHO2_02_FULL_43_16b OX=1802601 GN=tgt; PE = 3 SV=1
MSFFDITHKDNRSSARVGVIRTDHGDIETPVFMPVGTQATVKALTPEDLLDLGAEIILNNTYHLYLRPGTGVIESFGGVHGFQHWSRPILTDSGGFQVFSLGLGKLTKQRKVKHDLLAESLAEFTVEEVALKNPKILAKVDEDGVTFRSHLDGSTHRFTPEISLEIQHKLGADIILAFDECVPYPSNRKYALESLERTHNWAKRSLETHKLNKNQPYKQFVFGIVQGSVYPDLRAKSARFIGGLGFDGFCIGGVSVGEPKSEMYKAIESSVPFLDACKPRHLLGVGDIDDIFEAIERGVDMFDCVSPTRLGRNGSLYHSQASRASKFRVNILGEGYKTQTDPLDPECSCYTCANYSAAYLSHLYRADELLAYRLGSLHNVHFIVNLVKKIRQSILNGDFPLLKQKWLS

SEQ ID NO: 53520 - protein, 408 aa, unidentified; identical to SEQ ID NO: 53519
  source 1..408: note = Woykebacteria bacterium
  REGION 1..408: note = tr|A0A1G1WWC3|A0A1G1WWC3_9BACT Queuine tRNA-ribosyltransferase OS=Candidatus Woykebacteria bacterium RIFCSPLOWO2_01_FULL_43_14 OX=1802605 GN=tgt PE=3; SV = 1

SEQ ID NO: 53521 - protein, 379 aa, unidentified
  source 1..379: note = Yanofskybacteria bacterium
  REGION 1..379: note = tr|A0A1F8H4V7|A0A1F8H4V7_9BACT Queuine tRNA-ribosyltransferase OS=Candidatus Yanofskybacteria bacterium RIFCSPLOWO2_02_FULL_45_18 OX=1802707 GN=tgt PE=3; SV = 1
MLEFKVLKQSEKSKARLGLLKTANGIVETPTLVPVATQAVVKTLTSEEAAAAGSQMLICNTFHLRLKPGEKFVKSAGGLHKFMNWPRPLMTDSGGFQVFSLGFGKDLGVGKIIKEKTGEIVRLGQQPKLLKITDEGVHFTSFLDGSRLFLGPEESMKIQQALGADIIFAFDECPPPAAEHAYIKKSLERTHRWAKVCLKAKRNKHQALFGIVQGGRYKDLRQESARFINSQPFDGFGIGGEFGEDKKSMMQMLGWVTEELDPKKPRHLLGVGYLEDIPKIIKQGIDTFDCIVPTHYARHGIAFISSGTLDLLKSVFLKDKKPLDPKCSCAVCANYSRSYISHLFRAKEITALKLLTFHNLFFFNQYVSKIREDIRNNKV

SEQ ID NO: 53522 - protein, 399 aa, unidentified
  source 1..399: note = Yanofskybacteria bacterium
  REGION 1..399: note = tr|A0A1F8ECX6|A0A1F8ECX6_9BACT Queuine tRNA-ribosyltransferase OS=Candidatus Yanofskybacteria bacterium RIFCSPHIGHO2_01_FULL_41_26 OX=1802661; GN = A2649_04335 PE=3 SV= 1
MNETCFKVLKKDKKSKARLGLLSTPHGNIQTPSYVFVGTYGKFRHLTPRDIKRTKTQLVIANTFHLWEEALQGLPLQQGQSLLIKKLGLNIPTMTDSGGFQVLSLAFGDKNKIGKFMTKNIAVDNRLRKSVIHSRKNVKITQKGVYFNFKGQKMFLGPELSMKIQKKIGADIIFTFDHITSPLDSFKYNKKAVELTNKWALRCFRTNKNNNQALFGIVQGGIYKSLRIKSAKFIGSLPFDGFGIGGSYTKKQISKILKWVIPYLPEEKPRHLLGVGKVADIFEAVQNGIDTFDCVIPTREARHGRLYTKTRHIDIRKGKYIKDKKVIEKGCACQTCSNKIPRFKIRKLLTNEDRKQNATGQRYCLMHNMWFFNNLLEEIRESIQKDKFTEFKKKFLKNY

SEQ ID NO: 53523 - protein, 406 aa, unidentified
  source 1..406: note = Yonathbacteria bacterium
  REGION 1..406: note = tr|A0A1G2SK92|A0A1G2SK92_9BACT Queuine tRNA-ribosyltransferase OS=Candidatus Yonathbacteria bacterium RIFOXYD1_FULL_52_36 OX=1802730 GN=tgt PE=3 SV=1
MGKPIRFSIEKKMPGALGRAGTITTPHGEIRTPAFVTVGTKATVKALTPEMVRDLGAQVVLANTYHLYLEPGERIVRDAGGIHKFMNWSGPTMTDSGGFQAFSLGAAFGKGVSKIAKGGESENGSTAGDEGSQEEPRLARIDEDGVTFKSHLNGSEHKFTPERSIGIQHNIGADMIFAFDECTSPHAPHEYQEEALNRTHRWAQRSLDAHHANESAAGKQGLLGIVQGGRHKDLREESARVVGAMDFDGFGIGGSFDKEDMYTAVGWVNALLPEEKPRHLLGIGEPMDLFGGVENGCDIFDCVAPTRMARNGTIHTADGRINILNAQFVRDFTPLDPGCECYTCRTYTRAYLAHLFRAKEMLAGTLASIHNLHFIIKLVANIRQAILDDTFSEFKAAFLARYYKSL

SEQ ID NO: 53524 - protein, 418 aa, unidentified
  source 1..418: note = Yonathbacteria bacterium
  REGION 1..418: note = tr|A0A2M7Q607|A0A2M7Q607_9BACT Queuine tRNA-ribosyltransferase OS=Candidatus Yonathbacteria bacterium CG_4_10_14_0_8_um_filter_43_17 OX=1975099 GN=tgt; PE = 3 SV=1
MKPISFTIEKKMPGQKALGRAGTIITPHGDIKTPAFVTVGTKATVKALTPEMVRDLGAQVVLANTYHLYLEPGDELVRDAGGFGKFMNWKGPTMTDSGGFQVFSLGAAFGSKVGKLSKVPQANQQIRVLGVDSIVEEVEKEDEAGKLAKIDEDGVTFKSYKDGSVYRFTPERSIEIQHNLGADMFFAFDECTSPMAPYEYQKEAMERTHRWAKRSLDAHLNLETRRPSGENPQALLGVLQGGRHKDLREESARVLGAMDFDGYGIGGSFDKDDMTTAVGWVNAILPEDKPRHLLGIGEPEDLFGGVENGCDLFDCVAPTRMGRNGTLHTRDGKINIRGAKFVRDFAPVDSECDCYTCKNYTRAYLAHLFRSNEMLAGTLGSIHNLRFLVSVVDQMREAILEGTFDTLKTDFLNRYYRK

SEQ ID NO: 53525 - protein, 422 aa, unidentified
  source 1..422: note = Zambryskibacteria bacterium
  REGION 1..422: note = tr|A0A1G2UHH5|A0A1G2UHH5_9BACT Queuine tRNA-ribosyltransferase OS=Candidatus Zambryskibacteria bacterium RIFCSPLOWO2_02_FULL_39_14 OX=1802769 GN=tgt PE=3; SV = 1
MAPIKFSIEKELVNPTGRQLGRAGTLETPHGVIHTPAFVAVGTKATVKALTPEQVKSTGAEVILANTYHLYLEPGAERIRSFGHRHDGVGLRPDAVGGLHKFMNWQGPTMTDSGGFQVFSLGVAYGKELSKITKITDPSQMIALRSLDSEVPRLANIGADGVSFRSHHDGSLHYITPEKSIEIQHDLGADIIFAFDECTSPAEDFRYQEEALERTHRWAKRSLDHHHSLIRANGGINKQALFGIVQGGREESLRKRSAEFMKGLDFDGFGIGGSFSKDDMETVVKWVNEILPKDKPRHLLGIGEPEDLFMGVENGVDLFDCVAPTRNGRGGTLYTSRGKINIRNAEFREDTGPVDIECGCDVCKNYSRAYLCHLYRAHEMLGGTLGSIHNLYFIINLVKNMRQAILDNTFIQFREKFLDKYF

SEQ ID NO: 53526 - protein, 403 aa, unidentified
  source 1..403: note = Zambryskibacteria bacterium
  REGION 1..403: note = tr|A0A2H0QWH8|A0A2H0QWH8_9BACT Queuine tRNA-ribosyltransferase OS=Candidatus Zambryskibacteria bacterium CG10_big_fil_rev_8_21_14_0_10_42_12 OX=1975115; GN = tgt PE=3 S V=1
MSQPISFTKTKDIPDALGRAGIIHTQHGDIETPAFVTVGTKATVKSLTPEQVKDLGAQVVLANTYHLYLEPGDEIVKEAGGLHAFMNWKGPTITDSGGFQVFSLGEALGKGVSKVATGEAVTDAGDVARTDEFTNKRAKIDEEGVTFVSHKDGKKHRMTPEDSMRIQHNIGADIMFAFDECTSPHAKKEYQKEAMERTHRWAERCIAYHKESGQDKTQGLFAVVQGGRFEELRKESAKVLSEMDFAGFGVGGSFVKEDMDTAVGWVNEILPADKPRHLLGIGEPLDILKGVEQGCDTFDCVAATRMARNGGVYIDGGKINLLNAQFKKDFTPIMDTCDCYTCAHYTRAYIAHLFRAKEMLAATLASIHNLRFIIRFTDEIRESIKEGTFTEHKKEILQKYGLL

SEQ ID NO: 53527 - protein, 378 aa, unidentified
  source 1..378: note = Candidimonas bauzanensis
  REGION 1..378: note = tr|A0A1M5YTE7|A0A1M5YTE7_9BURK Queuine tRNA-ribosyltransferase OS=Candidimonas bauzanensis; OX = 658167 GN=tgt PE=3 SV=1
MTGIQFKLLATDGAARRGQITLSHGVVETPIFMPVGTYGSVKAMLPHELEEIGAQIVLGNTFHLWLRPGTEVMEKHGGLHGFMQWNKPILTDSGGFQVFSLHGMRKITEEGVKFASPIDGARLFLTPEESMRIQRALNSDIAMVFDECTPYTIDGRPATSEEAAASMRMSLRWARRSRQAFQQQENPNALFGIVQGGMFEQLRDESLAGLLDIGFEGYAIGGLSVGEPKEDMMRVLAHVAPRLPEHAPRYLMGVGTPEDLVEGVSRGVDMFDCVMPTRNARNGWLFTRFGDIKIRNARYRDDTRPLEPGCSCHTCRHFSRAYLHHLQRAKEITGSRLNTLHNLHFYLTIMQEMRDAIAAGRFEAWRAQFARDRARGIE

SEQ ID NO: 53528 - protein, 378 aa, Candidimonas nitroreducens
  REGION 1..378: note = tr|A0A225MLL4|A0A225MLL4_9BURK Queuine tRNA-ribosyltransferase OS=Candidimonas nitroreducens; OX = 683354 GN=tgt PE=3 SV=1
MSGLQFELLATDGAARRGRITLNHGIVETPIFMPVGTYGSVKAMLPHELEQIGAQIVLGNTFHLWLRPGTEVMQAHGGLHGFMQWQKPILTDSGGFQVFSLNGLRKITEEGVKFASPIDGARLFLTPEESMRIQRALNSDIAMVFDECTPYAIDGRPATAEEAARSMRMSLRWARRSRTAFDELGNPNALFGIVQGGMFEALRDESLQGLVDIGFHGYAIGGLSVGEPKEEMLRVLAHVAPRLPVAAPRYLMGVGTPEDLVEGVSRGVDMFDCVMPTRNARNGWLFTRYGDIKIRNARYRSDTRPLDASCGCHTCGHFSRAYLHHLQRANEITGARLNTLHNLHFYLNLMQEMRQAIEAGTFAQWRAGFEHDRARGIE

SEQ ID NO: 53529 - protein, 378 aa, Candidimonas sp.
  REGION 1..378: note = tr|A0A3S0N158|A0A3S0N158_9BURK Queuine tRNA-ribosyltransferase OS=Candidimonas sp. SYP-B2681; OX = 2497686 GN=tgt PE=3 SV=1
MTGLQFQLLATDGAARRGQITLNHGVVQTPIFMPVGTYGSVKAMLPHELDEVGAQIILGNTFHLWLRPGTEVLDKHNGLHGFMQWKKPILTDSGGFQVFSLHGMRKITEEGVKFASPIDGSRLFLTPEESMRIQRALNSDIAMVFDECTPYTIEGRPATSEEAARSMRMSLRWARRSRVAFQEQENPNALFGIVQGGMFEDLRDESLAGLVDIGFEGYAIGGLSVGEPKEDMMRVLAHVAPRLPANAPRYLMGVGTPEDLVEGVSRGVDMFDCVMPTRNARNGWLFTRFGDIKMRNARYRDDTQPLDPSCTCHTCQHFSRSYLHHLQRANEITGSRLNTLHNLHFYLTIMQEMREAIEEGRFESWRSQFARDRAVGIQ

SEQ ID NO: 53530 - protein, 378 aa, Candidimonas sp.
  REGION 1..378: note = tr|A0A522PAA1|A0A522PAA1_9BURK Queuine tRNA-ribosyltransferase OS=Candidimonas sp. OX=1912597; GN = tgt PE=3 SV=1
MTGLQFELLATEGAARRGRITLNHGIVETPMFMPVGTYGSVKAMLPHELTEVGAQIVLGNTFHLWLRPGVEVIDKHQGLHGFMQWDKPVLTDSGGFQVFSLKGMRKISEDGVKFASPIDGARLFLTPEESMRIQTVLNSDIAMVFDECTPYIIEGRPATHDEAAQSMRMSLRWARRSRLAFDQLQNPNALFGIVQGGMFENLRDESLAGLVDTGFHGYAIGGLSVGEPKDEMMRVLAHIAPRLPADAPRYLMGVGTPEDLVAGVALGVDMFDCVMPTRNARNGWLFTRYGDIKIRNARYRDDTRPLDSGCACHTCRFFSRAYLHHLQRANEITGARLNTLHNLHFYLTLMQEMREAIAAGTFEPWQREFARNRAHGIE

SEQ ID NO: 53531 - protein, 376 aa, Capnocytophaga canimorsus
  REGION 1..376: note = tr|F9YPB1|F9YPB1_CAPCC Queuine tRNA-ribosyltransferase OS=Capnocytophaga canimorsus (strain 5) OX=860228 GN=tgt PE=3 SV=1
MQFELLKTDPHTKARAGKIITDHGIIETPIFMPVGTVASVKGVHQRELKEDINPDIILGNTYHLYLRPTTSILEKAGGLHKFMNWDRNILTDSGGYQVYSLSDTRKIKEEGVKFKSHIDGSYHFFSPENVMETQRSIGADIIMAFDECTPYPCDYQYAKKSMQMTHRWLDRCISHLEKVPPKYGYSQSLFPIVQGSVYKDLREQSAEYIASKGADGNAIGGLSVGEPAEDMYEMTDLVCDILPKDKPRYLMGVGTPVNILENIALGVDMFDCVMPTRNARNGMLFTSQGIINIKNKKWEDDFSPIDPDGHTYVDTYYTKAYLRHLFAANEFLGKQIASIHNLGFYLWLVREARKHILAGDFAFWKEKMVKQLGQRL

SEQ ID NO: 53532 - protein, 376 aa, Capnocytophaga canimorsus
  REGION 1..376: note = tr|A0A0B7H2Y8|A0A0B7H2Y8_9FLAO Queuine tRNA-ribosyltransferase OS=Capnocytophaga canimorsus; OX = 28188 GN=tgt PE=3 SV=1
MQFELLKTDPHTKARAGKITTDHGIIETPIFMPVGTVASVKGVHQRELKEDINPDIILGNTYHLYLRPTTSILEKAGGLHKFMNWDRNILTDSGGYQVYSLSDTRKIKEEGVKFKSHIDGSYHFFSPENVMETQRSIGADIIMAFDECTPYPCDYQYAKKSMQMTHRWLDRCISHLEKVPPKYGYSQSLFPIVQGSVYKDLREQSAEYIASKGADGNAIGGLSVGEPAEDMYEMTDLVCDILPKDKPRYLMGVGTPINILENIALGVDMFDCVMPTRNARNGMLFTSQGIINIKNKKWEDDFSPIDPDGHTYVDTYYTKAYLRHLFAANEFLGKQIASIHNLGFYLWLVREARKHILAGDFAFWKEKMVKQLGQRL

SEQ ID NO: 53533 - protein, 376 aa, unidentified
  source 1..376: note = Capnocytophaga canis
  REGION 1..376: note = tr|A0A0B7I3B3|A0A0B7I3B3_9FLAO Queuine tRNA-ribosyltransferase OS=Capnocytophaga canis OX=1848903; GN = tgt PE=3 SV=1
MQFELLKTDEKTKARAGKITTDHGVIETPIFMPVGTVASVKGVHQRELKEDINPDIILGNTYHLYLRPQTAILEKAGGLHKFMNWDRNILTDSGGYQVYSLAANRKIKEEGVKFKSHIDGSYHFFSPENVMEIQRSIGADIIMAFDECTPYPCDYQYAKRSLAMTHRWLDRCISHLEKVPPKYGYSQSLFPIVQGSVYKDLRQQSAEYIASKGADGNAIGGLSVGEPAEEMYAMTEVVCDILPKDKPRYLMGVGTPINILENISLGVDMFDCVMPTRNARNGMLFTSQGVINIKNKKWEDDFSPIDPDGHTFVDVQYTKAYLRHLFAANEYLGKQIASIHNLGFYLWLVREARQRILAGDFSIWKEQMIRQMTTRL

SEQ ID NO: 53534 - protein, 376 aa, unidentified
  source 1..376: note = Capnocytophaga canis
  REGION 1..376: note = tr|A0A0B7ITY7|A0A0B7ITY7_9FLAO Queuine tRNA-ribosyltransferase OS=Capnocytophaga canis OX=1848903; GN = tgt PE=3 SV=1
MQFELLKTDEKTKARAGKITTDHGVIETPIFMPVGTVASVKGVHQRELKEDINPDIILGNTYHLYLRPQTAILEKAGGLHKFMNWDRNILTDSGGYQVYSLAANRKIKEEGVKFKSHIDGSYHFFSPENVMEIQRSIGADIIMAFDECTPYPCDYQYAKRSLAMTHRWLDRCISHLEKVPPKYGYSQSLFPIVQGSVYKDLRQQSAEYIASKGADGNAIGGLSVGEPAEEMYAMTEVVCDILPKDKPRYLMGVGTPINILENISLGVDMFDCVMPTRNARNGMLFTSQGVINIKNKKWEDDFSPIDPDGHTFVDVQYTKAYLRHLFAANEYLGKQIASIHNLGFYLWLVREARQRILAGDFSIWKEQMIRQMSTRL

SEQ ID NO: 53535 - protein, 376 aa, Capnocytophaga cynodegmi
  REGION 1..376: note = tr|A0A0B7HH94|A0A0B7HH94_9FLAO Queuine tRNA-ribosyltransferase OS=Capnocytophaga cynodegmi; OX = 28189 GN=tgt PE=3 SV=1
MQFELLKTDPHTKARAGKITTDHGIIETPIFMPVGTVASVKGVHQRELKEDINPDIILGNTYHLYLRPTTSILEKAGGLHKFMNWDRNILTDSGGYQVYSLSDTRKIKEEGVKFKSHIDGSYHFFSPENVMETQRSIGADIIMAFDECTPYPCDYQYAKKSMQMTHRWLDRCISHLEKVPPKYGYSQSLFPIVQGSVYKDLREQSAEYIASKGADGNAIGGLSVGEPAEDMYEMTDLVCNILPKDKPRYLMGVGTPINILENIALGVDMFDCVMPTRNARNGMLFTSQGIINIKNKKWEDDFSPIDPDGHTYVDTYYTKAYLRHLFAANEFLGKQIASIHNLGFYLWLVREARKHILAGDFAFWKEKMVKQLGQRL

SEQ ID NO: 53536 - protein, 376 aa, Capnocytophaga cynodegmi
  REGION 1..376: note = tr|A0A250E850|A0A250E850_9FLAO Queuine tRNA-ribosyltransferase OS=Capnocytophaga cynodegmi; OX = 28189 GN=tgt PE=3 SV=1
MQFELLKTDQHTKARAGKITTDHGIIETPIFMPVGTVASVKGVHQRELKEDINPDIILGNTYHLYLRPTTSILEKAGGLHKFMNWDRNILTDSGGYQVYSLSDTRKIKEEGVKFKSHIDGSYHFFSPENVMETQRSIGADIIMAFDECTPYPCDYQYAKKSMQMTHRWLDRCISHLEKVPPKYGYSQSLFPIVQGSVYKDLREQSAEYIASKGADGNAIGGLSVGEPAEDMYEMTDLVCDILPKNKPRYLMGVGTPVNILENIALGVDMFDCVMPTRNARNGMLFTSQGIINIKNKKWEDDFSPIDPDGHTYVDTYYTKAYLRHLFAANEFLGKQIASIHNLGFYLWLVREARKHILAGDFAFWKEKMVKQLGQRL

SEQ ID NO: 53537 - protein, 376 aa, Capnocytophaga gingivalis
  REGION 1..376: note = tr|C2M515|C2M515_CAPGI Queuine tRNA-ribosyltransferase OS=Capnocytophaga gingivalis; OX = 553178 GN=tgt PE=3 SV=1
MNFELQTTDTTTKARAGRITTDHGVIETPIFMPVGTVASVKGVQQRELTEDINADIILGNTYHLYLRPTTSILEQAGGLHKFMHWDRNILTDSGGYQVYSFSSTRKIKEEGVRFKSHIDGSYHFFSPEKSMEIQRSIGADIIMAFDECTPYPCEYGYAKRSMHMTHRWLDRCIAYLGENAPKYGYNQSLFPIVQGSVYPDLRKISAEYIASKGADGNAIGGLSVGEPAEKMYEITEIVCDILPKDKPRYLMGVGTPINILENIALGVDMMDCVMPTRNARNGMLFTAHGTINIKNKKWENDFSPIDENGYTFVDTYYTKAYLRHLFAAEESLGKQIASIHNLGFYLWLVREARRHIMEGDFSQWKDQMVRQMNNRL

SEQ ID NO: 53538 - protein, 376 aa, Capnocytophaga gingivalis; identical to SEQ ID NO: 53537
  REGION 1..376: note = tr|A0A250FS39|A0A250FS39_9FLAO Queuine tRNA-ribosyltransferase OS=Capnocytophaga gingivalis; OX = 1017 GN=tgt PE=3 SV=1

SEQ ID NO: 53539 - protein, 384 aa, Capnocytophaga granulosa
  REGION 1..384: note = tr|A0A381E390|A0A381E390_9FLAO Queuine tRNA-ribosyltransferase OS=Capnocytophaga granulosa; OX = 45242 GN=tgt PE=3 SV=1
MHPEKESYMNFELLSTDAATHARAGRITTDHGVIETPIFMPVGTVASVKGVQQRELSEDICADIILGNTYHLYLRPTTSILEQAGGLHKFMHWDRNILTDSGGYQVYSFSSTRKIKEEGVRFKSHIDGSYHFFSPEKSMEIQRSIGADIIMAFDECTPYPCEYPYAKRSMHMTHRWLDRCINYLQENAPKYGYNQSLFPIVQGSVYADLRRASAEYIASKGADGNAIGGLSVGEPAEKMYEITELVCDILPKDKPRYLMGVGTPINILENIALGVDMFDCVMPTRNARNGMLFTAHGTINIKNKKWENDFSPIDENGYTFVDTYYTKAYLRHLFAAEESLGKQIASIHNLGFYLWLVREARKHILQGDFSQWKNQMVRQMNNRL

SEQ ID NO: 53540 - protein, 376 aa, Capnocytophaga haemolytica
  REGION 1..376: note = tr|A0A0X8JBH6|A0A0X8JBH6_9FLAO Queuine tRNA-ribosyltransferase OS=Capnocytophaga haemolytica; OX = 45243 GN=tgt PE=3 SV=1
MEFELLTTDAATKARAGRITTAHGVIETPIFMPVGTVGTVKGVHQRELKEDINADIILGNTYHLYLRPQTDILEAAGGLHRFMNWDRSILTDSGGYQVYSLSATRKIKEEGVKFKSHIDGSYHVFSPEKVMEIERSIGADIMMAFDECTPYPCDYAYAKRSMAMTHRWLDRCIAHLEKVPPKYGYAQSLFPIVQGATYRDLRTQSAEYIASKGADGNAIGGLSVGEPAEKMYEITELVCDILPKDKPRYLMGVGTPVNILENIALGVDMMDCVMPTRNARNGMLFTSEGIINIKNKKWEADFSPIDADGHTYVDTYYTKAYLRHLFAANEFLGKQIASIHNLGFYLWLVREARRQILAGSFASWKAAMVPRLENRL

SEQ ID NO: 53541 - protein, 376 aa, Capnocytophaga leadbetteri
  REGION 1..376: note = tr|A0A250FC02|A0A250FC02_9FLAO Queuine tRNA-ribosyltransferase OS=Capnocytophaga leadbetteri; OX = 327575 GN=tgt PE=3 SV=1
MNFDILKTDELTKARAGKITTAHGVIETPIFMPVGTVGSVKGVHQRELKEDINADIILGNTYHLYLRPQMPILERAGGLHKFINWDRNILTDSGGYQVYSLAANRKIKEEGVKFKSHIDGSYHFFSPENVMEIERSIGADIMMAFDECTPYPCEYGYAKRSMHLTHRWLDRCIAHLEKVPPKYGYEQSLFPIVQGSVYKDLRIQSAEYIASKGADGNAIGGLSVGEPVEQMYEMTELVCDILPKDKPRYLMGVGTPINILENIALGVDMMDCVMPTRNARNGMLFTSKGIINIKNKKWEDDFSPLDPDGHTYVDTYYTKAYLRHLFAANEFLGKQIASIHNLGFYLWLVREARRQIIAGTFSQWKTKMVNDMSNRL

SEQ ID NO: 53542 - protein, 376 aa, Capnocytophaga leadbetteri
  REGION 1..376: note = tr|A0A2T5XTS9|A0A2T5XTS9_9FLAO Queuine tRNA-ribosyltransferase OS=Capnocytophaga leadbetteri; OX = 327575 GN=tgt PE=3 SV=1
MNFDILKTDELTKARAGKITTAHGVIETPIFMPVGTVGSVKGVHQRELKEDINADIILGNTYHLYLRPQMPILEKAGGLHKFINWDRNILTDSGGYQVYSLAANRKIKEEGVKFKSHIDGSYHFFSPENVMEIERSIGADIMMAFDECTPYPCEYGYAKRSMHLTHRWLDRCIAHLEKVPPKYGYEQSLFPIVQGSVYKDLRMQSAEYIASKGADGNAIGGLSVGEPVEQMYEMTELVCDILPKDKPRYLMGVGTPINILENIALGVDMMDCVMPTRNARNGMLFTSKGIINIKNKKWEDDFSPLDPDGHTYVDTYYTKAYLRHLFAANEFLGKQIASIHNLGFYLWLVREARRQIIAGTFSQWKTKMVNDMSNRL

SEQ ID NO: 53543 - protein, 376 aa, Capnocytophaga ochracea
  REGION 1..376: note = tr|A0A2X2T3P8|A0A2X2T3P8_CAPOC Queuine tRNA-ribosyltransferase OS=Capnocytophaga ochracea OX=1018; GN = tgt PE=3 SV=1
MDFEILKTDEHTKARAGKITTSHGVIETPIFMPVGTVGSVKGVHQRELKNDINADIILGNTYHLYLRPQTPILEKAGGLHKFINWDRNILTDSGGYQVYSLAANRKIKEEGVKFKSHIDGSFHFFSPEKVMEIERSIGADIMMAFDECTPYPCEYGYAKRSMHLTHRWLDRCIAHLEKVPPKYGYHQSLFPIVQGSVYKDLRTQSAEYIASKNADGNAIGGLSVGEPVEQMYEITELVCDILPKNKPRYLMGVGTPVNILENIALGVDMMDCVMPTRNARNGMLFTAKGIINIKNKKWEDDFSPIDPDGHTYVDTYYTKAYLRHLFAANEFLGKQIASIHNLGFYLWLVREARRQIVAGTFLTWKTKMVTDMSNRL

SEQ ID NO: 53544 - protein, 376 aa, Capnocytophaga ochracea
  REGION 1..376: note = tr|C7M900|C7M900_CAPOD Queuine tRNA-ribosyltransferase OS=Capnocytophaga ochracea (strain ATCC 27872 / DSM 7271 / JCM 12966 / NCTC 12371 / VPI 2845); OX = 521097 GN=tgtPE=3 SV=1
MDFEILKTDEHTKARAGKITTSHGVIETPIFMPVGTVGSVKGVHQRELKDDINADIILGNTYHLYLRPQTPILEKAGGLHKFINWDRNILTDSGGYQVYSLAANRKIKEEGVKFKSHIDGSFHVFSPEKVMEIERSIGADIMMAFDECTPYPCEYGYAKRSMHLTHRWLDRCIAHLEKVPPKYGYHQSLFPIVQGSVYKDLRTQSVEYIASKNADGNAIGGLSVGEPVEQMYEITELVCDILPKNKPRYLMGVGTPVNILENIALGVDMMDCVMPTRNARNGMLFTAKGIINIKNKKWEDDFSSIDPDGHTYVDTYYTKAYLRHLFAANEFLGKQIASIHNLGFYLWLVREARRQIVAGTFLTWKTKMVTDMSNRL

SEQ ID NO: 53545 - protein, 376 aa, Capnocytophaga sp.
  REGION 1..376: note = tr|I9P9C7|I9P9C7_9FLAO Queuine tRNA-ribosyltransferase OS=Capnocytophaga sp. oral taxon 412 str. F0487 OX=1125721 GN=tgt PE=3 SV=1
MDFEILKTDEHTKARAGKITTSHGVIETPIFMPVGTVGSVKGVHQRELKDDINADIILGNTYHLYLRPQTTILEKAGGLHKFINWDRNILTDSGGYQVYSLAANRKIKEEGVKFKSHIDGSFHVFSPEKVMEIERSIGADIMMAFDECTPYPCEYGYAKRSMHLTHRWLDRCIAHLEKVPPKYGYHQSLFPIVQGSVYKDLRTQSAEYIASKNADGNAIGGLSVGEPVEQMYEITELVCDILPKDKPRYLMGVGTPVNILENIALGVDMMDCVMPTRNARNGMLFTAKGIINIKNKKWEDDFSSIDPDGHTYVDTYYTKAYLRHLFAANEFLGKQIASIHNLGFYLWLVREARRQIVAGTFLTWKTKMVTDMSNRL

SEQ ID NO: 53546 - protein, 376 aa, Capnocytophaga sp.
  REGION 1..376: note = tr|A0A0M3RI24|A0A0M3RI24_9FLAO Queuine tRNA-ribosyltransferase OS=Capnocytophaga sp. oral taxon 323 OX=1705617 GN=tgt PE=3 SV=1
MDFEILKTDEHTKARAGKITTSHGVIETPIFMPVGTVGSVKGVHQRELKDDINADIILGNTYHLYLRPQTPILEKAGGLHKFINWDRNILTDSGGYQVYSLAANRKIKEEGVKFKSHIDGSFHVFSPEKVMEIERSIGADIMMAFDECTPYPCEYGYAKRSMHLTHRWLDRCIAHLEKVPPKYGYHQSLFPIVQGSVYKDLRTQSAEYIASKNADGNAIGGLSVGEPVEQMYEITELVCDILPKNKPRYLMGVGTPVNILENIALGVDMMDCVMPTRNARNGMLFTAKGIINIKNKKWEDDFSPIDPDGHTYVDTYYTKAYLRHLFAANEFLGKQIASIHNLGFYLWLVREARRQIVAGTFLTWKTKMVTDMSNRL

SEQ ID NO: 53547 - protein, 376 aa, Capnocytophaga sputigena
  REGION 1..376: note = tr|A0A2A3N2P9|A0A2A3N2P9_CAPSP Queuine tRNA-ribosyltransferase OS=Capnocytophaga sputigena; OX = 1019 GN=tgt PE=3 SV=1
MEFELLKTDEHTKARAGKITTSHGVIETPIFMPVGTVGSVKGVHQRELKNDINADIILGNTYHLYLRPQTSILEKAGGLHKFINWDRNILTDSGGYQVYSLAANRKIKEEGVKFKSHIDGSFHFFSPESVMEIERSIGADIMMAFDECTPYPCEYSYAKRSMHLTHRWLDRCIAHLEKVPPKYGYHQSLFPIVQGSVYKDLRTQSAEYIASKNADGNAIGGLSVGEPVEQMYEMTELVCDILPKDKPRYLMGVGTPINILENIALGVDMMDCVMPTRNARNGMLFTAKGIINIKNKKWEDDFSPIDPDGHTYVDTYYTKAYLRHLFAANEFLGKQIASIHNLGFYLWLVREARRQIIAGTFLQWKTKMVTDMSNRL

SEQ ID NO: 53548 - protein, 376 aa, Capnocytophaga sputigena
  REGION 1..376: note = tr|A0A250F6I3|A0A250F6I3_CAPSP Queuine tRNA-ribosyltransferase OS=Capnocytophaga sputigena; OX = 1019 GN=tgt PE=3 SV=1
MEFELLKTDEHTKARAGKITTSHGVIETPIFMPVGTVGSVKGVHQRELKNDINADIILGNTYHLYLRPQTSILEKAGGLHKFINWDRNILTDSGGYQVYSLAANRKIKEEGVKFKSHIDGSFHFFSPESVMEIERSIGADIMMAFDECTPYPCEYSYAKRSMHLTHRWLDRCIAHLEKVPPKYGYHQSLFPIVQGSVYKDLRTQSAEYIASKNADGNAIGGLSVGEPVEQMYEMTELVCDILPKDKPRYLMGVGTPINILENIALGVDMMDCVMPTRNARNGMLFTAKGIINIKNKKWEDDFSPIDPDGHTYVDTYYTKAYLRHLFAANEFLGKQIASIHNLGFYLWLVREARRQIIAGTFLQWKTKMVADMSNRL

SEQ ID NO: 53549 - protein, 376 aa, unidentified
  source 1..376: note = Capnocytophaga stomatis
  REGION 1..376: note = tr|A0A250FZ73|A0A250FZ73_9FLAO Queuine tRNA-ribosyltransferase OS=Capnocytophaga stomatis; OX = 1848904 GN=tgt PE=3 SV=1
MQFELLKTDPHTKARAGKITTDHGVIETPIFMPVGTVASVKGVHQRELKEDINPDIILGNTYHLYLRPTTHILEQAGGLHKFMNWDRNILTDSGGYQVYSLSDTRKIKEEGVKFKSHIDGSYHFFSPENVMETQRSIGADIIMAFDECTPYPCDYQYAKKSMHMTHRWLDRCISHLEKVPPKYGYSQSLFPIVQGSVYKDLRQQSAEYIASKGADGNAIGGLSVGEPAEDMYEMTDLVCDILPKDKPRYLMGVGTPINILENIALGVDMFDCVMPTRNARNGMLFTSQGIINIKNKKWENDFSPIDPDGHTYVDTYYTKAYLRHLFAANEFLGKQIASIHNLGFYLWLVREARRRILAGDFPIWKENMVKQMANRL

SEQ ID NO: 53550 - protein, 376 aa, unidentified
  source 1..376: note = Caproiciproducens galactitolivorans
  REGION 1..376: note = tr|A0A4Z0Y980|A0A4Z0Y980_9FIRM Queuine tRNA-ribosyltransferase OS=Caproiciproducens galactitolivorans OX=642589 GN=tgt PE=3 SV=1
MYKLIRNEGTARRGELVTPHGTVQTPAFMNVATCGAIKGGLSALDLKELKCQVQLCNTYHLHLRPGDETVKKLGGLHRFTRWDGPILTDSGGFQVFSLAKLRNIQEEGVTFASHIDGHRIFMGPEESMRIQSNLASTIAMAFDECVENPAEYDYARKSCQRTVRWLYRCKAEMDRLNSLPDTINRKQMLWGINQGSTYEDLRIENMRQIRELDLDGYAIGGLAVGESTEEMYCIIEAVEPEMPKDKPRYLMGVGTPENILEAVKRGVDIFDCVMPSRNARHGHVFTWEGCRNLFNAKYTLDEAPLDESCDCPTCRDFSRAYIHHLFKSGEMLAMRLCVTHNIYFYNTLLERIRKSLDEGNFQEFYNNNIRKLDTRI

SEQ ID NO: 53551 - protein, 376 aa, unidentified
  source 1..376: note = Caproiciproducens sp.
  REGION 1..376: note = tr|A0A410Q328|A0A410Q328_9FIRM Queuine tRNA-ribosyltransferase OS=Caproiciproducens sp. NJN-50; OX = 2507162 GN=tgt PE=3 SV=1
MFHLIQNCDAARRGEFTTPHGKIQTPAFMNVATAGAIKGAVSALDLKDLKCQVQLCNTYHLHLRPGDETVRKLGGLHRFTRWDGPILTDSGGFQVFSLAKLRNITEEGVTFASHIDGRKIFMGPEESMKIQSNLASTIAMAFDECVQNPAPYEYARDSCARTVRWLCRSKEAMNRLNREPGTINPRQMLFGINQGSTYEDLRVDCMKRIRDLDLDGYAIGGLAVGESSEEMYRIIEAVVPEMPMDKPRYLMGVGTPGNILEAVRRGVDLFDCVMPTRNARHGHVFTRQGRRNLFNAKYELDDTSLDPDCDCPVCKNFSRAYLHHLFKSGEMLAMRLCVMHNIYFYNSFFEKIRDSLQNETFERFYRENLEVLNRRI

SEQ ID NO: 53552 - protein, 382 aa, unidentified
  source 1..382: note = Capsulimonas corticalis
  REGION 1..382: note = tr|A0A402CSA8|A0A402CSA8_9BACT Queuine tRNA-ribosyltransferase OS=Capsulimonas corticalis; OX = 2219043 GN=tgt PE=3 SV=1
MTSFTLKGVSSDTGARRGELRLPHASLPIQTPVFMPVGTLGTVKAMTQEELSGLGFSLILGNTYHLYLRPGHELVRKAGGLHKFIAWDGAMLTDSGGFQVFSLQDLRKITENGAAFKSHIDGSEHFFSPERSIEVQHALGADIIMAFDECPPYPSTYEQTQSATERTHRWLTRCVAYHKEQASEQLLFGIAQGGTYESLRIESAQFIAAQDTPGIAIGGVSVGEPPEKMLEAVSWSMPYIPKEKPRYLMGVGTPQDILQAVAQGVDMFDCVLPTRLGRTGTFYTMRGRINIKGSRYTEDFGPVDPECSCAVCRRYSAAYLRHLYKCNEILASRLTTYHNLAHYAQLMADIRDAIERDDYASFMQTRLAQYGRKNDMKIEEVA

SEQ ID NO: 53553 - protein, 373 aa, Carboxydocella sporoproducens
  REGION 1..373: note = tr|A0A1T4PHW4|A0A1T4PHW4_9FIRM Queuine tRNA-ribosyltransferase OS=Carboxydocella sporoproducens DSM 16521 OX=1121270 GN=tgt PE=3 SV=1
MPVRYELIKECKETKARVGRLHTPHGVIDTPVFMPVGTQATVKTMTPEELKEIGAQIILANTYHLYLRPGHELIKEAGGLHRFMHWDRPILTDSGGFQVFSLGPLRNITEEGVTFKSHLDGSSHFLSPEKVMEIEMALGSTIAMAFDECAPYPSSYEYARAAMERTTRWAKRCKAAHHKEDQALFGIVQGVTYRDLREQSAAEIVEIDFPGYAIGGLSVGEPKPLMYEVLDYTVPLLPKDKPRYLMGVGSPDCLLEGVALGVDMFDCVLPTRIARNGTCLTSRGKVVIRNAAYARDFSPLDPECDCYTCRNYSRAYLRHLFKAEEVLALRLATIHNLYFLLRLMEGIRQAILEDRFVEFKRQFMAKYEGDQEE

SEQ ID NO: 53554 - protein, 373 aa, Carboxydocella thermautotrophica; identical to SEQ ID NO: 53553
  REGION 1..373: note = tr|A0A2R4N312|A0A2R4N312_9FIRM Queuine tRNA-ribosyltransferase OS=Carboxydocella thermautotrophica OX=178899 GN=tgt PE=3 SV=1

SEQ ID NO: 53555 - protein, 371 aa, Carboxydothermus hydrogenoformans
  REGION 1..371: note = tr|Q3ABY7|Q3ABY7_CARHZ Queuine tRNA-ribosyltransferase OS=Carboxydothermus hydrogenoformans (strain ATCC BAA-161 / DSM 6008 / Z-2901); OX = 246194 GN=tgt PE=3 SV=1
MFSFKLLKKDPNTRARLGLLKTFHNVVETPVFMPVGTLATVKTMSPEELKGIGAQIILSNTYHLYLRPGEELIAKAGGLHKFMNWDRAILTDSGGFQVFSLGPLRTISEEGVTFKSHIDGSTHFMSPEKAVKIQEALGSDIAMVFDECAPYPSEYSYAKEAMKRTYRWAKRCKEVHRREDQVLFGIVQGSIYPDLRVESAKYLTELDFPGYAVGGLSVGEPKPLMYEMLEVLEPHLPQDKPRYLMGVGSPDALIEGVIRGIDMFDCVLPTRIARNGTVFTRYGKLVVRNAAYKEDFRPIEEDCQCYTCRNYSRAYIRHLLHNDEVLGIRLTTIHNLHFLINLMKEIRKAIKEERLLVFAREFLQNYEQGKE

SEQ ID NO: 53556 - protein, 371 aa, Carboxydothermus islandicus
  REGION 1..371: note = tr|A0A1L8D1I8|A0A1L8D1I8_9THEO Queuine tRNA-ribosyltransferase OS=Carboxydothermus islandicus; OX = 661089 GN=tgt PE=3 SV=1
MFSFKLLKKDPSTKARLGLLKTFHNVVETPVFMPVGTLATVKTMSPEELKGIGAQIILANTYHLYLRPGEELIAKAGGLHKFMNWDRAILTDSGGFQVFSLGPLRTISEEGVTFKSHIDGSTHFMSPEKAVKIQEALGSDIAMVFDECAPYPSEYSYAKEAMKRTHRWAKRCKEAHRREDQVLFGIVQGSVYPDLRVESARYLTELDFPGYAVGGLSVGEPKPLMYEMLEVLEPHLPQDKPRYLMGVGSPDALIEGVIRGIDMFDCVLPTRIARNGTVFTRYGKLVVRNAAYKDDFRPLEEDCQCYTCRNYSRAYIRHLLHNDEVLGIRLTTIHNLHFLINLMKEIRKAIKEERLLAFAREFLQNYEQGKE

SEQ ID NO: 53557 - protein, 371 aa, unidentified
  source 1..371: note = Carboxydothermus pertinax
  REGION 1..371: note = tr|A0A1L8CXY8|A0A1L8CXY8_9THEO Queuine tRNA-ribosyltransferase OS=Carboxydothermus pertinax; OX = 870242 GN=tgt PE=3 SV=1
MFSFKVLKKDPKTRARLGLLKTFHNAVETPVFMPVGTLATVKTMSPEELKELGAEIILSNTYHLYLRPGEQLIAKAGGLHKFMNWDRAILTDSGGFQVFSLGPLRTITEEGVTFKSHIDGSTHFMSPEKAVKIQEALGSDIAMVFDECAPYPADYSYAREAMLRTHRWAKRCKEVHQREDQVQFGIIQGSTYADLRVESAKYLTELDFPGYAIGGLSVGEPKPLMYEMLEVLEPHLPADKPRYLMGVGSPDALIEGVIRGIDMFDCVLPTRIARNGTVFTKYGKLVVRNAIFKEDFRPIEEDCQCYTCRNYSRAYIRHLLHNDEVLGIRLTTIHNLHFLINLMREIKKAIREDRLLSFAWEFLQNYEQGKE

SEQ ID NO: 53558 - protein, 376 aa, unidentified
  source 1..376: note = Carboxylicivirga sp.
  REGION 1..376: note = tr|A0A553GPV6|A0A553GPV6_9BACT Queuine tRNA-ribosyltransferase OS=Carboxylicivirga sp. M1479; OX = 2594476 GN=tgt PE=3 SV=1
MKFELQHTDAKSSARAGKVTTDHGTIETPIFMPVGTVGSVKGVHFRDLEDDVKAQIILGNTYHLYLRPGLDILKAAGGLHKFNGWDKPVLTDSGGYQVFSLSDNRKLTEEGAVFRSHLDGSKHLFTPENVVDTQRVIGADIIMALDECPPGDAEYAYAKKSMELTHRWLKRGVDHFDQTEPLYGHSQTFFPIVQGAGYRDLRTQSAEFIASQNREGNAIGGLAVGEPTEVMYEMVELVNGILPKDKPRYLMGVGTPANLLENIALGVDMFDCVMPTRNGRNGMLFTSEGILNMRNEKWKNDFSPVDPNGTSFVDQRYSKAYLRHLYVSKEMLAAQIGSQHNLTFYLWLVGEARKHILAGDFAQWKEVMVKKLTTRL

SEQ ID NO: 53559 - protein, 374 aa, unidentified
  source 1..374: note = Cardinium endosymbiont
  REGION 1..374: note = tr|K0P028|K0P028_9BACT Queuine tRNA-ribosyltransferase OS=Cardinium endosymbiont cEper1 of Encarsia pergandiella OX=1231626 GN=tgt PE=3 SV=1
MQFSVIHEDQHSKARAGLITTSKGIIRTPIFMPVGTIGSVKSIPQGVLRDQINADIILGNTYHLYLRPGTKVLDAAGGLHTFMGWHRPILTDSGGYQVYSLADRRQLTEAGVTFRSHIDGSRHLFTPELVVDIQRSIGSDIMMVLDECTPYPCSYHYAKASMERTHRWLKRGINYFDATLTNQHAHQALFPIVQGSIYKDLRIQSAETIAAADRPGNAIGGVCHPDGQLYEITELVCSILPRSKPRYLMGVGTPLDLLECIALGVDMFDCIMPTRNGRNGTLFTTQGILNIRNKKWAYDFSPIDGALGGPVSGYYSKAYLRHLITSKELLGAQLASVHNLTFYLWLVRQAREQIQQNSFVAWKNHIVKTIMAKI

SEQ ID NO: 53560 - protein, 374 aa, unidentified
  source 1..374: note = Cardinium endosymbiont
  REGION 1..374: note = tr|A0A345PNA4|A0A345PNA4_9BACT Queuine tRNA-ribosyltransferase OS=Cardinium endosymbiont of Sogatella furcifera OX=650378 GN=tgt PE=3 SV=1
MQFLVEHVDRHSKARAGLITTSRGTIRTPIFMPVGTIGSVKSVTQQVLQDQLDADIILGNTYHLYLRPGTKVLDAAGGLHPFMGWHRPILTDSGGYQVYSLAGNRKLTEAGVTFRSHIDGSTHLFTPEGVIDIQRSIGSDIMMVLDECTPYPCSYHYAKASMERTHRWLKRGIDYFDATLTESYAHQTLFPIVQGSIYKDLRIQSAETIAAADRPGNAIGGVCHPTGQLYELTELVCSILPSTKPRYLMGVGTPMDLLECIALGVDMFDCVMPTRNGRNGTLFTTQGILNIKNKKWAYDFSPIDATLGGPVSGYYSKAYLRHLITAKERLGAQLASVHNLTFYLWLVRQARAQIQQGTFVAWKNRIRQTIMEKI

SEQ ID NO: 53561 - protein, 368 aa, Cardiobacterium hominis
  REGION 1..368: note = tr|C8N9K5|C8N9K5_CARH6 Queuine tRNA-ribosyltransferase OS=Cardiobacterium hominis (strain ATCC 15826 / DSM 8339 / NCTC 10426 / 6573) OX=638300; GN = tgt PE=3 SV=1
MQYQLFTQDGSARRGRITFPNGQTVETPVFMPVGTLGTVKGLAPEELHAMGAEIILGNTFHLMLRPGEDIVAAHGGLHQFMHWDKPILTDSGGFQVFSLAKIRKLTEEGARFRSPVDGSEVFLSPERSMQVQRALNSNIVMQLDECTPYPATHEEAEKSMRLSLRWAARSKAAHAGNPNHLFGIVQGGIYPDLRRESAEGLVALDLPGYAVGGLAVGEPLEMRNATLEHTLPHLPVTKPRYLMGVGKPEDIVEGVRRGVDMFDCVMPTRNARNAYLFTRFGTLKLRNTIHKRDLRPIEEGCDCYTCRHYSRAYLHHLDKCNEMLGARLNTIHNLRYYIRLMHDMRAAIEQGRFASFADDFYAMRRQGA

SEQ ID NO: 53562 - protein, 368 aa, Cardiobacterium hominis; identical to SEQ ID NO: 53561
  REGION 1..368: note = tr|A0A1C3H2K1|A0A1C3H2K1_9GAMM Queuine tRNA-ribosyltransferase OS=Cardiobacterium hominis OX=2718; GN = tgt PE=3 SV=1

SEQ ID NO: 53563 - protein, 371 aa, Cardiobacterium valvarum
  REGION 1..371: note = tr|A0A381ED00|A0A381ED00_9GAMM Queuine tRNA-ribosyltransferase OS=Cardiobacterium valvarum; OX = 194702 GN=tgt PE=3 SV=1
MHYTLITQDGDARRGYITFPGGQVVQTPVFMPVGTLGTVKGLAPEELHAIGAEIILGNTFHLMLRPGADIVAAHGGLHQFMHWDKPILTDSGGFQVFSLAKIRKLTEEGARFRSPVDGSEVFLSPERSMQVQRALNSNIVMQLDECTPYPATHEEAAKSMRLSLRWAARSKAAHEGNPNHLFGIVQGGIYPDLRRESAEGLVALDLPGYAVGGLAVGEPLEARNDTLDHTLPHLPAHKPRYLMGVGKPEDIVEGVRRGIDMFDCVMPTRNARNAYLFTRFGTLKLRNSVHKRDLRPIEEGCDCYTCRHYSRAYLHHLDKCNEMLGARLNTIHNLRYYIRLMHDMRAAIEAGRFASFAADFYAMRRAGASTL

SEQ ID NO: 53564 - protein, 381 aa, Carnobacterium alterfunditum
  REGION 1..381: note = tr|A0A1N6G9J1|A0A1N6G9J1_9LACT Queuine tRNA-ribosyltransferase OS=Carnobacterium alterfunditum; OX = 28230 GN=tgt PE=3 SV=1
MTEPAIKYRLIKKEKHTGARLGEIITPHGTFQTPMFMPVGTLATVKSIAPEELESMGADIILSNTYHLWLRPGEDIVEEAGGLHKFMNWDKGILTDSGGFQVFSLSDMRKIEEEGVHFRNHLNGSKMFLSPEKAINIQNKLGPDIMMSFDECPPFDESFDYVKKSVERTSRWAERGLKAHGKPNSQGLFGIIQGAGFKELRQQSARDLVSMDFPGYSIGGLSVGEPKQSMNRVLEYTTPFIPEDKPRYLMGVGTADSLIDGVIRGVDMFDCVLPTRIARNGTCMTSKGRVVIKNAQYERDFGPLDAKCDCYTCRNYTRAYIRHLIKANETFGLRLTSYHNLYFLLNVMKEVRQAIMDDNLLEYRESFFEEYGFNKPNARNF

SEQ ID NO: 53565 - protein, 381 aa, Carnobacterium divergens
  REGION 1..381: note = tr|A0A2R8A231|A0A2R8A231_CARDV Queuine tRNA-ribosyltransferase OS=Carnobacterium divergens; OX = 2748 GN=tgt PE=3 SV=1
MTEPAIKYRLIKKEKHTGARLGEIITPHGTFPTPMFMPVGTLATVKSIAPEELDAMGAGIILSNTYHLWLRPGEDIVQEAGGLHKFMNWDKGILTDSGGFQVFSLSDMRRIEEEGVHFRNHLNGSKMFLSPEKAIDIQNKLGPDIMMSFDECPPFEESFEYVKKSIERTSRWAERGLKAHANPSTQGLFGIIQGAGYKELRQQSARDLISMDFPGYSIGGLSVGEPKHLMNEVLEYTTPLIPEDKPRYLMGVGSADSLIDGVIRGVDMFDCVLPTRIARNGTCMTSAGRLVVKNAQYERDFRPIDEKCDCHTCKNYSRAYIRHLIKADETFGLRLTSYHNLYFLQNLMKNVRQAIMDDNLLEFREAFFEEYGFNKPNAKNF

SEQ ID NO: 53566 - protein, 387 aa, Carnobacterium divergens
  REGION 1..387: note = tr|A0A0R2HQ80|A0A0R2HQ80_CARDV Queuine tRNA-ribosyltransferase OS=Carnobacterium divergens DSM 20623 OX=1449336 GN=tgt PE=3 SV=1
MKVGEKMTEPAIKYRLIKKEKHTGARLGEIITPHGTFPTPMFMPVGTLATVKSIAPEELDAMGAGIILSNTYHLWLRPGEDIVQEAGGLHKFMNWDKGILTDSGGFQVFSLSDMRRIEEEGVHFRNHLNGSKMFLSPEKAIDIQNKLGPDIMMSFDECPPFEESFEYVKKSIERTSRWAERGLKAHANPSTQGLFGIIQGAGYKELRQQSARDLISMDFPGYSIGGLSVGEPKHLMNEVLEYTTPLIPEDKPRYLMGVGSADSLIDGVIRGVDMFDCVLPTRIARNGTCMTSAGRLVVKNAQYERDFRPIDEKCDCHTCKNYSRAYIRHLIKADETFGLRLTSYHNLYFLQNLMKNVRQAIMDDNLLEFREAFFEEYGFNKPNAKNF

SEQ ID NO: 53567 - protein, 381 aa, unidentified
  source 1..381: note = Carnobacterium iners
  REGION 1..381: note = tr|A0A1X7NQL2|A0A1X7NQL2_9LACT Queuine tRNA-ribosyltransferase OS=Carnobacterium iners OX=1073423; GN = tgt PE=3 SV=1
MPEPAIKYRLIKKEKHTGARLGEIITPHGTFETPMFMPVGTLATVKSIAPEELESMGANIILSNTYHLWLRPGEDIVEEAGGLHKFMNWDKGILTDSGGFQVFSLSDLRQIEEKGVHFRNHLNGSKMFLSPEKAIQIQNKLGPDIMMSFDECPPFDESFDYVKKSVERTTRWAERGLKAHTKPNSQGLFGIIQGAGYKELREQSAKELVAMDFPGYSIGGLSVGEPKHSMNEVLEYTTPLIPENKPRYLMGVGTADSLIDGVIRGVDMFDCVLPTRIARNGTVMTSQGRVVIKNAKYERDFGPLDPKCDCYTCKNYSRAYIRHLIKADETFGLRLTSYHNLYFLLNVMKDVRQAIREDNLLEYRESFFEEYGYNKPNAKNF

SEQ ID NO: 53568 - protein, 381 aa, Carnobacterium inhibens
  REGION 1..381: note = tr|U5S8A1|U5S8A1_9LACT Queuine tRNA-ribosyltransferase OS=Carnobacterium inhibens subsp. gilichinskyi OX=1266845 GN=tgt PE=3 SV=1
MPEPAIKYRLIKKEKHTGARLGEIITPHGTFPTPMFMPVGTLASVKSLAPEELESMGASIILSNTYHLWLRPGEDIVEEAGGLHKFMNWDKGILTDSGGFQVFSLSDLRRIEEEGVHFRNHLNGSKMFLSPEKAINIQNKLGPDIMMSFDECPPFDESFDYVKKSVERTSRWAERGLKAHAKPDSQGLFGIIQGAGFKELRQQSARDLVSMDFPGYSIGGLSVGEPKESMNKVLEYTTPFIPEDKPRYLMGVGTADSLIDGVMRGVDMFDCVLPTRIARNGTCMTSKGRVVIKNAQYERDFGPLDDKCDCYTCRNYTRAYIRHLIKADETFGLRLTSYHNLYFLLNVMKDVRQAIMDDNLLEYRESFFEEYGYNKPNARNF

SEQ ID NO: 53569 - protein, 381 aa, Carnobacterium maltaromaticum
  REGION 1..381: note = tr|A0A0R2IBC9|A0A0R2IBC9_CARML Queuine tRNA-ribosyltransferase OS=Carnobacterium maltaromaticum DSM 20342 OX=1449341 GN=tgt PE=3 SV=1
MTEPAVKYRLIKKEKHTGARLGEIITPHGTFQTPMFMPVGTLATVKSIAPEELDAMGAGIILSNTYHLWLRPGEDIVEEAGGLHKFMNWDKGILTDSGGFQVFSLSDMRRIEEEGVHFRNHLNGSKMFLSPEKAINIQNKLGPDIMMSFDECPPFDESFDYVKKSVERTSRWAERGLKAHANPDYQGLFGIIQGAGYRELREQSARDLVSMDFPGYSIGGLSVGEPKHLMNEVLEYTTPLIPEHKPRYLMGVGSADSLIDGVIRGVDMFDCVLPTRIARNGTCMTSAGRLVVKNAQYERDFRPLDEKCDCHTCKNYTRAYIRHLIKADETFGLRLTSYHNLYFLQNLMKNVRQAIMDDNLLEFREAFFEEYGFNKPNAKNF

SEQ ID NO: 53570 - protein, 381 aa, Carnobacterium maltaromaticum; identical to SEQ ID NO: 53569
  REGION 1..381: note = tr|A0A494QSC2|A0A494QSC2_CARML Queuine tRNA-ribosyltransferase OS=Carnobacterium maltaromaticum; OX = 2751 GN=tgt PE=3 SV=1

SEQ ID NO: 53571 - protein, 381 aa, Carnobacterium sp.
  REGION 1..381: note = tr|A8U9M4|A8U9M4_9LACT Queuine tRNA-ribosyltransferase OS=Carnobacterium sp. AT7; OX = 333990 GN=tgt PE=3 SV=1
MAEPAIKYRLIKKEKHTGARLGEIITPHGTFQTPMFMPVGTLATVKSIAPEELESMGASIILSNTYHLWLRPGEDIVEEAGGLHKFMNWDKGILTDSGGFQVFSLSDLRRIEEEGVHFRNHLNGSKMFLSPEKAINIQNKLGPDIMMSFDECPPFDESFDYVKKSVERTSRWAERGLNAHAKPNSQGLFGIIQGAGFKELRQQSARDLISMDFPGYSIGGLSVGEPKESMNRVLEYTTPLIPDDKPRYLMGVGTADSLIDGVMRGVDMFDCVLPTRIARNGTCMTSKGRVVIKNAQYERDFGPLDDKCDCYTCRNYTRAYIRHLIKADETFGLRLTSYHNLYFLLNVMKNVRQAIMDDNLLEYRESFFEEYGYNKPNARNF

SEQ ID NO: 53572 - protein, 380 aa, Carnobacterium sp.
  REGION 1..380: note = tr|A0A5C1LLT3|A0A5C1LLT3_9LACT Queuine tRNA-ribosyltransferase OS=Carnobacterium sp. PL26RED25; OX = 2592352 GN=tgt PE=3 SV=1
MTSSALKYTLHKKEKHTGARLGQVETPHGTIETPVFMPVGTQASVKAVSPEELTDMNAQIILSNTYHLWLRPGDDLVKEAGGLHQFMNWDKPILTDSGGFQVFSLADSRKIEEEGVTFKSHLDGKKLFLSPEKAIHIENNLGADIIMSFDECPDFNHDHNYVEKSIHRTTRWAERGLNAHQRPDDQALFGILQGAGYKDLRLQHAKDMIGLDFPGYSIGGLSVGESKEDMYKVLDYITPVMPEDKPRYLMGVGSPDALIEGVIRGIDMFDCVLPTRIARNGTTMTSQGRVVIKNAQYARDFTPLDPNCDCYTCRNYTRAYIRHLLKANETFALRLTSIHNLHFLINLMEQIKDAIREDRLLDFRDEFFLQYYGKVQKTAF

SEQ ID NO: 53573 - protein, 381 aa, Carnobacterium viridans
  REGION 1..381: note = tr|A0A1H1BC15|A0A1H1BC15_9LACT Queuine tRNA-ribosyltransferase OS=Carnobacterium viridans; OX = 174587 GN=tgt PE=3 SV=1
MSEPAIKYRLIKKEKHTGARLGEIITPHGTFPTPMFMPVGTLATVKSIAPEELESMGANIILSNTYHLWLRPGEDIVEEAGGLHKFMNWDKGILTDSGGFQVFSLSDLRRIEEEGVHFRNHLNGSKMFLSPEKAINIQNKLGPDIMMSFDECPPFDESFDYVKKSVERTSRWAERGLKAHAKPDSQGLFGIIQGAGFKELRQQSARDLVSMDFPGYSIGGLSVGEPKESMNKVLEYTTPLIPDDKPRYLMGVGTADSLIDGVMRGVDMFDCVLPTRIARNGTCMTSKGRVVIKNAQYERDFGPLDDKCDCYTCRNYTRAYIRHLIKADETFGLRLTSYHNLYFLLNVMKDVRQAIMDDNLLEYRESFFEEYGYNKPNARNF

SEQ ID NO: 53574 - protein, 381 aa, Caryophanon latum
  REGION 1..381: note = tr|A0A1C0Z5D1|A0A1C0Z5D1_9BACL Queuine tRNA-ribosyltransferase OS=Caryophanon latum OX=33977; GN = tgt PE=3 SV=1
MTQLPIRYELIKTCAQTGARLGIVHTPHGSFETPTFMPVGTQATVKAMSPEELKEMNAGIILSNTYHLWLRPGNDIVKEAGGLHKFMNWDRPILTDSGGFQVFSLSKFRKIEEEGVHFRNHLNGDKLFLSPEKAMEIQNDLGSDIMMAFDECPPFPATYEYMEASVDRTTRWAKRCKEAHKRPDEQGLFGIIQGGEFEELRRKSAEALVELDFPGYAIGGLSVGEPKDIMNKVLDFTAPLMPADKPRYLMGVGSPDSLIDGAIRGIDMFDCVLPTRIARNGTLMTSEGRMVIKNAKFARDFRPIDENCDCYTCKNYSRAYVRHLMRTEETFGLRLTSFHNLRFLINLMEQVRQAIREDRLGDFKEEFFEKYGYNVPNPKNF

SEQ ID NO: 53575 - protein, 381 aa, Caryophanon tenue
  REGION 1..381: note = tr|A0A1C0YMS0|A0A1C0YMS0_9BACL Queuine tRNA-ribosyltransferase OS=Caryophanon tenue OX=33978; GN = tgt PE=3 SV=1
MTQPPIRYELIKTCAQTGARLGIVHTPHGSFETPTFMPVGTQATVKAMSPEELKEMNAGIILSNTYHLWLRPGNDIVKEAGGLHKFMNWDRPILTDSGGFQVFSLSKFRKIEEEGVHFRNHLNGDKLFLSPEKAMEIQNDLGSDIMMAFDECPPFPATHEYMLKSVDRTTRWAKRCKEAHQRPDEQGLFGIIQGGEYEDLRRRSAEALIELDFPGYAIGGLSVGEPKDIMNKVLDFTAPMMPADKPRYLMGVGSPDSLIDGAMRGIDMFDCVLPTRIARNGTLMTSEGRMVIKNAKFARDFRPIDENCDCYTCKNYTRAYVRHLLRTEETFGLRLTSYHNLRFLINLMEQVREAIREDRLGDFKEEFFEKYGYNVPNPKNF

SEQ ID NO: 53576 - protein, 378 aa, Castellaniella defragrans
  REGION 1..378: note = tr|W8X5E0|W8X5E0_CASDE Queuine tRNA-ribosyltransferase OS=Castellaniella defragrans 65Phen OX=1437824 GN=tgt PE=3 SV=1
MTGLRFDLLHTDGAARRGRLTLNHGVVQTPIFMPVGTYGSVKAMLPHELEEIGAQIVLGNTFHLWLRPGTDILDRHGGLHGFMQWDRPILTDSGGFQVFSLDGMRKITEEGVRFASPIDGARLFLTPEESMRIQRSLNSDIAMVLDECTPYRIGERPATHEEAAASMRMSLRWARRSRQAFLELGNPNALFGIIQGGMYEDLRDESLAGLTEIGFEGYAIGGLSVGEPKEDMMRVLAHVTPRMPAQAPRYLMGVGTPEDLVEGVSRGVDMFDCVMPTRNARNGWLFTRHGDLKIRNARYRDDTRPLDPACGCHTCRHFSRAYLHHLQRAGEITGARLNTLHNLHFYLRLMAEMRTAIEEDRFESWRAAFHRDRARGIE

SEQ ID NO: 53577 - protein, 378 aa, Castellaniella sp.
  REGION 1..378: note = tr|A0A522TYT4|A0A522TYT4_9BURK Queuine tRNA-ribosyltransferase OS=Castellaniella sp. OX=1955812; GN = tgt PE=3 SV=1
MTGLHFELLHTDGAARRGCLTLNHGTIQTPIFMPVGTYGSVKAMLPDELESIGAQIVLGNTFHLWLRPGTEVLDAHGGLHGFMQWPRPILTDSGGFQVFSLNGMRKITEEGVKFASPIDGSRLFLSPEESMRIQHSLNSDIAMVLDECTPYQISGRPATHEEAATSMRMSLRWARRSRTAFQERQNPNALFGIIQGGMYEDLRDESLAGLTDIGFEGYAIGGLSVGEPKEDMMRMLAHVTPRMPAQAPRYLMGVGTPEDLVEGVRTGVDMFDCVMPTRNARNGWLFTRHGDIKIRNARYRNDTRPLDPSCACHTCRHFSRAYLHHLQRVGEITGARLNTLHNLHFYLNLMTEMRTAIENDRFETWRAQFQVDRASGIS

SEQ ID NO: 53578 - protein, 373 aa, unidentified
  source 1..373: note = Catabacter hongkongensis
  REGION 1..373: note = tr|A0A0M2NK42|A0A0M2NK42_9FIRM Queuine tRNA-ribosyltransferase OS=Catabacter hongkongensis; OX = 270498 GN=tgt PE=3 SV=1
MGYNRNFDFKVEAVDGFSRARTGVLKTPHGEIKTPVFMPVGTQATVKAMTNDQVLECGAQIILGNTYHLYMRPGHELIREAGGLHQFMNWKKPILTDSGGFQVFSLGDLRKLTEEGAAFQSHLDGSRHMFTPEKVVAIQEALGSDIMMVLDECTPYPADFAYTKHSMERTHRWAKRCRDAQQNDKQALFGIVQGGMYPELRKISAEEIARLDFIGNAIGGLSVGEPKPMMYEMLDAVTEILPEDKPRYLMGVGSADCLVEGVARGVDMFDCVLQTRIARNGTALVRNGKLVIRNAEYAKDFRPIDESCDCYACRNHTRAYIRHLVKTNEILGAILLSIHNTRFTIRLMEEIRGHIQTGTFEEFRREFMADFQI

SEQ ID NO: 53579 - protein, 376 aa, unidentified
  source 1..376: note = Catalinimonas alkaloidigena
  REGION 1..376: note = tr|A0A1G9UA16|A0A1G9UA16_9BACT Queuine tRNA-ribosyltransferase OS=Catalinimonas alkaloidigena; OX = 1075417 GN=tgt PE=3 SV=1
MKFTLVGTDLHSKARLGQVETAHGTIETPIFMPVGTVGTVKAVQQRELQTDIDAQIILGNTYHLFLRPGLPILEKAGGLHRFMNWNGPILTDSGGYQVYSLAGTRKIKEEGVTFRSHIDGSKHTFTPEGVMDIQRSIGADIIMAFDECPPYPCDFRYARESLDMTHRWLKRCCDRFDTTSGRYGYEQTLFPIVQGGVYPELRRHSAETIAALGREGNAIGGLSVGEPTEQMYEMTELVCDILPTDKPRYLMGVGTPANILEAIALGVDMFDCVMPTRNARNGMLFTTQGIMNMRNEKWKNDFTPLDEGLGGHVSTTYSRAYVRHLFASKEMLGPQIASIHNLTFYLWLVREARRHIQEGTFLAWKNQMVEQLMRRL

SEQ ID NO: 53580 - protein, 381 aa, Catellicoccus marimammalium
  REGION 1..381: note = tr|K8ZKG4|K8ZKG4_9ENTE Queuine tRNA-ribosyltransferase OS=Catellicoccus marimammalium M35/04/3 OX=1234409 GN=tgt PE=3 SV=1
MTEHPIRYRLIKKEKYTGARLGELITPHGTFPTPMFMPVGTLATVKTMSPEELKEMGAGVILSNTYHLWLRPGDEIVKEAGGLHSFMNWDQPILTDSGGFQVWSLSDMRQIEEEGVHFRNHLNGEKLFLSPEKAIQIQNNLGSDIMMSFDECPPFYESYDYVKKSIERTSRWAERGLKANQNPDRQGLFGIVQGAGFEDLRRQSAHDLVNMDFAGYSIGGLSVGESKQEMNEVLEYTTPLLPENKPRYLMGVGTADSLIDGVIRGVDMFDCVLPTRIARNGTCMTHNGRLVVKNAKYARDFRPIDEHCNCHVCRNYSRAYIRHLIKCNESFGMRLTSYHNLYFLLDVMRDIRQAIMDDNLLEFREAFFEQYGFNAENPKNF

SEQ ID NO: 53581 - protein, 392 aa, Catenibacterium mitsuokai
  REGION 1..392: note = tr|E2NVU7|E2NVU7_CATMR Queuine tRNA-ribosyltransferase OS=Catenibacterium mitsuokai (strain DSM 15897 / JCM 10609 / CIP 106738 / RCA14-39); OX = 451640 GN=tgt PE=3 SV=1
MAIFSYNRQGYRGDIMKDFWYECKHVCKQTGARYGILHTPHGDVETPMFMPVGTLATVKGISPEQLKEMGSQVVLANTYHLWLRPGSDIVRDAGGLHQFMNYDGPILTDSGGFQVFSLGKTRKIEEEGVTFKSIVDGSKLFLSPEKSIAIQEDLGADIIMSFDECAPYPCTHDYMKNSVERTLRWAKRGQEAHKREDQALFGIVQGGEFADLRELSAKTLVDMDFPGYSIGGTSVGEPKPIMYKMIEDSVKWLPEDKPRYLMGVGNPIDLIEGAMRGIDMFDCVLPTRVARHGALMTHHGRMNINNEKYKRDFTPIDDKCHCYACRNYTRAYLRHLHKCDEIFGKSLLSIHNVAFLLDLAADIRKAIQEDRLADFKEEFLEQYGRDVYERAF

SEQ ID NO: 53582 - protein, 377 aa, Catenibacterium sp.
  REGION 1..377: note = tr|A0A373I5D8|A0A373I5D8_9FIRM Queuine tRNA-ribosyltransferase OS=Catenibacterium sp. AM22-15; OX = 2292991 GN=tgt PE=3 SV=1
MKDFWYECKHVCKQTGARYGILHTPHGDVETPMFMPVGTLATVKGISPEQLKEMGSQVVLANTYHLWLRPGSDIVRDAGGLHQFMNYDGPILTDSGGFQVFSLGKTRKIEEEGVTFKSIVDGSKLFLSPEKSIAIQEDLGADIIMSFDECAPYPCTHDYMKNSVERTLRWAKRGQEAHKREDQALFGIVQGGEFADLRELSAKTLVDMDFPGYSIGGTSVGEPKPIMYKMIEDSVKWLPENKPRYLMGVGNPIDLIEGAIRGIDMFDCVLPTRVARHGALMTHHGRMNINNEKYKRDFTPIDDKCHCYACRNYTRAYLRHLHKCDEIFGKSLLSIHNVAFLLDLAADIRKAIQEDRLADFKEEFLEQYGRDVYERAF

SEQ ID NO: 53583 - protein, 377 aa, Catenibacterium sp.
  REGION 1..377: note = tr|R7GNT8|R7GNT8_9FIRM Queuine tRNA-ribosyltransferase OS=Catenibacterium sp. CAG:290; OX = 1262767 GN=tgt PE=3 SV=1
MKDFWYECKHVCKQTGARYGILHTPHGDVETPMFMPVGTLATVKGISPEQLKEMGSQVVLANTYHLWLRPGSDIVRDAGGLHQFMNYDGPILTDSGGFQVFSLGKTRKIEEEGVTFKSIVDGSKLFLSPEKSIAIQEDLGADIIMSFDECAPYPCTHDYMKNSVERTLRWAKRGQEAHKREDQALFGIVQGGEFADLRELSAKTLVDMDFPGYSIGGTSVGEPKPIMYKMIEDSVKWLPEDKPRYLMGVGNPIDLIEGAMRGIDMFDCVLPTRVARHGALMTHHGRMNINNEKYKRDFTPIDDKCHCYACRNYTRAYLRHLHKCDEIFGKSLLSIHNVAFLLDLAADIRKAIQEDRLADFKEEFLEQYGRDVYERAF

SEQ ID NO: 53584 - protein, 374 aa, Catenovulum agarivorans
  REGION 1..374: note = tr|W7QDX1|W7QDX1_9ALTE Queuine tRNA-ribosyltransferase OS=Catenovulum agarivorans DS-2; OX = 1328313 GN=tgt PE=3 SV=1
MKFEKMAEDGQARRGRLHFERGVVETPAFMPVGTYGTVKGMSPDELEAIGAHICLGNTFHLMLRPGTEIIRMHGDLHDFMNWQKPILTDSGGFQVFSLGELRKITEQGVIFRSPINGERIELTPEKAMQVQRELGSDIVMIFDECTPYPATEEQARTSMELSLRWAKRSKDAHEGNPSALFGIVQGGMYPHLREESLNGLEEIGFDGYAIGGLSVGEPKEDMINILNNLTDKMPTNKPRYLMGVGKPEDIVEAVRRGIDMFDCVMPTRNARNGHIFVSDGVVKLRNAKHKTDTGPLDENCDCYTCKNYSRAYLHHLDKCNEILGARLNTIHNLRYYQRLMEQLRDAIAAGELEQFVEEFYAARGLPVPPLDNQD

SEQ ID NO: 53585 - protein, 372 aa, unidentified
  source 1..372: note = Catenovulum maritimum
  REGION 1..372: note = tr|A0A0J8GW85|A0A0J8GW85_9ALTE Queuine tRNA-ribosyltransferase OS=Catenovulum maritimum; OX = 1513271 GN=tgt PE=3 SV=1
MKFEKLATDGKARRGRITFARGVVETPAFMPVGTYGTVKGLSPDEVKDTGAHICLGNTFHLMLRPGTEIIKMHGDLHDFMNWSGPILTDSGGFQVFSLGDLRKISEEGVVFRSPINGERIELTPEKAMHVQRDLGSDIVMIFDECTPYPATEEEARSSMELSLRWAQRSKDAHDGNPSALFGIVQGGMYPHLRQESLNGLEQIGFDGYAIGGLSVGEPKEDMINILDEIAYKLPEDKPRYLMGVGKPEDLVEAVRRGIDMFDCVMPTRNARNAHIFVSDGVLKLRNAKHKTDTDPLDKNCDCYTCKNYSRAYLHHLDKCNEILGSRLNTIHNLHFYQKVMQGLRDAIEQGRLEEHVEEFYAARGLPVPPLKD

SEQ ID NO: 53586 - protein, 381 aa, Catenovulum sp.
  REGION 1..381: note = tr|A0A2S0VMT9|A0A2S0VMT9_9ALTE Queuine tRNA-ribosyltransferase OS=Catenovulum sp. CCB-QB4; OX = 2172099 GN=tgt PE=3 SV=1
MKFEKITTEGKARRGRLIFERGVVETPAFMPVGTYGTVKGMSPDEIKDIGAHIVLGNTFHLMLRPGTEIIRQHGDLHDFMNWQGPILTDSGGFQVFSLGDLRKINEDGVIFRSPINGERIELTPEKAMQVQRELGSDIVMIFDECTPYPATEKEARDSMELSLRWAQRSKDAHDGNPNALFGIVQGGMYPHLRDESLEGLVNIEFDGYAIGGLSVGEPKEDMINILDHLAWKMPEDKPRYLMGVGKPEDLVEAVRRGIDMFDCVMPTRNARNGHIFVSDGVLKLRNARHKTDTGPLDENCDCYTCKNYSRAYLHHLDKCNEILGARLNTIHNLRFYQKLMSDMRDALEAGAFAKFVEDFYAARDLPVPPLADIGFNKAESN

SEQ ID NO: 53587 - protein, 376 aa, Catonella morbi
  REGION 1..376: note = tr|V2Y945|V2Y945_9FIRM Queuine tRNA-ribosyltransferase OS=Catonella morbi ATCC 51271; OX = 592026 GN=tgt PE=3 SV=1
MYRLLCKDGSAKRGEFTTVHGVIQTPVFMNVGTAAAIKGAVSTEDLGNLKTQVELSNTYHLHLRPGDEVIKKLGGIHKFMVWDKPVVTDSGGFQVFSLAKLRKIKEEGVKFSSHIDGRKIFMGPEESMQIQSNIASTIAMAFDECPGLPCERKYMEQSVARTERWLLRCKNELNRLNSLPDTINKHQLLFGINQGGVYSDIRIENAKRISDMDLAGYAIGGLAVGETHEEMYQTLETVVPYLPENKPTYLMGVGTPENILESVERGVDFFDCVYPSRNGRHGNAYTNHGKMNLNNAKYELDDRPLDSACDCPVCKRYSRAYIRHLLKAGEMLGMRFLVMHNLYFYNNMMEEIRSAIEKGEFQVYKKAKLDGFKAGE

SEQ ID NO: 53588 - protein, 371 aa, unidentified
  source 1..371: note = Caulobacter flavus
  REGION 1..371: note = tr|A0A2N5D388|A0A2N5D388_9CAUL Queuine tRNA-ribosyltransferase OS=Caulobacter flavus OX=1679497; GN = tgt PE=3 SV=1
MAAFPFEIQATDGKARTGVLKTPRGDIRTPAFMPVGTAATVKALTVDQVKDTGADIILGNTYHLMLRPTAERVKRLGGLHKFMRWDKPILTDSGGFQVMSLSGISKVTEEAVTFASHIDGTKHVLSPERSMEIQADLLGSDIVMQLDECVAWPAEEKRAREGMELSARWGLRSKTAFGARDTQALFGIQQGSTFENLRRESSERLQEIGFDGYAIGGLAVGEGHEAMCEVLDYAPGLLPADRPRYLMGVGKPIDLVEAVYRGVDMFDCVLPTRSGRHGQAWTWDGAINIKNARFAEDESPLDPTSDCPASRDYSKAYLRHLFKAEEILGQVLLSWHNIAFFQALTAAMRDAIAQGRFEQFRRDFAARQKGG

SEQ ID NO: 53589 - protein, 370 aa, Caulobacter henricii
  REGION 1..370: note = tr|A0A0P0NYM8|A0A0P0NYM8_9CAUL Queuine tRNA-ribosyltransferase OS=Caulobacter henricii OX=69395; GN = tgt PE=3 SV=1
MAFPFEISATDGKARTGVLKTPRGDIRTPAFMPVGTAGTVKALTVDQVKDTGADIILGNTYHLMLRPTAERVKRLGGLHRFMRWDKPILTDSGGFQVMSLSGISKVTEEAVTFASHIDGSKHVLSPERSMEIQADLLGSDIVMQLDECVAWPAEEARARQGMELSARWGARSKAAFGTRDSQVLFGIQQGSTFENLRRESSQRLQDIGFDGYAIGGLAVGEGHAAMCEVLDYAPDMLPSDKPRYLMGVGKPIDLVEAVARGVDMFDCVLPTRSGRHGQAWTWDGAINIKNARYAEDDTPLDPDSDCPASRDYSKAYLRHLFKAEEILGQVLLSWHNIAFFQALTAAMRAAIAEGRFEAFRQDFARRHNAG

SEQ ID NO: 53590 - protein, 370 aa, Caulobacter mirabilis
  REGION 1..370: note = tr|A0A2D2AZK7|A0A2D2AZK7_9CAUL Queuine tRNA-ribosyltransferase OS=Caulobacter mirabilis OX=69666; GN = tgt PE=3 SV=1
MAAFPFELKATDGAARTGVLRTPRGDIRTPAFMPVGTAGTVKALTVDQVKATGADIILGNTYHLMLRPTAERVKRLGGLHRFMRWDRPILTDSGGFQVMSLSGISKVTEEAVTFASHLDGSKHKLTPERSIEIQADLLGSDIVMQLDECVAWPAEEQRAREGMELSARWGARSKAAFGERETQALFGIQQGSTFETLRRESSERLIETGFDGYAIGGLAVGEGHEGMVEVLEYAPAMLPADRPRYLMGVGKPIDLVEAVARGVDMFDCVLPTRSGRHGQAWTWDGPINLKNARFAEDESPLDETSDCPASRDYSKAYLHHLVRSDEILGQVLLSWHNIAHFQALTAAMRAAIAEGRFEAFRKAFRDRQRK

SEQ ID NO: 53591 - protein, 371 aa, unidentified
  source 1..371: note = Caulobacter radicis
  REGION 1..371: note = tr|A0A2T9JFJ9|A0A2T9JFJ9_9CAUL Queuine tRNA-ribosyltransferase OS=Caulobacter radicis OX=2172650; GN = tgt PE=3 SV=1
MAAFPFEIKATDGKARTGVLKTPRGDIRTPAFMPVGTAGTVKALTVDQVKDTGADIILGNTYHLMLRPTAERVKRLGGLHKFMRWDKPILTDSGGFQVMSLSGISKVTEEAVTFASHIDGTKHVLSPERSMEIQADLLGSDIVMQLDECVAWPAEEKRAREGMELSARWGLRSKTAFGTRDTQALFGIQQGSTFENLRRESSERLQEIGFDGYAIGGLAVGEGHEAMCEVLDYAPGLLPADKPRYLMGVGKPIDLVEAVWRGVDMFDCVLPTRSGRHGQAWTWDGAINIKNARFAEDESPLDPTSDCPASRDYSKAYLRHLFKAEEILGQVLLSWHNIAFFQALTAAMRDAIAEGRFEQFRREFAARQKGG

SEQ ID NO: 53592 - protein, 371 aa, unidentified
  source 1..371: note = Caulobacter radicis
  REGION 1..371: note = tr|A0A2T9K527|A0A2T9K527_9CAUL Queuine tRNA-ribosyltransferase OS=Caulobacter radicis OX=2172650; GN = tgt PE=3 SV=1
MAAFPFEIKATDGKARTGVLKTPRGDIRTPAFMPVGTAGTVKALTVDQVKDTGADIILGNTYHLMLRPTAERVKRLGGLHKFMRWDKPILTDSGGFQVMSLSGISKVTEEAVTFASHIDGTKHVLSPERSMEIQADLLGSDIVMQLDECVAWPAEEKRAREGMELSARWGLRSKTAFGTRDTQALFGIQQGSTFENLRRESSERLQEIGFDGYAIGGLAVGEGHEAMCEVLDYAPGLLPADKPRYLMGVGKPIDLVEAVYRGVDMFDCVLPTRSGRHGQAWTWDGAINIKNARFAEDESPLDPTSDCPASRDYSKAYLRHLFKAEEILGQVLLSWHNIAFFQALTAAMRAAIEEGRFEQFRRDFAARQKGG

SEQ ID NO: 53593 - protein, 371 aa, unidentified
  source 1..371: note = Caulobacter rhizosphaerae
  REGION 1..371: note = tr|A0A561MWF0|A0A561MWF0_9CAUL Queuine tRNA-ribosyltransferase OS=Caulobacter rhizosphaerae; OX = 2010972 GN=tgt PE=3 SV=1
MVAFLFEIKATDGAARTGVLKTPRGDIRTPAFMPVGTAATVKALMVDQVKATGADIILGNTYHLMLRPTAERVKRLGGLHKFMRWDRPILTDSGGFQVMSLSGISKVTEEAVTFSSHIDGSKHVLSPERSMEIQADLLGSDIVMQLDECVAWPAEEARARQGMELSARWGARSKAAFGDRDTQALFGIQQGSTFRNLRQESSDRLREIGFDGYALGGLAVGEGHEAMCEVLDYAPAMLPADRPRYLMGVGKPIDLVEAVWRGVDMFDCVLPTRSGRHGQAWTWDGAINIKNARYAEDEDPLDPASDCPASRDYSKAYLRHLFKAEEILGQVLLSWHNIAFFQALTAAMRAAITEGRFEQFRRDFAARQQGG

SEQ ID NO: 53594 - protein, 371 aa, Caulobacter segnis
  REGION 1..371: note = tr|A0A2W5WC90|A0A2W5WC90_9CAUL Queuine tRNA-ribosyltransferase OS=Caulobacter segnis OX=88688; GN = tgt PE=3 SV=1
MAAFPFEIKATDGKARTGVLKTPRGDIRTPAFMPVGTAATVKAMTVDQVKDTGADIILGNTYHLMLRPSAERVARLGGLHKFMRWDKPILTDSGGFQVMSLSGISKLTEEAVTFSSHVDGSKHVLTPERSIEIQADLLGSDIVMQLDECVAWPAEEARARKGMELSARWARRSKDAFGTRDTQALFGIQQGSTFENLRRESSEKLQEIGFDGYAIGGLAVGEGHEAMCEVLDYAPGLLPHDRPRYLMGVGKPIDLVEAVARGVDMFDCVLPTRSGRHGQAWTWDGPINLKNAKYAEDDTPLDPTSDCPASRDYSKAYLRHLFKAEEILGQVLLSWHNIAFFQALTAAMRAAIAEGRFEQFRRDFAARHLAQ

SEQ ID NO: 53595 - protein, 371 aa, Caulobacter segnis
  REGION 1..371: note = tr|D5VKP3|D5VKP3_CAUST Queuine tRNA-ribosyltransferase OS=Caulobacter segnis (strain ATCC 21756 / DSM 7131 / JCM 7823 / NBRC 15250 / LMG 17158 / TK0059) OX=509190 GN =tgt PE=3 SV=1
MAAFPFEIKATDGKARTGVLKTPRGDIRTPAFMPVGTAATVKAMTVDQVKDTGADIILGNTYHLMLRPSAERVARLGGLHKFMRWDKPILTDSGGFQVMSLSGISKLTEDAVTFSSHVDGSKHVLTPERSIEIQADLLGSDIVMQLDECVAWPAEEARARKGMELSARWAKRSKDAFGTRDSQALFGIQQGSTFENLRRESSEKLREIGFDGYAIGGLAVGEGHTAMCEVLDYAPGLLPEDRPRYLMGVGKPIDLVEAVARGVDMFDCVLPTRSGRHGQAWTWDGPINLKNAKYAEDDTPLDPTSDCPASRDYSKAYLRHLFKAEEILGQVLLSWHNIAFFQALTAAMREAIAQGRFEQFRRDFAARHLAQ

SEQ ID NO: 53596 - protein, 371 aa, Caulobacter sp.
  REGION 1..371: note = tr|A0A3S9VEY1|A0A3S9VEY1_9CAUL Queuine tRNA-ribosyltransferase OS=Caulobacter sp. FWC26 OX=69665; GN = tgt PE=3 SV=1
MAAFPFEIKATDGKARTGVLRTPRGDIRTPAFMPVGTAATVKALTVDQVKDTGADIILGNTYHLMLRPSAERVKRLGGLHKFMRWDKPILTDSGGFQVMSLSGISKLTEEAVTFSSHVDGSKHVLTPERSIEIQADLLGSDIVMQLDECVAWPAEEARARKGMELSARWAKRSKDAFGTRDTQALFGIQQGSTFEPLRRESSERLREIGFDGYAIGGLAVGEGHEAMCEVLDYAPGLLPEDRPRYLMGVGKPIDLVEAVARGVDMFDCVLPTRSGRHGQAWTWDGPINLKNAKYAEDDTPLDPDSDCPASRDYSKAYLRHLFKAEEILGQVLLSWHNIAFFQALTAAMRVAIAEGRFEQFRRDFAVRHLGR

SEQ ID NO: 53597 - protein, 371 aa, Caulobacter sp.
  REGION 1..371: note = tr|A0A4R3H5V4|A0A4R3H5V4_9CAUL Queuine tRNA-ribosyltransferase OS=Caulobacter sp. BK020; OX = 2512117 GN=tgt PE=3 SV=1
MVAFPFEIKATDGAARTGVLKTPRGDIRTPAFMPVGTAATVKAMTVDQVKATGADIILGNTYHLMLRPTAERVKRLGGLHRFMRWDRPILTDSGGFQVMSLSGISKVTEEAVTFSSHIDGSKHVLSPERSMEIQADLLGSDIVMQLDECVAWPAEEARARQGMELSARWGKRSKAAFGTRDTQALFGIQQGSTFRNLRQESSDRLQEIGFDGYALGGLAVGEGHEAMCEVLDYAPAMLPADRPRYLMGVGKPIDLVEAVWRGVDMFDCVLPTRSGRHGQAWTWDGAINIKNARYAEDEDPLDPTSDCPASRDYSKAYLRHLFKAEEILGQVLLSWHNIAFFQALTAAMRNAIAEGRFEQFRRDFAARQQGA

SEQ ID NO: 53598 - protein, 371 aa, Caulobacter vibrioides
  REGION 1..371: note = tr|A0A0H3C9Y7|A0A0H3C9Y7_CAUVN Queuine tRNA-ribosyltransferase OS=Caulobacter vibrioides (strain NA1000 / CB15N) OX=565050 GN=tgt PE=3 SV=1
MAAFPFEIEATDGKARTGVLKTPRGDIRTPAFMPVGTAATVKAMTVDQVKDTGADIILGNTYHLMLRPSAERVKRLGGLHKFMRWDKPILTDSGGFQVMSLSGISKLTEEAVTFSSHVDGSKHVLTPERSIEIQADLLGSDIVMQLDECVAWPAEEARARKGMELSARWAKRSKDAFGTRDTQVLFGIQQGSTFENLRRESSERLREIGFDGYAIGGLAVGEGHQAMCEVLDYAPGFLPEDRPRYLMGVGKPIDLVEAVARGVDMFDCVLPTRSGRHGQAWTWDGPINLKNAKYAEDETPLDPDSDCPASRDYSKAYLRHLFKAEEILGQVLLSWHNIAFFQALTAAMRAAIAEGRFEQFRRDFAARHLGG

SEQ ID NO: 53599 - protein, 371 aa, Caulobacter vibrioides; identical to SEQ ID NO: 53598
  REGION 1..371: note = sp|Q9A7Y1|TGT_CAUVC Queuine tRNA-ribosyltransferase; OS = Caulobacter vibrioides (strain ATCC 19089 / CB15); OX = 190650 GN=tgt PE=3 SV=1

SEQ ID NO: 53600 - protein, 371 aa, unidentified
  source 1..371: note = Caulobacter zeae
  REGION 1..371: note = tr|A0A2N5DQP3|A0A2N5DQP3_9CAUL Queuine tRNA-ribosyltransferase OS=Caulobacter zeae OX=2055137; GN = tgt PE=3 SV=1
MAAFPFEIKATDGKARTGVLKTPRGDIRTPAFMPVGTAGTVKALTVDQVKDTGADIILGNTYHLMLRPTAERVKRLGGLHKFMRWDKPILTDSGGFQVMSLSGISKVTEEAVTFASHIDGTKHVLSPERSMEIQADLLGSDIVMQLDECVAWPAEEKRAREGMELSARWGLRSKTAFGARYTQALFGIQQGSTFENLRRESSERLQEIGFDGYAIGGLAVGEGHEAMCEVLDYAPGLLPADRPRYLMGVGKPIDLVEAVYRGVDMFDCVLPTRSGRHGQAWTWDGAINIKNARFAEDESPLDPTSDCPASRDYSKAYLRHLFKAEEILGQVLLSWHNIAFFQALTAAMRAAIEEGRFEQFRRDFAARQKGG

SEQ ID NO: 53601 - protein, 370 aa, unidentified
  source 1..370: note = Caulobacteraceae bacterium
  REGION 1..370: note = tr|A0A1B1ADM1|A0A1B1ADM1_9CAUL Queuine tRNA-ribosyltransferase OS=Caulobacteraceae bacterium OTSz_A_272 OX=1759059 GN=tgt PE=3 SV=1
MNFPFEIKARDGDARTGVLRTTRGDIRTPAFMPVGTAGTVKGLTVDQVASTGADIILGNTYHLMLRPGGERMTRLGGLHKFMRWDKPILTDSGGYQVMSLAQLRKLDADGVTFRSHVDGSQHRLTPESAMQIQADQIGADIVMQLDECPALPAPREDVEKAMRLSLGWAKRCKVAFGEREKQNLFAIVQGGIDPALRRISAEALVAEKFDGYAIGGLAVGEGHEAMLATLDVTTPLLPQDRPRYLMGVGKPIDIVESVVRGVDMFDCVLPTRSGRHGQAWTDEGPLNITNARYVEDSSPLDANIDCPASRDYSKAYLHHLFKAGELLGQVLLSWHNVAYYQFLMARLRDAIAEGRLTQFVSDFKAKSAAG

SEQ ID NO: 53602 - protein, 373 aa, unidentified
  source 1..373: note = Caulobacteraceae bacterium
  REGION 1..373: note = tr|A0A4V1UD24|A0A4V1UD24_9CAUL Queuine tRNA-ribosyltransferase OS=Caulobacteraceae bacterium; OX = 1978230 GN=tgt PE=3 SV=1
MMTFPFEISATDGAARTGALKTPRGDIRTPAFMPVGTAATVKALTVDQVKESGADIILGNTYHLMLRPTAERVQRLGGLHRFMRWDKPILTDSGGFQVMSLSNIAKVKEDAVTFASHIDGSKHVLSPERSIEIQADLLGSDIVMQLDECVSWPAERDRAEAAMQLSARWGQRSKAAFGTRDTQALFGIQQGSTFEALRRESSERLIETGFDGYAIGGLAVGEGHAAMCDVLDYAPGLLPADRPRYLMGVGKPIDIVEAVARGVDMFDCVLPTRSGRHGQAWTWDGPINLKNARFAEDDNPIDPDIAGPAGTSYSRAYLHHLVKADEILGQVLLSWHNIAFFQTLTAALRSAIAEGRLEQFRREFAARQSKPTS

SEQ ID NO: 53603 - protein, 373 aa, unidentified
  source 1..373: note = Caulobacterales bacterium
  REGION 1..373: note = tr|A0A1F8I2U6|A0A1F8I2U6_9PROT Queuine tRNA-ribosyltransferase OS=Caulobacterales bacterium RIFCSPHIGHO2_01_FULL_70_19 OX=1797585 GN=tgt PE=3 SV=1
MPFPFDISATDGRARTGLLRTPRGDIRTPAFMPVGTAATVKALTVEQVRQTGADILLGNTYHLMLRPGPERMERLGGLHRFMRWDRPILTDSGGFQVMSLSGISKLTEEAVTFSSHVDGSKHVLSPERSIEIQADRLGSDIVMQLDECVAWPAEESRAREGMELSARWAKRSKAAFGTRDAQALFGIQQGSTFEHLRRESSDRLQEIGFDGYAIGGLAVGEGHAAMCEVLDYAPEMLPADRPRYLMGVGKPVDLVEAVWRGVDMFDCVLPTRAGRHGQAWTWAGPINLKNARFAEDEEPLDPEVPCPASQDYSKAYLHHLVRTDEILGKVLLSWHNIAFFQALTAAMRAAIAEGRFEQFRRDFQARHVSNGRG

SEQ ID NO: 53604 - protein, 250 aa, unidentified
  source 1..250: note = Caulobacterales bacterium
  REGION 1..250: note = tr|A0A1F8IGF4|A0A1F8IGF4_9PROT Queuine tRNA-ribosyltransferase (Fragment) OS=Caulobacterales bacterium RIFCSPHIGHO2_01_FULL_67_30 OX=1797584; GN = A2795_11150 PE=3 SV=1
MPFPFEISAKEGRARTGVLKTARGDIRTPAFMPVGTAATVKAMTVDQVKATGADIILGNTYHLMLRPGPERMERLGGLHKFMGWDKPILTDSGGFQVMSLAGISKVKEEAVTFSSHIDGSKHVLTPERSIEIQADRIGADISMQLDQCVAYPAEKDAARKAMELSIRWGARSKARFGERENQALFGIQQGSTFEDLRRQSSDQLREIGFDGYAIGGLAVGEGHQAMCEVLDYAPEMLPADRPRYLMGVGK

SEQ ID NO: 53605 - protein, 380 aa, unidentified
  source 1..380: note = Caviibacterium pharyngocola
  REGION 1..380: note = tr|A0A2M8RTA6|A0A2M8RTA6_9PAST Queuine tRNA-ribosyltransferase OS=Caviibacterium pharyngocola; OX = 28159 GN=tgt PE=3 SV=1
MQFKLHKTDGVARRGTMTFHRPQGEFTVETPAFMPVGTYGTVKGMTPEEVRATGAEILLGNTFHLWLRPGQEVMRKHGDLHDFMQWHRPILTDSGGFQVFSLGKLRKITEEGVKFQNPINGERIFLSPEKSMEIQYDLGSDIVMIFDECAPYPSTFDYTKKSMEMSLRWAQRSRDRFDELGNKNALFGIVQGGVFEELRQVSLEGLVNIGFDGYAVGGLAVGEPKEDMHRILEYVCPQLPADKPRYLMGVGKPEDLVEGVRRGIDMFDCVMPTRNARNGHLFVSDGIVKIRNAKYRDDTSPLDPECDCYTCKHYTKSYLYHLDKCGEILGARLNTIHNLRYYQRLMAQIRQAIEEDRFDDFVVEFYAKIGKPVPPLQSEK

SEQ ID NO: 53606 - protein, 376 aa, unidentified
  source 1..376: note = Cecembia calidifontis
  REGION 1..376: note = tr|A0A4Q7P5M5|A0A4Q7P5M5_9BACT Queuine tRNA-ribosyltransferase OS=Cecembia calidifontis; OX = 1187080 GN=tgt PE=3 SV=1
MKFKLEHTDSKSKARAGMIKTDHGDIQTPIFMPVGTAGSVKAVHQRELMYDVKAQIILGNTYHLYLRPGLDILEKAGGLHKFNGWSKPILTDSGGYQVFSLAENRKLTEEGAVFKSHIDGSKHLFSPERVMDIQRIIGADIIMAFDECPPYPCDFAYARKSMELTHRWLKRCIDRFDSTEGKYGYSQTLFPIVQGSVFPELRKQSAEFIASCEREGNAIGGLSVGEPVEEMYAMTDMVTDILPKDKPRYLMGVGTPANILEGIALGVDMFDCVMPTRNARNGMLFTSEGIINIRNEKWKDDFSPIDPHINSYVSSFYSKAYLRHLTIAKEILAAQIASIHNLSFYLWLVGQAREHIIAGDFAVWKNQMVEKVSRRL

SEQ ID NO: 53607 - protein, 376 aa, unidentified
  source 1..376: note = Cecembia lonarensis
  REGION 1..376: note = tr|K1L0W7|K1L0W7_9BACT Queuine tRNA-ribosyltransferase OS=Cecembia lonarensis LW9; OX = 1225176 GN=tgt PE=3 SV=1
MKFKLEHTDSKSKARAGTIKTDHGDIQTPIFMPVGTAGSVKAVHQRELMYDVKAQIILGNTYHLYLRPGLDILEKAGGLHKFNGWSKPILTDSGGYQVFSLAENCKLTEEGAVFKSHIDGSKHLFSPERVMDIQRIIGADIIMAFDECPPYPCDFGYARKSMELTHRWLKRCIDRFDSTEGKYGYSQTLFPIVQGSVFPELRKQSAEFVASCDREGNAIGGLSVGEPVEEMYAMTDMVTDILPKDKPRYLMGVGTPANILEGIALGVDMFDCVMPTRNARNGMLFTSEGIINIRNEKWKDDFSAIDPHINSYVSSFYSKAYLRHLTIAKEILAAQIASIHNLSFYIWLVGQAREHIIAGDFAVWKNQMVEKVSRRL

SEQ ID NO: 53608 - protein, 398 aa, unidentified
  source 1..398: note = Cecembia rubra
  REGION 1..398: note = tr|A0A2P8E891|A0A2P8E891_9BACT Queuine tRNA-ribosyltransferase OS=Cecembia rubra OX=1485585; GN = tgt PE=3 SV=1
MSAIKYQSLRSKEKALNDQFIKMKFRLEHTDSKSKARAGTIKTDHGDIQTPIFMPVGTAGSVKAVHQRELIYDVKAQIILGNTYHLYLRPGLDILEKAGGLHKFNGWSKPILTDSGGYQVFSLAENRKLTEEGAVFKSHIDGSKHLFSPERVMDIQRIIGADIIMAFDECPPYPCDFAYARKSMELTHRWLKRCIDRFDNTEGKYGYSQTLFPIVQGSVFPELRKQSAEFVASCEREGNAIGGLSVGEPVEEMYAMTDMVTDILPKDKPRYLMGVGTPANILEGIALGVDMFDCVMPTRNARNGMLFTSEGIINIRNEKWKDDFSPIDPHINSYVSSFYSKAYLRHLTIAKEILAAQIASIHNLSFYLWLVGQAREHIIAGDFAVWKNQMVEKVSRRL

SEQ ID NO: 53609 - protein, 375 aa, Cedecea davisae
  REGION 1..375: note = tr|S3K1J5|S3K1J5_9ENTR Queuine tRNA-ribosyltransferase OS=Cedecea davisae DSM 4568; OX = 566551 GN=tgt PE=3 SV=1
MKFELDTTDGRARRGRLVFERGTVETPAFMPVGTYGTVKGMTPEEVKDTGAQIILGNTFHLWLRPGQEIMKLHGDLHDFMQWKGPILTDSGGFQVFSLGDIRKITEAGVHFRNPINGDPIFLDPEKSMEIQYDLGSDIVMIFDECTPYPADWDYAKRSMEMSLRWAQRSRDRFDSLGNKNALFGIIQGSVYEDLRDISVKGLVEIGFDGYAVGGLAVGEPKEDMHRILEHVCPQIPADKPRYLMGVGKPEDLVEGVRRGVDMFDCVMPTRNARNGHLFVTDGVVKIRNAKYKADTAPLDAECDCYTCRNYSRAYLHHLDRCNEILGARLNTIHNLRYYQRLMAGLRKAIEEGKLEHFVTDFYERTGKPVPPLNVD

SEQ ID NO: 53610 - protein, 375 aa, Cedecea lapagei
  REGION 1..375: note = tr|A0A447V5W5|A0A447V5W5_9ENTR Queuine tRNA-ribosyltransferase OS=Cedecea lapagei OX=158823; GN = tgt PE=3 SV=1
MKFELDTTDGRARRGRLVFERGTVETPAFMPVGTYGTVKGMTPEEVEATGAQIILGNTFHLWLRPGQEIMKLHGDLHDFMQWKGPILTDSGGFQVFSLGDIRKITEAGVHFRNPINGDPIFLDPEKSMEIQYDLGSDIVMIFDECTPYPADWDYAKRSMEMSLRWAQRSRDRFDSLGNKNALFGIIQGSVYEDLRDISVKGLVEIGFDGYAVGGLAVGEPKEDMHRILEHVCPQIPADKPRYLMGVGKPEDLVEGVRRGVDMFDCVMPTRNARNGHLFVTDGVVKIRNAKHKDDTAPLDAECDCYTCRNYSRAYLHHLDRCNEILGARLNTIHNLRYYQRLMAGLRKAIEEGKLEHFVTDFYERTGKPVPPLNVD

SEQ ID NO: 53611 - protein, 375 aa, Cedecea lapagei
  REGION 1..375: note = tr|A0A2N0CM43|A0A2N0CM43_9ENTR Queuine tRNA-ribosyltransferase OS=Cedecea lapagei OX=158823; GN = tgt PE=3 SV=1
MKFELDTTDGRARRGRLVFDRGVVETPAFMPVGTYGTVKGMTPEEVEATGAQIILGNTFHLWLRPGQEVMKLHGDLHDFMQWKGPILTDSGGFQVFSLGDIRKITEQGVHFRNPINGDPIFLDPEKSMEIQYDLGSDIVMIFDECTPYPADWDYAKRSMEMSLRWAKRSRDRFDGLENKNALFGIIQGSVYEDLRDISVKGLVEIGFDGYAVGGLAVGEPKEDMHRILEHVCPQIPADKPRYLMGVGKPEDLVEGVRRGIDMFDCVMPTRNARNGHLFVTDGVVKIRNAKHKNDTSTLDAECDCYTCRHYSRAYLYHLDRCNEILGARLNTIHNLRYYQRLMAGLRKAIEEGKLESFVTDFYQRQGRDVPPLNVD

SEQ ID NO: 53612 - protein, 375 aa, Cedecea neteri
  REGION 1..375: note = tr|A0A089Q1W3|A0A089Q1W3_9ENTR Queuine tRNA-ribosyltransferase OS=Cedecea neteri OX=158822 GN=tgt; PE = 3 SV=1
MKFELDTTDGRARRGRLVFERGTVETPAFMPVGTYGTVKGMTPEEVEATGAQIILGNTFHLWLRPGQEIMKLHGDLHDFMQWKGPILTDSGGFQVFSLGDIRKITEAGVHFRNPINGDPIFLDPEKSMEIQYDLGSDIVMIFDECTPYPADWDYAKRSMEMSLRWAQRSRDRFDSLENKNALFGIIQGSVYEDLRDISVKGLVEIGFDGYAVGGLAVGEPKEDMHRILEHVCPQIPADKPRYLMGVGKPEDLVEGVRRGIDMFDCVMPTRNARNGHLFVTDGVVKIRNAKHKDDTAPLDAECDCYTCRNYSRAYLHHLDRCNEILGARLNTIHNLRYYQRLMAGLRKAIEEGKLEHFVTDFYERTGKPVPPLNVD

SEQ ID NO: 53613 - protein, 375 aa, Cedecea sp.
  REGION 1..375: note = tr|A0A1X7J0Z0|A0A1X7J0Z0_9ENTR Queuine tRNA-ribosyltransferase OS=Cedecea sp. NFIX57 OX=1566286; GN = tgt PE=3 SV=1
MKFELDTTDGRARRGRLVFERGTVETPAFMPVGTYGTVKGMTPEEVEATGAQIILGNTFHLWLRPGQEIMKLHGDLHDFMQWKGPILTDSGGFQVFSLGDIRKITEAGVHFRNPINGDPIFLDPEKSMEIQYDLGSDIVMIFDECTPYPADWDYAKRSMEMSLRWAQRSRDRFDSLGNKNALFGIIQGSVYEDLRDISVKGLVEIGFDGYAVGGLAVGEPKEDMHRILEHVCPQIPADKPRYLMGVGKPEDLVEGVRRGIDMFDCVMPTRNARNGHLFVTDGVVKIRNAKHKDDTAPLDAECDCYTCRNYSRAYLHHLDRCNEILGARLNTIHNLRYYQRLMAGLRQAIEEGKLDHFVTDFYERTGKPVPPLNVD

SEQ ID NO: 53614 - protein, 381 aa, Celeribacter baekdonensis
  REGION 1..381: note = tr|K2INU4|K2INU4_9RHOB Queuine tRNA-ribosyltransferase OS=Celeribacter baekdonensis B30; OX = 1208323 GN=tgt PE=3 SV=1
MTQDAQTPRFSFSLNATDGRARTGVISTPRGDIRTPAFMPVGTAATVKAMMPESVRATGADILLGNTYHLMLRPTAERIARLGGLHKFMNWERPILTDSGGFQVMSLSDLRKLTEKGVTFRSHIDGSKHELTPERSMEIQKLLGSDIVMCFDECPALPADRDRIASSMRLSMRWAERSREAFGDRPGHALFGIQQGGLERDFREESAEALKKIGFDGYALGGLAVGEGQEAMFGCLDFAPDMLPTDKPRYLMGVGKPDDIVGAVKRGIDMMDCVLPSRSGRTGQAWTRRGQVNIKNARHADDPRPLDEHCSCPACSHYSRAYLHHVFRAQEMISGMLLTWHNLHYFQEIMQDMRDAIAGGTFAAWEAEFHAKRAMGDIDPL

SEQ ID NO: 53615 - protein, 381 aa, Celeribacter baekdonensis
  REGION 1..381: note = tr|A0A2R4M217|A0A2R4M217_9RHOB Queuine tRNA-ribosyltransferase OS=Celeribacter baekdonensis; OX = 875171 GN=tgt PE=3 SV=1
MTQDAQTPRFSFSLNATDGRARTGVISTPRGEIRTPAFMPVGTAATVKAMMPESVRATGADILLGNTYHLMLRPTAERIARLGGLHKFMNWERPILTDSGGFQVMSLSDLRKLTEKGVTFRSHIDGSKHELTPERSMEIQKLLGSDIVMCFDECPALPADRDRIASSMRLSMRWAERSKEAFGDRPGHALFGIQQGGLERDFREESAEALKNIGFDGYALGGLAVGEGQELMFQTLDFAPEFLPQDKPRYLMGVGKPDDIVGAVKRGIDMMDCVLPSRSGRTGQAWTRRGQVNIKNARHADDPRPLDETCTCPACSNYSRAYLHHVFRAQEMISGMLLTWHNLHYFQEIMQGMRDAIAAGTFAIWEADFHANRAMGDIDPL

SEQ ID NO: 53616 - protein, 376 aa, unidentified
  source 1..376: note = Celeribacter ethanolicus
  REGION 1..376: note = tr|A0A291GHI5|A0A291GHI5_9RHOB Queuine tRNA-ribosyltransferase OS=Celeribacter ethanolicus; OX = 1758178 GN=tgt PE=3 SV=1
MPQRFSFSVNATDGKARTGVISTPRGDIRTPAFMPVGTAATVKAMMPESVRATGADILLGNTYHLMLRPTAERIAALGGLHKFMNWDRPILTDSGGFQVMSLSDLRKLTEEGVTFRSHVDGSKHFLSPERSMEIQKLLGSDIVMCFDECPALPADRDRIASSMRLSMRWAARSKEAFGDRPGHALFGIQQGGLERDFREESASALKEIGFDGYAIGGLAVGEGQELMFQTLDFAPGFLPEDKPRYLMGVGKPDDIVGAVKRGVDMMDCVLPSRSGRTGQAWTRRGQVNIKNARHADDPRPLDEHCTCPACRNYSRAYLHHVFRSQEIISSMLLTWHNLHYFQEIMQGMRDAIAGGTFEAWEKDFHDTRALGDIEPI

SEQ ID NO: 53617 - protein, 395 aa, unidentified
  source 1..395: note = Celeribacter halophilus
  REGION 1..395: note = tr|A0A1I3Q7T2|A0A1I3Q7T2_9RHOB Queuine tRNA-ribosyltransferase OS=Celeribacter halophilus; OX = 576117 GN=tgt PE=3 SV=1
MLWSRAGFTGKSGGMTQNIQPQRFSFSLNATDGKARTGVISTPRGEIRTPAFMPVGTAATVKAMMPESVRATGADILLGNTYHLMLRPTAERIANLGGLHKFMNWERPILTDSGGFQVMSLSELRKLTEKGVTFRSHVDGSKHELTPERSMEIQKLLGSDIVMCFDECPALPADRGRIAESMRLSMRWAARSKEAFGDRPGYALFGIQQGGLERDFREESAEALKEIGFDGYALGGLAVGEGQEAMFDTLDFAPDMLPTDKPRYLMGVGKPDDIVGAVKRGIDMMDCVLPSRSGRTGQAWTRRGQVNIKNARHADDPRPLDEHCTCPACRNYSRAYLHHVFRSHEIISSMLLTWHNLHYFQEIMQGMRDAIAGGRFAAWEKEFHDTRALGDIEPL

SEQ ID NO: 53618 - protein, 376 aa, unidentified
  source 1..376: note = Celeribacter indicus
  REGION 1..376: note = tr|A0A0B5E3H9|A0A0B5E3H9_9RHOB Queuine tRNA-ribosyltransferase OS=Celeribacter indicus OX=1208324; GN = tgt PE=3 SV=1
MTQRFSFSLHATDGHARTGAISTPRGEIRTPAFMPVGTAATVKAMMPESVRATGADILLGNTYHLMLRPTAERIDRLGGLHRFMNWDRPILTDSGGFQVMSLSDLRKLTEEGVTFRSHVDGSKHFLSPERSMEIQRLLGSDIVMCFDECPALPADRDRIAQSMRLSMRWAERSREAFGDRPGHALFGIQQGGLERDFREESAAALKEIGFDGYAIGGLAVGEGQEAMFSALDFAPGMLPHDKPRYLMGVGKPDDIVGAVKRGVDMMDCVLPSRSGRTGQAWTRRGQVNIKNARHADDPRPLDEACTCPACSHYSRAYLHHVFRAGEMISGMLLTWHNLHYFQQIMAEMRAAIAAGTFAGWEAGFHGTRAAGDIEPL

SEQ ID NO: 53619 - protein, 376 aa, unidentified
  source 1..376: note = Celeribacter manganoxidans
  REGION 1..376: note = tr|A0A291M3D5|A0A291M3D5_9RHOB Queuine tRNA-ribosyltransferase OS=Celeribacter manganoxidans; OX = 1411902 GN=tgt PE=3 SV=1
MSQKFSYAVHATDGSARLGTISTPRGDIRTPAFMPVGTAATVKAMRPESVRETGADILLGNTYHLMLRPTAERIDRLGGLHRFMNWDRPILTDSGGFQVMSLADLRKLTEEGVTFRSHVDGSRHHLTPERSMEIQKLLGSDIVMCFDECPALPADEMRVAESMRLSMRWAQRSRDAFGDRPGHALFGIQQGGVTQHLRAESAEKLREIGFDGYAVGGLAVGEGQEAMFGVLDYACDMLPEDRPRYLMGVGKPDDIVGAVKRGIDMMDCVLPSRSGRTGQAFTRRGVVNIKNARHQDDPRPLDEDCTCPACRSYSRAYLHHVFRSQEIISSMLLTWHNLHYYQELMGDMRAAIGQGRFAAFEAQFHADRADGDIERL

SEQ ID NO: 53620 - protein, 376 aa, unidentified
  source 1..376: note = Celeribacter marinus
  REGION 1..376: note = tr|A0A0P0ADD3|A0A0P0ADD3_9RHOB Queuine tRNA-ribosyltransferase OS=Celeribacter marinus OX=1397108; GN = tgt PE=3 SV=1
MTQRFSFSLAATDGKARTGVISTPRGDIRTPAFMPVGTAATVKAMMPESVAATGADILLGNTYHLMLRPTAERIDRLGGLHKFMNWDKPILTDSGGFQVMSLAELRKLTEKGVTFRSHIDGSKHELTPERSMEIQRLLGSDIVMAFDECPALPADRARITESMRLSMRWAERSREAFGDRPGHALFGIQQGGLEQDLRGESAEALTKIGFEGYAIGGLAVGEGQEAMFDCLDYAPDQLPQDKPRYLMGVGKPDDIVGAVKRGVDMMDCVLPSRSGRTGQAFTRRGVVNIKNARHADDPRPLDEACTCPACSKYSRAYLHHVFRAGEMISGMLLTWHNLHYYQEIMQGMRDAIAAGTFAAWEKQFHDTRALGDIEPV

SEQ ID NO: 53621 - protein, 381 aa, Celeribacter neptunius
  REGION 1..381: note = tr|A0A1I3LIW3|A0A1I3LIW3_9RHOB Queuine tRNA-ribosyltransferase OS=Celeribacter neptunius; OX = 588602 GN=tgt PE=3 SV=1
MTQDAQTQRFSFSLHATDGKARTGVISTPRGEIRTPAFMPVGTAATVKAMMPESVRATGADILLGNTYHLMLRPTAERIANLGGLHKFMNWERPILTDSGGFQVMSLSDLRKLTEKGVTFRSHIDGSKHELTPERSMEIQKLLGSDIVMCFDECPALPADRDRIAESMRLSMRWAARSKEAFGDRPGHALFGIQQGGLEQDFRAESAEALKEIGFDGYAIGGLAVGEGQEAMFGALDFAPDMLPTDRPRYLMGVGKPDDIVGAVKRGVDMMDCVLPSRSGRTGQAWTRRGQVNIKNARHADDPRPLDEHCTCPACSNYSRAYLHHVFRSQEIISSMLLTWHNLHYFQEIMQGMRDAIAEGGFAAWEAEFHATRALGDIEPI

SEQ ID NO: 53622 - protein, 385 aa, unidentified
  source 1..385: note = Celeribacter persicus
  REGION 1..385: note = tr|A0A2T5HBK7|A0A2T5HBK7_9RHOB Queuine tRNA-ribosyltransferase OS=Celeribacter persicus; OX = 1651082 GN=tgt PE=3 SV=1
MACAMTQNTTPQRFSFSVSATDGKARTGVISTPRGEIRTPAFMPVGTAATVKAMMPESVRATGADILLGNTYHLMLRPTAERIAALGGLHKFMNWERPILTDSGGFQVMSLSDLRKLTEEGVTFRSHVDGSKHFLSPERSMEIQKLLGSDIVMCFDECPALPADRDRIATSMRLSMRWAARSKEAFGDRPGHALFGIQQGGLERDFREESASALKEIGFDGYAIGGLAVGEGQELMFQTLDFAPDFLPEDKPRYLMGVGKPDDIVGAVKRGVDMMDCVLPSRSGRTGQAWTRRGQVNIKNARHADDPRPLDEHCTCPACRNYSRAYLHHVFRSHEIISSMLLTWHNLHYFQEIMQGMRDAIAGGRFEAWEKDFHDTRALGDIEPL

SEQ ID NO: 53623 - protein, 381 aa, Celerinatantimonas diazotrophica
  REGION 1..381: note = tr|A0A4R1JLL4|A0A4R1JLL4_9GAMM Queuine tRNA-ribosyltransferase OS=Celerinatantimonas diazotrophica OX=412034 GN=tgt PE=3 SV=1
MKYELLKTDGKARRGQLTFERGSVQTPAFMPVGTYGTVKGMTPEEVRSTGAEILLGNTFHLWLRPGQAVMRKHGDLHDFMNWHGPILTDSGGFQVFSLGDIRKITEEGVHFRNPVSGEKIFLSPEKSMEIQNDLGSDIVMIFDECTPYPATEEQAQRSMQMSLRWAARSRQRFDELNNPNALFGIIQGGVYEHLRDVSLEGLLKVGFDGYAIGGLAVGEPKAEMHRILDYITPKIPDDKPRYLMGVGKPEDLVEGVRRGIDMFDCVMPTRNARNGHLFTADGVVKIRNARHRDDTSPLEEECDCYTCRNYSRAYLHHLDKCNEILGARLNTIHNLRYYQRLMAGLRDAIEQGKLDAFVTEFYSRIGREVPPLTDTTDFNNN

SEQ ID NO: 53624 - protein, 376 aa, Cellulophaga algicola
  REGION 1..376: note = tr|E6X9Q8|E6X9Q8_CELAD Queuine tRNA-ribosyltransferase OS=Cellulophaga algicola (strain DSM 14237 / IC166 / ACAM 630) OX=688270 GN=tgt PE=3 SV=1
MKFTLKYTDPHSKARAGEMITDHGKIETPIFMPVGTVASVKGVHQKELKEEINPDIILGNTYHLYLRPKTQILEKAGGLHKFMGWDRNILTDSGGYQVYSLSDNRKIKEEGVKFKSHIDGSYHTFTPESVMEVQRIIGADIIMAFDECTPYPCDYKYAQRSMHMTHRWLERCIKHLEKLPYKYDYSQSFFPIVQGSTYKDLRRQSAEYIAGVGAEGNAIGGLSVGEPADEMYAMTEVVCEILPEDKPRYLMGVGTPINILENIALGIDMFDCVMPTRNARNGMLFTAHGTINIKNKKWEDDFSPVDEMAITFVDTEYSKAYLRHLFAANEYLGKQIATIHNLGFYLWLTREARKHILAGDFTEWKNKMVKQMDKRL

SEQ ID NO: 53625 - protein, 376 aa, Cellulophaga baltica
  REGION 1..376: note = tr|A0A0A7K7B6|A0A0A7K7B6_9FLAO Queuine tRNA-ribosyltransferase OS=Cellulophaga baltica 18; OX = 1348584 GN=tgt PE=3 SV=1
MKFTLKHTDPHSKARAGEMITDHGKIETPIFMPVGTVASVKGVHQKELKEEINPDIILGNTYHLYLRPKTQILEKAGGLHKFMGWDRNILTDSGGYQVYSLSENRKIKEEGVKFKSHIDGSYHTFTPESVMEIQRIIGADIIMAFDECTPYPCDYKYAQRSMHMTHRWLERCIKHLETLPYKYDYSQSFFPIVQGSTYKDLRRQSAEYIAGVGAEGNAIGGLSVGEPADEMYAMTEVVCEILPEDKPRYLMGVGTPINILENIALGIDMFDCVMPTRNARNGMLFTAHGTINIKNKKWEDDFSPIDDMAITFVDTEYSKAYLRHLFAANEYLGKQIATIHNLGFYLWLTREARKHILAGDFTEWKNKMVKQMDKRL

SEQ ID NO: 53626 - protein, 376 aa, Cellulophaga baltica; identical to SEQ ID NO: 53625
  REGION 1..376: note = tr|A0A1G7L2S0|A0A1G7L2S0_9FLAO Queuine tRNA-ribosyltransferase OS=Cellulophaga baltica OX=76594; GN = tgt PE=3 SV=1

SEQ ID NO: 53627 - protein, 376 aa, Cellulophaga fucicola
  REGION 1..376: note = tr|A0A1K1R1S0|A0A1K1R1S0_9FLAO Queuine tRNA-ribosyltransferase OS=Cellulophaga fucicola OX=76595; GN = tgt PE=3 SV=1
MKFTIEKKDAQSKARAATMVTDHGVIETPIFMPVGTVASVKGVHQRELKEEINPDIILGNTYHLYLRPKLDILEAAGGLHKFMGWDRNILTDSGGYQVYSLSANRKIKEEGVKFKSHIDGSFHFFTPENVMETQRTIGADIIMAFDECTPYPCDYNYAKRSMHMTHRWLDRCMNHLETLPFKYGYEQTFFPIVQGSTYKDLRKQSAEYIANAGAEGNAIGGLSVGEPAEEMYAMTEVVCDILPEDKPRYLMGVGTPINILENIALGVDMFDCVMPTRNARNGMLFTAHGTINIKNKKWEADFSPIDEMAITFVDTEYSKAYLRHLFAANEYLGKQIATIHNLGFYLWLTREARKHIKAGDFTEWKNMMVKQMDKRL

SEQ ID NO: 53628 - protein, 376 aa, Cellulophaga lytica
  REGION 1..376: note = tr|F0RIA6|F0RIA6_CELLC Queuine tRNA-ribosyltransferase OS=Cellulophaga lytica (strain ATCC 23178 / DSM 7489 / JCM 8516 / NBRC 14961 / NCIMB 1423 / VKM B-1433 / Cy l2 0) OX=867900 GN=tgt PE=3 SV=1
MKFTLEKKDPQSKARAATMVTDHGVIETPIFMPVGTVASVKGVHQRELKEEINPDIILGNTYHLYLRPKLDILEAAGGLHKFMGWDRNILTDSGGYQVYSLSANRKIKEEGVKFKSHIDGSYHFFTPENVMEIQRTIGADIIMAFDECTPYPCDYNYAKRSMHMTHRWLDRCMSHLEKLPFKYGYEQTFFPIVQGSTYKDLRKQSAEYIANAGAEGNAIGGLSVGEPAEEMYAMTEVVCDILPEEKPRYLMGVGTPINILENIALGVDMFDCVMPTRNARNGMLFTAHGTINIKNKKWEADFSPIDEMGITFVDTEYSKAYLRHLFAANEYLGKQIATIHNLGFYLWLTREARKHIIAGDFTEWKNMMVKQMDKRL

SEQ ID NO: 53629 - protein, 376 aa, Cellulophaga sp.
  REGION 1..376: note = tr|A0A559N765|A0A559N765_9FLAO Queuine tRNA-ribosyltransferase OS=Cellulophaga sp. RHA_52; OX = 1250036 GN=tgt PE=3 SV=1
MKFTLEKKDPQSKARAATMVTDHGVIETPIFMPVGTVASVKGVHQRELKEEINPDIILGNTYHLYLRPKLDILEAAGGLHKFMGWDRNILTDSGGYQVYSLSANRKIKEEGVKFKSHIDGSYHFFTPENVMEIQRTIGADIIMAFDECTPYPCDYNYAKRSMHMTHRWLDRCMNHLEKLPFKYGYEQTFFPIVQGSTYKDLRKQSAEYIANAGAEGNAIGGLSVGEPAEEMYAMTEVVCDILPEEKPRYLMGVGTPINILENIALGVDMFDCVMPTRNARNGMLFTAHGTINIKNKKWEADFSPIDEMGITFVDTEYSKAYLRHLFAANEYLGKQIATIHNLGFYLWLTREARKHIIAGDFTEWKNMMVKQMDKRL

SEQ ID NO: 53630 - protein, 383 aa, Cellulophaga tyrosinoxydans
  REGION 1..383: note = tr|A0A1W2C6Y8|A0A1W2C6Y8_9FLAO Queuine tRNA-ribosyltransferase OS=Cellulophaga tyrosinoxydans; OX = 504486 GN=tgt PE=3 SV=1
MRLFTKDLKFTLKHTDPHSKARAGEMITDHGKIETPIFMPVGTVASVKGVHQRELKDEINPDIILGNTYHLYLRPKTDIIEKAGGLHKFMGWDRNILTDSGGYQVYSLSGNRKIKEEGVKFKSHIDGSYHVFTPENVMEIQRVIGADIIMAFDECTPYPCDYKYAQRSMHMTHRWLERCIKHLAKTPLKYDYSQTFFPIVQGSTYKDLRKQSAEYIAGVGAEGNAIGGLSVGEPAEEMYAMTEVVCAVLPEDKPRYLMGVGTPINILENIALGIDMFDCVMPTRNARNGMLFTAHGTINIKNKKWEDDFSPIDEMGITFVDTEYSKAYLRHLFAANEYLGKQIATIHNLGFYLWLTREARKHILAGDFYEWKNKMVKQMDKRL

SEQ ID NO: 53631 - protein, 376 aa, Cellulosilyticum lentocellum
  REGION 1..376: note = tr|F2JLS1|F2JLS1_CELLD Queuine tRNA-ribosyltransferase OS=Cellulosilyticum lentocellum (strain ATCC 49066 / DSM 5427 / NCIMB 11756 / RHM5); OX = 642492 GN=tgt PE=3 SV=1
MYELLKVEGRAKRGRFHTPHGVIETPVFMNVATVAAIKGALSTEDLETIDTQVVLSNTYHLHLRPGDKLIKELGGLHKFMVCNKPILTDSGGFQVFSLAAMRKIKEEGVYFSSHIDGRKIFMGPEESMQIQSNLGSTIAMAFDECPPALADRAYIMPSVERTTRWLKRCMDEMNRLNSLEDTVNKQQMLFGINQGGILPDVRIEHAKIISEFDLPGYAVGGLAVGESHEDMYHVLEAVVPYLPQNKPTYLMGVGTPENILEAVDRGIDFFDCVLPARNGRHGHVYTNEGKLNLFNQKHEKDMGPIAADCKCPTCQKYSRAYIRHLLKAKEMLGMRLCVMHNLHYFNNLMTEIRDALDKGEFAAYKKMRLEGYKNNK

SEQ ID NO: 53632 - protein, 376 aa, Cellulosilyticum sp.; identical to SEQ ID NO: 53631
  REGION 1..376: note = tr|A0A5B9YGN4|A0A5B9YGN4_9FIRM Queuine tRNA-ribosyltransferase OS=Cellulosilyticum sp. WCF-2; OX = 2497860 GN=tgt PE=3 SV=1

SEQ ID NO: 53633 - protein, 378 aa, Cellvibrio japonicus
  REGION 1..378: note = tr|B3PDJ7|B3PDJ7_CELJU Queuine tRNA-ribosyltransferase OS=Cellvibrio japonicus (strain Ueda107) OX=498211 GN=tgt PE=3 SV=1
MSRTSFMQFELDKQVGKARRGRLKFPRGVVETPAFMPVGTYGTVKGMTPRDIKDIGAQIILGNTFHLMLRPGTQVVKAHGDLHDFMQWDGPILTDSGGFQVFSLGKLRKITEAGVTFKSPINGSSVFLDPETSMQVQRDLGSDIVMIFDECTPYPATADQARQSMELSLRWAARSKTAHGESPSALFGIVQGGMYEHLRSESLKGLVDIGFDGYAIGGLSVGEPKEDMLRILDHITPEMPTDKPRYLMGVGKPIDLVEGVRRGVDMFDCVLPSRNARNAHLFTREGVIKLRNAKYREDTGPLDSECQCYTCRHFSRSYLHHLDKCNEMLGAQLNTIHNLHYYQDLMAEMREALGSDTFDGFLSRFYGRQGLEVPPLAQ

SEQ ID NO: 53634 - protein, 373 aa, Cellvibrio mixtus
  REGION 1..373: note = tr|A0A266Q4I9|A0A266Q4I9_9GAMM Queuine tRNA-ribosyltransferase OS=Cellvibrio mixtus OX=39650; GN = tgt PE=3 SV=1
MEFELDSQTGRARRGRLKFPRGTVETPAFMPVGTYGTVKGMTPRDVEDIGAHIILGNTFHLMLRPGTEVIKAHGDLHDFMQWKGPILTDSGGFQVFSLGKLRKITEEGVTFKSPINGSKVFMGPEESMQVQRDLGSDIVMIFDECTPYPATIHEARDSMELSLRWAKRSKVAHGDNPSALFGIVQGGMYENLRTESLTGLVEIGFDGYAIGGLSVGEPKEDMLRILESLTPQMPKHKPRYLMGVGKPADLVEGVRRGVDMFDCVMPTRNARNGHLFTSEGVIKLRNAKYRDDTGPLDPLCDCYTCKNFSRSYLHHLDKCNEMLGAQLNTIHNLRYYQRIMVDMRTALSEGTFDAFLADFYGRQGLEVPPAPSV

SEQ ID NO: 53635 - protein, 373 aa, Cellvibrio sp.; identical to SEQ ID NO: 53634
  REGION 1..373: note = tr|A0A1U9N6S5|A0A1U9N6S5_9GAMM Queuine tRNA-ribosyltransferase OS=Cellvibrio sp. PSBB023; OX = 1945512 GN=tgt PE=3 SV=1

SEQ ID NO: 53636 - protein, 373 aa, Cellvibrio sp.
  REGION 1..373: note = tr|A0A5J6PE80|A0A5J6PE80_9GAMM tRNA guanosine(34) transglycosylase Tgt OS=Cellvibrio sp. KY-GH-1 OX=2303332; GN = D0C16_05010 PE=4 SV=1
MQFELDGQIGRARRGRLKFPRGTVETPAFMPVGTYGTVKGLTPRDVEDIGAQIILGNTFHLMLRPGTEVVKAHGDLHDFMQWKGPILTDSGGFQVFSLGKLRKITEEGVTFKSPINGSKVFLDPETSMQVQRDLGSDIVMIFDECTPYPASIHEARDSMELSLRWAKRSKAAHGDNPSALFGIVQGGMYDNLRGESLRGLTEIGFDGYAIGGLSVGEPKEDMLRILENLTPQMPKYKPRYLMGVGKPGDIVEAVRRGVDMFDCVMPTRNARNGHLFTSEGVVKLRNAKYRDDTGPLDSLCDCYTCKNFSRSYLHHLDKCNEMLGATLNTIHNLRYYQRIMADMRKALSENTFDEFLNEFYGRQGLEVPPAPPQ

SEQ ID NO: 53637 - protein, 380 aa, unidentified
  source 1..380: note = Cellvibrionaceae bacterium
  REGION 1..380: note = tr|A0A545U8G5|A0A545U8G5_9GAMM Queuine tRNA-ribosyltransferase OS=Cellvibrionaceae bacterium R142; OX = 2591008 GN=tgt PE=3 SV=1
MRTCHMRFELDTPGQAAGARRGRLHFPRGVVETPAFMPVGTYGSVKGMLPRDIGATGAQIILGNTFHLMLRPGTEVVRAHGDLHDFMQWPGPILTDSGGFQVFSLGKLRKITEAGVSFKSPIDGSPVYLDPETSIQVQRDLGADIVMIFDECTPYPATAAEARDSMALSLRWAARSKAAHGDSAAALFGIVQGGMYPELRAESLAGLTAIGFDGYAIGGLSVGEPKAEMLRVLEELTPLMPAAQPRYLMGVGKPEDIVEAVRRGVDMFDCVMPTRNARNGHLFTGAGVIKIRNARHRHDTGPLDPDCTCYTCANFSRAYLHHLDKCGEILGSQLNTIHNLHYYQALMAGLREAIAGGRLDGFLETFYGGLGQSVPELRAG

SEQ ID NO: 53638 - protein, 370 aa, unidentified
  source 1..370: note = Cellvibrionales bacterium
  REGION 1..370: note = tr|A0A1Z8YN74|A0A1Z8YN74_9GAMM Queuine tRNA-ribosyltransferase OS=Cellvibrionales bacterium TMED79 OX=1986768 GN=tgt PE=3 SV=1
MKFSVSAKDGLARRGTMTFARGEVQTPAFMPVGTYGTVKGMTPDDVRATGAQILLGNTFHLWLRPGTDIISKHGDLHDFMGWDGPILTDSGGFQVFSLGEVRKVEESGVTFKSPVNGDKVFLDPETSMKIQRDLGSDIVMIFDECTPYPATEEEARRSMELSLRWAKRSKDAHAGNASALFGIVQGGMYKHLREASLAGLVDIGFDGYALGGLSVGEPKDEMVQVLDDVAHQLPDDKPRYLMGVGTPADLLEAVRRGVDMFDCVMPTRNARNGHLFTSHGVIKLRNARHKTSTRPLDENCECYTCSNFSRAYLHHLDRCNEILGSQLCTIHNLTYYQKHMQGIRDAIEAGTLDEFADAFYAAQEAGDPHV

SEQ ID NO: 53639 - protein, 376 aa, unidentified
  source 1..376: note = Cellvibrionales bacterium
  REGION 1..376: note = tr|A0A2E8KFE0|A0A2E8KFE0_9GAMM Queuine tRNA-ribosyltransferase OS=Cellvibrionales bacterium; OX = 2026722 GN=tgt PE=3 SV=1
MKFSVSTTDGLARRGQLHFDRGVVQTPAFMPVGTYGTVKAMLPKDIEAVGAEIILGNTFHLMLRPGTEVVRAHGDLHDFIGWEKPILTDSGGFQVWSLGDLRKITEAGVKFRSPIDGSPIFIDPEKSISVQHDLGSDIVMIFDECTPYPATETEAKVSMDLSLRWAARSKQAHGDNPAALFGIVQGGMYQDLRAESLQGLVDIGFDGYAIGGLSVGEPKEAMLHVLDGLAPLMPVDSPRYLMGVGTPSDLVEAVLRGVDMFDCVMPTRNARNGHLFTSTGVIKIRNAVHRHDTSPVDSACDCYSCQNFSRAYLHHLDKCREMLGAQLNTIHNLRYYQNLMRGMRDAISNKTLSAFVDAFYHQQSQQGRSDSTGKEV

SEQ ID NO: 53640 - protein, 373 aa, Centipeda periodontii
  REGION 1..373: note = tr|F5RLQ4|F5RLQ4_9FIRM Queuine tRNA-ribosyltransferase OS=Centipeda periodontii DSM 2778; OX = 888060 GN=tgt PE=3 SV=1
MPAIIYELIRKDETTGARAGVIHTPHGSFPTPIFMPVGTQATVKGVSPDELHDLGAGIILSNTYHLFLRPGMELVREAGGLHKFMHWDGAILTDSGGFQVFSLGDLRKITEEGATFRSHIDGSKKFLSPEVSMEVQKALGSDIVMAFDECIPYPADHGYAKASTERTQRWLVRCRAAMANATGQGLFGIVQGGMYRDLRAWHAAEVTVLDLPGYAIGGLSVGEPHELMEEILSYTVELLPENKPRYLMGVGTPDYLLTGVRHGIDMFDCVFPTRVARNGMAMTWTGRLVMKNAVHTHDHTVLEEGCGCYACRNGYTRAYIRHLVRADEIFGLRLLTLHNLYFLQEFMRRMRAAIIAGTFPVFYQDFMNHYHKK

SEQ ID NO: 53641 - protein, 377 aa, unidentified
  source 1..377: note = Cephaloticoccus capnophilus
  REGION 1..377: note = tr|A0A139SNG5|A0A139SNG5_9BACT Queuine tRNA-ribosyltransferase OS=Cephaloticoccus capnophilus; OX = 1548208 GN=tgt PE=3 SV=1
MTDDCPHFHVLKTDSDTGARRARLHTRHGAIETPIFMPVGTQGTVKAMTPVQLREIGAQVILGNTYHLNLRPTSELIAELGGLHRFMGWDGPILTDSGGFQVFSLAKLRKLRDDGVAFQSHLDGKKLFLGPREVVDIQSRLGSDIAMVLDECPPWPCERGPCAEAVARSARWAEQCLAHARDTGFFERGQLLFGIAQGSTYDDLRREAAESLAALPFSGYAVGGVSVGEPEDEMLKQVAATIPHLPAHKPRYTMGLGTPPQMLKMIALGVDMFDCVLPSRVARHGLVFTPDGPLNLRNAVHTRDPRPISEEVVNYTTQFSRSYLRHLIQAGEILGCTLLTLHNLHFYLDLMAQARAHIEAGDYASWHRAWCARYEAQ

SEQ ID NO: 53642 - protein, 381 aa, unidentified
  source 1..381: note = Cephaloticoccus primus
  REGION 1..381: note = tr|A0A139SSM0|A0A139SSM0_9BACT Queuine tRNA-ribosyltransferase OS=Cephaloticoccus primus; OX = 1548207 GN=tgt PE=3 SV=1
MSATASHFHLIKTDSGTAARRGRLQTAHGTIETPIFMPVGTQATVKALTPAQLREIGAQIILGNTYHLNLRPTSELIAELGGLHRFMRWDGPILTDSGGFQVFSLAKLRKLRDDGVEFHSHLDGRRLFLGPREVVAIQSNLGSDIAMVLDECPPWPCERAACEAAVARSARWAAQCLAAARETGFFERGQLLFAIVQGSTYDDLRRGAAESLAALDFSGYAVGGVSVGEPEPEMLKQVGATTPFLPAHKPRYTMGLGTPPQMLKMIAQGVDMFDCVLPSRVARHGLAFTPDGPLNLRNEKHRRDPRPISEEVVNYTTQFSRSYLRHLVQAGEILGCTLLTLHNLHFYLDLMAQARAHIEAGDYASWHRAWCERYESGAQRV

SEQ ID NO: 53643 - protein, 379 aa, Cerasibacillus quisquiliarum
  REGION 1..379: note = tr|A0A511V0W9|A0A511V0W9_9BACI Queuine tRNA-ribosyltransferase OS=Cerasibacillus quisquiliarum; OX = 227865 GN=tgt PE=3 SV=1
MGPIKYELIKTCKQTGARLGRVTTPHGSFETPIFMPVGTLATVKTMSPEDLKSMDAHIILSNTYHLWLRPGEDIIEEAGGLHRFMNWDGSILTDSGGFQVFSLSDMREIEEEGVHFRNHLNGEKLFLSPEKATQIQNVLGSDIMMAFDECPPYPATYDYMKTSVERTSRWAERCLKAHTRSYDQGLFGIVQGGEFEDLRKQSVRDLVSLDFPGYAIGGLSVGEPKDVMNRVLEFTTPELPANKPRYLMGVGSPDSLIDASIRGVDMFDCVLPTRIARNGTCMTSTGRLVVRNAKFARDFRPIDENCDCHVCQNYSRAYIRHLIKCNETFGFRLTTYHNLYFLLNLMKQVREAIKEDRLGDFREAFFELYGLNKPNAKNF

SEQ ID NO: 53644 - protein, 379 aa, Cerasibacillus sp.
  REGION 1..379: note = tr|A0A5C8P458|A0A5C8P458_9BACI Queuine tRNA-ribosyltransferase OS=Cerasibacillus sp. CC-CFT480; OX = 2498845 GN=tgt PE=3 SV=1
MGPIKYELIKTCKQTGARLGRVTTPHGSFETPIFMPVGTLATVKTMSPEDLHSMNAHIILSNTYHLWLRPGEDIIDEAGGLHSFMNWDGSILTDSGGFQVFSLSDMREIEEEGVHFRNHLNGEKLFLSPEKAMQIQNKLGSDIMMAFDECPPYPASYDYMKKSVERTSRWAERCLKAHQRQDVQGLFGIVQGGEYEELRKQSAKDLISLDFPGYAIGGLSVGEPIDVMNRVLEFTTPLLPANKARYLMGVGSPGSLIDGSIRGIDMFDCVLPTRIARNGTCMTSTGRLVVRNAKYARDFRPIDENCDCHVCKNYSRAYIRHLVKCNETFGFRLTSYHNLYFLLNLMKQVREAIKNDRLGDFKEAFFEQYGLNKPNAKNF

SEQ ID NO: 53645 - protein, 375 aa, unidentified
  source 1..375: note = Cereibacter changlensis
  REGION 1..375: note = tr|A0A2T4JQ44|A0A2T4JQ44_9RHOB Queuine tRNA-ribosyltransferase OS=Cereibacter changlensis JA139; OX = 1188249 GN=tgt PE=3 SV=1
MDRFSFQVSATDGAARSGVISTPRGEIRTPAFMPVGTAATVKAMLPESVRATGADILLGNTYHLMLRPTAERIARLGGLHKFMNWDRPILTDSGGFQVMSLAALRKLTEEGVKFSSHIDGSKHMLSPERSMEIQKLLGSDIVMCFDECPALPATDEVVAKSMRLSMRWAQRSRDAFGDRPGHALFGIMQGGVTRELREESAAALTAIGFDGYAVGGLAVGEGQEAMFGVLDYATDMLPADKPRYLMGVGKPDDIVGAVERGIDMMDCVLPSRSGRTGQAWTRRGQVNMKNARHMDDPRPLDEACSCPTCRSYSRAYLHHVLRSQEIIASMLLTWHNLHYYQELMQGLRDAIAAGRLAAFVQGFHSQRAEGDIPPV

SEQ ID NO: 53646 - protein, 375 aa, unidentified
  source 1..375: note = Cereibacter changlensis
  REGION 1..375: note = tr|A0A4U0Z1W5|A0A4U0Z1W5_9RHOB Queuine tRNA-ribosyltransferase OS=Cereibacter changlensis; OX = 402884 GN=tgt PE=3 SV=1
MDRFSFQVSATDGAARSGVISTPRGEIRTPAFMPVRTAATVKAMLPESVRATGADILLGNTYHLMLRPTAERIARLGGLHRFMNWDRPILTDSGGFQVMSLAALRKLTEEGVKFSSHIDGSKHMLSPERSMEIQKLLGSDIVMCFDECPALPATDEVVAKSMRLSMRWAQRSRDAFGDRPGHALFGIMQGGVTRELREESAAALTAIGFDGYAVGGLAVGEGQEAMFGVLDYATDLLPADKPRYLMGVGKPDDIVGAVERGIDMMDCVLPSRSGRTGQAWTRRGQVNMKNARHMDDPRPLDEACSCPTCRSYSRAYLHHVLRSQEIIASMLLTWHNLHYYQELMQGLRDAIAAGRLAAFVQGFHAQRAEGDIPPI

SEQ ID NO: 53647 - protein, 376 aa, Cesiribacter andamanensis
  REGION 1..376: note = tr|M7N387|M7N387_9BACT Queuine tRNA-ribosyltransferase OS=Cesiribacter andamanensis AMV16; OX = 1279009 GN=tgt PE=3 SV=1
MQFTLETTDPKSRARAGRLTTGHGTIETPIFMPVGTAGTVKAVHQRELRQDIGAQIILGNTYHLYLRPGLDTLYKAGGLHQFGGWDGPILTDSGGYQVFSLSDIRKITEEGVKFRSHIDGSKIDFTPEGVMDIQRIIGADIIMAFDECPPYPSDYEYARKSMELTHRWLKRCIERLDSTEPHYGYEQQLFPIVQGSTYSDLRQQSAEFIASQNRAGNAIGGLSVGEPAEEMYRITELVCGILPADKPRYLMGVGTPANILECIALGVDMFDCVMPTRNARNGMLFTTQGIINIRNEKWKQDFSPIDPGLSNYASSFYTKAYLRHLIHSKEMLGAQIASVHNLSFYLWLVGQAREQIKAGTFSAWKERIIPTLMQRL

SEQ ID NO: 53648 - protein, 372 aa, unidentified
  source 1..372: note = Cetia pacifica
  REGION 1..372: note = tr|A0A3N1YMR4|A0A3N1YMR4_9PROT Queuine tRNA-ribosyltransferase OS=Cetia pacifica OX=1424653; GN = tgt PE=3 SV=1
MDFKIDAVDNKARACTIKTAHSEIKTPIFMPVGTAAAVKSLDAIDMTEILDAPIILGNTYHLYLRPGDEVIAKLGGLHGFSGYKRSFLTDSGGFQAFSLGNNVKFTDEGIWFKSHIDGSKHFFSPEKVIDIEYNLNSDIMMVLDDLIPLPNTKERIKKSIERTTQWAYRSLVHHVKKGKKNNLFAIIQGGTDFEFRKISAESLVSLEYEGHTFDGFAIGGLSVGEENQLMYDTIEATTPYMPEDKPRYLMGVGTPEDIIEAIDRGVDMFDCVMPTRNARNGYLFTSFGTLRIKNAQYKLDDSPIDPECDCYTCKNFSRAYLNHLFKAKELTYFRLASIHNLHYYLNLVKKARKAIIEGRFKEFKKEFYSKRQ

SEQ ID NO: 53649 - protein, 388 aa, Cetobacterium ceti
  REGION 1..388: note = tr|A0A1T4JZA2|A0A1T4JZA2_9FUSO Queuine tRNA-ribosyltransferase OS=Cetobacterium ceti OX=180163; GN = tgt PE=3 SV=1
MEKKLPVEYELLKKDGKARAGVITTPHGKIETPVFMPVGTQATVKSMTPEELEEMGAEIILGNTYHLYLRPTDELVAKFGGLHKFMNWKHPILTDSGGFQVFSLGDLRKIKEEGVHFRSHIDGSKHFISPEKSINIQNNLGSDIVMLFDECPPGLSSREYLIPSIERTTRWARRCVEAHKRPNEQGLFAIVQGGIYEDLRDKSYNELKEMDEYFSGYAVGGLAVGEPREDMYRILDYIVEKLPSNKPRYLMGVGEPVDMLEAVESGIDMMDCVQPTRIGRHGTVFTKYGRLVIKNASYAEDDRPLDEGCQCYVCRNYTRGYIRHLFKTEEILGARLATYHNLYFLLKLMKDARKAILEDRFIEYKEEFLKNYSMGKSSEWIKPRKIGE

SEQ ID NO: 53650 - protein, 388 aa, Cetobacterium somerae
  REGION 1..388: note = tr|U7V846|U7V846_9FUSO Queuine tRNA-ribosyltransferase OS=Cetobacterium somerae ATCC BAA-474 OX=1319815 GN=tgt PE=3 SV=1
MSKKLPVTYELYDKDGKARTGKITTPHGEIETPVFMPVGTQATVKGMTPEELEEMGAEIILGNTYHLYLRPGDELVAKFGGLHKFMNWKKPILTDSGGFQVFSLGDLRNIKEEGVYFRSHLDGSKHFISPEKSINIQNNLGSDIVMLFDECPPGMSSKEYLIPSIERTTRWAKRCVEAHKRPDEQGLFAIVQGGIYEDLRDKSLSELSEMDEYFSGYAVGGLAVGEPREDMYRVLDYIVEKLPEDKPRYLMGVGEPLDMLEAVASGIDMMDCVQPSRIGRHGTIFTKYGRLVVKNASYSEDTRPLDEGCDCYVCRNYTRGYIRHLFKAQEILGGRLATYHNLYFLLKLMKDSRTAIKEKRFNEFKAEFEKNYAMGKNSDWIKPIKFDK

SEQ ID NO: 53651 - protein, 381 aa, Chamaesiphon minutus
  REGION 1..381: note = tr|K9UMT3|K9UMT3_CHAP6 Queuine tRNA-ribosyltransferase OS=Chamaesiphon minutus (strain ATCC 27169 / PCC 6605) OX=1173020 GN=tgt PE=3 SV=1
MNKPNFTFDCVGKCSHTHARAGVFHTPHGIVETPRFMPVGTTATVKTLTSAHIEDAGAQMVLSNTYHLHLRPGEDIIKEAGGLHKFMNWKGPMLTDSGGFQVFSLSKTRKITEEGVTFKSPLDGRTIFISPEKSIEIQNALGADVIMAFDECPPYPATRDEVIAATERTYRWLERCIQAHQRPEDQALFPIVQGGVHLDLRAQAAKSLQEFDLHGYAIGGVSVGEPSHFIHKIVRATAPLLPENKPRYLMGVGTYKEMAIAIASGIDLFDCVIPTRVARHGAAFVRGERWNLKNAPFKRDFTPLDDTCPCYTCQNFTRAYLCHLVRCGEITGFTLLSLHNITELIRFTQQIRDAILRDRFVEEFGHWLTSEEEEVIDESEN

SEQ ID NO: 53652 - protein, 381 aa, unidentified
  source 1..381: note = Chamaesiphon polymorphus
  REGION 1..381: note = tr|A0A2T1FG83|A0A2T1FG83_9CYAN Queuine tRNA-ribosyltransferase OS=Chamaesiphon polymorphus CCALA 037 OX=2107692 GN=tgt PE=3 SV=1
MNKPHFTFDCVGKCSHTHARAGVFHTPHGIVETPRFMPVGTTATVKTLTSAHIEDAGAQMVLSNTYHLHLRPGEDIIKEAGGLHKFMNWNKPMLTDSGGFQVFSLSKTRKITEEGVTFKSPLDGRTIFISPEKSIEIQNALGADVIMAFDECPPYPATRDEVIAATERTYRWLERCIQAHQRPEDQALFPIVQGGVHLDLRAQAAKSLQEFDLHGYAIGGVSVGEPSHFIHKIVRATAPLLPENKPRYLMGVGTYKEMAIAIASGIDLFDCVIPTRVARHGAAFVRGERWNLKNAPFKRDFTPLDDTCPCYTCQNFTRAYLCHLVRCGEITGFTLLSLHNITELIRFTQQIRNAILRDRFVEEFGHWLTSEDPESSEESQH

SEQ ID NO: 53653 - protein, 375 aa, unidentified
  source 1..375: note = Chania multitudinisentens
  REGION 1..375: note = tr|W0LHI4|W0LHI4_9GAMM Queuine tRNA-ribosyltransferase OS=Chania multitudinisentens RB-25; OX = 1441930 GN=tgt PE=3 SV=1
MKFELQTTDGRARRGRLVFERGVVETPAFMPVGTYGTVKGMTPEEVKETGAQILLGNTFHLWLRPGQEIMKLHGDLHDFMQWHGPILTDSGGFQVFSLGAMRKIKEEGVYFRNPINGDKVFLSPEKSMEIQYDLGSDIVMIFDECTPYPADWDYAKRSMEMSLRWAQRSRQRFDELSNKNALFGIIQGGVYEDLRDVSVKGLVDIGFDGYAVGGLAVGEPKEDMHRILEHVCPQIPADKPRYLMGVGKPEDLVEGVRRGIDMFDCVMPTRNARNGHLFVTDGVVKIRNAKHKDDTSPLDKDCDCYTCRHYSRAYLYHLDRCNEILGARLNTIHNLRYYQRLMAGLRRAIEDSKLEQFVADFYGRIGKPVPSLNTL

SEQ ID NO: 53654 - protein, 376 aa, Chelativorans sp.
  REGION 1..376: note = tr|Q11IH3|Q11IH3_CHESB Queuine tRNA-ribosyltransferase OS=Chelativorans sp. (strain BNC1); OX = 266779 GN=tgt PE=3 SV=1
MSDTFTFRVLATDGKARRGEISMPRGNIRTPAFMPVGTGGTVKAMYMDQVRALGSDIILGNTYHLMLRPGAERVARLGGLHEFARWPYPILTDSGGFQVMSLSALRKVREEGVTFRSHVDGEVHEMSPERSIEIQGLLDSDIQMQLDECIALPSPEKEIERAMELSLRWAERCKIAFGDQPGKAMFGIVQGGDNRRLRLRSAEALAAMGLKGYAVGGLAVGEPQEVMLDILDATCPALPANKPRYLMGVGTPDDILKSVARGIDMFDCVMPTRAGRHGLAFTRRGKINLKNARHAEDTRPLDEESDCPAARDYSRAYLHHLVKSGEALGGMLLTWNNLAYYQGLMADIRAAIEAGRLGERTAEIQEEWVRGDLPAL

SEQ ID NO: 53655 - protein, 383 aa, Chelatococcus asaccharovorans
  REGION 1..383: note = tr|A0A2V3U551|A0A2V3U551_9RHIZ Queuine tRNA-ribosyltransferase OS=Chelatococcus asaccharovorans; OX = 28210 GN=tgt PE=3 SV=1
MSESFTFSVTGTDGTARTGEIRMPRGVIRTPAFMPVGTAATVKAMYPEQVKALGADVVLGNTYHLMLRPGAERVAALGGLHKFMNWPYPILTDSGGFQVMSLSKLRKIDESGVTFQSHVDGATHVLTPERSIEIQGLLGADIQMQLDECVKLPASPQDTERAMRLSLRWAERCRRAFGEQPGKALFGIVQGGEDRALRIESARALVDMDFKGYAIGGLAVGEPQATMLAMIETVVPYLPTTKPRYLMGVGTPDDLVAAVTRGIDMFDCVMPTRAGRHGLAYTRFGKINLKNARHADDPAPLDPTSSCPAANSYSRAYLHHLVKSGEILGMMLLTWANLAYYQDLMASLRKAIVDNTLADVSAAIRADWGAGAADAPGEADQAS

SEQ ID NO: 53656 - protein, 379 aa, Chelatococcus sambhunathii
  REGION 1..379: note = tr|A0A0K6H6N5|A0A0K6H6N5_9RHIZ Queuine tRNA-ribosyltransferase OS=Chelatococcus sambhunathii; OX = 363953 GN=tgt PE=3 SV=1
MTVSFTFTPGKTSGSARTGEIRMPRGVIRTPAFMPVGTAATVKAMYPDQVKALGADVVLGNTYHLMLRPGAERVAALGGLHKFMNWPYPILTDSGGFQVMSLAQLRKIDENGVTFQSHLDGSTHVLTPERSIEIQGLLGSDIQMQLDECVKLPCEEAVAEKAMRLSLRWAERCKVAFGTQPERALFGIVQGGEVPRLRIESARELVDMGLDGYAIGGLAVGEPQPVMLAMIETVMPHLPAGKPRYLMGVGTPDDIVEAVRRGIDMFDCVMPTRAGRHGLAYTRFGRINLRNACHAEDSRPLDPDSKCPASNTYSRAYLHHLVKAGEILGMMLLTWNNLAYYQDLMSGLRRAIADDRLDDFIAETKAAWARGEKGGDATA

SEQ ID NO: 53657 - protein, 380 aa, Chelatococcus sp.
  REGION 1..380: note = tr|A0A0K2DGA0|A0A0K2DGA0_9RHIZ Queuine tRNA-ribosyltransferase OS=Chelatococcus sp. CO-6; OX = 1702325 GN=tgt PE=3 SV=1
MTVSFTFTPGKTSGAARTGEIRMPRGVIRTPAFMPVGTAATVKAMYPDQVKALGADVVLGNTYHLMLRPGAERVAALGGLHKFMNWPYPILTDSGGFQVMSLAQLRKIDENGVTFQSHLDGSTHVLTPERSIEIQGLLGSDIQMQLDECVKLPCEEAVAEKAMQLSLRWAERCKVAFGTQPERALFGIVQGGEVPRLRIESARELADMGLDGYAIGGLAVGEPQHVMLAMIETVMPHLPAGKPRYLMGVGTPDDIVEAVRRGIDMFDCVMPTRAGRHGLAYTRFGRINLRNACHAEDSRPLDPDSKCPASNTYSRAYLHHLVKAGEILGMMLLTWNNLAYYQDLMSGLRRAIADDRLDDFIAETKAGWARGEKGGDASAG

SEQ ID NO: 53658 - protein, 384 aa, Chelatococcus sp.
  REGION 1..384: note = tr|A0A2W6Y5E1|A0A2W6Y5E1_9RHIZ Queuine tRNA-ribosyltransferase OS=Chelatococcus sp. OX=1953771; GN = tgt PE=3 SV=1
MTAQPKTTPLASDRFAFHLLARDGAARTGEIRMPRGTIRTPAFMPVGTAATVKGMYPEQVRALGADVVLGNTYHLMLRPGAERVARLGGLHRFMNWPHPILTDSGGFQVMSLSQLRKLTEEGVTFQSHIDGSKHMLSPERSVEIQNLLGSDIVMQLDECVSLPCEDKVAEKAMRLSLRWAERCKAAFGNPEGRALFGIVQGGAVPRLRVESARELVAMDLKGYAIGGLAVGEPQDVMLAMIETVEPHLPQEKPRYLMGVGTPDDIVQAVARGIDMFDCVMPTRAGRHGQIFTRFGRMNLKNAKHAEDPRPIDEASSCPAAKDWSRAYLHHLVKAEEMLGKMLLTWVNLAYYQDLMAGLRAAIAAGRLDDFIAETKEGWARGEPA

SEQ ID NO: 53659 - protein, 386 aa, Chelonobacter oris
  REGION 1..386: note = tr|A0A0A3AKA6|A0A0A3AKA6_9PAST Queuine tRNA-ribosyltransferase OS=Chelonobacter oris OX=505317; GN = tgt PE=3 SV=1
MKYELQKTDGRARRGRLTFQRPHGEYHVETPAFMPVGTYGTVKGMTPEEVQASGAQILLGNTFHLWLRPGQEVMRKHGDLHDFMQWHGPILTDSGGFQVFSLGDIRKIKEEGVHFRNPINGEKIFLSPEKSMEIQYDLGSDIVMIFDECTPYPAEFDYAKNSMEMSLRWAKRSRERFDALGNKNALFGIIQGGVYEELRKVSVEGLVDIGFDGYAVGGLAVGEPKEDMHRILEYVCPQIPQDKPRYLMGVGKPEDLVEGVRRGIDMFDCVMPTRNARNGHLFTADGVIKIRNAKYRDDTSPLEAECDCYTCKKYTKSYLYHLDKCGEILGARLNTIHNLRYYQRLMAQLRTAIENGELEQFVARFYARIGKPVPPLNEYHAFDQTK

SEQ ID NO: 53660 - protein, 407 aa, unidentified
  source 1..407: note = Chishuiella changwenlii
  REGION 1..407: note = tr|A0A1M6YXX2|A0A1M6YXX2_9FLAO Queuine tRNA-ribosyltransferase OS=Chishuiella changwenlii; OX = 1434701 GN=tgt PE=3 SV=1
MRVKFALLSFFNYFFSETNSPHTKQLISLRIMKFSIDKKDEFSKARAGVVETDHGTIQTPIFMPVGTVGTVKSVHQRELEEDIKAQIILGNTYHLYLRPGTDILHKAGGLHQFINWQKPILTDSGGFQVYSLATSRKKSEEGVKFKSHIDGSYHMFTPEKSMEIQRYIGADIFMAFDELTGIPAKYHDAKRAMHVTHRWLERCRTWLNNNPEYYGHKQTLFPIVQGNDFKDLRQESAKYIADFGAEGNAIGGLSVGEPEPIMYEMTDIVTEILPQDKPRYLMGVGTPWNIIECIALGVDMFDCVMPTRNARNGMLFTWNGVMNMKNAKWKDCFEPLDETGTSYVDSYYTKAYVRHLFNANESLGKQIASIHNLAFYLDLVKVAREHILAGDFAQWKEQIVPQLKQRM

SEQ ID NO: 53661 - protein, 375 aa, Chitinimonas sp.
  REGION 1..375: note = tr|A0A2G3K5J1|A0A2G3K5J1_9BURK Queuine tRNA-ribosyltransferase OS=Chitinimonas sp. BJB300; OX = 1559339 GN=tgt PE=3 SV=1
MPENGLKFILKTTSHGARRGSVELNHGVVETPVFMPVGTYGTVKAMSPLELNEIGAQIVLGNTFHLWLRPGLEVIDAHGGLHDFMGWDKPILTDSGGFQVFSLGALRKITEEGVKFSSPVNGDKLFLTPEISMQIQKSLNSDIVMIFDECTPYPADEKTAAASMRMSARWARRSKDEFERLDNPNALFGIVQGGMHERLRDESLAGLEEIGFHGYAIGGLSVGEPKEEFTRVLAYTAPKLPVDKPRYLMGVGTPEDLVYGVSQGVDMFDCVMPTRNARNGWLFTRFGDAKIKNARFKNDIRPLDESCACYACQNFSRAYLHHLFRAGEILGARLNTVHNLHYYQWLMAGMRAAIEADEFDQFVQRFHAERARGVE

SEQ ID NO: 53662 - protein, 375 aa, Chitinimonas sp.
  REGION 1..375: note = tr|A0A516SH50|A0A516SH50_9MICO Queuine tRNA-ribosyltransferase OS=Chitinimonas sp. R3-44; OX = 2594795 GN=tgt PE=3 SV=1
MPDNGLKFTLKTTSHGARRGSVELNHGTVETPVFMPVGTYGTVKAMAPNELNEMGAQIVLGNTFHLWLRPGLEVVAKHEGLHRFMGWDKPILTDSGGFQVFSLGALRKITEEGVKFQSPVNGDRLFLTPEESMRIQTVLNSDIVMIFDECTPYPADEQTAAISMRLSARWARRSRDEFDRQQNPNALFGIVQGGMHERLREESLAGLEEIGFHGYAIGGLSVGEPKEEFTRILAHTAPRLPVDKPRYLMGVGTPEDLVYGVSQGIDMFDCVMPTRNARNGWLFTRWGDAKVKNARYKDDVRPLDESCGCYACSNFSRAYLHHLFRTGEILGARLNTIHNLFYYQWLMAEMRTAIEADQFDQFVVRFHAERARGIA

SEQ ID NO: 53663 - protein, 375 aa, Chitinimonas taiwanensis
  REGION 1..375: note = tr|A0A1K2HFV7|A0A1K2HFV7_9BURK Queuine tRNA-ribosyltransferase OS=Chitinimonas taiwanensis DSM 18899 OX=1121279 GN=tgt PE=3 SV=1
MPDNGLKFTLKTTSGGARRGSVELNHGVVETPVFMPVGTYGTVKAMAPNELNEIGAQIVLGNTFHLWLRPGLDVIAAHQGLHRFMGWDKPILTDSGGFQVFSLGALRKITEEGVKFSSPVNGDKLFLTPEISMQIQTTLNSDVVMIFDECTPYPADEKTAAASMRMSARWARRSKDEFERLNNPNALFGIVQGGMHERLRDESLAGLQEIGFHGYAIGGLSVGEPKDEFTRILAYTAPKLPSDKPRYLMGVGTPEDLVFGVSQGVDMFDCVMPTRNARNGWLFTRFGDAKIKNARFKNDARPLDESCACYACQNFSRAYLHHLFRAGEILGARLNTIHNLYYYQWLMAQMRAAIEADRFADFVTTFHAERARGVD

SEQ ID NO: 53664 - protein, 370 aa, Chitiniphilus sp.
  REGION 1..370: note = tr|A0A4U0QCN2|A0A4U0QCN2_9NEIS Queuine tRNA-ribosyltransferase OS=Chitiniphilus sp. HX-2-15; OX = 2571148 GN=tgt PE=3 SV=1
MQFMLRKTSGGARRGTLQLNHGVVETPVFMPVGTYGTVKAMTPRDLGDIGAQIVLGNTFHLWLRPGLDVIGEFGGLHRFMGWDKPILTDSGGFQVFSLGDLRKISEEGVKFQSPVNGDKLFLTPEESMRIQTVLNSDIVMIFDECTPYPADLRQAADSMRMSLRWARRSKDEFTARQNPNALFGIVQGGMHETLRDESLAGLDDIGFHGMAIGGLSVGEPKEDFARILAHTAPRLPVNKPRYLMGVGTPEDLVFGVSQGIDMFDCVMPTRNARNGMLFTRYGDVRIKNARYRADTRPLDESCDCYTCRHFSRAYLHHLFRSGEILSSQLNTIHNLHYYQVVMREMRAAIDADDFAGHVARFHADRARGVD

SEQ ID NO: 53665 - protein, 378 aa, unidentified
  source 1..378: note = Chitinivibrio alkaliphilus
  REGION 1..378: note = tr|U7D5H4|U7D5H4_9BACT Queuine tRNA-ribosyltransferase OS=Chitinivibrio alkaliphilus ACht1 OX=1313304 GN=tgt PE=3 SV=1
MGNTFSFELHGRSGDARAGVFYTDHGPVETPVFMPVGTQGCVKTLSPHDVSQTGASIILGNTYHLHLRPGSEVIRSAGGLHRFENWGGALLTDSGGFQVFSLKDISRITEEGVEFSSHLDGSRHFFSPEKVMEIEHNIGADIIMAFDECPSSTASREVIYAAVERTLRWAERSLEAHHRLPLHFGYEQALFGIVQGGIHRDYRAYCAEKLVAMDFPGYAIGGLAVGESTQQLYDISRYTASLLPVDKPRYLMGVGKPENILEAIGAGIDMFDCVMPTRNARNSSVFTSQGRLNIKNSAHRLDFSTPLDPACTCYTCTHFSRAYLRHLYKAGEILALRLLSLHNIHFYVNLVAEARRRIVDNSFLEWKEETVHAVAGKA

SEQ ID NO: 53666 - protein, 376 aa, Chitinophaga arvensicola
  REGION 1..376: note = tr|A0A1I0QSP1|A0A1I0QSP1_9BACT Queuine tRNA-ribosyltransferase OS=Chitinophaga arvensicola; OX = 29529 GN=tgt PE=3 SV=1
MNFELITTDSGSNARAGKITTDHGEIETPIFMPVGTVGSVKAVTQEQLRDAVQAQIILGNTYHLYLRPGLEVLSMAGGLHKFNGWDRPILTDSGGYQVFSLAANRKIKEEGVVFQSHIDGSRHLFTPENVMDIQRTIGADIIMAFDECPPYPSEYRYARKSMELTHRWLDRCIQRLGETQPAYGHEQTLFPIVQGSTYKDLRKASAEYIASRNCAGNAIGGLSVGEPENEMYEMCGHVCEVLPADKPRYLMGVGTPWNILENIALGIDMFDCVMPTRNGRNGMLFTWNGVINIRNKKWATDFSPVDANSPCFATSQYSRAYLRHLFVAGEILGMTLASIHNLAFYLELVKEARKQILAGTFATWKTSMVNQLKTRL

SEQ ID NO: 53667 - protein, 375 aa, unidentified
  source 1..375: note = Chitinophaga barathri
  REGION 1..375: note = tr|A0A3N4MFS5|A0A3N4MFS5_9BACT Queuine tRNA-ribosyltransferase OS=Chitinophaga barathri; OX = 1647451 GN=tgt PE=3 SV=1
MQFDLITTDPSGARAGTITTAHGTIQTPIFMPVGTVGSVKAVTQEQLRTDVNAQIILGNTYHLYLRPGTDVLKQAGGLHKFNGWERPILTDSGGYQVFSLAANRKIKEEGVLFQSHIDGSRHLFTPENVMDIQRTIGADIVMAFDECPPYPSEYAYAKRSMELTHRWLDRCIKRLGETSPEYGHEQTLFPIVQGSTYKDLRKISAEAIASRNCAGNAIGGLSVGEPEAEMYEMCGLVTELLPVEKPRYLMGVGTPWNILNNIELGIDMFDCVMPTRNGRNGMLFTWQGVINIRNKKWATDFSPLDEQNPCTASQNYSKAYVRHLFIAGEILGMTLASIHNLCFYLELVKVAREQILQGTYGSWKREVVPQLKTRL

SEQ ID NO: 53668 - protein, 376 aa, unidentified
  source 1..376: note = Chitinophaga caeni
  REGION 1..376: note = tr|A0A291R113|A0A291R113_9BACT Queuine tRNA-ribosyltransferase OS=Chitinophaga caeni OX=2029983; GN = tgt PE=3 SV=1
MKFELLHKDPASKARAGKLTTAHGEIETPIFMPVGTVGSVKAVTQEQLREEINAQIILGNTYHLYLRPGLEILRQAGGLHGFNGWERPLLTDSGGYQVFSLANNRKIKEEGCVFQSHIDGSRHLFTPENVMDTQRVIGADIIMAFDECPPYPSEYKYAKQSMELTHRWLDRCIRRFKGTDPIYGYEQALFPIVQGSTYKDLRKISAEVIASKDCLGNAIGGLSVGEPEEDMYEMCELVCDILPTEKPRYLMGVGTPWNILENISLGVDMFDCVMPTRNGRNGMLFTWQGVINIKNKKWATDFTPIDANSPCIATSKYTKAYLRHLFAAGEILGMQLASIHNLAFYLELVKEARKRILEGTFAAWKEGMVKQLRQRL

SEQ ID NO: 53669 - protein, 376 aa, unidentified
  source 1..376: note = Chitinophaga costaii
  REGION 1..376: note = tr|A0A1C4BYI2|A0A1C4BYI2_9BACT Queuine tRNA-ribosyltransferase OS=Chitinophaga costaii OX=1335309; GN = tgt PE=3 SV=1
MNFELTGTDPASRARAGVLTTGHGVINTPIFMPVGTVGSVKALTQEQLRQDVQAQIILGNTYHLYLRPGLEVLSAAGGLHKFNGWERPILTDSGGYQVFSLAANRKIKEEGVVFQSHIDGSRHLFTPESVMDIQRTIGADIIMAFDECPPYPSTYAYARKSMELTHRWLDRCIQRLAETSPAYGHEQTLFPIVQGSTFKDLRTISATEIAARECAGNAIGGLSVGEPEQDMYEMCELVCDILPKDKPRYLMGVGTPWNILENIALGVDMFDCVMPTRNGRNGMLFTWNGVINIRNKKWATDFSPIDAQSSCFASRNYSRAYLRHLFVAGEYLSLTLASMHNLRFYLELVAEARQQILAGTFAAWKASMIPQLKTRL

SEQ ID NO: 53670 - protein, 399 aa, unidentified
  source 1..399: note = Chitinophaga cymbidii
  REGION 1..399: note = tr|A0A512RK46|A0A512RK46_9BACT Queuine tRNA-ribosyltransferase OS=Chitinophaga cymbidii; OX = 1096750 GN=tgt PE=3 SV=1
MYVRLWKNYLPNIQYLCPLKKSDVLNFDLITTDPSGARAGVITTAHGAIQTPIFMPVGTVGSVKAVTQEQLRQDINAQIILGNTYHLYLRPGMDVLREAGGLHKFNGWERPILTDSGGYQVFSLAANRKIKEEGVVFQSHIDGSRHLFTPENVMDIQRTIGADIIMAFDECPPYPSEYRYAKKSMELTHRWLDRCIKRLNETSPAYGHEQTLFPIVQGSTYKDLRKISAEAIAARNCAGNAIGGLSVGEPEAEMYEMCGLVTEILPKEKPRYLMGVGTPWNILENIELGIDMFDCVMPTRNGRNGMLFTWNGVINIRNKKWAADFSPVDEMNPCDASRNYSKAYLRHLFVAGEFLGLTLASIHNLCFYLDLVKAAREQILQGTYGAWKQRMIPQLKTRL

SEQ ID NO: 53671 - protein, 376 aa, unidentified
  source 1..376: note = Chitinophaga dinghuensis
  REGION 1..376: note = tr|A0A327VJ55|A0A327VJ55_9BACT Queuine tRNA-ribosyltransferase OS=Chitinophaga dinghuensis; OX = 1539050 GN=tgt PE=3 SV=1
MNFELITKDNGSKARAGKITTAHGEIETPIFMPVGTVGSVKAVTQEQLKEAVQAQIILGNTYHLYLRPGLEVLSKAGGLHKFNGWDRPILTDSGGYQVFSLAANRKIKEEGCVFQSHIDGSRHLFTPENVMDIQRTIGADIIMAFDECPPYPSEYRYARKSMDLTHRWLDRCIQRLADTMPAYGHEQTLFPIVQGSTFKDLRKASAEYIASRGAAGNAIGGLSVGEPEQDMYEMCELVCDILPVDKPRYLMGVGTPWNILENISLGVDMFDCVMPTRNGRNGMLFTWNGVINIRNKKWADDFTPIDENSPCFATNTYSKAYLRHLFIAGEILGMTLASIHNLAFYLELVKEARRQILAGTFSAWKPKMISQLKTRL

SEQ ID NO: 53672 - protein, 376 aa, Chitinophaga eiseniae
  REGION 1..376: note = tr|A0A1T4Q814|A0A1T4Q814_9BACT Queuine tRNA-ribosyltransferase OS=Chitinophaga eiseniae OX=634771; GN = tgt PE=3 SV=1
MNFELITTDSGSNARAGKITTAHGTIETPIFMPVGTVGSVKAVTQEQVRDDVQAQIILGNTYHLYLRPGLEVLSLAGGLHKFNGWERPILTDSGGYQVFSLAANRKIKEEGVVFQSHIDGSKHLFTPENVMDIQRTIGADIIMAFDECPPYPSEYRYARKSMDLTHRWLDRCIQRLKDTQPAYGHEQTLFPIVQGSTYKDLRKASAEYIASRGAAGNAIGGLSVGEPENEMYEMCGLVTEILPKDKPRYLMGVGTPWNILENIALGVDMFDCVMPTRNGRNGMLFTWNGVINIRNKKWATDFNPIDANSECFATRDYSRAYLRHLFVAGEILGMTLASIHNLAFYLELVKEARRQILAGTFATWKTGMVQQLKTRL

SEQ ID NO: 53673 - protein, 376 aa, Chitinophaga filiformis
  REGION 1..376: note = tr|A0A1G7GIP8|A0A1G7GIP8_CHIFI Queuine tRNA-ribosyltransferase OS=Chitinophaga filiformis; OX = 104663 GN=tgt PE=3 SV=1
MNFELITTDSNSKARAGEITTGHGKIETPIFMPVGTVGSVKAVTQEQLREDVQAQIILGNTYHLYLRPGMDVLSQAGGLHKFNGWDRPLLTDSGGYQVFSLAANRKIKEEGVLFQSHIDGSRHLFTPENVMDIQRTIGADIVMAFDECPPYPSEYRYAKKSMELTHRWLDRCIKRLAETQPAYGHEQTLFPIVQGSTYKDLRTISATEIAARECAGNAIGGLSVGEPEEDMYEMCGLVCDILPVQKPRYLMGVGTPWNILENIALGVDMFDCVMPTRNGRNGMLFTWNGVINIKNKKWATDFTPIDENSDCFASKRYTKAYLRHLFAAGEILGMQLASIHNIAFYLELVKEARKQILAGNYASWKNTMVPQLKQRL

SEQ ID NO: 53674 - protein, 376 aa, unidentified
  source 1..376: note = Chitinophaga flava
  REGION 1..376: note = tr|A0A365Y1V8|A0A365Y1V8_9BACT Queuine tRNA-ribosyltransferase OS=Chitinophaga flava OX=2259036; GN = tgt PE=3 SV=1
MNFELITTDSGSNARAGKITTAHGEIETPIFMPVGTVGSVKAITQEQVRDDVQAQIILGNTYHLYLRPGLEVLSLAGGLHKFNGWDRPILTDSGGYQVFSLAANRKIKEEGVVFQSHIDGSKHLFTPENVMDIQRTIGADIIMAFDECPPYPSEYRYARKSMELTHRWLDRCIQRLGDTQPAYGHEQTLFPIVQGSTYKDLRKASAEYIASRGAAGNAIGGLSVGEPENEMYDMCGLVCDILPKDKPRYLMGVGTPWNILENIALGVDMFDCVMPTRNGRNGMLFTWNGVMNIRNKKWATDFSPIDENSDCFATSGYSRAYLRHLFVAGEILGMTLASIHNLAFYLELVKEARRQILAGTFATWKTGMVQQLKTRL

SEQ ID NO: 53675 - protein, 376 aa, Chitinophaga ginsengisegetis
  REGION 1..376: note = tr|A0A1T5NLK2|A0A1T5NLK2_9BACT Queuine tRNA-ribosyltransferase OS=Chitinophaga ginsengisegetis; OX = 393003 GN=tgt PE=3 SV=1
MNFELITTDSGSNARAGKITTAHGEIETPIFMPVGTVGSVKAVTQEQLRADVQAQIILGNTYHLYLRPGLEVLSLAGGLHKFNGWDRPILTDSGGYQVFSLAANRKIKEEGVVFQSHIDGSRHLFTPENVMDIQRTIGADIIMAFDECPPYPSEYRYARKSMELTHRWLDRCITRLNDTQPAYGHEQTLFPIVQGSTYKDLRKASAEYIASRNCAGNAIGGLSVGEPENEMYEMCGLVCESLPTDKPRYLMGVGTPWNILENIGLGIDMFDCVMPTRNGRNGMLFTWNGVINIRNKKWATDFSPVDANSPCFATNTYSKAYLRHLFVAGEILGMTLASIHNLAFYLELVKEARKQILAGTFATWKTGMINQLKTRL

SEQ ID NO: 53676 - protein, 392 aa, Chitinophaga ginsengisoli
  REGION 1..392: note = tr|A0A2P8GGL3|A0A2P8GGL3_9BACT Queuine tRNA-ribosyltransferase OS=Chitinophaga ginsengisoli; OX = 363837 GN=tgt PE=3 SV=1
MPPENGRNSLKHSDTEMNFELITTDSNSKARAGEITTGHGKIETPIFMPVGTVGSVKAVTQEQLRDDVQAQIILGNTYHLYLRPGMDVLSQAGGLHKFNGWERPLLTDSGGYQVFSLAANRKIKEEGVLFQSHIDGSRHLFTPENVMDIQRTIGADIIMAFDECPPYPSEYRYAKKSMELTHRWLDRCIKRMAETQPAYGHEQTLFPIVQGSTYKDLRTISATEIAARECAGNAIGGLSVGEPEQDMYEMCGLVCDILPEQKPRYLMGVGTPWNILENIALGVDMFDCVMPTRNGRNGMLFTWNGVINIKNKKWATDFTPVDENSACFASNRYTKAYLRHLFAAGEILGMQLASIHNIAFYLELVKEARKQILAGNYASWKNTMVPQLKQRL

SEQ ID NO: 53677 - protein, 376 aa, Chitinophaga japonensis
  REGION 1..376: note = tr|A0A562TCA6|A0A562TCA6_CHIJA Queuine tRNA-ribosyltransferase OS=Chitinophaga japonensis; OX = 104662 GN=tgt PE=3 SV=1
MQFDLITTDHNSRARAGVLTTDHGAIATPIFMPVGTVGSVKAVTQEQLRSDVQAQIILGNTYHLYLRPGLEVLSAAGGLHRFNGWDRPLLTDSGGYQVFSLAANRKIKEEGVVFQSHIDGSRHLFTPENVMDIQRTIGADIIMAFDECPPYPSEYRYARKSMELTHRWLDRCIQRMRETQPAWGHQQSLFPIVQGSTFKDLRTISATEIAARECDGNAIGGLSVGEPEAEMYDMCGLVCDILPAHKPRYLMGVGTPWNILENIALGVDMFDCVMPTRNGRNGMLFTWQGVINIKNKKWATDFSPLDEQTDCFASNHYTRAYLRHLFAAGEILGMQLASIHNLAFYLQLVKAAREQILAGNYAAWKTTMVKQLQTRL

SEQ ID NO: 53678 - protein, 376 aa, unidentified
  source 1..376: note = Chitinophaga jiangningensis
  REGION 1..376: note = tr|A0A1M6W0C4|A0A1M6W0C4_9BACT Queuine tRNA-ribosyltransferase OS=Chitinophaga jiangningensis; OX = 1419482 GN=tgt PE=3 SV=1
MNFELITTDNGSKARAGKITTAHGEIETPIFMPVGTVGSVKAVTQEQLRDAVQAQIILGNTYHLYLRPGLEVLSKAGGLHKFNGWNRPILTDSGGYQVFSLANNRKIKEEGVVFQSHIDGSRHLFTPENVMDIQRTIGADIIMAFDECPPYPSEYRYARKSMDLTHRWLDRCIKRLGETMPAYGHEQTLFPIVQGSTYKDLRKASAEYIASRGAAGNAIGGLSVGEPEEDMYEMCELVCDILPVEKPRYLMGVGTPWNILENISLGVDMFDCVMPTRNGRNGMLFTWNGVINIKNKKWADDFTPIDANSECFATRDYSKAYIRHLFAAGEILGMTLASIHNLAFYLELVKEARKQILAGTFSTWKPKMIAQLKTRL

SEQ ID NO: 53679 - protein, 375 aa, Chitinophaga niabensis
  REGION 1..375: note = tr|A0A1N6HA90|A0A1N6HA90_9BACT Queuine tRNA-ribosyltransferase OS=Chitinophaga niabensis; OX = 536979 GN=tgt PE=3 SV=1
MNFELTKTDPSGARAGTLTTDHGVIQTPIFMPVGTVGSVKAVTQEQLRNDIDARIILGNTYHLYLRPGLDVLKQAGGLHKFNGWDRPLLTDSGGYQVFSLAANRKIKEEGCLFQSHIDGSRHLFTPENVMDIQRVIGADIIMAFDECPPYPSEYQYAKRSMELTHRWLDRCIKRLNETTPEYGHEQTLFPIVQGSTYKDLRKISAEAIASRNCAGNAIGGLSVGEPEADMYEMCGLVTEILPKEKPRYLMGVGTPWNILQNIELGIDMFDCVMPTRNGRNGMLFTWQGVINIRNKKWATDFSQLDAENPCFASQNYTKAYVRHLFVAGEILGMTLASIHNLCFYLELVKAAREQILQGTYGPWKTKMIPQLKTRL

SEQ ID NO: 53680 - protein, 376 aa, Chitinophaga niastensis
  REGION 1..376: note = tr|A0A2P8HVC4|A0A2P8HVC4_9BACT Queuine tRNA-ribosyltransferase OS=Chitinophaga niastensis; OX = 536980 GN=tgt PE=3 SV=1
MNFELITTDSGSNARAGKITTAHGEIETPIFMPVGTVGSVKAVTQEQLRDAVQAQIILGNTYHLYLRPGLEVLSLAGGLHKFNGWDRPILTDSGGYQVFSLAANRKIKEEGVVFQSHIDGSRHLFTPENVMDIQRTIGADIIMAFDECPPYPSDYRYARKSMDLTHRWLDRCIQRLSDTQPAYGHEQTLFPIVQGSTYKDLRKASAEYIASRNCAGNAIGGLSVGEPENEMYEMCGLVCESLPVDKPRYLMGVGTPWNILENIALGVDMFDCVMPTRNGRNGMLFTWNGVINIRNKKWATDFNPIDGNSACFATRDYSRAYLRHLFVAGEILGMTLASIHNLAFYLELVQEARRQILAGTFATWKTGMVNQLKTRL

SEQ ID NO: 53681 - protein, 376 aa, unidentified
  source 1..376: note = Chitinophaga parva
  REGION 1..376: note = tr|A0A2T7BNK6|A0A2T7BNK6_9BACT Queuine tRNA-ribosyltransferase OS=Chitinophaga parva OX=2169414; GN = tgt PE=3 SV=1
MNFELISTDSASSARAGVLTTDHGVINTPIFMPVGTVGSVKAVTQEQLRQDVKAQIILGNTYHLYLRPGLEVLSAAGGLHKFNGWEKPILTDSGGYQVFSLAANRKIKEEGVVFQSHIDGSRHLFTPENVMDIQRTIGADIIMAFDECPPYPSEYRYAKKSMELTHRWLDRCIKRLGETTPRYGHEQTLFPIVQGSTFKDLRTISATEIAARGCAGNAIGGLSVGEPEQDMYEMCALVCNILPADKPRYLMGVGTPWNILENIALGVDMFDCVMPTRNGRNGMLFTWNGVINIKNKKWATDFTPVDEHSPCFASRDYSKAYLRHLFAAGEYLGLTLASIHNLAFYLELITEARAQILAGTYTAWKNKMIPVLKTRL

SEQ ID NO: 53682 - protein, 376 aa, Chitinophaga pinensis
  REGION 1..376: note = tr|A0A5C6LZD6|A0A5C6LZD6_9BACT Queuine tRNA-ribosyltransferase OS=Chitinophaga pinensis OX=79329; GN = tgt PE=3 SV=1
MIFELTTTDSNSKARAGLITTDHGKIETPIFMPVGTVGSVKAVTQEQLRDDVKAQIILGNTYHLYLRPGMEVLSQAGGLHKFNGWERPMLTDSGGYQVFSLAANRKIKEEGCLFQSHIDGSRHLFTPENVMDIQRTIGADIIMAFDECPPYPSEYRYAKKSMELTHRWLDRCIKRLAETQPVYGHEQTLFPIVQGSTYKDLRTISATEIAARECAGNAIGGLSVGEPEQDMYEMCGLVCDILPTEKPRYLMGVGTPWNILENIALGVDMFDCVMPTRNGRNGMLFTWNGVINIKNKKWATDFTPIDENSPCFASNRYTKAYLRHLFAAGEILGMQLASIHNIAFYLELVQEARKQILAGNYASWKNSMVPQLKQRL

SEQ ID NO: 53683 - protein, 376 aa, Chitinophaga pinensis
  REGION 1..376: note = tr|C7PR80|C7PR80_CHIPD Queuine tRNA-ribosyltransferase OS=Chitinophaga pinensis (strain ATCC 43595 / DSM 2588 / NCIB 11800 / UQM 2034) OX=485918; GN = tgt PE=3 SV=1
MIFELITTDSNSKARAGLITTDHGKIETPIFMPVGTVGSVKAVTQEQLRDDVKAQIILGNTYHLYLRPGMEVLSQAGGLHKFNGWERPMLTDSGGYQVFSLAANRKIKEEGCLFQSHIDGSRHLFTPENVMDIQRTIGADIIMAFDECPPYPSEYRYAKKSMELTHRWLDRCIKRLAETQPVYGHEQTLFPIVQGSTYKDLRTISATEIAARECAGNAIGGLSVGEPEQDMYEMCGLVCDILPTEKPRYLMGVGTPWNILENIALGVDMFDCVMPTRNGRNGMLFTWNGVINIKNKKWATDFTPIDENSPCFASNRYTKAYLRHLFVAGEILGMQLASIHNIAFYLELVQEARKQILAGNYASWKNSMVPQLKQRL

SEQ ID NO: 53684 - protein, 376 aa, unidentified
  source 1..376: note = Chitinophaga polysaccharea
  REGION 1..376: note = tr|A0A561Q5F4|A0A561Q5F4_9BACT Queuine tRNA-ribosyltransferase OS=Chitinophaga polysaccharea; OX = 1293035 GN=tgt PE=3 SV=1
MNFELITTDSGSNARAGKITTAHGEIETPIFMPVGTVGSVKAVTQEQLRADVQAQIILGNTYHLYLRPGLEVLSQAGGLHKFNGWDRPILTDSGGYQVFSLAANRKIKEEGVVFQSHIDGSRHLFTPENVMDIQRTIGADIIMAFDECPPYPSEYRYARKSMELTHRWLDRCIQRLSDTQPAYGHEQTLFPIVQGSTYKDLRKASAEFIASRNCAGNAIGGLSVGEPEEDMYEMCGLVCEVLPSDKPRYLMGVGTPWNILENIALGIDMFDCVMPTRNGRNGMLFTWNGVMNIRNKKWATDFSPIDENSPCFATSRYSRAYLRHLFVAGEILGMTLASIHNLAFYLELVQEARKQILAGTFATWKTGMVQQLKTRL

SEQ ID NO: 53685 - protein, 376 aa, Chitinophaga rupis
  REGION 1..376: note = tr|A0A1H8BNC3|A0A1H8BNC3_9BACT Queuine tRNA-ribosyltransferase OS=Chitinophaga rupis OX=573321; GN = tgt PE=3 SV=1
MNFDLLTTDNNSQARAGMLTTAHGSIETPIFMPVGTVGSVKAVTQEQLRNDVQAQIILGNTYHLYLRPGLEVLSAAGGLHSFNGWQRPILTDSGGYQVFSLAANRKIKEEGVVFQSHIDGSRHLFTPESVMDIQRTIGADIIMAFDECPPYPSEFVYARKSMELTHRWLDRCIKRLAETQPAYGHEQTLFPIVQGSTYKELRTISATEIAARECAGNAIGGLSVGEPEAEMYEMCGLVCEILPVHKPRYLMGVGTPWNLLENIALGIDMFDCVMPTRNGRNGMLFTWQGVINIKNKKWATDFSVIDEQTNCFASNNYTKAYLRHLFAAGEILGMQLASIHNLSFYLQLVKAAREQILAGTYAAWKAAMVPQLQTRL

SEQ ID NO: 53686 - protein, 376 aa, Chitinophaga sancti
  REGION 1..376: note = tr|A0A1K1REI2|A0A1K1REI2_9BACT Queuine tRNA-ribosyltransferase OS=Chitinophaga sancti OX=1004; GN = tgt PE=3 SV=1
MIFELTTTDSESKARAGVITTGHGVIETPIFMPVGTVGSVKALTQEQIKNDVQAQIILGNTYHLYLRPGMDILSRAGGLHKFNGWDRPILTDSGGYQVFSLAANRKIKEEGCLFQSHIDGSRHLFTPENVMDIQRTIGADIIMAFDECPPYPSEYRYAKKSMELTHRWLDRCIARLKETQPVYGHEQTLFPIVQGSTYKDLRTISATEIAARDCAGNAIGGLSVGEPEADMYEMCGLVCDILPKEKPRYLMGVGTPWNILENIALGVDMFDCVMPTRNGRNGMLFTWNGVINIKNKKWADDFSPIDENSPCFASSQYSKAYLRHLFVAGEILGMTLASIHNLAFYLELVKEARKQILTGNYAQWKTRMVPQLKQRL

SEQ ID NO: 53687 - protein, 376 aa, Chitinophaga skermanii
  REGION 1..376: note = tr|A0A327Q5B5|A0A327Q5B5_9BACT Queuine tRNA-ribosyltransferase OS=Chitinophaga skermanii; OX = 331697 GN=tgt PE=3 SV=1
MKFELLHTDAGSKARAGKLTTAHGEIETPIFMPVGTVGSVKAVTQEQLRTDINAQIILGNTYHLYLRPGLDIIKQAGGLHKFNGWERPLLTDSGGYQVFSLANNRKIKEEGCVFQSHIDGSRHLFTPENVMDTQRIIGADIIMAFDECPPYPSDYRYAKKSMELTHRWLDRCIKRFAETEPVYGYEQNLFPIVQGSTYKDLRKISAEVIASKECAGNAIGGLSVGEPEADMYEMCELVCDVLPTDKPRYLMGVGTPWNILQNISLGVDMFDCVMPTRNGRNGMLFTWNGVINIKNKKWADDFTPIDENSACVATSKYTKAYLRHLFVAGEILGMQLASIHNLAFYLDLVKEARKQILAGTFATWKEGMVKQLQVRL

SEQ ID NO: 53688 - protein, 375 aa, Chitinophaga sp.
  REGION 1..375: note = tr|A0A5B9WTC5|A0A5B9WTC5_9BACT Queuine tRNA-ribosyltransferase OS=Chitinophaga sp. XS-30; OX = 2604421 GN=tgt PE=3 SV=1
MNFDLITTDPSGARAGVITTAHGSIQTPIFMPVGTVGSVKAITQEQLREDINAQIILGNTYHLYLRPGMDVLREAGGLHGFNGWERPILTDSGGYQVFSLAANRKIKEEGVVFQSHIDGSRHLFTPENVMDIQRTIGADIIMAFDECPPYPSEYRYAKKSMELTHRWLDRCIKRLNETAPAYGYEQTLFPIVQGSTFPDLRKLSAEAIASRNCAGNAIGGLSVGEPEADMYEMCGLVTAILPKEKPRYLMGVGTPWNILENIGLGIDMFDCVMPTRNGRNGMLFTWNGVINIRNKKWATDFSPIDEMNPCNASRNYSKAYLRHLFVAGEFLALTLASIHNLCFYLDLVKVAREQILQGTYEAWKRNMVPQLKTRL

SEQ ID NO: 53689 - protein, 376 aa, Chitinophaga sp.
  REGION 1..376: note = tr|A0A1I0NBJ8|A0A1I0NBJ8_9BACT Queuine tRNA-ribosyltransferase OS=Chitinophaga sp. YR573; OX = 1881040 GN=tgt PE=3 SV=1
MIFELKTTDSGSKARAGVITTGHGVIETPIFMPVGTVGSVKAVTQEQLRTDINAQIILGNTYHLYLRPGLEVLSKAGGLHKFNGWDRPLLTDSGGYQVFSLAANRKIKEEGCMFQSHIDGSRHLFTPENVMDIQRTIGADIIMAFDECPPYPSEYRYARKSMELTHRWLDRCIKRMAQTEPAYGHEQTLFPIVQGSTYKDLRTISATEIAARECAGNAIGGLSVGEPEEDMYEMCGLVCDILPAHKPRYLMGVGNPWNILENIALGVDMFDCVMPTRNGRNGMLFTWEGVINIKNKKFATDFTPIAESTDCFASRQYSKAYLRHLFAAGEILGMQLASIHNLAFYLELVKEARKQILAGTFAPWKEKMVPQLKTRL

SEQ ID NO: 53690 - protein, 376 aa, Chitinophaga terrae
  REGION 1..376: note = tr|A0A1H4DD92|A0A1H4DD92_9BACT Queuine tRNA-ribosyltransferase OS=Chitinophaga terrae Kim and Jung 2007 OX=408074 GN=tgt PE=3 SV=1
MNFELITTDTHSKARAGKITTDHGEIATPIFMPVGTVGSVKAVTQEQLRDAVQAQIILGNTYHLYLRPGLEVLSKAGGLHKFNGWNRPILTDSGGYQVFSLAANRKIKEEGVVFQSHIDGSRHLFTPENVMDIQRTIGADIIMAFDECPPYPSEYRYARKSMDLTHRWLDRCIQRLKDTQPAYGHEQTLFPIVQGSTYKDLRKASAEYIAGRGCAGNAIGGLSVGEPEQEMYEMCGLVCEILPTEKPRYLMGVGTPWNILENIALGVDMFDCVMPTRNGRNGMLFTWNGVINIKNKKWATDFTPIDEHSACFATRDYTKAYLRHLFVAGEILGMTLASIHNLAFYLELVTEARKQILQGTFASWKASMVNQLKTRL

SEQ ID NO: 53691 - protein, 377 aa, unidentified
  source 1..377: note = Chitinophagaceae bacterium
  REGION 1..377: note = tr|A0A257HZK4|A0A257HZK4_9BACT Queuine tRNA-ribosyltransferase OS=Chitinophagaceae bacterium BSSC1 OX=2015574 GN=tgt PE=3 SV=1
MAALRFNLEASAGKARAGTIQTDHGTIQTPIFMPVGTVGTVKAVTQQQLKLDVQAQIILGNTYHLYLRPGTEVLEAAGGLHKFMGWDRPILTDSGGYQVFSLAANRKIKEEGVVFQSHIDGSKHLFSPESVMDIQRNIGADIIMAFDECPPYPSDYAYAKKSMELTHRWLTRCVNRLAETPDKYGYTQNLFPIVQGSTFPDLRKASCEFIASKGAVGNAIGGLSVGEPMDMMYEFTNLCCEILPADKPRYLMGVGTPWNLLECIDLGIDMFDCVMPTRNGRNGMLFTTQGVINIRNKKWFKDFSPIDPGLPSETSQYYTKAYLRHLFVGEEILGLQLASIHNLSFYLWLVGEARRNIIEGNYVSWKQQILPILQQRL

SEQ ID NO: 53692 - protein, 376 aa, unidentified
  source 1..376: note = Chitinophagaceae bacterium
  REGION 1..376: note = tr|A0A1Z5SES2|A0A1Z5SES2_9BACT Queuine tRNA-ribosyltransferase OS=Chitinophagaceae bacterium IBVUCB1 OX=1985173 GN=tgt PE=3 SV=1
MEFELSAKDNNSKARAGIITTAHGQIETPIFMPVGTVGSVKAVTQQQLDAEVKAQIILGNTYHLYLRPGIEVLEQAGGLHKFNGWSKPILTDSGGYQVFSLANNRKLKEEGAVFQSHIDGSKHLFTPENVIDIQRSIGADIIMAFDECPPYPSDYEYARKSMELTHRWLARCVQRMNDTEPKYGYEQTLFPIVQGSTYKDLRVASSQFIADMDCDGNAIGGLSVGEPEEMMYEMCALCCNNLPEEKPRYLMGVGTPWNILENIALGIDMFDCVMPTRNGRNGMLFTSKGVVNIKNKRWATDFSPIDDGIDCPTSNYYSKAYLRHLFVANEILGLQIASIHNLAFYLHLVRQAREHILLGDYNSWKNEMIPILKQRL

SEQ ID NO: 53693 - protein, 372 aa, unidentified
  source 1..372: note = Chlamydia abortus
  REGION 1..372: note = sp|Q5L5T1|TGT_CHLAB Queuine tRNA-ribosyltransferase; OS = Chlamydia abortus (strain DSM 27085 / S26/3) OX=218497; GN = tgt PE=3 SV=1
MALKFHVLHQSKKSRARVGRIETAHGIIDTPAFVPVATNGALKGVVDHSNIQLMFCNTYHLLVHPGTEAIAAMGGLHKFIHRNSPIITDSGGFQIFSLAYGSVAEEIKSCGKKKGSSSILEVTDEGVWFKSYRDGSKLFLSPEVSVQAQKDLGADIIIPLDELLPFHSDTTYFLSSCARTYVWEKRSLDYHKKDPRHQSMYGVIHGGIDPKQRKIGCAFVEDHPFDGFAIGGSLGRNLNEMVPIVDITTSYLSKDRPVHLLGIGDLPSIQATIGFGIDSFDSSYPTKAARHGLILSSQGPIKIANQAYTNDLSPIDPECTCLTCTSKISRAYLRHLFKVHEPNASIWASIHNLHYMQEFMKNIREQILHDRI

SEQ ID NO: 53694 - protein, 372 aa, unidentified; identical to SEQ ID NO: 53693
  source 1..372: note = Chlamydia abortus
  REGION 1..372: note = tr|A0A1X6RB40|A0A1X6RB40_CHLAO Queuine tRNA-ribosyltransferase OS=Chlamydia abortus OX=83555; GN = tgt PE=3 SV=1

SEQ ID NO: 53695 - protein, 372 aa, unidentified
  source 1..372: note = Chlamydia avium
  REGION 1..372: note = tr|W8JGE2|W8JGE2_9CHLA Queuine tRNA-ribosyltransferase OS=Chlamydia avium 10DC88; OX = 1229831 GN=tgt PE=3 SV=1
MALKFHVLHQSKKSQARVCQIETAHGTIDTPAFVPVATNGALKGVLDHSRIPLMFCNTYHLLVHPGTQHIAAMGGLHKFINRHAPIITDSGGFQIFSLAYGSVTEEIKSKGKKKHSSSILNITDDGVWFKSYRDGSKLFLSPETSVQAQKDLGADIIIPLDELLPFHTDTNYFLSSCSRTYIWEKRSLDYHRQSPGYQSMYGVIHGGIDPKQRKIGCQFVEEHPFDGFAIGGSLGRNFQEMVNVVDITMRYLSKDRPVHLLGIGDLPSIRAAVKFGIDSFDSSYPTKIARHGLILSSPKPIKIDNHAYSQDPTPIDPNCHCLTCTSNISKAYLHHLFKVHEPNAGIWASIHNLHYMQEVMKTIREQILNDEI

SEQ ID NO: 53696 - protein, 372 aa, unidentified
  source 1..372: note = Chlamydia felis
  REGION 1..372: note = sp|Q254U7|TGT_CHLFF Queuine tRNA-ribosyltransferase; OS = Chlamydia felis (strain Fe/C-56) OX=264202 GN=tgt PE=3; SV = 1
MALKFHVIHQSKKSRARVGRIETDHGIIDTPAFVPVATNGALKGVVDHSNIPLMFCNTYHLLVHPGTESIAAMGGLHKFINRDAPIITDSGGFQIFSLAYGSVAEEIKSHGKKKGSSSILEITDEGVWFKSYRDGHKLFLSPEVSVQAQKDLGADIIIPLDELLPFHSDQQYFLSSCSRTYVWEKRSLDYHRNDPRHQSMYGVIHGGIDPEQRKIGCQFVEDHPFDGFAIGGSLGRNLNEMVPVVDITTSHLSKDRPVHLLGIGDLPSIQATVKFGIDSFDSSYPTKAARHGLILSSQGPIKIANQAYANDLSPIDPKCTCLTCSSNLSRAYLRHLFKVHEPNAGIWASIHNLHHMQEVMKNIRKQILNDEI

SEQ ID NO: 53697 - protein, 372 aa, unidentified
  source 1..372: note = Chlamydia gallinacea
  REGION 1..372: note = tr|A0A173E097|A0A173E097_9CHLA Queuine tRNA-ribosyltransferase OS=Chlamydia gallinacea 08-1274/3; OX = 1143323 GN=M787_004550 PE=3 SV=1
MALKFRILHQSKKSRARVCQIETAHGVIDTPAFVPVATNGALKGVLDHSQIPLIFCNTYHLLVHPGTKHIAAMGGLHKFIHRQAPIITDSGGFQIFSLAYGSVEEEIKSKGKKKHTSSILSITDDGVWFKSYRDGSKLFLSPEVSIQAQKDLGADIIIPLDELLPFHTETAYFLSSCSRTYRWEKRSLDYHKKNPGYQSMYGVIHGGTDPEQRKIGCQFVEDHAFDGFAIGGSLGRNSKEMIDIVDITTRFLSKDRPIHLLGIGDLTSIQATVKFGIDSFDSSYPTKAARHGLILSSPKPIKISHRAYAQDPLPIDPECSCLTCTSNISKAYLHHLFKVHEPNAGIWASIHNLHYMQKIMQTIRKQILNDEM

SEQ ID NO: 53698 - protein, 372 aa, unidentified
  source 1..372: note = Chlamydia ibidis
  REGION 1..372: note = tr|S7J5I6|S7J5I6_9CHLA Queuine tRNA-ribosyltransferase OS=Chlamydia ibidis OX=1405396; GN = tgt PE=3 SV=1
MSLKFRVIHKSKISRARVGQIETAHGVIDTPAFVPVATNGALKGVIDHAKIPLIFCNTYHLIIHPGTEAIAQLGGIHKFINRNAPIITDSGGFQIFSLAYGSVVEEIKSQGKKKGTSSILKITDDGVWFKSYRDGRKLFLSPEVSIEAQKNLGADIIIPLDELLPFHTEKKYFLDSCSRTYIWEKRSLDYHKRNPGYQSMYGVIHGGIDPEQRKIGCQFVEDNPFDGFAIGGSLGRNIKELIDVVNVTTSHLTWERPVHLLGIGDLPSIRSTISFGIDSFDSSYPTKAARHGLILSSQGPIKIENRIYANDLSPIDNSCTCLTCSSKISRAYLRHLFKASEPNAVIWASIHNLHYMQQFMQDLRQKILEDKI

SEQ ID NO: 53699 - protein, 372 aa, Chlamydia muridarum
  REGION 1..372: note = sp|Q9PKK0|TGT_CHLMU Queuine tRNA-ribosyltransferase; OS = Chlamydia muridarum (strain MoPn / Nigg) OX=243161; GN = tgt PE=3 SV=1
MALRFEILHQSKKSRARVGRIETEHGCIDTPAFVPVATNGALKGVLDHSNIPLMFCNTYHLIVHPGAEAVAAMGGLHQFIGRNAPIITDSGGFQIFSLAYGSVAEEIKSCGKKKGENSIIKINDEGVWFKSYRDGRKLFLSPEVSVQAQKHLGADIIIPLDELLPFHTDPAYFQQSSQRTYAWEKRSLDYHLANPGYQSMYGVIHGGTFPDQRKLGCQFVEDLPFDGSAIGGSLGKNLRDIVGVVDVTTANLSIERPRHLLGIGDLPSIWATVGFGIDSFDSSYPTKAARHGMILTSQGSLKINNQRYASDLNPIEPGCACPACSQGISRAYLRHLFKVHEPNAGIWASIHNMHYMQKIMSKIREKILNDQL

SEQ ID NO: 53700 - protein, 372 aa, Chlamydia muridarum; identical to SEQ ID NO: 53699
  REGION 1..372: note = tr|A0A069ZZG9|A0A069ZZG9_CHLMR Queuine tRNA-ribosyltransferase OS=Chlamydia muridarum OX=83560; GN = tgt PE=3 SV=1

SEQ ID NO: 53701 - protein, 372 aa, unidentified
  source 1..372: note = Chlamydia pecorum
  REGION 1..372: note = tr|V8TPG0|V8TPG0_9CHLA Queuine tRNA-ribosyltransferase OS=Chlamydia pecorum DBDeUG; OX = 1427370 GN=tgtB PE=3 SV=1
MALKFHLLHQSTRSRARVGQIETAHGVIDTPAFVPVATHGALKGVIDHSFIPLVFCNTYHLLLHPGTAEIAKLGGLHTFIGRNAPIITDSGGFQIFSLAYGSVAAEIKSCGKKQGAPSLLKVTDEGAWFKSYRDGRQLFLSPEVSVQAQKDLGADIIIPLDELLPFHSEKEYFLSSCSRTYVWEKRSLDYHKKNPGYQSMYGVVHGGTDFEQRRVGCKFVEDEPFDGVAIGGSLGRNREEMHSVVQATTSCLSQERPVHLLGIGDLPSIEALVKCGIDSFDSSYPTKAARHGLILSRQGAIKILHQQYSHDLETLDPQCSCITCSSGISRAYLRHLFKVHEPNAAIWASIHNLHYMQQVMKNLREAILCNEI

SEQ ID NO: 53702 - protein, 372 aa, unidentified
  source 1..372: note = Chlamydia pneumoniae
  REGION 1..372: note = sp|Q9Z8W5|TGT_CHLPN Queuine tRNA-ribosyltransferase; OS = Chlamydia pneumoniae OX=83558 GN=tgt PE=3 SV=1
MALKFHLIHQSKKSQARVGQIETSHGVIDTPAFVPVATHGALKGVIDHSDIPLLFCNTYHLLLHPGPEAVAKLGGLHQFMGRQAPIITDSGGFQIFSLAYGSVAEEIKSCGKKKGMSSLVKITDEGAWFKSYRDGRKLFLSPELSVQAQKDLGADIIIPLDELLPFHTDQEYFLTSCSRTYVWEKRSLEYHRKDPRHQSMYGVIHGGLDPEQRRIGVRFVEDEPFDGSAIGGSLGRNLQEMSEVVKITTSFLSKERPVHLLGIGDLPSIYAMVGFGIDSFDSSYPTKAARHGLILSKAGPIKIGQQKYSQDSSTIDPSCSCLTCLSGISRAYLRHLFKVREPNAAIWASIHNLHHMQQVMKEIREAILKDEI

SEQ ID NO: 53703 - protein, 372 aa, unidentified; identical to SEQ ID NO: 53702
  source 1..372: note = Chlamydia pneumoniae
  REGION 1..372: note = tr|A0A0F7XJ36|A0A0F7XJ36_CHLPN Queuine tRNA-ribosyltransferase OS=Chlamydia pneumoniae OX=83558; GN = tgt PE=3 SV=1

SEQ ID NO: 53704 - protein, 372 aa, unidentified
  source 1..372: note = Chlamydia psittaci
  REGION 1..372: note = tr|A0A0E2JBQ8|A0A0E2JBQ8_CHLPS Queuine tRNA-ribosyltransferase OS=Chlamydia psittaci 01DC11; OX = 1112252 GN=tgt PE=3 SV=1
MALKFHVLHQSKKSRARVGRIETAHGTIDTPAFVPVATNGALKGVVDHSNIQLMFCNTYHLLVHPGIEAIAAMGGLHKFIHRNAPIITDSGGFQIFSLAYGSVAEEIKSCGKKKGSSSILEVTDEGVWFKSYRDGSKLFLSPEVSVQAQKDLGADIIIPLDELLPFHSDTTYFLSSCARTYVWEKRSLDYHKKDPRHQSMYGVIHGGIDPQQRKIGCKFVEDHPFDGFAIGGSLGRNLNEMVPTVDITTSYLSKDRPVHLLGIGDLPSIQATIGFGIDSFDSSYPTKAARHGLILSSQGPIKIANQAYTNDLSPIDPECTCLTCTSKISRAYLRHLFKVHEPNAGIWASIHNLHYMQEFMKNIRKQILNDEI

SEQ ID NO: 53705 - protein, 372 aa, unidentified
  source 1..372: note = Chlamydia psittaci
  REGION 1..372: note = tr|S7IJU0|S7IJU0_CHLPS Queuine tRNA-ribosyltransferase OS=Chlamydia psittaci 08-2626_L3; OX = 1112246 GN=tgt PE=3 SV=1
MALKFHVLHQSKKSRARVGKIETAHGVIDTPAFVPVATNGALKGVVDHSNIQLMFCNTYHLLLHPGAQVIAAMGGLHKFINRNAPIITDSGGFQIFSLAYGSVAEEIKSCGKKKGSSSILEVTDEGVWFKSYRDGSQFFLSPEVSVQAQKDLGADIIIPLDELLPFHSNTADFLSSCARTYVWEKRSLDYHKKDPGYQSMYGVIHGGIDLKQRKIGCEFVEDHPFDGFAIGGSLGRNRNEMVPIVEITTSYLSKDRPIHLLGIGDLPSIQATVSFGIDSFDSSYPTKAARHGLILSSQGPIKITNQAYTNDLSPIDPECRCLTCTSKISRAYLRHLFKVHEPNAGIWSSIHNLHYMQEFMKNIRKQILNDTI

SEQ ID NO: 53706 - protein, 372 aa, Chlamydia sp.
  REGION 1..372: note = tr|A0A1A9HVG8|A0A1A9HVG8_9CHLA Queuine tRNA-ribosyltransferase OS=Chlamydia sp. 2742-308; OX = 1806891 GN=tgt PE=3 SV=1
MALKFRILHKSKKSQARVGQIETAHGIIDTPAFVPVATHGALKGVIDHSHVPLLFCNTYHLLLHPGTEAIAKLGGLHQFMGRQMPIITDSGGFQIFSLAYGSVAAEIKSCGKKKDISSLVQITDEGAWFKSYRDGRKLFLSPEISIEAQKNLGADIIIPLDELLPFYADREYFLSSCARTYVWEKRSLDYHKKNPKCQSMYGVIHGGLDPEQRCIGCRFVEEEPFDGFAIGGSLGRNLKEMVDIVRITTAFLAKDRPIHLLGIGDAPSITATVGFGVDSFDSSYPTKAARHGLILSIGGGIKIAQQKYMYDSTPLDPSCSCLTCSSGISRAYLRHLFKVREPNAAIWASIHNLHYMQQVMAEIRERILRDEI

SEQ ID NO: 53707 - protein, 366 aa, Chlamydia sp.
  REGION 1..366: note = tr|A0A1M3BCQ7|A0A1M3BCQ7_9CHLA Queuine tRNA-ribosyltransferase OS=Chlamydia sp. 32-24 OX=1895742; GN = tgt PE=3 SV=1
MKFSVTKQDATSSARIGKLETSHGVIETPIFMPVGTRGAVKTLTNQHLIDIGAQIILGNTYHLMLRPGMEIMEKAGGLHRFMNWNKPILTDSGGFQVFSLSGLNKITEDGVYFQSHIDGAKYFLGPNESMQIQKTLGSDIVMAFDQCPPYPCSAIEMEHALDRTHRWAEKCLQFPLQEHQSLFGIVQGGVYSQYRRQSAQTLAAMNFPGYAIGGLSVGEPAAYMYEMVEETTAFLPQEKPRYLMGVGTPRNMIEAVMRGIDMFDCVMPTRNARNGTAFTWEGKVNIKAGRYAQDFSPLDPKTNCYTSQFTKAYIRHLLNVEEITALTLVTLQNLAFYLNFMEAIREAIRSNTLQELYNKTCEIYPI

SEQ ID NO: 53708 - protein, 372 aa, Chlamydia suis
  REGION 1..372: note = tr|A0A1T4J023|A0A1T4J023_9CHLA Queuine tRNA-ribosyltransferase OS=Chlamydia suis OX=83559 GN=tgt; PE = 3 SV=1
MALRFEILHQSKKSRARVGRIETAHGCIDTPAFVPVATNGALKGVLDHKNIPLMFCNTYHLIVHPGTEAIAAMGGLHQFIGRNAPIITDSGGFQIFSLSYGSVAEEIKSCGKKKGDSGIIKIDDEGVWFKSYRDGRKLFLSPEVSVQAQKNLGADIIIPLDELLPFHTDPTYFHQSSLRTYAWEKRSLDYHLKNPGYQSMYGVIHGGILPDQRKLGCQFVESLPFDGSAIGGSLGKTLQDIVGVVDVTTANLCPERPRHLLGIGDLPSIWATVGFGIDSFDSSYPTKAARHGMMLTSQGPLKIHNQRYASDLNPIEPGCSCLACSQGISRAYLRHLFKVHEPNAGIWASIHNMHYMQQVMREIREKILADQI

SEQ ID NO: 53709 - protein, 372 aa, Chlamydia trachomatis
  REGION 1..372: note = sp|O84196|TGT_CHLTR Queuine tRNA-ribosyltransferase; OS = Chlamydia trachomatis (strain D/UW-3/Cx) OX=272561; GN = tgt PE=3 SV=1
MALRFEILHQSKKSRARVGRIETAHGYIDTPAFVPVATNGALKGVLDHSNIPLMFCNTYHLIVHPGAEAIAAMGGLHQFIGRNAPIITDSGGFQIFSLAYGSVAEEIKSCGKKKGGNTIIKVNDDGVHFKSYRDGRKLFLSPEISVQAQKDLGADIILPLDELLPFHADPTYFHQSSQRTYVWEKRSLDYHLKNPGIQSMYGVIHGGTFPDQRKLGCKFVEDLPFDGSAIGGSLGKNLQDIVEVVGVTAANLSAERPRHLLGIGDLPSIWATVGFGIDSFDSSYPTKAARHGMILTSQGPLKINNQRYSSDLNPIEPGCSCLACSQGITRAYLRHLFKVHEPNAGIWASIHNMHHMQKVMREIREGILNDRI

SEQ ID NO: 53710 - protein, 372 aa, Chlamydia trachomatis; identical to SEQ ID NO: 53709
  REGION 1..372: note = sp|B0BBH3|TGT_CHLTB Queuine tRNA-ribosyltransferase; OS = Chlamydia trachomatis serovar L2b (strain UCH-1/proctitis) OX=471473 GN=tgt PE=3 SV=1

SEQ ID NO: 53711 - protein, 375 aa, unidentified
  source 1..375: note = Chlamydiae bacterium
  REGION 1..375: note = tr|A0A0S8D977|A0A0S8D977_9BACT Queuine tRNA-ribosyltransferase OS=Chlamydiae bacterium SM23_39; OX = 1704235 GN=tgt PE=3 SV=1
MTFSFKILHKSKKSKARVGKIYTPHGIVDTPNFVGVATNGTIKALDNKILEDLGMQLIFCNTYHLMIHPGEDIIAKAGGLHKFINRNLPIITDSGGFQVFSLLYGTVFDELKKKGKKRSDKLVLKIEEEGVLFRSYRDGKKILLTPEKSIQIQKALHSDIIIPLDELPPYYLKEKNLKKSFERTHRWEKRSLDEHIKNKKGQAIYGVIHGGIDKELRKKSCNILQDFPFDGFAIGGSIGKNKKEMVDIVKHTVKYLPEEYPKHLLGIGDSVSFEKIIPLGIDTFDSSYPTKAARHALLFKKEKNIKISKKKYSYIYKPIDERCNCFTCKNYTLAYMHHLFKTRELVFYSLATIHNIFFMINLMKEYREKILKGIF

SEQ ID NO: 53712 - protein, 375 aa, unidentified
  source 1..375: note = Chlamydiae bacterium
  REGION 1..375: note = tr|A0A317JE31|A0A317JE31_9BACT Queuine tRNA-ribosyltransferase OS=Chlamydiae bacterium OX=2081524; GN = tgt PE=3 SV=1
MTFRFELIHTSTKSKARVGKIYTPHGIIDTPSFVGVGTNGTMKALDNQAVHEIGLQLMFCNTYHLLLQPGTAIVKQAGGLHSFINRSLPIITDSGGFQVFSLAYGSIADELKGKGTKKQAGHVLKISEEGVTFRSYRDGQKVLLTPESSIEAQKDLGADIIIPLDELPPYHIEKKALEDSLARTHRWEERSLHTHLKNPNNQAMYAVIHGGIDAVLREKSCRYLTKLPFDGFSIGGSMGRTKQEMFEVLRSTMSHLPLEKPNHLLGIGDLTSIEMCIPMGIDTFDSSYPTRAARHGILLTQEGHIKIGKSSHAHLFSPPEKNCSCSTCSRFTLAYLHHLFKAKEATCMILATIHNLHFMVQLMQSYRAKILNNNV

SEQ ID NO: 53713 - protein, 376 aa, unidentified
  source 1..376: note = Chlamydiales bacterium
  REGION 1..376: note = tr|A0A1M3CRU4|A0A1M3CRU4_9CHLA Queuine tRNA-ribosyltransferase OS=Chlamydiales bacterium 38-26; OX = 1895743 GN=tgt PE=3 SV=1
MRPFYFELLHRSKKSRARVGRIHTPHGIINTPNFVAVGTNGTIKALDNTLVHDIGLQLMFCNTYHMLLQPGTKVVKQAGGLHTFINRKLPIITDSGGFQVFSLAYGSVADELKSRGTKKQTTSVVKITEEGVHFRSYRDGSKVMLTPESSIQAQKDLGADIIIPFDELPPYHIAPDALKRSLDRTHRWEKRSLDEHLKNPQGQAMYAVIHGGIDPELRKASCDYLTKLPFEGFAIGGSMGKNKEEMHTLLSYTLPLLPEEKPNHLLGIGDLASIDRSVPLGIDTFDSSYPTRAARHGVLFTAKGGLNVTKAENATKFEPIEKDCTCPTCSRFTLAYLHHLFKAREMTCMSLATAHNLYFMVQLMERYRNHILEDRI

SEQ ID NO: 53714 - protein, 366 aa, unidentified
  source 1..366: note = Chlamydiales bacterium
  REGION 1..366: note = tr|A0A1M3CVF5|A0A1M3CVF5_9CHLA Queuine tRNA-ribosyltransferase OS=Chlamydiales bacterium 38-26; OX = 1895743 GN=tgt PE=3 SV=1
MKFHIHKSDGHTKARVGVIDTVHGSIETPIFMPVGTRGAVKTLTNQQLLDIQAQIILANTYHLMLRPGTQILSKAGGLHAFMNWQKPLLTDSGGFQVFSLSSMNKITEKGVHFQSHIDGSRHFLGPDESMSIQKIIGADIVMAFDECTAYPAEKSKVEDGLERTHRWATRCRNYELLPHQNLFGIVQGGVHADLRQYSAKTLTDMNFDGYAVGGLSVGEPASIMYEVLDQTVPFLPEDKPRYLMGVGTPRNLIESVMRGIDMFDCVMPTRNARNGMAFTWSGKVQIKAARYAEDFTPLDSQTPCYTSQFSKAYIRHLLNVDEVTGLTLVTLQNLAFYLDFMQKLRLAIKNDTLATFYEKVCAVYPQ

SEQ ID NO: 53715 - protein, 372 aa, Chlamydophila caviae
  REGION 1..372: note = sp|Q822U8|TGT_CHLCV Queuine tRNA-ribosyltransferase; OS = Chlamydophila caviae (strain ATCC VR-813 / DSM 19441 / GPIC) OX=227941 GN=tgt PE=3 SV=1
MALKFHVLHQSKKSRARVGKIETAHGIIDTPAFVPVATNGALKGVIDHSNIPLMFCNTYHLLVHPGTEAIAAMGGLHKFMNRNAPIITDSGGFQIFSLAYGSVAEEIKSRGKKKGSSSILEVNDEGVWFKSYRDGHKLFLSPEVSVQAQKDLGADIIIPLDELLPFHSDEKYFLSSCSRTYVWEKRSLDYHKKDPRHQSMYGVIHGGIDPEQRKIGCQFVEDHPFDGFAIGGSLGRNLQEMLPVVDVTTSYLSKDRPVHLLGIGDLPSIHATVGLGIDSFDSSYPTKAARHGLILSSQGPIKIANQAYANDLSSLDPECTCATCTSNISRAYLRHLFKVHEPNAAIWASIHNLHYMQEVMKNIREQILNDEI

SEQ ID NO: 53716 - protein, 372 aa, Chlamydophila psittaci
  REGION 1..372: note = tr|A0A2D2DY33|A0A2D2DY33_CHLPS Queuine tRNA-ribosyltransferase OS=Chlamydophila psittaci OX=83554; GN = tgt PE=3 SV=1
MALKFHVLHQSKKSRARVGRIETAHGTIDTPAFVPVATNGALKGVVDHSNIQLMFCNTYHLLVHPGIEAIAAMGGLHKFIHRNAPIITDSGGFQIFSLAYGSVAEEIKSCGKKKGSSSILEVTDEGVWFKSYRDGSKLFLSPEVSVQAQKDLGADIIIPLDELLPFHSDTTYFLSSCARTYVWEKRSLDYHKKDPRHQSMYGVIHGGIDPQQRKIGCKFVEDHPFDGFAIGGSLGRNLNEMVPTVDITTSYLSKDRPVHLLGIGDLPSIQATIGFGIDSFDSSYPTKAARHGLILSSQGPIKIANQAYTNDLSPIDPECTCLTCTSKISRAYLRHLFKVHEPNAGIWASIHNLHYMQEFMKNISKQILNDEI

SEQ ID NO: 53717 - protein, 380 aa, unidentified
  source 1..380: note = Chloracidobacterium sp.
  REGION 1..380: note = tr|A0A257B9W6|A0A257B9W6_9BACT Queuine tRNA-ribosyltransferase OS=Chloracidobacterium sp. CP2_5A; OX = 2012633 GN=tgt PE=3 SV=1
MSLRFEVLARDCATEARRGRLTTARSVIETPVFMPVGTAATVKALTQEMLEALDARIILGNTYHLFLRPGHGVIRELGGLHRFMSWPRSILTDSGGYQVFSLGELRTISEAGVAFRSHLDGSQLFISPEVSMDAQIALGADIVMAFDECPPYPATHEQARVSLELTERWARRCRTHFDAQADRERQSLFGIVQGGIYADLRARSLEGLLEIGFDGYAIGGLSVGEEKHHMYDTTAFIAPRLPADKPRYLMGVGTPADLVESVARGVDMFDCVMPTRHARNGTVFTSAGKLNLRNARYIRDDQPLDAACACFVCRRYSRAYVAHLTRAGEILASVLATYHNVHHYLDLMGRIRHALERGEFGRFVAEFRRQQPSSEESDSL

SEQ ID NO: 53718 - protein, 380 aa, unidentified
  source 1..380: note = Chloracidobacterium thermophilum
  REGION 1..380: note = tr|G2LGP3|G2LGP3_CHLTF Queuine tRNA-ribosyltransferase OS=Chloracidobacterium thermophilum (strain B) OX=981222 GN=tgt PE=3 SV=1
MSLRFELLASDAGTAARRGRITTTRSVIETPVFMPVGTAATVKALTQDMLEALDARIILANTYHLFLRPGHEVIRELGGLHRFMSWPRSILTDSGGYQVFSLGELRTISEEGVTFRSHLDGTRLLLSPEVSMEVQIALGSDIVMAFDECPPYPASPEQVRHSLELTERWARRCRTYFDTHADRERQSLFGIVQGSVYPELRARSLEGLLEIGFEGYAIGGLSVGEEKHLMYDTTEFIAPRLPADKPRYLMGVGTPADLVESVARGVDMFDCVMPTRHARNGTVFTTTGRLNLRNARYVRDEQPLDPDCTCAVCRRYSRAYLAHLLRTGEILASILATYHNVHHYLDLMRQIRHALERAEFSRFRADFHRRQLSSEESLST

SEQ ID NO: 53719 - protein, 377 aa, Chlorobaculum limnaeum
  REGION 1..377: note = tr|A0A1D8CYZ1|A0A1D8CYZ1_CHLLM Queuine tRNA-ribosyltransferase OS=Chlorobaculum limnaeum; OX = 274537 GN=tgt PE=3 SV=1
MNFSVTAKDSRSAARCGVLSTAHGDIPTPIFMPVGTRASVKSVEPDELKALEAKIILANTYHLYLKPGNDILFKAGGIHRFMNWDGPLLTDSGGYQVYSLTDLRKISEEGVMFKSHLDGSKLHFTPENVVDTQRIIGSDIMMPLDECPPWPAEREYVRKSGELTLRWAERARKHFLSTRPHYGYEQFQFGITQGGTFEDLRAHSSRELVDMDFDGYAVGGMAVGEPAEEMYRMLDLSHTILPESKPRYLMGVGTPSNILNAIERGIDMFDCVIPTREGRNGRVYTRKGTINLRAGKYADDFRPIDEGFDNHVCRNYSRAYIRHLLNVGEILGLKLCTMHNLSFYLWLTSTARQHIQAGTFKDWKEAFLMEFNGNDKN

SEQ ID NO: 53720 - protein, 377 aa, Chlorobaculum parvum
  REGION 1..377: note = tr|B3QMN1|B3QMN1_CHLP8 Queuine tRNA-ribosyltransferase OS=Chlorobaculum parvum (strain NCIB 8327) OX=517417 GN=tgt PE=3 SV=1
MKFSVTAKDSSSAARCGVLSTAHGDIPTPIFMPVGTRASVKSVEPDELKALDAKIILANTYHLYLKPGNDILFKAGGVHRFMNWDGPLLTDSGGYQVYSLTDLRKISEEGVMFKSHLDGSKLHFTPENVVDTQRIIGSDIMMPLDECPPWPAEREYVQKSGELTLRWAERARKHFLSTRPHYGHEQFQFGITQGGTFDDLRAHSSRELIGMDFDGYAVGGMAVGEPAEEMYRMLELSHTILPESKPRYLMGVGTPSNILNAIERGVDMFDCVIPTREGRNGRVYTRKGTLNLRSAKYADDFRPIDEGFDNHVCRNYSRAYIRHLLNVGEILGLKLCTMQNLSFYLWLTRTAREHIAAGDFTDWKESFLMEFNRNGNK

SEQ ID NO: 53721 - protein, 377 aa, Chlorobaculum sp.
  REGION 1..377: note = tr|A0A4Q1D2K1|A0A4Q1D2K1_9CHLB Queuine tRNA-ribosyltransferase OS=Chlorobaculum sp. 24CR; OX = 2508878 GN=tgt PE=3 SV=1
MEFSVTSKDSRSAARCGVLSTAHGSIPTPIFMPVGTRASVKSIEPDELKALDAKIILANTYHLFLKPGNDILFKAGGVHRFMNWDGPLLTDSGGYQVYSLTDLRKISEEGVMFKSHLDGSKLHFTPENVVDTQRIIGSDIMMPLDECPPWPAERDYVQKSGELTLRWADRARKHFLSTRPHYGCEQFQFGITQGGTFDDLRAHSSRELVKMEFDGYAVGGMAVGEPAEQMYRMLELSHTILPESKPRYLMGVGTPSNILNAIERGIDMFDCVIPTREGRNGRIYTRKGAINLRAAKYADDFRPIDEGFDNHVCRNYSRAYIRHLLNVGEILGLKLCTMQNLSFYLWLTRTAREQIAAGDFTDWKESFLMEFNSNGNK

SEQ ID NO: 53722 - protein, 377 aa, Chlorobaculum tepidum
  REGION 1..377: note = tr|Q8KCL8|Q8KCL8_CHLTE Queuine tRNA-ribosyltransferase OS=Chlorobaculum tepidum (strain ATCC 49652 / DSM 12025 / NBRC 103806 / TLS) OX=194439; GN = tgt PE=3 SV=1
MKFSVLSTDRHSAARCGVLSTSHGDIPTPIFMPVGTRASVKSVEPNELKALDAKIILANTYHLYLKPGNDILFKAGGVHRFMNWDGPLLTDSGGYQVYSLTDLRKISEEGVMFKSHLDGSKLHFTPENVVDTQRIIGSDIMMPLDECPPWPAEKEYVQKSGELTLRWAERARKHFLSTRPHYGYEQFQFGITQGGTFDDLRAHSSRALVDMDFDGYAVGGMAVGEPAEEMYRMLELSHTILPESKPRYLMGVGTPANILNAIERGIDMFDCVIPTREGRNGRVYTRKGTINLRAGKYADDFRPIDEGFDNHVCRNYSRAYIRHLLNVGEILGLKLCTMQNLSFYLWLTRTAREHIAAGDFTDWKESFLMEFNSNDKN

SEQ ID NO: 53723 - protein, 377 aa, Chlorobaculum thiosulfatiphilum
  REGION 1..377: note = tr|A0A5C4S5Q0|A0A5C4S5Q0_CHLTI Queuine tRNA-ribosyltransferase OS=Chlorobaculum thiosulfatiphilum; OX = 115852 GN=tgt PE=3 SV=1
MNFSVTAKDSRSAARCGVLSTAHGDIPTPIFMPVGTRASVKSIEPDELKALDAKIILANTYHLYLKPGNDILFKAGGVHRFMNWDGPLLTDSGGYQVYSLTDLRKISEEGVMFKSHLDGSKLHFTPENVVDTQRIIGSDIMMPLDECPPWPAEREYVRKSGELTLRWAERARNHFLSTRPHYGYEQFQFGITQGGTFDDLRAHSSRMLVEMDFDGYAVGGMAVGEPAEQMYRMLDLSHTILPESKPRYLMGVGTPSNILNAIERGIDMFDCVIPTREGRNGRVYTRKGTINLRAGKYADDFRPIDEGFDNHVCRNYSRAYIRHLLNVGEILGLKLCTMQNLSFYLWLTSTAREHIAAGTFTDWKESFLMEFNSNGNK

SEQ ID NO: 53724 - protein, 378 aa, unidentified
  source 1..378: note = Chlorobi bacterium
  REGION 1..378: note = tr|A0A136NU80|A0A136NU80_9BACT Queuine tRNA-ribosyltransferase OS=Chlorobi bacterium OLB5; OX = 1617412 GN=tgt PE=3 SV=1
MFFKVLSQSGNCKARVSEITTSHGSFQTPIFMPVGTQATVKAIEQRELEEIGAQIILGNTYHLYLRPGTEVLNRAGGLHKFMNWNKPILTDSGGFQVFSLSALRKITDDGAEFRSHLDGSSHMFTPEKVVNIQREIGSDIMMVLDECLENPAAYEKVEESVKLTGRWAKRSREEFMRTEEMYGFKQHQFGIIQGSTYNELRKRSVLELAEMDFEGYAIGGLAVGEANEVMYDIVEFTTEFMPADKPRYLMGVGTPEDLLNAIERGVDMFDCVMPTRNARNATLFTSKGKMRLRNLEHKFNFGSIDEEVSSYTSDNFTPAYLRHLFMCDEMLAAQLATIHNLRFYLNLVEKSREAILEDRFTEFKKNFLEKYNSGINNS

SEQ ID NO: 53725 - protein, 373 aa, unidentified
  source 1..373: note = Chlorobi bacterium
  REGION 1..373: note = tr|A0A4P5UUQ3|A0A4P5UUQ3_9BACT Queuine tRNA-ribosyltransferase OS=Chlorobi bacterium OX=2268192; GN = tgt PE=3 SV=1
MSFFSLVHSDSESQARAGIITTDHGIIETPIFMPVGTVGSVKAIEQRELSEIGAQIILGNTYHLYLRPGEDVLSYFGGHHRFMSWNKPILTDSGGYQVFSLKELRKITEEGVQFRSHIDGSKHFFSPEKVIDIQRCIGSDIMMVLDECTEFPVSHKEAKTSMDLTLRWASRNKNAFDNSTPRYNHNQFLFGIGQGSTYKDLRRECMESLIDMNFDGYAIGGLAVGEPAFNMYDIIQHSTGIMPADKPRYLMGVGTPENILTAIEMGIDMFDCVMPTRNARNGTIFTTRGRMNIKNLKNKFNDECIDPGLDLYASQNYSLGYLRHLFTVGELLGLQLATMQNLGFYLWLVRTAREKILSNTYRQWKHSILDIIK

SEQ ID NO: 53726 - protein, 377 aa, unidentified
  source 1..377: note = Chlorobium chlorochromatii
  REGION 1..377: note = tr|Q3ASP2|Q3ASP2_CHLCH Queuine tRNA-ribosyltransferase OS=Chlorobium chlorochromatii (strain CaD3) OX=340177 GN=tgt PE=3 SV=1
MKFTLVAEDARSAARCGIVHTAHGDIPTPVFMPVGTRASVKSVEPHELDELQVPIILGNTYHLYLKPGNAIMHKAGGLHRFMNWQKPILTDSGGYQVYSLSELRKISEEGVIFKSHLDGSRLQFTPENVVDTERIIGSDIMMPLDECPPATAERSYVEASGELTIRWAERARQHFSKTAPLYGHEQYLFGITQGGIHADLRTRSTKALVELDFDGYAVGGMAVGEEASEMYRILELSHPLLPIHKPRYLMGVGTPANILNAIERGIDMFDCVIPTREGRNGRVYTRNGTINLRSARYADDFSSIDEGFENEVCRNYSRAYIRHLLNVGEILGLKLCTLQNISFFTWLTKTAQQEIQNGSFVDWKEDFLSRFTHGEKR

SEQ ID NO: 53727 - protein, 377 aa, unidentified
  source 1..377: note = Chlorobium ferrooxidans
  REGION 1..377: note = tr|Q0YP25|Q0YP25_9CHLB Queuine tRNA-ribosyltransferase OS=Chlorobium ferrooxidans DSM 13031 OX=377431 GN=tgt PE=3 SV=1
MKFTLLQTDPRSAARCGVLNTAHGAIPTPVFMPVGTRASVKSVEPHELKENNVHIILANTYHLYLKPGNDIILKAGGVHKFMNWDGPLLTDSGGYQVYSLSELRKISEEGVIFKSHLDGSMQQFTPENVVDTQRIIGSDIMMPLDECPPSMAEKEYIRKSGELTIRWAARAKKAFSSTSPLYGHDQYLFGITQGGIHNDLREVSIKALVDMDFDGYSIGGMAVGEPAPEMYRILELSHTLLPEQKPRYLMGVGTPENILNAIERGVDMFDCVIPTREGRNGRVYTRHGKMNLRSAKYATDFSPIDEGFDNDVCRNYSRAYIRHLLNVGEILGLKICTLQNISFFMWLTATARTHIQQGSFLEWKDDFLKRFNDNDKA

SEQ ID NO: 53728 - protein, 379 aa, Chlorobium limicola
  REGION 1..379: note = tr|B3EDL1|B3EDL1_CHLL2 Queuine tRNA-ribosyltransferase OS=Chlorobium limicola (strain DSM 245 / NBRC 103803 / 6330) OX=290315 GN=tgt PE=3 SV=1
MPLQFSVTCTDPHTAARCGVLHTDHGTIPTPVFMPVGTRASVKSVPTGLLAGLNVHIILANTYHLYLKPGNTIIRKAGGVHRFMNWNGPLLTDSGGYQVYSLSDLRKITEEGVTFKSHLDGSKLQFTPENVVDTQRVIGSDIMMPLDECPPSTAERSYIEKSGELTLRWAERARSHFVRTSPLYGHQQYQFGITQGGVHTDLRTISSKALVDLDFDGYAVGGMAVGEPAEAMYRVLELSHNLLPEHKPRYLMGVGTPENILNAIERGIDMFDCVIPTREGRNGRVYTRNGTMNLRSAKFAEDFRPIDEGFDNEISQSYSRAYIRHLLNVGEIFGLTLCTMQNISFFMWLTTTARTNIQNGTFTTWKEEFLRQFNSKQNR

SEQ ID NO: 53729 - protein, 377 aa, Chlorobium phaeobacteroides
  REGION 1..377: note = tr|B3EPX6|B3EPX6_CHLPB Queuine tRNA-ribosyltransferase OS=Chlorobium phaeobacteroides (strain BS1) OX=331678 GN=tgt PE=3 SV=1
MNFTVTHKDSGTASRSGILSTDHGDIPTPVFMPVGTRASVKSTEPEELKAQQVHIILANTYHLYLKPGNDIMGKAGGIHAFMNWDRPLLTDSGGYQVYSLSELRTISEEGVRFKSHLDGSMLQFTPENVIETQRLIGSDIMMPLDECPPSSAKKNYVKESGDMTVRWAERAKKHLSATKPHYGHAQALFGITQGGTYADLRTQISRELVDLDFEGYSIGGLAVGEPAEKMYRILELSHTILPENKPRYLMGVGTPENILNAIERGVDMFDCVIPTREARNGRVYTRNGYINLRSARYAEDFTAIDEGFDNHVCRNYSRAYIRHLLNVGELLGLKLCTLHNISFFMWLTRTAREQIINGSFREWKDDFLKTFNAGKQS

SEQ ID NO: 53730 - protein, 377 aa, Chlorobium phaeobacteroides
  REGION 1..377: note = tr|A1BH99|A1BH99_CHLPD Queuine tRNA-ribosyltransferase OS=Chlorobium phaeobacteroides (strain DSM 266) OX=290317 GN=tgt PE=3 SV=1
MNFTLTATDTKSSARCGVLETSHGTIPTPIFMPVGTRASVKSLEPHELTELGVSIILANTYHLYLRPGNDILRKAGGVHRFMNWNGPLLTDSGGYQVYSLSDLRKITEEGVTFRSHLDGSKQQFTPENVIDTERIIGSDIIMPLDECPPSTADREYVQTSGELTIRWAERAKKRFVSTSPLYGHSQFLFGITQGGIHADLRTISTKALVDLDFDGYAIGGMAVGEPAEAMYRVLELSDMLLPARKPRYLMGVGTPENILNAIERGVDMFDCVIPTREGRNGRVYTRNGTMNLRAAKYAADFRPLDEGFDNEVCRNFSRAYIRHLLNVGEILGLKLCTMQNISFYLWLTTTAREQIQNGTFTEWKNDFLSRFNSNEKT

SEQ ID NO: 53731 - protein, 375 aa, Chlorobium phaeovibrioides
  REGION 1..375: note = tr|A4SFH6|A4SFH6_CHLPM Queuine tRNA-ribosyltransferase OS=Chlorobium phaeovibrioides (strain DSM 265 / 1930) OX=290318 GN=tgt PE=3 SV=1
MNFRLLHTDTNTAARCAELYTDHGTIPTPVFMPVGTRASVKSVEPHELKEQQAHIILANTYHLYLKPGNAIMEKAGGVHRFMNWQGPLLTDSGGYQVYSLSELRKITEEGVTFKSHLDGSMLQFTPENVVDTQRIIGSDILMPLDECPSSTAEREYIRKSGEMTIRWAERAKQHFSLTRPLYGHGQMLFGITQGGTHADLRTISAKALVDLDFDGYATGGMAVGEPAEEMYRILELSHTLLPEHKPRYLMGVGTPENILNAIERGVDMFDCVIPTREGRNGRVYTRHGKMNLRSAKYSEDFSSIDEGFDNDVCRNYSRAYIRHLLNVGEILGLKLCTLQNISFFMWLTRTARTQIQNGSFREWKESFLEQYKRND

SEQ ID NO: 53732 - protein, 375 aa, Chlorobium phaeovibrioides; identical to SEQ ID NO: 53731
  REGION 1..375: note = tr|A0A3S0NAT8|A0A3S0NAT8_CHLPH Queuine tRNA-ribosyltransferase OS=Chlorobium phaeovibrioides; OX = 1094 GN=tgt PE=3 SV=1

SEQ ID NO: 53733 - protein, 376 aa, Chlorobium sp.
  REGION 1..376: note = tr|A0A4R0QLY6|A0A4R0QLY6_9CHLB Queuine tRNA-ribosyltransferase OS=Chlorobium sp. N1 OX=2491138; GN = tgt PE=3 SV=1
MSFRLETTDPRSAARTGTLSTGHGEIRTPVFMPVGTRASVKSVEPHELLEQEAQIILANTYHLYLKPGNHIIAKAGGVHRFMDWQGPLLTDSGGYQVYSLSELRKITEEGVAFKSHLDGSMLQFTPENVVDTQRIIGSDIMMPLDECPSATAEREYIRKSGELTIRWAERARRRFLQTEPLYGHPQMLFAITQGGTHADLRTISAKALVELDFEGYAIGGMAVGEPAEEMYRILELSHTMLPEHKPRYLMGVGTPENILNAIERGVDMFDCVIPTREGRNGRVYTRKGKMNLRSAKYAEDFRPLDEGFESHVSGHYSRAYIRHLLNVGEILGLKLCTLQNIAFFMWLTRTARQEIEKGSFLEWKAAVLEEFNRGEA

SEQ ID NO: 53734 - protein, 374 aa, Chlorobium sp.
  REGION 1..374: note = tr|A0A533TE55|A0A533TE55_CHLSQ Queuine tRNA-ribosyltransferase OS=Chlorobium sp. OX=1095 GN=tgt; PE = 3 SV=1
MKFTLTRQDSRTAARCGVLQTDHGTIPTPIFMPVGTRASVKSVEPHELRELNVHIILANTYHLYLRPGNDIIMKAGGIHRFMNWQGPLLTDSGGYQVYSLSDLRKISEEGVMFKSHLDGSKQHFTPENVVDTERIIGSDIMMPLDECPPSTAEKEYVRISGELTIRWAERARNHFSKTSPLYGHKQYLFGITQGGVHADLRSISSKALVDLDFDGYAIGGMAVGEPAAEMYRILELSHTLLPEEKPRYLMGVGTPENILNAIERGVDLFDCVIPTREGRNGRVYTRHGKMNLRSAKYSEDFSSIDEGFDNEVCRNYSRAYIRHLLNVEEILGLKLCTLHNISFFMWLTATARTEIQNGSFLEWKTDFLDQFNRQ

SEQ ID NO: 53735 - protein, 373 aa, unidentified
  source 1..373: note = Chloroflexi bacterium
  REGION 1..373: note = tr|A0A1F8TBI6|A0A1F8TBI6_9CHLR Queuine tRNA-ribosyltransferase OS=Chloroflexi bacterium RBG_19FT_COMBO_62_14 OX=1797671 GN=tgt PE=3 SV=1
MTAFGWSLAGTDGRGRAGTFHTSHGDVCTPVFAPVGTQGTVKALTPDQLESLGAGLILANTYHLYLRPGHQVIARLGGLHGFMGWNGPILTDSGGYQVFSLADRRDVDGDGVTFRSHLDGTEHRLTPEKAIAIQEDLGADIIMALDECPVPNDRDAVEGAVIRTHNWAERCLEAHTRTDQALFGIVQGGIFPDLRTDSAEFIAGLDFPGNAIGGLSVGESKPETLAVLELLDQTLPEDRPRYLMGVGSPEDLVEGVVRGVDIFDCVLPTRMARNHAALTRQGRLNLRRAEYIEDTRPIDPACDCYTCLKFTRAYLRHLSVSGEMLAATLLSIHNLHALVHLMDDLRQAILELRLNAFAEEFRDGYQKHRDPEA

SEQ ID NO: 53736 - protein, 376 aa, unidentified
  source 1..376: note = Chloroflexi bacterium
  REGION 1..376: note = tr|A0A2N2M9W3|A0A2N2M9W3_9CHLR Queuine tRNA-ribosyltransferase OS=Chloroflexi bacterium HGW-Chloroflexi-7 OX=2013730 GN=tgt PE=3 SV=1
MTTSPFTYDIIATEKNARAGVFHTPHGDLLTPVFAPVGTQATVKSITPAQLKDTGASLVLSNTYHLYLRPGADLVAEMGGLHEFMQWPNPMLTDSGGFQVFSLSDTRKVDEEGVTFKSHIDGSSHRFTPESAIKVQEQLGADIIMAFDECATPNDLAYNKRAVVRTHNWLKRCVAAKTRSDQALFGIVQGGVFADLRRESAEFVSSMDLPGIAIGGLSVGETKTEMHAMLDVLHPILPANKPRYLMGVGSPEDLVNGVMRGVDIFDCVLPTRLARHQSAFTPTGRINLMNAGFAHDKLPIDQTCNCYACKNFTRAYIRHLVVAKEMLASTLISIHNISFLINLMNNIRAAIKAGNFELFAADFLRSYKTNIKQEPS

SEQ ID NO: 53737 - protein, 403 aa, Chloroflexus aggregans
  REGION 1..403: note = tr|B8GAI9|B8GAI9_CHLAD Queuine tRNA-ribosyltransferase OS=Chloroflexus aggregans (strain MD-66 / DSM 9485) OX=326427 GN=tgt PE=3 SV=1
MTHFTITARDPHSRARTGRLRTAHGEVETPVFMPVGTRATVKSLSPHELREHGASIILGNTYHLYLQPGHELIARHGGLHGFMSWNGPILTDSGGFQVFSLVYGGIADEVKGRRPAHPTRLADMVTVTEEAVIFKSYLDGSRHVFTPERSIEVQHHLGADIIVCFDELPPFRAGYDYTAQSMARTHRWAERCLVAHQRRNRAALPNPDQLLFGIVHGGIFADLRRASAEFISSMPFDGLCIGGSLGANKAQMYEVVDMTVPYLPDGMARHLLGVGDVDDLLEGVARGIDMFDCVSPTRLGRHGAALIRNRERNWRLNVTNATLRDDPGPLQAGCPCYTCRHFSRAYIHHLYRSKELLGIRLVSLHNVAFLLNLMAEVRAAIAANRFGELYYEWLGKPLPDITP

SEQ ID NO: 53738 - protein, 372 aa, Chloroflexus aggregans
  REGION 1..372: note = tr|B8G769|B8G769_CHLAD tRNA-guanine transglycosylase, various specificities OS=Chloroflexus aggregans (strain MD-66 / DSM 9485) OX=326427 GN=Cagg_1116; PE = 4 SV=1
MVKTLLVHHGQLTLPVFLPDATFGTVRSVDSRDVAEAGITALVMNVFHLMQRPGSSTIHALGGLHRMAAWNGPIVTDSGGFQAYSLIRSNPKQGKISDQGLVFQPEGAERPFHLTPEKSIQLQLSYGADIVICLDDCTHVDDPPAEQRRSVERTVRWAKRCRAEFDRQLAQRRPSGPPPLLFAVVQGGGDLRLRAECAAALLEIGFDGFGFGGWPLDAQGNLLHEILAFTRAQIPSHYPMHALGVGHPANVVACARMGYEMFDSALPTRDARQGRLLAFTTDPHHPSFRLEGEWFTYVYLADRKHIKADHPISPGCTCFTCRHYSLGYLHHLHKIGETLVLRLATIHNLHFMAQLMALIRRERYEEDGHGAN

SEQ ID NO: 53739 - protein, 405 aa, Chloroflexus aurantiacus
  REGION 1..405: note = tr|A9WBV8|A9WBV8_CHLAA Queuine tRNA-ribosyltransferase OS=Chloroflexus aurantiacus (strain ATCC 29366 / DSM 635 / J-10-fl) OX=324602 GN=tgt; PE = 3 SV=1
MAPFTITARDPESRARAGLLQTAHGTVATPVFMPVGTRATVKSLTPHELRDHGASIILGNTYHLYLQPGHELIARHGGLHSFMGWNGPILTDSGGFQVFSLVYGGIADEVKGRRPAHPTRLNDMVTVTEEAVIFKSYLDGSRHVFTPERSIEVQHHLGADIIVCFDELPPFRAGYDYTAQSMARTHRWAERCLIAHQRRDRSALPNPDQLLFGIVHGGIFPDLRRASACYISDMAFDGLCIGGSLGANKTQMYEVVDMTVPYLPDGMARHLLGVGDVDDLLEGVARGIDMFDCVSPTRLGRHGAALIRNRERNWRLNVTNAALRDDRQPLQEGCPCYTCRHFSRAYIHHLYRSKELLGIRLVSLHNVAFLLNLMADIRSALAAGRFGELYTEWLGKPLPVLPSPE

SEQ ID NO: 53740 - protein, 370 aa, Chloroflexus aurantiacus
  REGION 1..370: note = tr|A9WEM6|A9WEM6_CHLAA tRNA-guanine transglycosylase; OS = Chloroflexus aurantiacus (strain ATCC 29366 / DSM 635 / J-10-fl) OX=324602 GN=Caur_2844 PE=4 SV=1
MTDFLTLQHGQLSLPTFLPDATFGTVRAVDSRDLSEAGIRALVMNVFHLMQRPGSSTITALGGLHQMTAWSGPIVTDSGGFQAYSLIRNNSKQGRITDQGLTFQPEGAERRFQLTPEKSIQLQLSYGADIVICLDDCTHVDDPPAEQRRSVERTIRWARRCRQEFDRQVAQRRRQGPPPLLFAVVQGGGDLHLRAECAAALLDIGFDGFGFGGWPLDAQGQLLDEVLAFTRDQIPARFPMHALGVGHPASVVACARMGYDIFDSALPTRDARQGRLLAFTADPQRPGFQLRGDWFTYVYLADRKHVKADTPISPGCQCFTCSRYSLGYLHHLHKLGETLVLRLATIHNLHFMAQLMELIRHERRGSQAND

SEQ ID NO: 53741 - protein, 403 aa, unidentified
  source 1..403: note = Chloroflexus islandicus
  REGION 1..403: note = tr|A0A178M9Q8|A0A178M9Q8_9CHLR Queuine tRNA-ribosyltransferase OS=Chloroflexus islandicus; OX = 1707952 GN=tgt PE=3 SV=1
MSHFTITARDPDSRARAGVLQTAHGAVATPVFMPVGTRATVKSLSPHELRDHGASIILGNTYHLYLQPGHELIARHGGLHGFMSWDGPILTDSGGFQVFSLVYGGIADEVKGRRPAHPSRLSDMVTVTEEAVIFKSYLDGSRHVFTPERSIEVQHHLGADVIVCFDELPPFRAGYDYTAQSMARTHRWAERCLTAHQQRNRAALPNPDQLLFGIVHGGIFPDLRRASAEVISRMGFDGLCIGGSLGANKEQMYEVVDMTVPYLPDGMARHLLGVGDVDDLLEGVARGIDMFDCVSPTRLGRHGAALVRNRERNWRLNVTNASLRDDPGPLQAGCTCYTCRHFSRAYIHHLYRSKELLGIRLVSLHNVAFLLNLMADVRAALAAGRFGELYEEWLGKPLISVTR

SEQ ID NO: 53742 - protein, 376 aa, Chlorogloea sp.
  REGION 1..376: note = tr|A0A2T1EJN4|A0A2T1EJN4_9CHRO Queuine tRNA-ribosyltransferase OS=Chlorogloea sp. CCALA 695; OX = 2107693 GN=tgt PE=3 SV=1
MSEFSYQVLAKCSQTQARVGIFSTPHGIVETPRFMPVGTLANVKTLTPMQLEATGAQMVLSNTYHLHLQPGESIVGKAGGLHSFMNWQKPILTDSGGFQVFSLSQMRKISEAGVIFRSPHGGDIINFTPEFSIQVQNILGADVIMAFDECPPYPATKEEIAAATNRTNRWLERCIVAHERPDQALFGIVQGGVHLDLRAAAAQALAAYDLPGYAIGGVSVGEPPELIAKIVAATTPMLPVNKPRYLMGVGTYREMAQAIASGIDLFDCVIPTRLARHGAALVQGDRWNLKNAQFREDFTPLDSTCPCYTCQNFTRAYLSHLVRSQEILAYTLLSIHNVTELIGFTQKIRDSILANRFTTDFQHWLNPQIDESLLNE

SEQ ID NO: 53743 - protein, 354 aa, Chlorogloeopsis fritschii
  REGION 1..354: note = tr|A0A3S0Y2K4|A0A3S0Y2K4_CHLFR Queuine tRNA-ribosyltransferase OS=Chlorogloeopsis fritschii PCC 6912 OX=211165 GN=tgt PE=3 SV=1
MFFTPHGLVETPRFMPVGTLANVKTLTPAQLRDTGAQMVLSNTYHLHLQPGEAIVAGGGGLHKFMGWNGPMLTDSGGFQVFSLSEMRKITEEGVTFRSPHDGQIIKLTPEKSIEIQNTLGADVIMAFDECPPATASRQEVEQATERTYRWLERCIAAHQRDDQALFGIVQGGVYLDLRCQATEALTKLDLPGYAIGGVSVGEEPELIHKIVQATAPLLPNHKPRYLMGVGTYREMVMAIASGVDLFDCVIPTRWARHGTAMVQGDRWNLKNAKFREDFTPLDETCPCYTCQNFTRAYISHLVRSQEILAYTLLSIHNITELIRFTQKIREAILRDTFATEFAHWLAPQEVGEGE

SEQ ID NO: 53744 - protein, 380 aa, Chloroherpeton thalassium
  REGION 1..380: note = tr|B3QU33|B3QU33_CHLT3 Queuine tRNA-ribosyltransferase OS=Chloroherpeton thalassium (strain ATCC 35110 / GB-78) OX=517418 GN=tgt PE=3 SV=1
MNFTLQGVDSQTAARAGVLETAHGTIETPIYMPVGTRASVKAIEQRELLELDAQIILGNTYHLYLKPGTAILQNAGGLHKFMNWPRPILTDSGGFQVFSLSELREISEEGATFKSHIDGTRHLFSPENVIDTQRLIGSDIMMAFDECPPHDADPDYLRKSHELTLRWAARCQNQFAKTSGVYGYEQSLFAITQGGTNEMLRAESTKRLVEMDFEGYAIGGLAVGEPAEEMYRMIEVSHPLLPANKPRYLMGVGTPENILNAIERGVDMFDCVIPTREGRNGRIYTRTGILNLRAAKYRDDFRPIDEGFDNYVCKNFSRAYIRHLLNVGEILGLQLCSLHNTSFFIWLTKTARAHILKGDFQTWKAEFFARYCHEQESDKR

SEQ ID NO: 53745 - protein, 370 aa, Chondrocystis sp.
  REGION 1..370: note = tr|A0A1Z4RL54|A0A1Z4RL54_9CHRO Queuine tRNA-ribosyltransferase OS=Chondrocystis sp. NIES-4102; OX = 2005460 GN=tgt PE=3 SV=1
MGFSFECQAVCNHTQARAGIFNTPHGIVETPRFMPVGTLATVKGIIPQQLEVAKAQMILANTYHLHLQPGEDIVREAGGLHSFMAWKQPILTDSGGFQVFSLSKLRKITETGVTFKSPRDGSIIEITPERSIQIQNALGADVIMAFDECPPADATKEQIQAATDRSYRWLQRCIEAHQNPQKQALFGIVQGGIHLDLRTRAVEQLVELNLPGYAIGGVSVGESPELINATVKHTAPLLPVNKPRYLMGVGTYREMAQAIAHGIDLFDCVIPTRLGRHGTALVQGHRINIKNAQYKRDYQPLDPTCSCYACQNFSRAYLNHMVRSREMLGYIMLSLHNITELIRFTQQIRQAIFNNTFAQEFSMWLMDASF

SEQ ID NO: 53746 - protein, 372 aa, Chondromyces apiculatus
  REGION 1..372: note = tr|A0A017T059|A0A017T059_9DELT Queuine tRNA-ribosyltransferase OS=Chondromyces apiculatus DSM 436; OX = 1192034 GN=tgt PE=3 SV=1
MHSPGYSFRETSRDGNARTGLLVTPHGEVETPTFMPVGTQGSVKTLSPTEVAATGARIVLGNTYHLWIRPGPDIIARAGGLHKFASWPHVMLTDSGGFQAFSLADRRTMTEDGFVFRSHIDGSRLALSPEVAMEVQGKIGADIAMQLDVCPPGMSARPELERACATTTRWARRCLAAKRPDQALFGIVQGGTDVALRKAHAEELAAMPFDGLALGGFSVGEPIERMHEVLGEVAPTLDRARPHYLMGVGTPSDLVRAIGTGVDMFDCVLPTRNARNGQALTQRGRIVIKQARYKEDFTPLDPTCSCPACTGGYTRAYLRHLYLAGEILVLRLITEHNLHLYGRLVREAREAIAAGRYASFARAWLGSDGDEP

SEQ ID NO: 53747 - protein, 374 aa, Chondromyces crocatus
  REGION 1..374: note = tr|A0A0K1ENX5|A0A0K1ENX5_CHOCO Queuine tRNA-ribosyltransferase OS=Chondromyces crocatus OX=52; GN = tgt PE=3 SV=1
MAISTFGFEFRQTAQDGAARTGVLTTPHGEVETPTFMPVGTQGSVKTLTPEEVAATGARIVLGNTYHLWLRPGPEVIDKIGGLHKFTCWPHAMLTDSGGFQAFSLADRRTVSEEGFVFRSHLDGSRRVLTPEVAMQVQGALGADIAMQLDICPPGTASPREMDEACAVTTRWARRCLSAKRPDQALFGIVQGGTDVRRRLAHADELAAMSFDGLALGGFSVGEPIEKMHEVLAEVAPRLDASRPRYLMGVGTPTDLVRAIGAGVDMFDCVLPTRNARNGQALTKQGRIVIKQARYKEDFSPLDPGCECPTCTQGYSRAYLRHLFMAGEVVVLRMLTEHNLHLYGRLVREARAAIAAGRYAAFARSWLTKDVADS

SEQ ID NO: 53748 - protein, 369 aa, Christensenella minuta
  REGION 1..369: note = tr|A0A136Q6B5|A0A136Q6B5_9FIRM Queuine tRNA-ribosyltransferase OS=Christensenella minuta; OX = 626937 GN=tgt PE=3 SV=1
MNFSFQVEKKDGGSKARAGRLATPHGEIKTPVFMPVGTQATVKAMTNDQVLRAGAQIILGNTYHLYMRPGHELIREAGGLHRFMNWKKPILTDSGGFQVFSLGDLRKLTEEGVEFQSHLDGSRHMFTPEKAVEIEEALGSDIMMVLDECTPYPADFDYTKHSMERTHRWAKRCKEAQTRDDQALFGIVQGGMYPDLRKKSAEEIARLDFIGNAIGGLSVGEPKPVMYEMLDVVTDTLPEEKPRYLMGVGTADCLVEGVARGVDMFDCVLQTRIARNGTALVRNGKLVIRNAEYAKDFRPIDEACDCYACRNHTRAYIRHLIKTGEILGAILLSIHNTRFTIRLMEEIRGHIEAGTFGEFRRGFMEDFRI

SEQ ID NO: 53749 - protein, 98 aa, unidentified
  source 1..98: note = Chromatiaceae bacterium
  REGION 1..98: note = tr|A0A3D4RS44|A0A3D4RS44_9GAMM tRNA guanosine(34) transglycosylase Tgt (Fragment) OS=Chromatiaceae bacterium; OX = 2049432 GN=tgt PE=4 SV=1
NARNGHLFTHTGTVRIRNAEHKTSTDSLDPHCNCYTCRNYSRAYLHHLDKCNEILGARLNTIHNLTYYQTLMSGMRDAIAAGALHQFVADFFARRIVS

SEQ ID NO: 53750 - protein, 371 aa, unidentified
  source 1..371: note = Chromatiales bacterium
  REGION 1..371: note = tr|A0A257SVZ1|A0A257SVZ1_9GAMM Queuine tRNA-ribosyltransferase OS=Chromatiales bacterium 21-64-14; OX = 1970504 GN=tgt PE=3 SV=1
MNFDILATDGTARHGRMVFPRGAVATPAFMPVGTRGTVKAMTPDEVRGLGYELILGNTFHLMLRPGLEVIRAHGGLHGFMNWSAPILTDSGGYQVFSLAKMRRISEQGVTFRSPEDGATVFLGPEESMAVQRALDADVVMAFDECTPYPATPQQARESMELSARWALRSRRAHADNPAALFGIVQGGMYPELREASLSTLTEIGFDGYALGGLSVGEPKAERLGVLEYTVPRMPATAPRYLMGVGTPEDIVDAVCRGIDLFDCVLPTRNARNGFLFVGQGTLRIRNARYRNDLRPPDEACGCYTCRNYSRAYLRHLDQCNEILGARLNTIHNLYYYQGLLQGLREAIAAGRLAAFVRDFYAGRVQAAESVA

SEQ ID NO: 53751 - protein, 375 aa, unidentified
  source 1..375: note = Chromatiales bacterium
  REGION 1..375: note = tr|A0A524KIS9|A0A524KIS9_9GAMM Queuine tRNA-ribosyltransferase OS=Chromatiales bacterium; OX = 2026725 GN=tgt PE=3 SV=1
MRFEVSATDGAARCGRLTLAHGTVETPVFMPVGTYGTVKAMTPEDLVGLGAEIILGNTFHLMLRPGGEVVQSLGGLHGFMHWRKPILTDSGGFQVWSLETRSKVSEDGVEFRAPTDGSLVFLSPERAMEVQAQLGSDIQMIFDECTTYPATEAQARASMELSLRWAKRSRAAFDAGPAPARGSAVFGIVQGGMHGNLRSESLAGLVDIGFDGLAIGGLSVGEPEVDRLRILEHTLPRMPAAQPRYLMGVGTPSDIVQAVLRGVDMFDCVMPTRNARNGSLFVADGVVRIRNARYRDDPRPIEEGCECYTCRNYSRAYLRHLDQCGEMLGSHLNTIHNLHFYMQLMGNLRRSIGLGTLRGFAGDFLARQQSGASVP

SEQ ID NO: 53752 - protein, 372 aa, Chromatium okenii
  REGION 1..372: note = tr|A0A2S7XNI2|A0A2S7XNI2_9GAMM Queuine tRNA-ribosyltransferase OS=Chromatium okenii OX=61644; GN = tgt PE=3 SV=1
MEFKLFNQDGLARRGQLQFERGTVETPAFMPVGTYGTVKAMTPEELRDVGAEIILGNTFHLMLRPGTEVIRHCGDLHRFMHWERPILTDSGGFQVFSLGALRKITEAGVHFQSPIDGSPVFLSPEVSMQVQRDLGADIVMIFDECTPYPATETQARASMELSLRWAARSRAAHGDNSAALFGIVQGGMHPQLRAESLAGLTQIGFDGYAIGGLSVGEPEAERLQVLDFLADKLPIDRPRYLMGVGTPEDLVAAVQRGIDMFDCVMPTRNARNGHLFTHQGTVKIRNAIHRSDNSPIDPLCDCETCRHYSRAYLHHLDKCKEILGARLATIHNLRYYQTLMRGLRDAIAAGQLAAFIQEFKRLRSQSANDHDA

SEQ ID NO: 53753 - protein, 367 aa, Chromatocurvus halotolerans
  REGION 1..367: note = tr|A0A4R2L061|A0A4R2L061_9GAMM Queuine tRNA-ribosyltransferase OS=Chromatocurvus halotolerans; OX = 1132028 GN=tgt PE=3 SV=1
MRFEHLCSDGSARRGRLTFPRGVVETPAFMPVGTYGTVKGMLPRDVVATGAQMILGNTFHLWLRPGTEIIAAHGDLHDFMQWQGPILTDSGGFQVFSLGKMRRITEEGVSFRSPVDGAKVFLDPKTSMSIQRALGSDVVMIFDECTPYPATESEARVSMELSLRWAARSRAAHGDSAAALFGIVQGGMYPALRAESLQGLVDIGFDGYAVGGLSVGEPKDDMLMVLDAMQDALPADKPRYLMGVGTPADLIEGARRGIDMFDCVMPTRNARNGHLFTSRGIVKIRNARHKTSTQPLDDSCGCYTCSHFTRAYLHHLERCNEILGAQLNTLHNLHYYQRHMQGIRAAIERGALDEFARAYHASQGGDA

SEQ ID NO: 53754 - protein, 367 aa, Chromatocurvus sp.
  REGION 1..367: note = tr|A0A2N5XYT2|A0A2N5XYT2_9GAMM Queuine tRNA-ribosyltransferase OS=Chromatocurvus sp. F02; OX = 1905677 GN=tgt PE=3 SV=1
MTFERTASDGAARRGRLQFPRGSVETPAFMPVGTYGTVKGMLPRDIRAIGAEIILGNTFHLWLRPGTDIIERHGDLHDFMGWDGPILTDSGGFQVFSLGAMRKITEQGVKFRSPVDGAPVFLDPETSMAIQRSLGSDIVMIFDECTPYPATEPEARASMELSLRWAARSKAAHGNSPSALFGIVQGGMYQGLREQSLAGLEAIGFDGYAIGGLSVGEPKDEMVAVLDGLQPLLPEHKPRYLMGVGTPADLLEGVRRGIDMFDCVMPTRNARNGFIFTSRGILKLRNARHKTSTLPLDERCDCYTCENFSRAYLHHLDKCNEILGSQLNTIHNLRFYQNHMAGIRMAIEQGRLEAFAADFHSAQAEGV

SEQ ID NO: 53755 - protein, 371 aa, unidentified
  source 1..371: note = Chromobacterium amazonense
  REGION 1..371: note = tr|A0A1S1X721|A0A1S1X721_9NEIS Queuine tRNA-ribosyltransferase OS=Chromobacterium amazonense; OX = 1382803 GN=tgt PE=3 SV=1
MLKFTVHKTSGGARRGTLELNHGTVETPVFQPVGTYGSVKAMSPVELNDIGAQIILGNTFHLWLRPGLEIVEQFGGLHEFIGWDKPILTDSGGFQVFSLSDMRKLTEEGCTFQSPINGDKLFLSPEISMKIQTVLNSDIVMQLDECTPGQVDHATAQKSLQMSLRWAERSRRAFNDLNNPNALFGIVQGNLYTDLRQESLEGLMQIGFDGIAIGGLSVGEPKPEMYRMLTELKDMLPADKPHYLMGVGTPEDLVHGVANGVDMFDCVMPTRNARNGWIFTQWGDVKIKNARYKDDKKPLDEECGCYACRNFSRAYLHHLHRVGEILGARLNTIHNLYYYQELMRQMRQAIEEDRFEDFRLEFAAKRARGVN

SEQ ID NO: 53756 - protein, 371 aa, Chromobacterium haemolyticum
  REGION 1..371: note = tr|A0A2T5NU15|A0A2T5NU15_9NEIS Queuine tRNA-ribosyltransferase OS=Chromobacterium haemolyticum; OX = 394935 GN=tgt PE=3 SV=1
MLKFTVHKTSGGARRGTLELNHGTVETPVFQPVGTYGSVKAMSPVELNDIGAQIILGNTFHLWLRPGLEIVEQFGGLHEFIGWDKPILTDSGGFQVFSLSDMRKLTEEGCTFQSPINGDKLFLSPEISMKIQTVLNSDIVMQLDECTPGQVDHATAQKSLQMSLRWAERSRRAFDDLKNPNALFGIVQGNLYTDLRQESLEGLMQVGFDGIAIGGLSVGEPKPEMYRMLTELKDMLPAEKPHYLMGVGTPEDLVHGVANGVDMFDCVMPTRNARNGWIFTQWGDVKIKNARYKDDKRPLDEECECYACRNFSRAYLHHLHRVGEILGARLNTIHNLHYYQELMRQMRRAIEEDRFEDFRLEFAAKRARGVN

SEQ ID NO: 53757 - protein, 371 aa, Chromobacterium haemolyticum
  REGION 1..371: note = tr|A0A1W0D4E6|A0A1W0D4E6_9NEIS Queuine tRNA-ribosyltransferase OS=Chromobacterium haemolyticum; OX = 394935 GN=tgt PE=3 SV=1
MLKFTVHKTSGGARRGTLELNHGTVETPVFQPVGTYGSVKAMSPVELNDIGAQIILGNTFHLWLRPGLEIVEQFGGLHEFIGWDKPILTDSGGFQVFSLSDMRKLTEEGCTFQSPINGDKLFLSPEISMKIQTVLNSDIVMQLDECTPGQVDHATAQKSLQMSLRWAERSRRTFDDLKNPNALFGIVQGNLYTDLRQESLEGLMQVGFDGIAIGGLSVGEPKPEMYRMLTELKDMLPAEKPHYLMGVGTPEDLVHGVANGVDMFDCVMPTRNARNGWIFTQWGDVKIKNARYKDDKRPLDEECECYACRNFSRAYLHHLHRVGEILGARLNTIHNLHYYQELMRQMRRAIEEDRFEDFRLEFAAKRARGVN

SEQ ID NO: 53758 - protein, 371 aa, Chromobacterium sp.
  REGION 1..371: note = tr|A0A2K4MNG4|A0A2K4MNG4_9NEIS Queuine tRNA-ribosyltransferase OS=Chromobacterium sp. MWU13-2610; OX = 2077146 GN=tgt PE=3 SV=1
MLKFTVHKTSGGARRGTLELNHGTVETPVFQPVGTYGSVKAMSPVELNDIGAQIILGNTFHLWLRPGLEIVEQFGGLHEFIGWDKPILTDSGGFQVFSLSDMRKLTEEGCTFQSPINGDKLFLSPEISMKIQTVLNSDIVMQLDECTPGQVDHATAQKSLQMSLRWAERSRRAFDDLKNPNALFGIVQGNLYTDLRRESLEGLMQIGFDGIAIGGLSVGEPKPEMYRMLTELKDMLPAEKPHYLMGVGTPEDLVHGVANGVDMFDCVMPTRNARNGWIFTQWGDVKIKNARYKDDKKPLDEECACYACRNFSRAYLHHLHRVGEILGARLNTIHNLYYYQELMRQMRQAIEEDRFEDFRLEFAAKRARGVN

SEQ ID NO: 53759 - protein, 371 aa, Chromobacterium sp.
  REGION 1..371: note = tr|A0A2S5DKT4|A0A2S5DKT4_9NEIS Queuine tRNA-ribosyltransferase OS=Chromobacterium sp. MWU14-2602; OX = 2073169 GN=tgt PE=3 SV=1
MLKFTVHKTSGGARRGTLELNHGTVETPVFQPVGTYGSVKAMSPVELNDIGAQIILGNTFHLWLRPGLEIVEQFGGLHEFIGWDKPILTDSGGFQVFSLSDMRKLTEEGCTFQSPINGDKLFLSPEISMKIQTVLNSDIVMQLDECTPGQVDHATAQKSLQMSLRWAERSRRAFDDLKNPNALFGIVQGNLYTDLRQESLEGLMQVGFDGIAIGGLSVGEPKPEMYRMLTELKDMLPAEKPHYLMGVGTPEDLVHGVANGVDMFDCVMPTRNARNGWIFTQWGDVKIKNARYKDDKKPLDEECACYACRNFSRAYLHHLHRVGEILGARLNTIHNLHYYQELMREMRKAIEDDRFEDFRLEFAAKRARGVN

SEQ ID NO: 53760 - protein, 371 aa, unidentified
  source 1..371: note = Chromobacterium sphagni
  REGION 1..371: note = tr|A0A1S1X479|A0A1S1X479_9NEIS Queuine tRNA-ribosyltransferase OS=Chromobacterium sphagni; OX = 1903179 GN=tgt PE=3 SV=1
MLKFTVHKTSGGARRGTLELNHGTVETPVFQPVGTYGSVKAMSPVELKDIGAEIILGNTFHLWLRPGLEIVEQFGGLHEFIGWDRPILTDSGGFQVFSLSDMRKLTEEGCTFQSPINGDKLFLSPEISMKIQTVLNSDIVMQLDECTPGQVDHATAQKSLQMSLRWAERSRRAFDDLNNPNALFGIVQGNLYTDLRQESLEGLMQVGFDGIAIGGLSVGEPKPEMYRMLTELKDMLPADKPHYLMGVGTPEDLVHGVANGVDMFDCVMPTRNARNGWIFTQWGDVKIKNARYKDDKKPLDEACECYTCKNFSRAYLHHLHRVGEILGARLNTIHNLFYYQELMRQVRKSIEDDRFEDFRLAFAANRARGVN

SEQ ID NO: 53761 - protein, 371 aa, unidentified
  source 1..371: note = Chromobacterium vaccinii
  REGION 1..371: note = tr|A0A2L2B9Z0|A0A2L2B9Z0_9NEIS Queuine tRNA-ribosyltransferase OS=Chromobacterium vaccinii; OX = 1108595 GN=tgt PE=3 SV=1
MLKFTVHKTSGGARRGTLELNHGTVETPVFQPVGTYGSVKAMSPVELNDIGAQIILGNTFHLWLRPGLEIVEQFGGLHEFIGWDKPILTDSGGFQVFSLSDMRKLTEEGCTFQSPINGDKLFLSPEISMKIQTVLNSDIVMQLDECTPGQVDHATAQKSLQMSLRWAERSRRAFDDLKNPNALFGIVQGNLYTDLRQESLEGLMQVGFDGIAIGGLSVGEPKPEMYRMLTELKDMLPADKPHYLMGVGTPEDLVHGVANGVDMFDCVMPTRNARNGWIFTQWGDVKIKNARYKDDKKPLDEECACYACRNFSRAYLHHLHRVGEILGARLNTIHNLHYYQELMREIRKAIEEDRFEDFRLEFAAKRARGVN

SEQ ID NO: 53762 - protein, 371 aa, unidentified
  source 1..371: note = Chromobacterium vaccinii
  REGION 1..371: note = tr|A0A1D9LL77|A0A1D9LL77_9NEIS Queuine tRNA-ribosyltransferase OS=Chromobacterium vaccinii; OX = 1108595 GN=tgt PE=3 SV=1
MLKFTVHKTSGGARRGTLELNHGTVETPVFQPVGTYGSVKAMSPVELNDIGAEIILGNTFHLWLRPGLEIVEQFGGLHEFIGWDKPILTDSGGFQVFSLSDMRKLTEEGCTFQSPINGDKLFLSPEISMKIQTVLNSDIVMQLDECTPGQVDHATAQKSLQMSLRWAERSRRAFDDLKNPNALFGIVQGNLYTDLRQESLEGLMQVGFDGIAIGGLSVGEPKPEMYRMLTELKDMLPAEKPHYLMGVGTPEDLVHGVANGVDMFDCVMPTRNARNGWIFTQWGDVKIKNARYKDDKKPLDEECACYACRNFSRAYLHHLHRVGEILGARLNTIHNLHYYQELMREIRKAIEEDRFEDFRLEFAAKRARGVN

SEQ ID NO: 53763 - protein, 371 aa, Chromobacterium violaceum
  REGION 1..371: note = sp|Q7NYC7|TGT_CHRVO Queuine tRNA-ribosyltransferase; OS = Chromobacterium violaceum (strain ATCC 12472 / DSM 30191 / JCM 1249 / NBRC 12614 / NCIMB 9131 / NCTC 9757); OX = 243365 GN=tgt PE=3 SV=1
MLKFTVHKTSGGARRGTLELNHGTVETPVFQPVGTYGSVKAMSPVELNDIGAQIILGNTFHLWLRPGLEIVEQFGGLHEFIGWDKPILTDSGGFQVFSLSDMRKLTEEGCTFQSPINGDKLFLSPEISMKIQTVLNSDIVMQLDECTPGQVDHATAQKSLQMSLRWAERSRRAFDDLKNPNALFGIVQGNLYTDLRQESLEGLMQVGFDGIAIGGLSVGEPKPEMYRMLTELKDMLPADKPHYLMGVGTPEDLVHGVANGVDMFDCVMPTRNARNGWIFTQWGDVKIKNARYKDDKKPLDEECACYACRNFSRAYLHHLHRVGEILGARLNTIHNLFYYQELMREMRKAIEEDRFEDFRLEFAAKRARSVN

SEQ ID NO: 53764 - protein, 371 aa, Chromobacterium violaceum; identical to SEQ ID NO: 53762
  REGION 1..371: note = tr|A0A381EPE4|A0A381EPE4_CHRVL Queuine tRNA-ribosyltransferase OS=Chromobacterium violaceum; OX = 536 GN=tgt PE=3 SV=1

SEQ ID NO: 53765 - protein, 378 aa, Chromohalobacter canadensis
  REGION 1..378: note = tr|A0A285VH57|A0A285VH57_9GAMM Queuine tRNA-ribosyltransferase OS=Chromohalobacter canadensis; OX = 141389 GN=tgt PE=3 SV=1
MRNESFMRFERLAEDGMARRGRLSFPRGTVETPAFMPVGTYGTVKGMTPQSVKNIGAEIILGNTFHLWLRPGTEVIETHGDLHDFAQWDKPILTDSGGFQVFSLGDMRKITEEGVHFRSPVDGAKVFMGPEESMAVQRSLGSDIVMIFDECTPYPATEEEARRSMEMSLRWAQRSRTAHGDSPSALFGIIQGGMYPELRERSLKGLLDIGFDGLAIGGLSVGEPKEEMLKVLDYLPGWMPDDKPRYLMGVGKPEDLVEGVRRGVDMFDCVMPTRNARNGHLFTADGTVKIRNAQHRHSTQALEADCDCHTCRHFTRSYLHHLDRCGEMLGAMLNTVHNLRYYQRVMAGLRTAIEAGTLTAFVEDFYARRGMPVPPLSA

SEQ ID NO: 53766 - protein, 372 aa, Chromohalobacter japonicus
  REGION 1..372: note = tr|A0A1Q8TGH2|A0A1Q8TGH2_9GAMM Queuine tRNA-ribosyltransferase OS=Chromohalobacter japonicus; OX = 223900 GN=tgt PE=3 SV=1
MRFERIAEDGMARRGRLSFPRGSVETPAFMPVGTYGTVKGMTPQSVKDIGAEIILGNTFHLWLRPGTEVIETHGDLHDFAQWDKPILTDSGGFQVFSLGDMRKITEEGVHFRSPVDGAKVFMGPEESMAVQRSLGSDIVMIFDECTPYPATEEEARRSMEMSLRWAQRSRTAHGDSPSALFGIIQGGMYPELRERSLKGLLDIDFDGLAIGGLSVGEPKEEMLKVLDYLPGWMPDDKPRYLMGVGKPEDLVEGVRRGVDMFDCVMPTRNARNGHLFTADGTVKIRNAQHRHSTQALEADCDCHTCRHFTRSYLHHLDRCGEMLGAMLNTVHNLRYYQRVMAGLRTAIEAGTLTAFVEDFYARRGMPVPPLSA

SEQ ID NO: 53767 - protein, 378 aa, Chromohalobacter marismortui
  REGION 1..378: note = tr|A0A4R7NFY0|A0A4R7NFY0_9GAMM Queuine tRNA-ribosyltransferase OS=Chromohalobacter marismortui; OX = 42055 GN=tgt PE=3 SV=1
MRNDSFMRFERLAEDGMARRGRLSFPRGTVETPAFMPVGTYGTVKGMTPESVEQIGADIILGNTFHLWLRPGTEVIETHGDLHDFAQWQKPILTDSGGFQVFSLGDMRKITEEGVHFRSPVDGAKVFMGPEESMAVQRSLGSDIVMIFDECTPYPATEEEAKRSMEMSLRWAQRSRIAHGDSPSALFGIIQGGMHPALRERSLKGLLDIGFDGLAIGGLSVGEPKDEMLKVLDYLPGWMPDDKPRYLMGVGKPEDLVEGVRRGVDMFDCVMPTRNARNGHLFIAAGTVKIRNAQHRHSTQALEAGCDCHTCRHFTRSYLHHLDRCGEMLGAMLNTIHNLRYYQRVMAGLRTAIEAGTLTAFVEDFYARRGMPVPPLSA

SEQ ID NO: 53768 - protein, 372 aa, Chromohalobacter salexigens
  REGION 1..372: note = sp|Q1QTM9|TGT_CHRSD Queuine tRNA-ribosyltransferase; OS = Chromohalobacter salexigens (strain DSM 3043 / ATCC BAA-138 / NCIMB 13768) OX=290398 GN=tgt PE=3 SV=1
MRFERLAQDGQARRGRLSFPRGTVETPAFMPVGTYGTVKGMTPQSVKDIGAEIILGNTFHLWLRPGTEVIETHGDLHDFAQWDKPILTDSGGFQVFSLGDMRKITEEGVHFRSPVDGAKVFMGPEESMAVQRSLGSDIVMIFDECTPYPATEAEAKRSMEMSLRWAERSRIAHGDSPSALFGIIQGGMYPELRERSLKGLLDIGFDGLAIGGLSVGEPKEEMLKVLDYLPGWMPDDKPRYLMGVGKPEDLVEGVRRGVDMFDCVMPTRNARNGYLFTAEGTVKIRNAQHRYSTQALEADCDCHTCQHFSRSYLHHLDRCGEMLGAMLNTIHNLRYYQRVMAGLRTAIEAGTLTAFVEDFYARRGMPVPPLAA

SEQ ID NO: 53769 - protein, 372 aa, Chromohalobacter salexigens
  REGION 1..372: note = tr|A0A4Q0HKU1|A0A4Q0HKU1_CHRSL Queuine tRNA-ribosyltransferase OS=Chromohalobacter salexigens; OX = 158080 GN=tgt PE=3 SV=1
MRFERLAQDGQARRGRLSFPRGTVETPAFMPVGTYGTVKGMTPQSVKDIGAEIILGNTFHLWLRPGTEVIETHGDLHDFAQWDKPILTDSGGFQVFSLGDMRKITEEGVHFRSPVDGAKVFMGPEDSMAVQRSLGSDIVMIFDECTPYPATEAEAKRSMEMSLRWAERSRIAHGDSPSALFGIIQGGMYPELRERSLKGLLDIGFDGLAIGGLSVGEPKEEMLKVLGYLPGWMPDDKPRYLMGVGKPEDLVEGVRRGVDMFDCVMPTRNARNGHLFTAEGTVKIRNAQHRHSTQALEADCDCHTCQHFSRGYLHHLDRCGEMLGAMLNTIHNLRYYQRVMAGLRTAIEAGTLTAFVEDFYARRGMPVPPLAA

SEQ ID NO: 53770 - protein, 372 aa, unidentified
  source 1..372: note = Chroococcales cyanobacterium
  REGION 1..372: note = tr|A0A2G7GQR0|A0A2G7GQR0_9CHRO Queuine tRNA-ribosyltransferase OS=Chroococcales cyanobacterium IPPAS B-1203 OX=2049454 GN=tgt PE=3 SV=1
MSEKFLFQVLAECSQTEARAGLFLTPHGIVETPRFMPVGTLANVKTITTAQLGETGAQMVLANTYHLHLQPGEEIVAKAGGLHSFMQWHGPMLTDSGGFQVFSLSELRQVTDEGVTFRSPRDGQVIHITPEKSIQIQNTLGADVIMAFDECPPYPASRTAVEAATNRTYQWLERCIATHQRQDQALFGIVQGGIHLDLRAQAAQALAKLNLPGYAIGGVSVGEPPELIHQIVKATAPFLPREKPRYLMGVGTYREMAQAVAAGVDLFDCVIPTRLARHGAALVQQGNRWNLKNAQFREDFTPLDETCPCYTCQNFTRAYLCHLVRSREILAYTLLSIHNITELVRFTQRMREAILSDSFTTEFAPWLTQAED

SEQ ID NO: 53771 - protein, 367 aa, unidentified
  source 1..367: note = Chroococcidiopsis cubana
  REGION 1..367: note = tr|A0A433V3M0|A0A433V3M0_9CYAN Queuine tRNA-ribosyltransferase OS=Chroococcidiopsis cubana SAG 39.79 OX=388085 GN=tgt PE=3 SV=1
MTTQFSFQVSTRCSQTKARAGVFHTPHGAVETPRFMPVGTLANVKTVTPTQLQETGAQMVLANTYHLHLQPGERIVEKAGGLHQFMRWNQPILTDSGGFQVFSLSEMRQITDDGVIFRSPHDGQMINLTPERSIQIQNALGADVIMAFDECPPYPASREEVEAATQRTYRWLERCISAHQRPDQALFGIVQGGVYPDLRAAAAEALAGLDLPGYAIGGVSVGEPPELIAKIVQATTPMLPVDKPRYLMGVGTYKEMAQAIASGMDLFDCVIPTRLARHGAALVKGERWNLKNSQYREDFQPLDETCPCYTCQNFTRAYISHLVRSQEILAYTLLTIHNITELVRFTQKIREAIIGDRFTTEFAQWLS

SEQ ID NO: 53772 - protein, 367 aa, unidentified
  source 1..367: note = Chroococcidiopsis sp.
  REGION 1..367: note = tr|A0A2P8QL75|A0A2P8QL75_9CYAN Queuine tRNA-ribosyltransferase OS=Chroococcidiopsis sp. CCALA 051; OX = 869949 GN=tgt PE=3 SV=1
MTTQFSFQVSTRCSQTKARAGVFYTPHGAVETPRFMPVGTLANVKTVTPTQLQETGAQMVLANTYHLHLQPGERIVEKAGGLHQFMRWNQPILTDSGGFQVFSLSEMRQITDDGVIFRSPHDGQMINLTPERSIQIQNALGADVIMAFDECPPYPASREEVEAATQRTYRWLERCISAHQRPDQALFGIVQGGVYPDLRAAAAEALAGLDLPGYAIGGVSVGEPPELIAKIVQATTPMLPVDKPRYLMGVGTYKEMAQAIASGMDLFDCVIPTRLARHGAALVKGERWNLKNSQYREDFQPLDETCPCYTCQNFTRAYISHLVRSQEILAYTLLTIHNITELVRFTQKIREAIIGDRFTTEFAQWLS

SEQ ID NO: 53773 - protein, 378 aa, unidentified
  source 1..378: note = Chroococcidiopsis sp.
  REGION 1..378: note = tr|A0A2S6VE06|A0A2S6VE06_9CYAN Queuine tRNA-ribosyltransferase OS=Chroococcidiopsis sp. TS-821; OX = 1378066 GN=tgt PE=3 SV=1
MSEKFSFQVLAECSQTKARAGFFLTPHGCVATPRFMPVGTLANVKTMTTAQLGETGAQMVLANTYHLHLQPGEAIVAKAGGLHSFMQWHGPMLTDSGGFQVFSLSELRQVTDDGVTFRSPRDGQVINITPEKSIQIQNALGADVIMAFDECPPYPASREVVIDATNRTYRWLERCIAAHQRQDQALFGIVQGGVHLDLRAQAALEIAKLNLPGYAIGGVSVGEPPELIHQIVAATAPLLPREKPRYLMGVGTYREMAKAVAAGVDLFDCVIPTRLARHGAALVQQGDRWNLKNAQFREDFTPLDETCPCYTCQNFTRAYLCHLVRSREILAYTLLSIHNITELIRFTQRMREAILNDSFATEFAPWLTSSVTTDSSNV

SEQ ID NO: 53774 - protein, 415 aa, unidentified
  source 1..415: note = Chroococcidiopsis thermalis
  REGION 1..415: note = tr|K9U485|K9U485_CHRTP Queuine tRNA-ribosyltransferase OS=Chroococcidiopsis thermalis (strain PCC 7203) OX=251229 GN=tgt PE=3 SV=1
MGKKYFHAPRRGFISEDASPTGARGSRGFLDIGAASRFTTHHSLLITELTTQFSFQVSTRCSQTKARVGVFYTPHGAVETPRFMPVGTLANVKTVTPTQLQETGAQMVLANTYHLHLQPGERIVEKAGGLHQFMRWNQPILTDSGGFQVFSLSEMRQITDDGVIFRSPHDGQMINLTPERSIQIQNALGADVIMAFDECPPYPASREEVEAATQRTYRWLERCISAHQRPDQALFGIVQGGVYPDLRAAAAEALAGLDLPGYAIGGVSVGEPPELIAKIVQATTPMLPVDKPRYLMGVGTYKEMAQAIASGMDLFDCVIPTRLARHGAALVKGERWNLKNSQYREDFQPLDETCPCYTCQNFTRAYISHLVRSQEILAYTLLTIHNITELVRFTQKIREAIISDRFTTEFAQWLS

SEQ ID NO: 53775 - protein, 378 aa, unidentified
  source 1..378: note = Chroogloeocystis siderophila
  REGION 1..378: note = tr|A0A1U7HW67|A0A1U7HW67_9CHRO Queuine tRNA-ribosyltransferase OS=Chroogloeocystis siderophila 5.2 s.c.1 OX=247279 GN=tgt PE=3 SV=1
MSEKFSFQVLAECSQTKARAGFFITPHGRVATPRFMPVGTLANVKTITTAQLGETGAQMVLANTYHLHLQPGEAIVAKAGGLHSFMQWHGPMLTDSGGFQVFSLSELRQVTDDGVTFRSPRDGQVINITPEKSIQIQNTLGADVIMAFDECPPYPASREVVEDATNRTYRWLERCIATHQRQDQALFGIVQGGVHLDLRAQAALEVAKLNLPGYAIGGVSVGEPPELIHQIVEATVPLLPREKPRYLMGVGTYREMAKAVAAGVDLFDCVIPTRLARHGAALVQQGDRWNLKNTRFREDFTPLDETCPCYTCQNFTRAYLCHLVRSREILAYTLLSIHNITELIRFTQRMREAILSDTFATEFAPWLTQSAPTDSSNS

SEQ ID NO: 53776 - protein, 376 aa, unidentified
  source 1..376: note = Chryseobacterium angstadtii
  REGION 1..376: note = tr|A0A0J7IJQ0|A0A0J7IJQ0_9FLAO Queuine tRNA-ribosyltransferase OS=Chryseobacterium angstadtii; OX = 558151 GN=tgt PE=3 SV=1
MKFFNIEKTSEGKARAGEITTDHGKIQTPIFMPVGTVASVKTVHQRELKEDIKAQIILGNTYHLYLRPTMDIMEQAGGLHKFMNWDLPILTDSGGFQVFSLSKSRKMSEEGVKFKSHIDGSYHLFTPEKSMEIQRQIGADIFMAFDECTPYPCEYNQAKTSMELTHRWLKRCIDWTEENKEIYGHKQRLFPIVQGSTYSDLRKISAEVIAEAGAEGNAIGGLSVGEPEEEMYRITDEVTDILPKEKPRYLMGVGTPWNILESIGLGIDMMDCVMPTRNARNAMLFTWQGVMNLKNEKWKNDFSPLDEFGTSFVDKEYSKAYLRHLFVSKEYLAKQIASVHNLAFYLDLVKVAREHIVAGDFYEWKKSVVPVLRQRL

SEQ ID NO: 53777 - protein, 378 aa, Chryseobacterium antarcticum
  REGION 1..378: note = tr|A0A448NSK2|A0A448NSK2_9FLAO Queuine tRNA-ribosyltransferase OS=Chryseobacterium antarcticum; OX = 266748 GN=tgt PE=3 SV=1
MKSNFFEINQTTTGKARAGTITTDHGTIQTPIFMPVGTVASVKTVHQRELKDDIKAQIILGNTYHLNLRPKMEIMQAAGGLHKFMNWDLPILTDSGGYQVFSLSKSRKLNEAGVKFKSHIDGSTHFISPEISMEIQRQIGADIFMAFDECTPYPCEYNLAKKSMEMTHRWLKRCIKWTEENPEMYGYQQKLFPIVQGSTYSDLRKKSAEFISEQNAAGNAIGGLSVGEPEDEMYRITDEVTDILPKDKPRYLMGVGTPWNILETIGLGIDMMDCVMPTRNARNAMLFTWQGVMNMKNKKWESDFSPLDEFGTSYVDSDYSKAYVRHLFVAKEYLGKQIASVHNLAFYLDLVRVARQHILAGDFYEWKESIVPTLKQRL

SEQ ID NO: 53778 - protein, 377 aa, Chryseobacterium aquaticum
  REGION 1..377: note = tr|A0A0Q3KBR5|A0A0Q3KBR5_9FLAO Queuine tRNA-ribosyltransferase OS=Chryseobacterium aquaticum; OX = 452084 GN=tgt PE=3 SV=1
MQQFFKIEKTSQGKARAGELMTDHGVVKTPIFMPVGTVASVKTVHQRELKEDIKAQIILGNTYHLYLRPGMEVMQEAGGLHKFMNWELPILTDSGGFQVFSLSGTRKMSEEGVKFKSHIDGSVHLFTPEKSMEIQRQIGADIFMAFDECVAYPSEYNQVKKSMEMTHRWLKRCIDWNEKNPELYGHKQRFFPIVQGSTFSDLRKISAEVISEAGAEGNAIGGLSVGEPEDELYRITDEVTDILPKEKPRYLMGVGTPWNILESIGLGIDMMDCVMPTRNARNAMLFTWQGVMNLKNEKWKKDFSPLDEFGTSFVDQEYSKAYVRHLFVSKEYLAKQIASIHNLAFYLDLVKVAREHIVAGDFYEWKNSVVPVLRQRL

SEQ ID NO: 53779 - protein, 376 aa, Chryseobacterium aquifrigidense
  REGION 1..376: note = tr|A0A543EC40|A0A543EC40_9FLAO Queuine tRNA-ribosyltransferase OS=Chryseobacterium aquifrigidense; OX = 558021 GN=tgt PE=3 SV=1
MKFFNIEKTSEGKARAGEITTDHGKIQTPIFMPVGTVASVKTVHQRELKEDIKAQIILGNTYHLYLRPGMETMQDAGGLHKFMNWDLPILTDSGGFQVFSLASNRKMTEEGARFKSHIDGSYHMFSPERSMEIQRQIGADIFMAFDECTPYPCDYNQAKSSMELTHRWLKRCIDWTSDNPELYGHKQRLFPIVQGSTYSDLRKISAEVISEAGAEGNAIGGLSVGEPEEEMYRITDEVTDILPKEKPRYLMGVGTPWNILESIGLGIDMMDCVMPTRNARNAMLFTWQGVMNLKNEKWKRDFSPLDEFGTSFVDREYSKAYLRHLFVSKEYLAKQIASIHNLAFYLDLVKVAREHIMAGDFYEWKNSVVPVLRQRL

SEQ ID NO: 53780 - protein, 376 aa, unidentified
  source 1..376: note = Chryseobacterium arachidiradicis
  REGION 1..376: note = tr|A0A420DD90|A0A420DD90_9FLAO Queuine tRNA-ribosyltransferase OS=Chryseobacterium arachidiradicis OX=1617282 GN=tgt PE=3 SV=1
MKFFEIEKTSESKARAGVITTDHGQIQTPIFMPVGTVASVKTVHQRELKEDIKAQIILGNTYHLMLRPAMDIMEQAGGLHRFMNWDRPILTDSGGYQVFSLAKSRKITEEGVKFKSHIDGSLRFMSPEISMQIQRQIGADIFMAFDECIAYPSDYNAVKTSMELTHRWLKRCIDWTNENKELYGHKQRLFPIVQGSCFSDLRKISAEVISEAGAEGNAIGGLSVGEPEEEMYRITNEVTDILPKEKPRYLMGVGTPWNILESIGFGIDMMDCVMPTRNARNAMLFTWQGVMNMKNEKWKTDFSPLDEFGTSFVDQEYSKAYVRHLFVAKEYLAKQIASIHNLAFYLDLVKVAREHIVAGDFYQWKDQIIPQLKTRL

SEQ ID NO: 53781 - protein, 377 aa, unidentified
  source 1..377: note = Chryseobacterium arachidis
  REGION 1..377: note = tr|A0A1M4XQY8|A0A1M4XQY8_9FLAO Queuine tRNA-ribosyltransferase OS=Chryseobacterium arachidis; OX = 1416778 GN=tgt PE=3 SV=1
MQKFFNIEKTTGGKARAGELTTDHGKIQTPIFMPVGTVASVKTVHQRELKEDIKAQIILGNTYHLYLRPGMETMQAAGGLHKFMNWDLPILTDSGGFQVFSLASSRKMSEEGARFKSHIDGSYHMFSPEKSMEIQRQIGADIFMAFDECVAYPCEYNQAKTSMELTHRWLKRCIEWTENNPELYGYKQRLFPIVQGSTFSDLRKISAEVIAEAGAEGNAIGGLSVGEPEEEMYRITDEVTDILPKEKPRYLMGVGTPWNILESIGLGIDMMDCVMPTRNARNAMLFTWKGVMNMKNEKWKKDFSPLDEFGTSFVDREYSKAYLRHLFVSKEYLAKQIASIHNLAFYLDLVKAAREHILAGDFYEWKNSVVPVLRQRL

SEQ ID NO: 53782 - protein, 376 aa, Chryseobacterium arthrosphaerae
  REGION 1..376: note = tr|A0A1B8ZIX1|A0A1B8ZIX1_9FLAO Queuine tRNA-ribosyltransferase OS=Chryseobacterium arthrosphaerae; OX = 651561 GN=tgt PE=3 SV=1
MKFFNIEKTSEGKARAGEITTDHGKIQTPIFMPVGTVASVKTVHQRELKEDIKAQIILGNTYHLYLRPGMETMQDAGGLHKFMNWDLPILTDSGGFQVFSLASNRKMTEEGARFKSHIDGSYHMFSPERSMEIQRQIGADIFMAFDECTPYPCDYNQAKSSMELTHRWLKRCIDWTNDNPELYGHKQRLFPIVQGSTYSDLRKISAEVISEAGAEGNAIGGLSVGEPEEEMYRITDEVTDILPKEKPRYLMGVGTPWNILESIGLGIDMMDCVMPTRNARNAMLFTWQGVMNLKNEKWKRDFSPLDEFGTSFVDREYSKAYLRHLFVSKEYLAKQIASIHNLAFYLDLVKVAREHILAGDFYEWKNSVVPVLRQRL

SEQ ID NO: 53783 - protein, 376 aa, unidentified
  source 1..376: note = Chryseobacterium artocarpi
  REGION 1..376: note = tr|A0A1B8ZDB0|A0A1B8ZDB0_9FLAO Queuine tRNA-ribosyltransferase OS=Chryseobacterium artocarpi; OX = 1414727 GN=tgt PE=3 SV=1
MKFFNIEKTSEGKARAGEITTDHGKIQTPIFMPVGTVASVKTVHQRELKEDIKAQIILGNTYHLYLRPGMETMQDAGGLHKFMNWDLPILTDSGGFQVFSLASNRKMTEEGARFKSHIDGSYHMFSPERSMEIQRQIGADIFMAFDECTPYPCDYNQAKSSMELTHRWLKRCIEWTNDNPELYGHKQRLFPIVQGSTYSDLRKISAEVISEAGAEGNAIGGLSVGEPEEEMYRITDEVTDILPKEKPRYLMGVGTPWNILESIGLGIDMMDCVMPTRNARNAMLFTWQGVMNLRNEKWKRDFSPLDEFGTSFVDKEYSKAYLRHLFVSKEYLAKQIASIHNLAFYLDLVKVAREHILAGDFYEWKNSVVPILRQRL

SEQ ID NO: 53784 - protein, 376 aa, Chryseobacterium balustinum
  REGION 1..376: note = tr|A0A3G6TPI2|A0A3G6TPI2_9FLAO Queuine tRNA-ribosyltransferase OS=Chryseobacterium balustinum; OX = 246 GN=tgt PE=3 SV=1
MNFFNIEKTSESKARAGVLTTDHGTVQTPIFMPVGTVASVKTVHQREIKDDIKAQIILGNTYHLYLRPGMEVMEAAGGLHKFMNWDLPILTDSGGFQVFSLSGSRKMSEEGVKFKSHIDGSYHLFTPEKSMEIQRQIGADIFMAFDECVAYPAHYNQVKKSMEMTHRWLKRCIDWNAENPELYGYKQRFFPIVQGSTYSDLRKISAEVISEAGAEGNAIGGLSVGEPEDELYRITNEVTDILPKDKPRYLMGVGTPWNILESIGLGIDMMDCVMPTRNARNGMLFTWQGVINMKNEKWKKDFSPLDEFGTSFVDQEYSKAYVRHLFVSKEYLAKQIASIHNLAFYLDLVKVAREHILAGDFYQWKDSVIPVLRQRL

SEQ ID NO: 53785 - protein, 376 aa, unidentified
  source 1..376: note = Chryseobacterium bernardetii
  REGION 1..376: note = tr|A0A3G6T4R2|A0A3G6T4R2_9FLAO Queuine tRNA-ribosyltransferase OS=Chryseobacterium bernardetii; OX = 1241978 GN=tgt PE=3 SV=1
MKFFNIEKTSEGKARAGEITTDHGKIQTPIFMPVGTVASVKTVHQRELKEDIKAQIILGNTYHLYLRPGMETMQDAGGLHKFMNWDLPILTDSGGFQVFSLASNRKMTEEGARFKSHIDGSYHMFSPERSMEIQRQIGADIFMAFDECTPYPCDYNQAKSSMELTHRWLKRCIEWTNNNPELYGHKQRLFPIVQGSTYSDLRKISAEVISEAGAEGNAIGGLSVGEPEEEMYRITDEVTDILPKEKPRYLMGVGTPWNILESIGLGIDMMDCVMPTRNARNAMLFTWQGVMNLKNEKWKRDFSPLDEFGTSFVDREYSKAYLRHLFVSKEYLAKQIASIHNLAFYLDLVKVAREHIIAGDFYEWKNSVVPVLRQRL

SEQ ID NO: 53786 - protein, 376 aa, Chryseobacterium bovis
  REGION 1..376: note = tr|A0A1U7PPG2|A0A1U7PPG2_9FLAO Queuine tRNA-ribosyltransferase OS=Chryseobacterium bovis DSM 19482 OX=1121284 GN=tgt PE=3 SV=1
MNFFQIEKTTESKARAGVITTDHGQIQTPIFMPVGTVASVKTVHQRELRDDIKAQIILGNTYHLMLRPTMDIMQQAGGLHQFMNWDRPILTDSGGYQVFSLAKSRKITEEGVKFKSHIDGSLRFMSPEVSMQIQRQIGADIFMAFDECIAYPSDYNAVKTSMELTHRWLKRCISWTEENKELYGHKQRLFPIVQGSCFSDLRKISAEVISEAGAEGNAIGGLSVGEPEEEMYRITNEVTDILPKEKPRYLMGVGTPWNILESIGLGVDMMDCVMPTRNARNAMLFTWQGIMNMKNEKWKSDFSPLDEFGTSFVDQEYSKAYVRHLFVAKEYLAKQIASIHNLAFYLDLVKVAREHIIAGDFYQWKDQVVPQLKKRL

SEQ ID NO: 53787 - protein, 376 aa, unidentified
  source 1..376: note = Chryseobacterium carnipullorum
  REGION 1..376: note = tr|A0A1M7CJT4|A0A1M7CJT4_9FLAO Queuine tRNA-ribosyltransferase OS=Chryseobacterium carnipullorum; OX = 1124835 GN=tgt PE=3 SV=1
MKFFNIEKTSEGKARAGEITTDHGKIQTPIFMPVGTVASVKTVHQRELKEDIKAQIILGNTYHLYLRPTMDIMQKAGGLHQFMNWDLPILTDSGGFQVFSLSKSRKMSEEGVKFKSHIDGSYHMFTPEKSMEIQRQIGADIFMAFDECTPYPCEYNQAKTSMELTHRWLKRCIDWTEENKEIYGHKQRLFPIVQGSTYSDLRKISAEVIAEAGAEGNAIGGLSVGEPEEEMYRITDEVTDILPKDKPRYLMGVGTPWNILESIGLGIDMMDCVMPTRNARNAMLFTWQGVMNMKNEKWKSDFSPLDEFGTSFVDREYSKAYLRHLFVSKEYLAKQIASVHNLAFYLDLVKVAREHIVAGDFYEWKKTVVPVLRQRL

SEQ ID NO: 53788 - protein, 378 aa, unidentified
  source 1..378: note = Chryseobacterium carnis
  REGION 1..378: note = tr|A0A3G8XYS8|A0A3G8XYS8_9FLAO Queuine tRNA-ribosyltransferase OS=Chryseobacterium carnis; OX = 1241979 GN=tgt PE=3 SV=1
MKSPFFEINKTTTGKARAGKITTDHGTIETPIFMPVGTVASVKTVHQRELKDDIKAQIILGNTYHLNLRPKMDIMQAAGGLHKFMNWDLPILTDSGGYQVFSLSKSRKLNEEGVKFKSHIDGSTHFISPEISMEIQRQIGADIFMAFDECTPYPCEYNLAKKSMEMTHRWLKRCIKWTDENSEIYGHQQRLFPIVQGSTYSDLRKKSAEFISEQNAAGNAIGGLSVGEPEDEMYRITDEVTDILPKDKPRYLMGVGTPWNILETIGLGIDMMDCVMPTRNARNAMLFTWQGVMNMKNKKWESDFSPLDEFGTSYVDSEYSKAYVRHLFVSKEYLGKQIASIHNLAFYLDLVRVARQHILAGDFYEWKDSVVPALKQRL

SEQ ID NO: 53789 - protein, 377 aa, Chryseobacterium chaponense
  REGION 1..377: note = tr|A0A1N7LDS7|A0A1N7LDS7_9FLAO Queuine tRNA-ribosyltransferase OS=Chryseobacterium chaponense; OX = 713588 GN=tgt PE=3 SV=1
MSTFFEINKTSTGKARAGTITTDHGTIQTPIFMPVGTVASVKTVHQRELKDDIKAQIILGNTYHLNLRPKMDIMQSAGGLHKFMNWDLPILTDSGGYQVFSLSKSRKLNEAGVKFKSHIDGSTQFISPEISMEIQRQIGADIFMAFDECVAYPAEYKQVKKSMDLTHRWLKRCIKWNAENPELYGHKQAFFPIVQGSCYSDLRKKSAEFISEQNAVGNAIGGLSVGEPEEEMYRITDEVTDILPIDKPRYLMGVGTPWNIIETIGLGIDMMDCVMPTRNARNAMLFTWKGVMNMKNKKWESDFSPLDEFGTSYVDAEYSKAYVRHLFVAKEYLAKQIASIHNLAFYLDLVKVAREHIVAGDFYEWKDSIIPVLKQRL

SEQ ID NO: 53790 - protein, 376 aa, unidentified; identical to SEQ ID NO: 53785
  source 1..376: note = Chryseobacterium contaminans
  REGION 1..376: note = tr|A0A1M6W121|A0A1M6W121_9FLAO Queuine tRNA-ribosyltransferase OS=Chryseobacterium contaminans; OX = 1423959 GN=tgt PE=3 SV=1

SEQ ID NO: 53791 - protein, 376 aa, Chryseobacterium culicis
  REGION 1..376: note = tr|A0A2S9CSI2|A0A2S9CSI2_9FLAO Queuine tRNA-ribosyltransferase OS=Chryseobacterium culicis; OX = 680127 GN=tgt PE=3 SV=1
MKFFNIEKTSEGKARAGEITTDHGKIQTPIFMPVGTVASVKTVHQRELKEDIKAQIILGNTYHLYLRPGMETMQDAGGLHKFMNWDLPILTDSGGFQVFSLASNRKMTEEGARFKSHIDGSYHMFSPERSMEIQRQIGADIFMAFDECTPYPCDYNQAKSSMELTHRWLKRCIEWTNDNPELYGYKQRLFPIVQGSTYSDLRKISAEVISEAGAEGNAIGGLSVGEPEEEMYRITDEVTDILPKEKPRYLMGVGTPWNILESIGLGIDMMDCVMPTRNARNAMLFTWQGVMNLKNEKWKRDFSPLDEFGTSFVDREYSKAYLRHLFVSKEYLAKQIASIHNLAFYLDLVKVAREHIIAGDFYEWKNSVVPILRQRL

SEQ ID NO: 53792 - protein, 376 aa, Chryseobacterium culicis
  REGION 1..376: note = tr|A0A1H6HLT1|A0A1H6HLT1_9FLAO Queuine tRNA-ribosyltransferase OS=Chryseobacterium culicis; OX = 680127 GN=tgt PE=3 SV=1
MKFFNIEKTSEGKARAGEITTDHGKIQTPIFMPVGTVASVKTVHQRELKEDIKAQIILGNTYHLYLRPGMETMQDAGGLHQFMNWDLPILTDSGGFQVFSLASNRKMTEEGARFKSHIDGSYHMFSPERSMEIQRQIGADIFMAFDECTPYPCDYNQAKSSMELTHRWLKRCIDWTNDNPELYGHKQRLFPIVQGSTYSDLRRISAEVISEAGAEGNAIGGLSVGEPEEEMYRITDEVTDILPKEKPRYLMGVGTPWNILESIGLGIDMMDCVMPTRNARNAMLFTWQGVMNLKNEKWKRDFSPLDEFGTSFVDREYSKAYLRHLFVSKEYLAKQIASIHNLAFYLDLVKVAREHIMAGDFYEWKNAVVPVLRQRL

SEQ ID NO: 53793 - protein, 377 aa, Chryseobacterium daecheongense
  REGION 1..377: note = tr|A0A3N0VTN6|A0A3N0VTN6_9FLAO Queuine tRNA-ribosyltransferase OS=Chryseobacterium daecheongense; OX = 192389 GN=tgt PE=3 SV=1
MQKFFNIEKTSEGKARAGEITTDHGTIQTPIFMPVGTVASVKTVHQRELKEDIKAQIILGNTYHLYLRPTMDIMQEAGGLHQFMNWDLPILTDSGGFQVFSLASSRKMTEEGVKFKSHIDGSYHFISPEKSMEIQRQIGADIFMAFDECTPYPCEYNQAKSSMELTHRWLKRCIDWTEENKELYGHKQRLFPIVQGSTYSDLRKISAEVISEAGAEGNAIGGLSVGEPEEEMYRITDEVTDILPKEKPRYLMGVGTPWNILESIGLGIDMMDCVMPTRNARNAMLFTWKGVMNLKNEKWKRDFSPLDEFGTSYVDQEYSKAYLRHLFVSKEYLAKQIASIHNLAFYLDLVKVAREHIMAGDFYEWKKSVVPVLRQRL

SEQ ID NO: 53794 - protein, 376 aa, Chryseobacterium defluvii
  REGION 1..376: note = tr|A0A495SB41|A0A495SB41_9FLAO Queuine tRNA-ribosyltransferase OS=Chryseobacterium defluvii; OX = 160396 GN=tgt PE=3 SV=1
MKFFNIEKTSEGKARAGEITTDHGTIQTPIFMPVGTVASVKTVHQRELKEDIKAQIILGNTYHLYLRPTMDIMQEAGGLHKFMNWDLPILTDSGGFQVFSLASSRKMTEEGVKFKSHIDGSYHFISPEKSMEIQRQIGADIFMAFDECTPYPCEYNQAKSSMELTHRWLKRCIEWTEENKELYGHKQRLFPIVQGSTYSDLRKISAEVISEAGAEGNAIGGLSVGEPEEEMYRITDEVTDILPKEKPRYLMGVGTPWNILESIGLGIDMMDCVMPTRNARNAMLFTWKGVMNLKNEKWKRDFSPLDEFGTSFVDQEYSKAYLRHLFVSKEYLAKQIASIHNLAFYLDLVKVAREHIIAGDFYEWKKSVVPVLRQRL

SEQ ID NO: 53795 - protein, 376 aa, Chryseobacterium elymi
  REGION 1..376: note = tr|A0A3D9DQL3|A0A3D9DQL3_9FLAO Queuine tRNA-ribosyltransferase OS=Chryseobacterium elymi; OX = 395936 GN=tgt PE=3 SV=1
MKFFNIEKTSEGKARAGEITTDHGKIQTPIFMPVGTVASVKTVHQRELKEDIKAQIILGNTYHLYLRPTMDIMQEAGGLHKFMNWDLPILTDSGGFQVFSLSKSRKMSEEGVKFKSHIDGSYHMFTPEKSMEIQRQIGADIFMAFDECTPYPCEYNQAKTSMELTHRWLKRCIEWTEQNKEIYGYKQRLFPIVQGSTYSDLRKMSAEVISEAGAEGNAIGGLSVGEPEEEMYRITDEVTDILPKDKPRYLMGVGTPWNILESIGLGIDMMDCVMPTRNARNAMLFTWQGVMNLKNEKWKRDFSALDEFGTSYVDREYSKAYLRHLFVSKEYLAKQIASVHNLAFYLDLVKVAREHIVAGDFYEWKKSVVPVLRQRL

SEQ ID NO: 53796 - protein, 376 aa, Chryseobacterium flavum
  REGION 1..376: note = tr|A0A3D9CT37|A0A3D9CT37_9FLAO Queuine tRNA-ribosyltransferase OS=Chryseobacterium flavum; OX = 415851 GN=tgt PE=3 SV=1
MKFFNIEKTSEGKARAGEITTDHGKIQTPIFMPVGTVASVKTVHQRELKEDIKAQIILGNTYHLYLRPGMKTMQDAGGLHKFMNWDLPILTDSGGFQVFSLASNRKMTEEGARFKSHIDGSYHMFSPERSMEIQRQIGADIFMAFDECTPYPCDYNQAKSSMELTHRWLKRCIEWTENNPELYGHKQRLFPIVQGSTYSDLRKISAEVISEAGAEGNAIGGLSVGEPEEEMYRITDEVTDILPKEKPRYLMGVGTPWNILESIGLGIDMMDCVMPTRNARNAMLFTWQGVMNLKNEKWKRDFSPLDEFGTSFVDKEYSKAYLRHLFVSKEYLAKQIASIHNLAFYLDLVKVAREHIIAGDFYEWKNSVVPALRQRL

SEQ ID NO: 53797 - protein, 376 aa, Chryseobacterium formosense
  REGION 1..376: note = tr|A0A085Z2F2|A0A085Z2F2_9FLAO Queuine tRNA-ribosyltransferase OS=Chryseobacterium formosense; OX = 236814 GN=tgt PE=3 SV=1
MNFFNIEKTSEGKARAGVLSTDHGTVQTPIFMPVGTVASVKTVHQREIKDDIKAQIILGNTYHLYLRPGMEVMEAAGGLHKFMNWDLPILTDSGGFQVFSLSGSRKMSEEGVKFKSHIDGSYHLFTPEKSMEIQRQIGADIFMAFDECVAYPCDYNQVKLSMEMTHRWLKRCIDWNAENPELYGHKQRFFPIVQGSTYSDLRKISAEVIAEAGAEGNAIGGLSVGEPEEEMYRITDEVTDILPKDKPRYLMGVGTPWNILESIGLGIDMMDCVMPTRNARNAMLFTWQGVMNMKNEKWKKDFSPLDEFGTSFVDQEYSKAYLRHLFVSKEYLAKQIASIHNLAFYLDLVKVAREHILAGDFYQWKESVVPVLRQRL

SEQ ID NO: 53798 - protein, 377 aa, unidentified
  source 1..377: note = Chryseobacterium frigidisoli
  REGION 1..377: note = tr|A0A1I3GPC2|A0A1I3GPC2_9FLAO Queuine tRNA-ribosyltransferase OS=Chryseobacterium frigidisoli; OX = 1125876 GN=tgt PE=3 SV=1
MQKFFEIEKTSGGKARAGIITTDHGKVETPIFMPVGTVASVKTVHQRELKDDIKAQIILGNTYHLNLRPKMEIMQAAGGLHKFMNWDLPILTDSGGYQVFSLAKSRKLNEEGVKFKSHIDGSTMFISPEISMQIQRQIGADIFMAFDECVAYPEEYNKVRKSMDLTHRWLKRCIKWNAENPELYNYKQAFFPIVQGSCFSDLRKKSAEFISEQNAVGNAIGGLSVGEPEEEMYRITDEVTDVLPKDKPRYLMGVGTPWNILETIGLGIDMMDCVMPTRNARNAMLFTWQGVMNMKNKKWERDFSPLDEFGTSYVDSEYSKAYVRHLFVAKEYLAKQIASIHNLAFYLDLVKVAREHIIKGDFYEWKNSVVPNLRNRL

SEQ ID NO: 53799 - protein, 376 aa, unidentified
  source 1..376: note = Chryseobacterium gallinarum
  REGION 1..376: note = tr|A0A0G3M0R3|A0A0G3M0R3_9FLAO Queuine tRNA-ribosyltransferase OS=Chryseobacterium gallinarum; OX = 1324352 GN=tgt PE=3 SV=1
MKFFNIEKTSEGKARAGEITTDHGKIQTPIFMPVGTVASVKTVHQRELKEDIKAQIILGNTYHLYLRPGMETMQDAGGLHKFMNWDLPILTDSGGFQVFSLAGSRKMTEEGARFKSHIDGSYHMFSPERSMEIQRQIGADIFMAFDECTPYPCDYNQAKSSMELTHRWLKRCIDWTNNNPELYGHKQRLFPIVQGSTYSDLRKISAEVISEAGAEGNAIGGLSVGEPEEEMYRITDEVTDILPKEKPRYLMGVGTPWNILESIGLGIDMMDCVMPTRNARNAMLFTWNGVMNLKNEKWKRDFSPLDEFGTSFVDREYSKAYLRHLFVSKEYLAKQIASVHNLAFYLDLVKVAREHILAGDFYEWKNAVVPILRQRL

SEQ ID NO: 53800 - protein, 377 aa, Chryseobacterium gambrini
  REGION 1..377: note = tr|A0A1N7MN25|A0A1N7MN25_9FLAO Queuine tRNA-ribosyltransferase OS=Chryseobacterium gambrini; OX = 373672 GN=tgt PE=3 SV=1
MQKFFNIEKTSEGKARAGELTTDHGTIQTPIFMPVGTVASVKTVHQRELKEDIKAQIILGNTYHLYLRPGMEVMQEAGGLHKFMNWDLPILTDSGGFQVFSLASSRKMSEEGARFKSHIDGSYHMFSPEKSMEIQRQIGADIFMAFDECVAYPCEYNQAKTSMELTHRWLKRCIEWTENNPELYGHKQRLFPIVQGSTFSDLRKISAEVIAEAGAEGNAIGGLSVGEPEEEMYRITDEVTDILPKEKPRYLMGVGTPWNILESIGLGIDMMDCVMPTRNARNAMLFTWKGVMNMKNEKWKKDFSPLDEFGTSFVDREYSKAYVRHLFVSKEYLAKQIASIHNLAFYLDLVKVAREHIMAGDFYQWKNSVVPILRQRL

SEQ ID NO: 53801 - protein, 377 aa, unidentified
  source 1..377: note = Chryseobacterium geocarposphaerae
  REGION 1..377: note = tr|A0A2M9C1L0|A0A2M9C1L0_9FLAO Queuine tRNA-ribosyltransferase OS=Chryseobacterium geocarposphaerae OX=1416776 GN=tgt PE=3 SV=1
MQKFFNIEKTSEGKARAGEITTDHGTIQTPIFMPVGTVASVKTVHQRELKEDIKAQIILGNTYHLYLRPGMETMQEAGGLHKFMNWDLPILTDSGGFQVFSLASSRKMTEEGARFKSHIDGSYHMFSPEKSMEIQRQIGADIFMAFDECVAYPCEYNQAKTSMELTHRWLKRCIEWTENNPELYGHKQRLFPIVQGSTYSDLRKISAEVIAEAGAEGNAIGGLSVGEPEEEMYRITDEVTDILPKEKPRYLMGVGTPWNILESIGLGIDMMDCVMPTRNARNAMLFTWKGVMNMKNEKWKKDFSPLDEFGTSFVDREYSKSYVRHLFVSKEYLGKQIASIHNLAFYLDLVKVAREHIIAGDFYEWKKSVVPVLRQRL

SEQ ID NO: 53802 - protein, 376 aa, unidentified
  source 1..376: note = Chryseobacterium glaciei
  REGION 1..376: note = tr|A0A172XU36|A0A172XU36_9FLAO Queuine tRNA-ribosyltransferase OS=Chryseobacterium glaciei; OX = 1685010 GN=tgt PE=3 SV=1
MKFFNIEKTSEGKARAGELMTDHGKVQTPIFMPVGTVASVKTVHQRELKEDIKAQIILGNTYHLYLRPGMETMQNAGGLHKFMNWDLPILTDSGGFQVFSLSGSRKMSEEGVKFKSHIDGSYHLFTPEKSMEIQRQIGADIFMAFDECVAYPSGYNQVKASMEMTHRWLKRCIDWNEQNPELYGHKQRFFPIVQGSTYSDLRKISAEVISEAGAEGNAIGGLSVGEPEDELYRITDEVTDILPKDKPRYLMGVGTPWNILESIGLGIDMMDCVMPTRNARNAMLFTWQGVMNMKNEKWKNDFSPLDEFGTSFVDKEYSKAYVRHLFVSKEYLGKQIASIHNLAFYLDLVKVAREHIVAGDFYQWKNSVVPILRQRL

SEQ ID NO: 53803 - protein, 376 aa, Chryseobacterium gleum
  REGION 1..376: note = tr|A0A4U8WNJ9|A0A4U8WNJ9_9FLAO Queuine tRNA-ribosyltransferase OS=Chryseobacterium gleum OX=250; GN = tgt PE=3 SV=1
MNFFNIEKTSEGKARAGVLSTDHGNVQTPIFMPVGTVASVKTVHQREIKEDIKAQIILGNTYHLYLRPGMEVIQEAGGLHKFMNWDLPILTDSGGFQVFSLSGSRKMSEEGVKFKSHIDGSYHLFTPEKSMEIQRQIGADIFMAFDECVAYPCDYNQVKLSMEMTHRWLKRCMEWNENNPELYGYKQRFFPIVQGSTYSDLRKISAEVIAEAGAEGNAIGGLSVGEPEEEMYRITDEVTDILPKEKPRYLMGVGTPWNILESIGLGIDMMDCVMPTRNARNGMLFTWQGVINMKNEKWKKDFSPLDEFGTSFVDQEYSKAYVRHLFVSKEYLAKQIASIHNLAFYLDLVKVAREHILAGDFYQWKDSVVPVLRQRL

SEQ ID NO: 53804 - protein, 376 aa, Chryseobacterium gleum; identical to SEQ ID NO: 53785
  REGION 1..376: note = tr|A0A448B644|A0A448B644_9FLAO Queuine tRNA-ribosyltransferase OS=Chryseobacterium gleum OX=250; GN = tgt PE=3 SV=1

SEQ ID NO: 53805 - protein, 377 aa, Chryseobacterium greenlandense
  REGION 1..377: note = tr|A0A101CKA8|A0A101CKA8_9FLAO Queuine tRNA-ribosyltransferase OS=Chryseobacterium greenlandense; OX = 345663 GN=tgt PE=3 SV=1
MQQFFKIEKTSQGKARAGELVTDHGVVKTPIFMPVGTVASVKTVHQRELKEDIKAQIILGNTYHLYLRPGMEVMQEAGGLHKFMNWDLPILTDSGGFQVFSLSGTRKMSEEGVKFKSHIDGSVHLFTPEKSMEIQRQIGADIFMAFDECVAYPSEYNQVKKSMEMTHRWLKRCIDWNEKNPELYGHKQRFFPIVQGSTFSDLRKISAEVISEAGAEGNAIGGLSVGEPEEELYRITDEVTDILPKEKPRYLMGVGTPWNILESIGLGIDMMDCVMPTRNARNAMLFTWQGVMNLKNEKWKKDFSPLDEFGISFVDQEYSKAYVRHLFVSKEYLAKQIASIHNLAFYLDLVKVAREHIVAGDFYEWKNSVVPVLRQRL

SEQ ID NO: 53806 - protein, 378 aa, Chryseobacterium hagamense
  REGION 1..378: note = tr|A0A511YI47|A0A511YI47_9FLAO Queuine tRNA-ribosyltransferase OS=Chryseobacterium hagamense; OX = 395935 GN=tgt PE=3 SV=1
MMQKFFNIEKTSEGKARAGELTTDHGKIQTPIFMPVGTVASVKTVHQRELKEDIQAQIILGNTYHLYLRPGMETMQAAGGLHQFMKWDLPILTDSGGFQVFSLASSRKMSEEGARFKSHIDGSYHMFSPEKSMEIQRQIGADIFMAFDECVAYPCEYNQAKSSMELTHRWLKRCIEWTENNPELYGHKQRLFPIVQGSTFSDLRKISAEVIAEAGAEGNAIGGLSVGEPEEEMYRITDEVTDILPKDKPRYLMGVGTPWNILESIGLGIDMMDCVMPTRNARNAMLFTWKGVMNMKNEKWKQDFSPLDEFGTSFVDREYSKAYLRHLFVSKEYLAKQIASIHNLAFYLDLVKTARAHILAGDFYQWKDSVVPVLRQRL

SEQ ID NO: 53807 - protein, 377 aa, Chryseobacterium haifense
  REGION 1..377: note = tr|A0A246B9Z2|A0A246B9Z2_9FLAO Queuine tRNA-ribosyltransferase OS=Chryseobacterium haifense DSM 19056 OX=1450526 GN=tgt PE=3 SV=1
MSQFFEINNTTTGKARAGTITTDHGTIQTPIFMPVGTVASVKTVHQRELRDDIKAQIILGNTYHLNLRPKMDIMQAAGGLHKFMNWDLPILTDSGGYQVFSLSKSRKLTEEGVKFKSHIDGSLHFISPEKSMEIQRQIGADIFMAFDECTPYPCDYNLAKDSMEMTHRWLKRCIEWIEENPEIYGHKQRLFPIVQGSTFSDLRKISAEFISEQNAAGNAIGGLSVGEPEEEMYRITDEVTDILPKDKPRYLMGVGTPWNILESIGLGIDMMDCVMPTRNARNAMLFTWNGVMNMKNKKWESDFSPLDEFGTSYVDSEYSKAYVRHLFVAKEYLAKQIASVHNLAFYLDLVRVAREHIIAGDFYEWKNSVIPTLKTRL

SEQ ID NO: 53808 - protein, 377 aa, Chryseobacterium haifense
  REGION 1..377: note = tr|A0A3G6T3H0|A0A3G6T3H0_9FLAO Queuine tRNA-ribosyltransferase OS=Chryseobacterium haifense; OX = 421525 GN=tgt PE=3 SV=1
MSQFFEINNTTTGKARAGTITTDHGTIQTPIFMPVGTVASVKTVHQRELRDDIKAQIILGNTYHLNLRPKMDIMQAAGGLHKFMNWDLPILTDSGGYQVFSLSKSRKLTEEGVKFKSHIDGSLHFISPEKSMEIQRQIGADIFMAFDECTPYPCDYNLAKDSMEMTHRWLKRCIEWTEENPEIYGHKQRLFPIVQGSTYSDLRKISAEFISEQNAAGNAIGGLSVGEPEEEMYRITDEVTDILPKDKPRYLMGVGTPWNILESIGLGIDMMDCVMPTRNARNAMLFTWNGVMNMKNKKWESDFSPLDEFGTSYVDSEYSKAYVRHLFVAKEYLAKQIASVHNLAFYLDLVRVARAHIIAGDFYEWKNSVIPTLKTRL

SEQ ID NO: 53809 - protein, 377 aa, unidentified
  source 1..377: note = Chryseobacterium halperniae
  REGION 1..377: note = tr|A0A085BMA7|A0A085BMA7_9FLAO Queuine tRNA-ribosyltransferase OS=Chryseobacterium halperniae; OX = 421072 GN=tgt PE=3 SV=1
MQKFFEIEKTSESKARAGVINTDHGQIQTPIFMPVGTVASVKTVHQRELKEDIKAQIILGNTYHLMLRPTMDIMEKAAGLHQFMNWDLPILTDSGGYQVFSLAKSRKITEEGVKFKSHIDGSLHFMSPEVSMQIQRQIGADIFMAFDECIAYPSDYNAVKTSMELTHRWLKRCITWTEENKELYGHKQRLFPIVQGSCYSDLRKISAEVISEAGAEGNAIGGLSVGEPEPEMYRITNEVTDILPTDKPRYLMGVGTPWNILESIGFGVDMMDCVMPTRNARNAMLFTWQGVMNMKNERWKEDFSPLDEFGTSFVDSAYSKAYVRHLFVSKEYLAKQIASIHNLAFYLDLVKVAREHIVAGDFYQWKDSIIPQLKTRL

SEQ ID NO: 53810 - protein, 376 aa, Chryseobacterium hispanicum
  REGION 1..376: note = tr|A0A3D9D1W6|A0A3D9D1W6_9FLAO Queuine tRNA-ribosyltransferase OS=Chryseobacterium hispanicum; OX = 358687 GN=tgt PE=3 SV=1
MKFFEIEKTSESKARAGVITTDHGQIQTPIFMPVGTVASVKTVHQRELKEDIKAQIILGNTYHLMLRPTMDIMEQAGGLHKFMNWDRPILTDSGGYQVFSLAKSRKITEEGVKFKSHIDGSLRFMSPEVSMQIQRQIGADIFMAFDECIAYPSDYNAVKTSMELTHRWLKRCIDWTEENKELYDHKQRLFPIVQGSCFSDLRKISAEVISEAGAEGNAIGGLSVGEPEEEMYRITNEVTDILPKDKPRYLMGVGTPWNIIESIGFGVDMMDCVMPTRNARNAMLFTWQGVMNMKNEKWKTDFSPLDEFGTSFVDQEYTKAYVRHLFVAKEYLAKQIASIHNLAFYLDLVKVAREHIIAGDFYQWKEQIIPQLKKRL

SEQ ID NO: 53811 - protein, 390 aa, Chryseobacterium hominis
  REGION 1..390: note = tr|A0A1H6M282|A0A1H6M282_9FLAO Queuine tRNA-ribosyltransferase OS=Chryseobacterium hominis; OX = 420404 GN=tgt PE=3 SV=1
MTFGKNRRRNLLHTMKFFEIEKNSESKARAGIITTDHGTIQTPIFMPVGTVASVKTVHQRELKEDIKAQIILGNTYHLMLRPKMDIMEQAGGLHKFMNWDRPILTDSGGYQVFSLAKSRKITEEGVKFKSHIDGSLHFMSPEVSMQIQRQIGADIFMAFDECIAYPSDYNAVKTSMELTHRWLKRCISWTEENKELYGHKQRLFPIVQGSCFSDLRKISAEVISEAGADGNAIGGLSVGEPEDEMYRITNEVTDILPKDKPRYLMGVGTPWNILESIGFGVDMMDCVMPTRNARNAMLFTWQGVMNMKNEKWKTDFSPLDEFGTSFVDQEYSKAYVRHLFVAKEYLAKQIASIHNLAFYLDLVKVAREHIVAGDFYQWKEQIIPQLKTRL

SEQ ID NO: 53812 - protein, 376 aa, Chryseobacterium hominis
  REGION 1..376: note = tr|A0A3N0X6H8|A0A3N0X6H8_9FLAO Queuine tRNA-ribosyltransferase OS=Chryseobacterium hominis; OX = 420404 GN=tgt PE=3 SV=1
MKFFEIEKNSESKARAGVITTDHGTIQTPIFMPVGTVASVKTVHQRELKEDIKAQIILGNTYHLMLRPKMDIMEQAGGLHKFMNWDRPILTDSGGYQVFSLAKSRKITEEGVKFKSHIDGSLHFMSPEVSMQIQRQIGADIFMAFDECIAYPSDYNAVKTSMELTHRWLKRCISWTEENKELYGHKQRLFPIVQGSCFSDLRKISAEVISEAGADGNAIGGLSVGEPEDEMYRITNEVTDILPKDKPRYLMGVGTPWNILESIGFGVDMMDCVMPTRNARNAMLFTWQGVMNMKNEKWKTDFSPLDEFGTSFVDQEYSKAYVRHLFVAKEYLAKQIASIHNLAFYLDLVKVAREHIVAGDFYQWKEQIIPQLKTRL

SEQ ID NO: 53813 - protein, 377 aa, Chryseobacterium humi
  REGION 1..377: note = tr|A0A1H5XYA5|A0A1H5XYA5_9FLAO Queuine tRNA-ribosyltransferase OS=Chryseobacterium humi OX=493375; GN = tgt PE=3 SV=1
MQKFFEIEKTSEGKARAGIINTDHGKIETPIFMPVGTVASVKTVHQRELKDDIKAQIILGNTYHLNLRPKMDIMQAAGGLHKFMNWDLPILTDSGGYQVFSLSKSRKLNEEGVKFKSHIDGSTHFISPEISMEIQRQIGADIFMAFDECTPYPCDYRLAKKSMEMTHRWLKRCIDYNEKNKEIYGYKQHFFPIVQGSTYSDLRKISAEKIAESDQVGNAIGGLSVGEPEEEMYRITDEVTDFLPKEKPRYLMGVGTPWNILETIGLGIDMMDCVMPTRNARNAMLFTWQGVMNMKNKKWENDFSPLDEFGTSYVDREYSKAYVRHLFVAKEYLSKQIASIHNLAFYLDLVKVAREHIVAGDFYEWKNAVIPNLKNRL

SEQ ID NO: 53814 - protein, 376 aa, Chryseobacterium hungaricum
  REGION 1..376: note = tr|A0A1G7FP49|A0A1G7FP49_9FLAO Queuine tRNA-ribosyltransferase OS=Chryseobacterium hungaricum; OX = 454006 GN=tgt PE=3 SV=1
MKFFEIEKTSESKARAGVITTDHGQIQTPIFMPVGTVASVKTVHQRELKEDIKAQIILGNTYHLMLRPKMDIMEQAGGLHKFMNWDRPILTDSGGYQVFSLAKSRKITEEGVKFKSHIDGSLQFMSPEISMQIQRQIGADIFMAFDECIAYPSDYNAVKTSMELTHRWLKRCIDWTEENKELYGHKQRLFPIVQGSCYSDLRKISAEVISEAGAEGNAIGGLSVGEPEEEMYRITNEVTDILPKDKPRYLMGVGTPWNIIESIGLGVDMMDCVMPTRNARNAMLFTWQGVMNMKNEKWKTDFSPLDEFGTSFVDQEYSKAYVRHLFVAKEYLAKQIASIHNLAFYLDLVKVAREHIIAGDFYQWKEQIIPQLKQRL

SEQ ID NO: 53815 - protein, 376 aa, Chryseobacterium indologenes
  REGION 1..376: note = tr|A0A411DRE9|A0A411DRE9_9FLAO Queuine tRNA-ribosyltransferase OS=Chryseobacterium indologenes; OX = 253 GN=tgt PE=3 SV=1
MKFFNIEKTSEGKARAGEITTDHGKIQTPIFMPVGTVASVKTVHQRELKEDIKAQIILGNTYHLYLRPGMETMQDAGGLHKFMNWDLPILTDSGGFQVFSLASNRKMTEEGARFKSHIDGSYHMFSPERSMEIQRQIGADIFMAFDECTPYPCDYNQAKSSMELTHRWLKRCIDWTNDNPELYGHKQRLFPIVQGSTYSDLRKISAEVISEAGAEGNAIGGLSVGEPEEEMYRITDEVTDILPKEKPRYLMGVGTPWNILESIGLGIDMMDCVMPTRNARNAMLFTWQGVMNLKNEKWKRDFSPLDEFGTSFVDREYSKAYLRHLFVSKEYLAKQIASIHNLAFYLDLVKVAREHIMAGDFYEWKNSVVPVLRQRL

SEQ ID NO: 53816 - protein, 376 aa, Chryseobacterium indologenes
  REGION 1..376: note = tr|A0A1Z3W6U7|A0A1Z3W6U7_9FLAO Queuine tRNA-ribosyltransferase OS=Chryseobacterium indologenes; OX = 253 GN=tgt PE=3 SV=1
MKFFNIEKTSEGKARAGEITTDHGKIQTPIFMPVGTVASVKTVHQRELKEDIKAQIILGNTYHLYLRPGMETMQAAGGLHKFMNWDLPILTDSGGFQVFSLASNRKMTEEGARFKSHIDGSYHMFSPERSMEIQRQIGADIFMAFDECTPYPCEYNQAKSSMELTHRWLKRCIEWTNDNPELYGHKQRLFPIVQGSTYSDLRKISAEVISEAGAEGNAIGGLSVGEPEEEMYRITDEVTDILPKEKPRYLMGVGTPWNILESIGLGIDMMDCVMPTRNARNAMLFTWQGVMNLKNEKWKQDFSPLDEFGTSFVDREYSKAYLRHLFVSKEYLAKQIASIHNLAFYLDLVKVAREHIIAGDFYEWKNSVVPVLRQRL

SEQ ID NO: 53817 - protein, 376 aa, Chryseobacterium indoltheticum
  REGION 1..376: note = tr|A0A381F704|A0A381F704_9FLAO Queuine tRNA-ribosyltransferase OS=Chryseobacterium indoltheticum; OX = 254 GN=tgt PE=3 SV=1
MNFFNIEKTSESKARAGVLSTDHGTIQTPIFMPVGTVASVKTVHQREIKDDIKAQIILGNTYHLYLRPGMEVMQEAGGLHKFMNWDLPILTDSGGFQVFSLSGSRKMSEEGVKFKSHIDGSYHLFTPEKSMEIQRQIGADIFMAFDECVAYPSDYNRVKLSMEMTHRWLKRCIDWNAENPELYGHKQRFFPIVQGSTYSDLRKISAEVISEAGAEGNAIGGLSVGEPEEELYRITDEVTDILPKDKPRYLMGVGTPWNILESIGLGIDMMDCVMPTRNARNAMLFTWQGVMNMKNEKWKKDFSPLDEFGTSFVDHEYSKAYVRHLFVSKEYLAKQIASIHNLAFYLDLVKVAREHILAGDFYQWKDSVVPVLRQRL

SEQ ID NO: 53818 - protein, 376 aa, Chryseobacterium indoltheticum
  REGION 1..376: note = tr|A0A381FKC5|A0A381FKC5_9FLAO Queuine tRNA-ribosyltransferase OS=Chryseobacterium indoltheticum; OX = 254 GN=tgt PE=3 SV=1
MNFFNIEKTSESKARAGVLSTDHGTIQTPIFMPVGTVASVKTVHQREIKDDIKAQIILGNTYHLYLRPGMEVMQEAGGLHKFMNWDLPILTDSGGFQVFSLSGSRKMSEEGVKFKSHIDGSYHLFTPEKSMEIQRQIGADIFMAFDECVAYPSDYNQVKLSMEMTHRWLKRCIDWNAENPELYGHKQRFFPIVQGSTYSDLRKISAEVISEAGAEGNAIGGLSVGEPEEELYRITDEVTDILPKDKPRYLMGVGTPWNILESIGLGIDMMDCVMPTRNARNAMLFTWQGVMNMKNEKWKKDFSPLDEFGTSFVDHEYSKAYVRHLFVSKEYLAKQIASIHNLAFYLDLVKVAREHILAGDFYQWKDSVVPVLRQRL

SEQ ID NO: 53819 - protein, 376 aa, Chryseobacterium jejuense
  REGION 1..376: note = tr|A0A2X2ZBU4|A0A2X2ZBU4_9FLAO Queuine tRNA-ribosyltransferase OS=Chryseobacterium jejuense; OX = 445960 GN=tgt PE=3 SV=1
MKFFNIEKTSEGKARAGEITTDHGKIQTPIFMPVGTVASVKTVHQRELKEDIKAQIILGNTYHLYLRPGMETMQDAGGLHKFMNWDLPILTDSGGFQVFSLASNRKMTEEGARFKSHIDGSYHMFSPERSMEIQRQIGADIFMAFDECTPYPCEYNQAKSSMELTHRWLKRCIEWTNDNPELYGYKQRLFPIVQGSTYSDLRKISAEVISEAGAEGNAIGGLSVGEPEEEMYRITDEVTDILPKEKPRYLMGVGTPWNILESIGLGIDMMDCVMPTRNARNAMLFTWQGVMNLKNEKWKRDFSPLDEFGTSFVDREYSKAYLRHLFVSKEYLAKQIASIHNLAFYLDLVKVAREHIIAGDFYEWKNSVVPVLRQRL

SEQ ID NO: 53820 - protein, 378 aa, Chryseobacterium jeonii
  REGION 1..378: note = tr|A0A0C1FDW2|A0A0C1FDW2_9FLAO Queuine tRNA-ribosyltransferase OS=Chryseobacterium jeonii; OX = 266749 GN=tgt PE=3 SV=1
MISPFFEINKTSTGKARAGTITTDHGTIQTPIFMPVGTVASVKTVHQRELKDDIKAQIILGNTYHLNLRPKMDIMQAAGGLHKFMNWDLPILTDSGGYQVFSLSKSRKLNEAGVKFKSHIDGSTHFISPEISMEIQRQIGADIFMAFDECVAYPAEYNQVKKSMDLTHRWLKRCIKWNAENPELYGHKQAFFPIVQGSCYSDLRKKSAEFISEQNAVGNAIGGLSVGEPEEEMYRITDEVTDILPKDKPRYLMGVGTPWNIIETIGLGIDMMDCVMPTRNARNAMLFTWQGVMNMKNKKWESDFSPLDEFGTSYVDTEYSKAYVRHLFVAKEYLAKQIASIHNLAFYLDLVKVAREHIVAGDFYEWKDSIIPVLRQRL

SEQ ID NO: 53821 - protein, 376 aa, Chryseobacterium joostei
  REGION 1..376: note = tr|A0A1N7I9I6|A0A1N7I9I6_9FLAO Queuine tRNA-ribosyltransferase OS=Chryseobacterium joostei; OX = 112234 GN=tgt PE=3 SV=1
MKFFNIEKTSEGKARAGEITTDHGKIQTPIFMPVGTVASVKTVHQRELKEDIKAQIILGNTYHLYLRPGMETMQDAGGLHKFMNWDLPILTDSGGFQVFSLASNRKMTEEGARFKSHIDGSYHMFSPERSMEIQRQIGADIFMAFDECTPYPCEYNQAKSSMELTHRWLKRCIDWTNDNPELYGHKQRLFPIVQGSTYSDLRKISAEVISEAGAEGNAIGGLSVGEPEEEMYRITDEVTDILPKEKPRYLMGVGTPWNILESIGLGIDMMDCVMPTRNARNAMLFTWQGVMNLKNEKWKRDFSPLDEFGTSFVDREYSKAYLRHLFVSKEYLAKQIASIHNLAFYLDLVKVGREHILAGDFYEWKNSVVPVLRQRL

SEQ ID NO: 53822 - protein, 377 aa, Chryseobacterium koreense
  REGION 1..377: note = tr|A0A0J7J2N9|A0A0J7J2N9_9FLAO Queuine tRNA-ribosyltransferase OS=Chryseobacterium koreense CCUG 49689 OX=1304281 GN=tgt PE=3 SV=1
MSPFFKINKTSTGKARAGTISTDHGTIQTPIFMPVGTVASVKTVHQHELKEDIKAQIILGNTYHLYLRPKMEIMQQAGGLHKFMNWDLPILTDSGGYQVFSLSASRKMSEEGVKFKSHIDGSYHFISPEKSMEIQRQIGGDIFMAFDECTPYPCEYNLAKTSMEMTHRWLKRCIDWTNENQEIYGHQQRLFPIVQGSTYSDLRKISAEFISEQNAEGNAIGGLSVGEPEEEMYRITNEVTDILPKDKPRYLMGVGTPWNILESIGLGIDMMDCVMPTRNARNAMLFTWNGVMNMKNEKWKNDFSPLDEFGTSYVDREYSKAYVRHLFVSKEYLAKQIASIHNLAFYLDLVKVAREHIFAGDFYEWKDSVVPVLKQRL

SEQ ID NO: 53823 - protein, 376 aa, unidentified
  source 1..376: note = Chryseobacterium kwangjuense
  REGION 1..376: note = tr|A0A135WDV3|A0A135WDV3_9FLAO Queuine tRNA-ribosyltransferase OS=Chryseobacterium kwangjuense; OX = 267125 GN=tgt PE=3 SV=1
MKFFNIEKTSEGKARAGELTTDHGKIQTPIFMPVGTVASVKTVHQRELKEDIKAQIILGNTYHLYLRPTMDIMEEAGGLHKFMNWDLPILTDSGGFQVFSLSKSRKMSEEGVKFKSHIDGSYHMFTPEKSMEIQRQIGADIFMAFDECTPYPCEYNQAKSSMELTHRWLKRCIDWTEENKEIYGHKQRLFPIVQGSTYSDLRKISAEVISEAGAEGNAIGGLSVGEPEEEMYRITDEVTDILPKDKPRYLMGVGTPWNILESIGLGIDMMDCVMPTRNARNAMLFTWQGVMNLKNEKWKRDFSPLDEFGTSYVDREYSKAYLRHLFVSKEYLAKQIASVHNLAFYLDLVKVAREHIIAGDFYEWKKSVVPVLRQRL

SEQ ID NO: 53824 - protein, 376 aa, unidentified
  source 1..376: note = Chryseobacterium lactis
  REGION 1..376: note = tr|A0A3G6RUD4|A0A3G6RUD4_9FLAO Queuine tRNA-ribosyltransferase OS=Chryseobacterium lactis; OX = 1241981 GN=tgt PE=3 SV=1
MKFFNIEKTSEGKARAGEITTDHGKIQTPIFMPVGTVASVKTVHQRELKEDIKAQIILGNTYHLYLRPGMETMQDAGGLHKFMNWDLPILTDSGGFQVFSLASNRKMTEEGARFKSHIDGSYHMFSPERSMEIQRQIGADIFMAFDECTPYPCEYNQAKSSMELTHRWLKRCIDWTNDNPEIYGHKQRLFPIVQGSTYSDLRKISAEVISEAGAEGNAIGGLSVGEPEEEMYRITDEVTDILPKEKPRYLMGVGTPWNILESIGLGIDMMDCVMPTRNARNAMLFTWQGVMNLKNEKWKRDFSPLDEFGTSFVDKEYSKAYLRHLFVSKEYLAKQIASIHNLAFYLDLVKVAREHIIAGDFYQWKDSVVPVLRQRL

SEQ ID NO: 53825 - protein, 376 aa, Chryseobacterium lathyri
  REGION 1..376: note = tr|A0A511YDM0|A0A511YDM0_9FLAO Queuine tRNA-ribosyltransferase OS=Chryseobacterium lathyri; OX = 395933 GN=tgt PE=3 SV=1
MKFFNIEKTSEGKARAGEITTDHGKIQTPIFMPVGTVASVKTVHQRELKEDIKAQIILGNTYHLYLRPTMDIMQEAGGLHKFMNWDLPILTDSGGFQVFSLSKSRKMSEEGVKFKSHIDGSYHMFTPEKSMEIQRQIGADIFMAFDECTPYPCEYNQAKTSMELTHRWLKRCIEWTEQNKEIYGHKQRLFPIVQGSTYSDLRKISAEVISEAGAEGNAIGGLSVGEPEEEMYRITDEVTDILPKDKPRYLMGVGTPWNILESIGLGIDMMDCVMPTRNARNAMLFTWQGVMNLKNEKWKRDFSPLDEFGTSYVDREYSKAYLRHLFVSKEYLAKQIASVHNLAFYLDLVKVAREHIVAGDFYEWKKSVVPVLRQRL

SEQ ID NO: 53826 - protein, 376 aa, unidentified
  source 1..376: note = Chryseobacterium limigenitum
  REGION 1..376: note = tr|A0A1K2IF76|A0A1K2IF76_9FLAO Queuine tRNA-ribosyltransferase OS=Chryseobacterium limigenitum; OX = 1612149 GN=tgt PE=3 SV=1
MKFFNIEKTSEGKARAGEIMTDHGKVQTPIFMPVGTVASVKTVHQRELKEDIKAQIILGNTYHLYLRPGMETMQNAGGLHKFMNWDLPILTDSGGFQVFSLSGSRKMSEEGVKFKSHIDGSYHLFTPEKSMEIQRQIGADIFMAFDECVAYPSGYNQVKASMEMTHRWLKRCIDWNEQNPELYGHKQRFFPIVQGSTYSDLRKISAEVISEAGAEGNAIGGLSVGEPEDELYRITDEVTDILPKDKPRYLMGVGTPWNILESIGLGIDMMDCVMPTRNARNAMLFTWQGVMNMKNEKWKNDFSPLDEFGTSFVDKEYSKAYVRHLFVSKEYLGKQIASIHNLAFYLDLVKVAREHIVAGDFYQWKNSVVPILRQRL

SEQ ID NO: 53827 - protein, 376 aa, Chryseobacterium luteum
  REGION 1..376: note = tr|A0A085ZX15|A0A085ZX15_9FLAO Queuine tRNA-ribosyltransferase OS=Chryseobacterium luteum; OX = 421531 GN=tgt PE=3 SV=1
MKFFNIEKTSEGKARAGEITTAHGKIQTPIFMPVGTVASVKTVHQRELKEDIKAQIILGNTYHLYLRPTMDIMQEAGGLHKFMNWDLPILTDSGGFQVFSLSKSRKMSEEGVKFKSHIDGSYHMFTPEKSMEIQRQIGADIFMAFDECVAYPCDYNQVKSSMEMTHRWLKRCIDWNEKNPELYGHKQTFFPIVQGSTYSDLRKISAEVISEAGAEGNAIGGLSVGEPEEEMYRITDEVTDILPKDKPRYLMGVGTPWNILESIGLGIDMMDCVMPTRNARNAMLFTWQGVMNLKNEKWKRDFSPLDEFGTSYVDREYSKAYLRHLFVSKEYLAKQIASIHNLAFYLDLVKVAREHIVAGDFYEWKKSVMPALRQRL

SEQ ID NO: 53828 - protein, 376 aa, Chryseobacterium molle
  REGION 1..376: note = tr|A0A1M6R2Y6|A0A1M6R2Y6_9FLAO Queuine tRNA-ribosyltransferase OS=Chryseobacterium molle; OX = 216903 GN=tgt PE=3 SV=1
MKFFEIEKSSESKARAGVITTDHGQIQTPIFMPVGTVASVKTVHQRELKEDIKAQIILGNTYHLMLRPTMDIMEQAGGLHKFMNWDRPILTDSGGYQVFSLAKSRKMTEEGVKFKSHIDGSFHFISPEKSMEIQRQIGADIFMAFDECTPYPCEYAQAKTSMELTHRWLKRCIEWTEENKELYGHKQRLFPIVQGSTYSDLRKISAEVISEFGAEGNAIGGLSVGEPEEEMYRITNEVTDILSKEKPRYLMGVGTPWNIIESIGLGVDMMDCVMPTRNARNAMLFTWQGVMNMKNEKWKADFSPLDEFGTSFVDQEYSKAYVRHLFVAKEYLAKQIASIHNLAFYLDLVKVAREHIVAGDFYQWKEQIIPQLKQRL

SEQ ID NO: 53829 - protein, 377 aa, unidentified; identical to SEQ ID NO: 53800
  source 1..377: note = Chryseobacterium mucoviscidosis
  REGION 1..377: note = tr|A0A202C2Y7|A0A202C2Y7_9FLAO Queuine tRNA-ribosyltransferase OS=Chryseobacterium mucoviscidosis; OX = 1945581 GN=tgt PE=3 SV=1

SEQ ID NO: 53830 - protein, 376 aa, unidentified
  source 1..376: note = Chryseobacterium nakagawai
  REGION 1..376: note = tr|A0A3S4UPC4|A0A3S4UPC4_9FLAO Queuine tRNA-ribosyltransferase OS=Chryseobacterium nakagawai; OX = 1241982 GN=tgt PE=3 SV=1
MKFFNIEKTSEGKARAGEITTDHGKIQTPIFMPVGTVASVKTVHQRELKEDIKAQIILGNTYHLYLRPGMETMQDAGGLHKFMNWDLPILTDSGGFQVFSLASNRKMTEEGARFKSHIDGSYHMFSPERSMEIQRQIGADIFMAFDECTPYPCEYNQAKSSMELTHRWLKRCIEWTNDNPELYGHKQRLFPIVQGSTYSDLRKISAEVISEAGAEGNAIGGLSVGEPEEEMYRITDEVTDILPKEKPRYLMGVGTPWNILESIGLGIDMMDCVMPTRNARNAMLFTWQGVMNLKNEKWKRDFSPLDEFGTSFVDREYSKAYLRHLFVSKEYLAKQIASIHNLAFYLDLVKVAREHIIAGDFYEWKNSIVPVLRQRL

SEQ ID NO: 53831 - protein, 376 aa, unidentified; identical to SEQ ID NO: 53782
  source 1..376: note = Chryseobacterium nakagawai
  REGION 1..376: note = tr|A0A3N2ER50|A0A3N2ER50_9FLAO Queuine tRNA-ribosyltransferase OS=Chryseobacterium nakagawai; OX = 1241982 GN=tgt PE=3 SV=1

SEQ ID NO: 53832 - protein, 376 aa, unidentified
  source 1..376: note = Chryseobacterium nematophagum
  REGION 1..376: note = tr|A0A3M7LHE2|A0A3M7LHE2_9FLAO Queuine tRNA-ribosyltransferase OS=Chryseobacterium nematophagum; OX = 2305228 GN=tgt PE=3 SV=1
MKFFNIEKISQGKARAGEITTDHGKIQTPIFMPVGTVASVKTVHQRELKEDIKAQIILGNTYHLYLRPTMDIMQEAGGLHHFMNWDGPILTDSGGFQVFSLSKSRKMTEEGVKFKSHIDGSYHFISPEKSMEIQRQIGADIFMAFDECTPYPCEYNQAKSSMELTHRWLKRCIEWTEKNQELYGHKQRLFPIVQGSTYSDLRKISAEVISEAGAEGNAIGGLSVGEPEEEMYRITDEVTDILPKDKPRYLMGVGTPWNILESIGLGIDMMDCVMPTRNARNAMLFTWKGVMNLKNEKWKKDFSPLDEFGISFVDREYSKAYLRHLFVSKEYLAKQIASIHNLAFYLDLVKVAREHIIAGDFYEWKKSVVPVLKQRL

SEQ ID NO: 53833 - protein, 376 aa, unidentified
  source 1..376: note = Chryseobacterium nematophagum
  REGION 1..376: note = tr|A0A3M7TC84|A0A3M7TC84_9FLAO Queuine tRNA-ribosyltransferase OS=Chryseobacterium nematophagum; OX = 2305228 GN=tgt PE=3 SV=1
MKFFNIEKISQGKARAGEITTDHGKIQTPIFMPVGTVASVKTVHQRELKEDIKAQIILGNTYHLYLRPTMDIMQEAGGLHHFMNWDGPILTDSGGFQVFSLSKSRKMTEEGVKFKSHIDGSYHFISPEKSMEIQRQIGADIFMAFDECTPYPCEYNQAKSSMELTHRWLKRCIEWTEKNQELYGHKQRLFPIVQGSTYSDLRKISAEVISEAGAEGNAIGGLSVGEPEEEMYRITDEVTDILPKDKPRYLMGVGTPWNILESIGLGIDMMDCVMPTRNARNAMLFTWKGVMNLKNEKWKKDFSPLDEFGTSFVDRDYSKAYLRHLFVSKEYLAKQIASIHNLAFYLDLVKVAREHIIAGDFYEWKKSVVPVLKQRL

SEQ ID NO: 53834 - protein, 376 aa, unidentified
  source 1..376: note = Chryseobacterium oleae
  REGION 1..376: note = tr|A0A1I5AM34|A0A1I5AM34_9FLAO Queuine tRNA-ribosyltransferase OS=Chryseobacterium oleae; OX = 491207 GN=tgt PE=3 SV=1
MKFFNIEKTSEGKARAGEITTDHGKIQTPIFMPVGTVASVKTVHQRELKEDIKAQIILGNTYHLYLRPAMDTMEQAGGLHKFMNWDLPILTDSGGFQVFSLSKSRKMSEEGVKFKSHIDGSYHMFTPEKSMEIQRQIGADIFMAFDECVAYPSGYNEVKASMEMTHRWLKRCIDWNEANPELYGHKQRFFPIVQGSTYSDLRKISAEVISEAGAEGNAIGGLSVGEPEEELYRITDEVTDILPKEKPRYLMGVGTPWNILESIGLGIDMMDCVMPTRNARNAMLFTWQGVMNMKNEKWKQDFSPLDEFGTSYVDREYSKAYLRHLFVSKEYLAKQIASVHNLAFYLDLVKVAREHIVAGDFYEWKKSIVPVLKQRL

SEQ ID NO: 53835 - protein, 376 aa, Chryseobacterium oncorhynchi
  REGION 1..376: note = tr|A0A316WTS0|A0A316WTS0_9FLAO Queuine tRNA-ribosyltransferase OS=Chryseobacterium oncorhynchi; OX = 741074 GN=tgt PE=3 SV=1
MKFFNIEKTSEGKARAGELTTDHGKIQTPIFMPVGTVASVKTVHQRELKEDIKAQIILGNTYHLYLRPGMETMQDAGGLHKFMNWDLPILTDSGGFQVFSLASNRKMTEEGARFKSHIDGSYHMFSPERSMEIQRQIGADIFMAFDECTPYPCEYNQAKSSMELTHRWLKRCIDWTNENPELYGHKQRLFPIVQGSTYSDLRKISAEVISEAGAEGNAIGGLSVGEPEEEMYRITDEVTDILPKEKPRYLMGVGTPWNILESIGLGIDMMDCVMPTRNARNAMLFTWQGVMNLKNEKWKRDFSPLDEFGTSFVDREYSKAYLRHLFVSKEYLAKQIASIHNLAFYLDLVKVAREHILAGDFYEWKNSVVPVLRQRL

SEQ ID NO: 53836 - protein, 376 aa, Chryseobacterium oranimense
  REGION 1..376: note = tr|A0A1M5PGE0|A0A1M5PGE0_9FLAO Queuine tRNA-ribosyltransferase OS=Chryseobacterium oranimense; OX = 421058 GN=tgt PE=3 SV=1
MKFFNIEKTSEGKARAGELTTDHGKIQTPIFMPVGTVASVKTVHQRELKEDIKAQIILGNTYHLYLRPTMDIMQEAGGLHKFMNWDLPILTDSGGFQVFSLSKSRKMSEEGVKFKSHIDGSYHMFTPEKSMEIQRQIGADIFMAFDECTPYPCEYNQAKSSMELTHRWLKRCIDWTEENKEIYGHKQRLFPIVQGSTYSDLRKISAEVISEAGAEGNAIGGLSVGEPEEEMYRITDEVTDILPKDKPRYLMGVGTPWNILESIGLGIDMMDCVMPTRNARNAMLFTWQGVMNLKNEKWKRDFSPLDEFGTSYVDREYSKAYLRHLFVSKEYLAKQIASVHNLAFYLDLVKVAREHIVAGDFYEWKKSVVPVLRQRL

SEQ ID NO: 53837 - protein, 376 aa, Chryseobacterium piperi
  REGION 1..376: note = tr|A0A086BN19|A0A086BN19_9FLAO Queuine tRNA-ribosyltransferase OS=Chryseobacterium piperi; OX = 558152 GN=tgt PE=3 SV=1
MKFFNIEKTSEGKARAGELTTDHGKIQTPIFMPVGTVASVKTVHQRELKEDIKAQIILGNTYHLYLRPGMDVMQEAGGLHKFMNWDLPILTDSGGFQVFSLSGSRKMSEEGVKFKSHIDGSYHLFTPEKSMEIQRQIGADIFMAFDECTPYPCEYNQAKLSMELTHRWLKRCIDWTEQNPELYGHKQRLFPIVQGSTYSDLRKISAEVISEAGAEGNAIGGLSVGEPEEEMYRITDEVTDILPKDKPRYLMGVGTPWNILESIGLGIDMMDCVMPTRNARNAMLFTWQGVMNLKNEKWKRDFSPLDEFGTSFVDREYSKAYVRHLFVAREYLAKQIASIHNLAFYLDLVKVAREHIIAGDFYEWKKSVIPVLRQRL

SEQ ID NO: 53838 - protein, 376 aa, Chryseobacterium piscicola
  REGION 1..376: note = tr|A0A1N7K8Z3|A0A1N7K8Z3_9FLAO Queuine tRNA-ribosyltransferase OS=Chryseobacterium piscicola; OX = 551459 GN=tgt PE=3 SV=1
MNFFTIEKTSQGKARAGELNTAHGKVQTPIFMPVGTVASVKTVHQRELKDDIKAQIILGNTYHLYLRPGMDVMQAAGGLHQFMNWDLPILTDSGGFQVFSLSGTRKMSEEGVKFKSHIDGSVHLFTPEKSMEIQRQIGADIFMAFDECVAYPAHYNQVKKSMDMTHRWLKRCMDWNEKNPELYGYKQTFFPIVQGSTFSDLRKISAEVIAEAGAEGNAIGGLSVGEPEDELYRITDEVTDILPKEKPRYLMGVGTPWNILESIGLGIDMMDCVMPTRNARNGMLFTWNGVMNMKNERWKNDFSQLDEFGTSFVDREYSKAYVRHLFVSKEYLGKQIASIHNLAFYLDLVKVAREHILAGDFYEWKNSVVPILRQRL

SEQ ID NO: 53839 - protein, 376 aa, Chryseobacterium piscium
  REGION 1..376: note = tr|A0A3D9BVD6|A0A3D9BVD6_9FLAO Queuine tRNA-ribosyltransferase OS=Chryseobacterium piscium; OX = 333702 GN=tgt PE=3 SV=1
MNFFNIEKTSEGKARAGVLSTDHGTIQTPIFMPVGTVASVKTVHQREIKDDIKAQIILGNTYHLYLRPGMEVMEAAGGLHKFMNWDLPILTDSGGFQVFSLSGSRKMSEEGVKFKSHIDGSYHLFTPEKSMEIQRQIGADIFMAFDECVAYPSDYNQVKLSMEMTHRWLKRCIDWNAENPELYGHKQRFFPIVQGSTYSDLRKISAEVISEAGAEGNAIGGLSVGEPEEELYRITDEVTDILPKDKPRYLMGVGTPWNILESIGLGIDMMDCVMPTRNARNGMLFTWQGVINMKNEKWKKDFSPLDEFGTSFVDHEYSKAYVRHLFVSKEYLAKQIASIHNLAFYLDLVKVAREHILAGDFYQWKNSIVPVLRQRL

SEQ ID NO: 53840 - protein, 376 aa, unidentified
  source 1..376: note = Chryseobacterium polytrichastri
  REGION 1..376: note = tr|A0A1M6WYC2|A0A1M6WYC2_9FLAO Queuine tRNA-ribosyltransferase OS=Chryseobacterium polytrichastri; OX = 1302687 GN=tgt PE=3 SV=1
MKFFNIEKTSEGKARAGEIMTDHGKVQTPIFMPVGTVASVKTVHQRELKEDIKAQIILGNTYHLYLRPGMETMQEAGGLHKFMNWELPILTDSGGFQVFSLSGSRKMSEEGVKFKSHIDGSYHLFTPEKSMEIQRQIGADIFMAFDECVAYPSGYNQVKASMEMTHRWLKRCIDWNEKNPELYGHKQRFFPIVQGSTYSDLRKISAEVIAEAGAEGNAIGGLSVGEPEDELYRITDEVTDILPKDKPRYLMGVGTPWNILESIGLGIDMMDCVMPTRNARNAMLFTWQGVMNMKNEKWKQDFSPLDEFGTSFVDREYSKAYVRHLFVSKEYLGKQIASIHNLAFYLDLVKVAREHIIAGDFYQWKDSVVPILRQRL

SEQ ID NO: 53841 - protein, 376 aa, unidentified
  source 1..376: note = Chryseobacterium rhizoplanae
  REGION 1..376: note = tr|A0A521BY72|A0A521BY72_9FLAO Queuine tRNA-ribosyltransferase OS=Chryseobacterium rhizoplanae; OX = 1609531 GN=tgt PE=3 SV=1
MKFFNIEKTSEGKARAGEITTDHGKIQTPIFMPVGTVASVKTVHQRELKEDIKAQIILGNTYHLYLRPGMETMQDAGGLHKFMNWDLPILTDSGGFQVFSLASNRKMTEEGARFKSHIDGSYHMFSPERSMEIQRQIGADIFMAFDECTPYPCDYNQAKSSMELTHRWLKRCIEWTNDNPELYGYKQRLFPIVQGSTYSDLRKISAEVISEAGAEGNAIGGLSVGEPEEEMYRITDEVTDILPKEKPRYLMGVGTPWNILESIGLGIDMMDCVMPTRNARNAMLFTWQGVMNLKNEKWKRDFSPLDEFGTSFVDREYSKAYLRHLFVSKEYLAKQIASIHNLAFYLDLVKVAREHIIAGDFYEWKNSIVPVLRQRL

SEQ ID NO: 53842 - protein, 376 aa, Chryseobacterium rhizosphaerae
  REGION 1..376: note = tr|A0A3D9DK97|A0A3D9DK97_9FLAO Queuine tRNA-ribosyltransferase OS=Chryseobacterium rhizosphaerae; OX = 395937 GN=tgt PE=3 SV=1
MKFFNIEKTSEGKARAGEITTDHGKIQTPIFMPVGTVASVKTVHQRELKEDIKAQIILGNTYHLYLRPGMETMQAAGGLHKFMNWDLPILTDSGGFQVFSLASNRKMTEEGARFKSHIDGSYHMFSPERSMEIQRQIGADIFMAFDECTPYPCEYNQAKSSMELTHRWLKRCIEWTNDNPELYGHKQRLFPIVQGSTYSDLRKISAEVISEAGAEGNAIGGLSVGEPEEEMYRITDEVTDILPKEKPRYLMGVGTPWNILESIGLGIDMMDCVMPTRNARNAMLFTWQGVMNLKNEKWKQDFSPLDEFGTSFVDREYSKAYLRHLFVSKEYLAKQIASIHNLAFYLDLVKVAREHILAGDFYEWKNSVVPVLRQRL

SEQ ID NO: 53843 - protein, 376 aa, Chryseobacterium scophthalmum
  REGION 1..376: note = tr|A0A1N6HNM2|A0A1N6HNM2_9FLAO Queuine tRNA-ribosyltransferase OS=Chryseobacterium scophthalmum; OX = 59733 GN=tgt PE=3 SV=1
MNFFNIEKTSEGKARAGVLNTDHGTVQTPIFMPVGTVASVKTVHQREIKDDIKAQIILGNTYHLYLRPGMEVMEAAGGLHKFMNWDLPILTDSGGFQVFSLSGSRKMSEEGVKFKSHIDGSYHLFTPEKSMEIQRQIGADIFMAFDECVAYPAHYNQVKKSMEMTHRWLKRCIDWNAENPELYGYKQRFFPIVQGSTYSDLRKISAEVISEAGAEGNAIGGLSVGEPEEELYRITDEVTDILPKDKPRYLMGVGTPWNILESIGLGIDMMDCVMPTRNARNGMLFTWQGVINMKNEKWKKDFSPLDEFGTSFVDHEYSKAYVRHLFVSKEYLAKQIASIHNLAFYLDLVKVAREHILAGDFYQWKDSIVPVLRQRL

SEQ ID NO: 53844 - protein, 376 aa, unidentified
  source 1..376: note = Chryseobacterium sediminis
  REGION 1..376: note = tr|A0A5B2U3G2|A0A5B2U3G2_9FLAO Queuine tRNA-ribosyltransferase OS=Chryseobacterium sediminis; OX = 1679494 GN=tgt PE=3 SV=1
MKFFNIEKTSEGKARAGEITTDHGKIQTPIFMPVGTVASVKTVHQRELKEDIKAQIILGNTYHLYLRPGMETMQDAGGLHKFMNWDLPILTDSGGFQVFSLASNRKMTEEGARFKSHIDGSYHMFSPERSMEIQRQIGADIFMAFDECTPYPCDYNQAKSSMELTHRWLKRCIEWTNDNPELYGYKQRLFPIVQGSTYSDLRKISAEVISEAGAEGNAIGGLSVGEPEEEMYRITDEVTDILPKEKPRYLMGVGTPWNILESIGLGIDMMDCVMPTRNARNAMLFTWQGVMNLKNEKWKRDFSPLDEFGTSFVDREYSKAYLRHLFVSKEYLAKQIASIHNLAFYLDLVKVAREHIIAGDFYEWKNSVVPVLRQRL

SEQ ID NO: 53845 - protein, 377 aa, unidentified
  source 1..377: note = Chryseobacterium shandongense
  REGION 1..377: note = tr|A0A3G6R2P7|A0A3G6R2P7_9FLAO Queuine tRNA-ribosyltransferase OS=Chryseobacterium shandongense; OX = 1493872 GN=tgt PE=3 SV=1
MQKFFTIEKTSEGKARAGELTTDHGKIQTPIFMPVGTVASVKTVHQRELKEDIKAQIILGNTYHLYLRPGMDTMQEAGGLHKFMNWDLPILTDSGGFQVFSLASSRKMSEEGARFKSHIDGSYHMFSPEKSMEIQRQIGADIFMAFDECVAYPCEYNQAKSSMELTHRWLKRCIDWTENNPELYGHKQRLFPIVQGSTYSDLRKISAQVIAEAGAEGNAIGGLSVGEPEEEMYRITDEVTDILPKEKPRYLMGVGTPWNILESIGLGIDMMDCVMPTRNARNAMLFTWKGVMNMKNEKWKKDFSPLDEFGTSFVDREYSKAYVRHLFVSKEYLAKQIASIHNLAFYLDLVKVAREHILAGDFYEWKNSVVPVLRQRL

SEQ ID NO: 53846 - protein, 376 aa, Chryseobacterium shigense
  REGION 1..376: note = tr|A0A1N7IFB6|A0A1N7IFB6_9FLAO Queuine tRNA-ribosyltransferase OS=Chryseobacterium shigense; OX = 297244 GN=tgt PE=3 SV=1
MKFFNIEKTSEGKARAGEITTDHGKIQTPIFMPVGTVASVKTVHQRELKEDIKAQIILGNTYHLYLRPTMDIMQAAGGLHQFMNWDLPILTDSGGFQVFSLSKSRKMSEEGVKFKSHIDGSYHMFTPEKSMEIQRQIGADIFMAFDECTPYPCEYNQAKTSMELTHRWLKRCIDWTEENKEIYGHKQRLFPIVQGSTYSDLRKISAEVIAEAGAEGNAIGGLSVGEPEEEMYRITDEVTDILPKDKPRYLMGVGTPWNILESIGLGIDMMDCVMPTRNARNAMLFTWQGVMNMKNEKWKNDFSPLDEFGTSFVDREYSKAYVRHLFVSKEYLAKQIASIHNLAFYLDLVKVAREHIVAGDFYEWKRSVVPVLRQRL

SEQ ID NO: 53847 - protein, 376 aa, Chryseobacterium shigense; identical to SEQ ID NO: 53787
  REGION 1..376: note = tr|A0A376EK88|A0A376EK88_9FLAO Queuine tRNA-ribosyltransferase OS=Chryseobacterium shigense; OX = 297244 GN=tgt PE=3 SV=1

SEQ ID NO: 53848 - protein, 378 aa, Chryseobacterium soldanellicola
  REGION 1..378: note = tr|A0A1H1ACM5|A0A1H1ACM5_9FLAO Queuine tRNA-ribosyltransferase OS=Chryseobacterium soldanellicola; OX = 311333 GN=tgt PE=3 SV=1
MMQRFFTIEKTSEGKARAGEITTDHGKIQTPIFMPVGTVASVKTVHQRELKEDIKAQIILGNTYHLYLRPGMETMQDTGGLHKFMNWDLPILTDSGGFQVFSLASSRKMSEEGARFKSHIDGSYHMFSPEKSMEIQRQIGADIFMAFDECVAYPCDYNQVKSSMEMTHRWLKRCIDWNEKNPELYGYKQTFFPIVQGSTYSDLRKISAEVISEAGAEGNAIGGLSVGEPEEEMYRITDEVTDILPKEKPRYLMGVGTPWNILESIGLGIDMMDCVMPTRNARNAMLFTWQGVMNMKNEKWKKDFSPLDEFGTSFVDREYSKAYLRHLFVSKEYLAKQIASIHNLAFYLDLVKVAREHIIAGDFYQWKNSVVPVLRQRL

SEQ ID NO: 53849 - protein, 376 aa, Chryseobacterium soli
  REGION 1..376: note = tr|A0A086ABI0|A0A086ABI0_9FLAO Queuine tRNA-ribosyltransferase OS=Chryseobacterium soli OX=445961; GN = tgt PE=3 SV=1
MKFFNIEKTSEGKARAGELTTDHGKIQTPIFMPVGTVASVKTVHQRELKEDIKAQIILGNTYHLYLRPTMDTMQEAGGLHKFMNWDLPILTDSGGFQVFSLSKSRKMSEEGVKFKSHIDGSYHLFTPEKSMEIQRQIGADIFMAFDECVAYPSGYNEVKASMEMTHRWLKRCIDWNEANPELYGHKQRFFPIVQGSTYSDLRKISAEVISEAGAEGNAIGGLSVGEPEEELYRITDEVTDILPKDKPRYLMGVGTPWNILESIGLGIDMMDCVMPTRNARNAMLFTWQGVMNLKNEKWKKDFSPLDEFGTSFVDREYSKAYVRHLFVSKEYLAKQIASIHNLAFYLDLVKVAREHIVAGDFYQWKNSIVPILRQRL

SEQ ID NO: 53850 - protein, 378 aa, Chryseobacterium solincola
  REGION 1..378: note = tr|A0A0C1CUS9|A0A0C1CUS9_9FLAO Queuine tRNA-ribosyltransferase OS=Chryseobacterium solincola; OX = 510955 GN=tgt PE=3 SV=1
MKSQFFTINNTTPGKARAGTLSTDHGDIQTPIFMPVGTIASVKTVHQRELKDDIKAQIILGNTYHLNLRPKMDVMQAAGGLHKFMNWDLPILTDSGGYQVFSLSKSRKLNEEGVKFKSHIDGSTHFISPEKSMEIQRQIGADIFMAFDECTPYPCDYNLAKSSMEMTHRWLKRCISWTEENPEIYGHKQRLFPIVQGSTYSDLRKASAEFISEQNAEGNAIGGLSVGEPEDEMYRITNEVTDVLPKEKPRYLMGVGTPWNILESIGLGIDMMDCVMPTRNARNAMLFTWGGIMNMKNEKWKDDFSALDELGTSYVDSEYSKAYVRHLFASKEYLGKQIASVHNLAFYLDLVRVAREHIVAGDFYEWKDSIIPQLKNRL

SEQ ID NO: 53851 - protein, 376 aa, Chryseobacterium sp.
  REGION 1..376: note = tr|A0A0T0MAR8|A0A0T0MAR8_9FLAO Queuine tRNA-ribosyltransferase OS=Chryseobacterium sp. Leaf394; OX = 1736361 GN=tgt PE=3 SV=1
MSFFSIEKTSQGKARAGELNTAHGKVQTPIFMPVGTVASVKTVHQRELKEDIKAQIILGNTYHLYLRPGMEVMQEAGGLHKFMNWDLPILTDSGGFQVFSLSGTRKMSEEGVKFKSHIDGSVHLFTPEKSMEIQRQIGADIFMAFDECVAYPEEYNQVKQSMEMTHRWLKRCMDWNEKNPELYGHKQTFFPIVQGSTFSDLRKISAEVISEAGAEGNAIGGLSVGEPEEEMYRITDEVTDILPKEKPRYLMGVGTPWNILESIGLGIDMMDCVMPTRNARNAMLFTWQGVMNMKNEKWKKDFSPLDEFGTSFVDREYSKAYVRHLFVSKEYLAKQIASVHNLAFYLDLVKVAREHILAGDFYEWKNSVMPVLRQRL

SEQ ID NO: 53852 - protein, 376 aa, Chryseobacterium sp.
  REGION 1..376: note = tr|A0A316X3S1|A0A316X3S1_9FLAO Queuine tRNA-ribosyltransferase OS=Chryseobacterium sp. ISE14; OX = 475075 GN=tgt PE=3 SV=1
MKFFNIEKTSEGKARAGEITTDHGKIQTPIFMPVGTVASVKTVHQRELKEDIKAQIILGNTYHLYLRPGMETMQAAGGLHKFMNWDLPILTDSGGFQVFSLASNRKMTEEGARFKSHIDGSYHMFSPERSMEIQRQIGADIFMAFDECTPYPCEYNQAKSSMELTHRWLKRCIEWTNDNPELYGHKQRLFPIVQGSTYSDLRKISAEVISEAGAEGNAIGGLSVGEPEEEMYRITDEVTDILPKEKPRYLMGVGTPWNILESIGLGIDMMDCVMPTRNARNAMLFTWKGVMNLKNEKWKQDFSPLDEFGASFVDQEYSKAYLRHLFVSKEYLAKQIASIHNLAFYLDLVKVAREHIIAGDFYEWKNSVVPVLRQRL

SEQ ID NO: 53853 - protein, 378 aa, Chryseobacterium taeanense
  REGION 1..378: note = tr|A0A1G8KSJ1|A0A1G8KSJ1_9FLAO Queuine tRNA-ribosyltransferase OS=Chryseobacterium taeanense; OX = 311334 GN=tgt PE=3 SV=1
MMQKFFNIEKTSEGKARTGELTTDHGKIQTPIFMPVGTVASVKTVHQRELKEDIKAQIILGNTYHLYLRPGMEVMKEAGGLHKFMNWDLPILTDSGGFQVFSLASSRKMSEEGARFKSHIDGSYHMFSPEKSMEIQRQIGADIFMAFDECVAYPCEYNQAKSSMELTHRWLKRCIEWTENNPELYGHKQRLFPIVQGSTFSDLRKISAEVIAEAGAQGNAIGGLSVGEPEEEMYRITDEVTDILPKEKPRYLMGVGTPWNILESIGLGIDMMDCVMPTRNARNAMLFTWQGVMNMKNEKWKKDFSPLDEFGTSFVDREYSKAYVRHLFVSKEYLAKQIASIHNLAFYLDLVKVAREHIIAGDFYQWKNSVVPVLRQRL

SEQ ID NO: 53854 - protein, 377 aa, Chryseobacterium taichungense
  REGION 1..377: note = tr|A0A1H7ZKH8|A0A1H7ZKH8_9FLAO Queuine tRNA-ribosyltransferase OS=Chryseobacterium taichungense; OX = 295069 GN=tgt PE=3 SV=1
MQKFFNIEKTSEGKARAGELTTDHGKIQTPIFMPVGTVASVKTVHQRELKEDIKAQIILGNTYHLYLRPGMEVMQEAGGLHKFMNWDLPILTDSGGFQVFSLASSRKMSEEGARFKSHIDGSYHMFSPEKSMEIQRQIGADIFMAFDECVAYPCEYNQAKTSMELTHRWLKRCIEWTENNPELYGYKQRLFPIVQGSTFSDLRKISAEVIAEAAAEGNAIGGLSVGEPEEEMYRITDEVTDILPKEKPRYLMGVGTPWNILESIGLGIDMMDCVMPTRNARNAMLFTWKGVMNMKNEKWKKDFSPLDEFGTSFVDREYSKAYVRHLFVSKEYLAKQIASIHNLAFYLDLVKVAREHILAGDFYQWKNSVVPVLRQRL

SEQ ID NO: 53855 - protein, 376 aa, unidentified
  source 1..376: note = Chryseobacterium taihuense
  REGION 1..376: note = tr|A0A1G9KY72|A0A1G9KY72_9FLAO Queuine tRNA-ribosyltransferase OS=Chryseobacterium taihuense; OX = 1141221 GN=tgt PE=3 SV=1
MNFFNIEKASEGKARAGVLSTDHGNVQTPIFMPVGTVASVKTVHQREIKEDIKAQIILGNTYHLYLRPGMEVMQEAGGLHKFMNWDLPILTDSGGFQVFSLSGSRKMSEEGVKFKSHIDGSYHLFTPEKSMEIQRQIGADIFMAFDECVAYPCDYNQVKLSMEMTHRWLKRCMEWNENNPELYGYKQRFFPIVQGSTYSDLRKISAEVIAEAGAEGNAIGGLSVGEPEEEMYRITDEVTDILPKEKPRYLMGVGTPWNILESIGLGIDMMDCVMPTRNARNGMLFTWQGVINMKNEKWKKDFSPLDEFGTSFVDQEYSKAYVRHLFVSKEYLAKQIASIHNLAFYLDLVKVAREHILAGDFYQWKDSVVPVLRQRL

SEQ ID NO: 53856 - protein, 377 aa, Chryseobacterium taiwanense
  REGION 1..377: note = tr|A0A0B4EE70|A0A0B4EE70_9FLAO Queuine tRNA-ribosyltransferase OS=Chryseobacterium taiwanense; OX = 363331 GN=tgt PE=3 SV=1
MQKFFNIEKTSEGKARAGELTTDHGKIQTPIFMPVGTVASVKTVHQRELKEDIKAQIILGNTYHLYLRPGMETMQEAGGLHKFMNWDLPILTDSGGFQVFSLASSRKMSEEGARFKSHIDGSYHMFSPEKSMEIQRQIGADIFMAFDECVAYPCEYNQAKTSMELTHRWLKRCIEWTENNPELYGYKQRLFPIVQGSTFSDLRKISAEVIAEAGAEGNAIGGLSVGEPEEEMYRITDEVTDILPKEKPRYLMGVGTPWNILESIGLGIDMMDCVMPTRNARNAMLFTWKGVMNMKNEKWKKDFSPLDEFGTSYVDREYSKAYVRHLFVSKEYLAKQIASVHNLAFYLDLVKVAREHILAGDFYEWKNSVVPVLRQRL

SEQ ID NO: 53857 - protein, 377 aa, unidentified
  source 1..377: note = Chryseobacterium takakiae
  REGION 1..377: note = tr|A0A1M4VGF5|A0A1M4VGF5_9FLAO Queuine tRNA-ribosyltransferase OS=Chryseobacterium takakiae; OX = 1302685 GN=tgt PE=3 SV=1
MQKFFTIEKTSQGKARAGELTTDHGKIQTPIFMPVGTVASVKTVHQRELKEDIKAQIILGNTYHLYLRPGMDTMQEAGGLHQFMNWDLPILTDSGGFQVFSLASSRKMSEEGARFKSHIDGSYHMFSPEKSMEIQRQIGADIFMAFDECVAYPCEYNQAKSSMELTHRWLKRCIDWTENNPELYGHKQRLFPIVQGSTYSDLRKISAQVIAEAGAEGNAIGGLSVGEPEEEMYRITDEVTDILPKEKPRYLMGVGTPWNILESIGLGIDMMDCVMPTRNARNAMLFTWKGVMNMKNEKWKKDFSPLDEFGTSFVDREYSKAYVRHLFVSKEYLAKQIASIHNLAFYLDLVKVAREHILAGDFYEWKNSVVPILRQRL

SEQ ID NO: 53858 - protein, 378 aa, unidentified
  source 1..378: note = Chryseobacterium taklimakanense
  REGION 1..378: note = tr|A0A3G8WY80|A0A3G8WY80_9FLAO Queuine tRNA-ribosyltransferase OS=Chryseobacterium taklimakanense; OX = 536441 GN=tgt PE=3 SV=1
MEKKFFEIEKTTESKARAGVITTDHGQVQTPIFMPVGTVASVKTVHQRELKEDIKAQIILGNTYHLYLRPKMDVMQEAGGLHKFMNWDLPILTDSGGYQVFSLSDTRKITEEGSKFKSHIDGSYHFISPEKSMEIQRQIGGDIFMAFDECTPYPCEYNQAKESMEMTHRWLKRCIKWCDENPEIYGHKQRLFPIVQGSTYSDLRRISAEFISEQNAEGNAIGGLSVGEPEDEMYRITNEVTDILPMEKPRYLMGVGTPWNILESIGLGVDMMDCVMPTRNARNGMLFTWQGVINIKNEKWKNDFSQLDEFGTSFVDREYSKAYVRHLFVSREYLAKQIASIHNLAFYLDLVRVAREHILAGDFYKWKDSVVPVLRHRL

SEQ ID NO: 53859 - protein, 378 aa, unidentified
  source 1..378: note = Chryseobacterium taklimakanense
  REGION 1..378: note = tr|A0A239XMC4|A0A239XMC4_9FLAO Queuine tRNA-ribosyltransferase OS=Chryseobacterium taklimakanense; OX = 536441 GN=tgt PE=3 SV=1
MEKKFFEIEKTTESKARAGVITTDHGQVQTPIFMPVGTVASVKTVHQRELKEDIKAQIILGNTYHLYLRPKMDVMQEAGGLHKFMNWDLPILTDSGGYQVFSLSDTRKITEEGSKFKSHIDGSYHFISPEKSMEIQRQIGGDIFMAFDECTPYPCEYNQAKESMEMTHRWLKRCIKWCDENPEIYGHRQRLFPIVQGSTYSDLRKISAEFISEQNAEGNAIGGLSVGEPEDEMYRITNEVTDILPIEKPRYLMGVGTPWNILESIGLGVDMMDCVMPTRNARNGMLFTWQGVINIKNEKWKNDFSQLDEFGTSFVDREYSKAYVRHLFVSREYLAKQIASIHNLAFYLDLVRVAREHILAGDFYQWKDSVVPVLRHRL

SEQ ID NO: 53860 - protein, 378 aa, Chryseobacterium treverense
  REGION 1..378: note = tr|A0A1I3M4J0|A0A1I3M4J0_9FLAO Queuine tRNA-ribosyltransferase OS=Chryseobacterium treverense; OX = 631455 GN=tgt PE=3 SV=1
MKSQFFTINNTTPGKARAGTLSTDHGNIQTPIFMPVGTVASVKTVHQRELKDDIKAQIILGNTYHLNLRPKMDVMQAAGGLHKFMNWDLPILTDSGGYQVFSLSKSRKLNEEGVKFKSHIDGSTHFISPEKSMEIQRQIGADIFMAFDECTPYPCDYNLAKSSMEMTHRWLKRCISWTEENSEIYSHKQRLFPIVQGSTYSDLRKASAEFISEQNAEGNAIGGLSVGEPEDEMYRITNEVTDVLPKEKPRYLMGVGTPWNILESIGLGIDMMDCVMPTRNARNAMLFTWGGIMNMKNEKWKDDFSALDELGTSYVDSEYSKAYVRHLFASKEYLGKQIASVHNLAFYLDLVRVAREHIIAGDFYEWKDSIIPQLKNRL

SEQ ID NO: 53861 - protein, 376 aa, Chryseobacterium ureilyticum; identical to SEQ ID NO: 53783
  REGION 1..376: note = tr|A0A1N7NBR8|A0A1N7NBR8_9FLAO Queuine tRNA-ribosyltransferase OS=Chryseobacterium ureilyticum; OX = 373668 GN=tgt PE=3 SV=1

SEQ ID NO: 53862 - protein, 376 aa, unidentified
  source 1..376: note = Chryseobacterium viscerum
  REGION 1..376: note = tr|A0A316X3Q8|A0A316X3Q8_9FLAO Queuine tRNA-ribosyltransferase OS=Chryseobacterium viscerum; OX = 1037377 GN=tgt PE=3 SV=1
MKFFNIEKTSEGKARAGEITTDHGKIQTPIFMPVGTVASVKTVHQRELKEDIKAQIILGNTYHLYLRPGMETMQDAGGLHKFMNWDLPILTDSGGFQVFSLASSRKMTEEGARFKSHIDGSYHMFSPERSMEIQRQIGADIFMAFDECTPYPCEYNQAKSSMELTHRWLKRCIEWTNNNPELYGYKQRLFPIVQGSTYSDLRKISAEVISEAGAEGNAIGGLSVGEPEEEMYRITDEVTDILPKDKPRYLMGVGTPWNILETIGLGIDMMDCVMPTRNARNAMLFTWQGVMNLKNEKWKRDFSPLDEFGTSFVDREYSKAYLRHLFVSKEYLAKQIASIHNLAFYLDLVKVAREHIIAGDFYEWKKSVVPVLRQRL

SEQ ID NO: 53863 - protein, 377 aa, Chryseobacterium wanjuense
  REGION 1..377: note = tr|A0A1I0RKT2|A0A1I0RKT2_9FLAO Queuine tRNA-ribosyltransferase OS=Chryseobacterium wanjuense; OX = 356305 GN=tgt PE=3 SV=1
MQKFFTIEKTSEGKARAGELTTDHGKIQTPIFMPVGTVASVKTVHQRELKEDIKAQIILGNTYHLYLRPGMETMQDAGGLHKFMNWDLPILTDSGGFQVFSLASSRKMSEEGARFKSHIDGSYHMFSPEKSMEIQRQIGADIFMAFDECVAYPCEYNQAKLSMELTHRWLKRCIEWTENNPELYGYKQRLFPIVQGSTYSDLRKISAEVISEAGAEGNAIGGLSVGEPEEEMYRITDEVTDILPKEKPRYLMGVGTPWNILESIGLGIDMMDCVMPTRNARNAMLFTWKGVMNLKNEKWKKDFSPLDEFGTSFVDKEYSKAYLRHLFVSKEYLAKQIASIHNLAFYLDLVKVAREHIMAGDFYEWKNSVVPVLRQRL

SEQ ID NO: 53864 - protein, 376 aa, unidentified
  source 1..376: note = Chryseobacterium xixisoli
  REGION 1..376: note = tr|A0A4V3H2M1|A0A4V3H2M1_9FLAO Queuine tRNA-ribosyltransferase OS=Chryseobacterium xixisoli; OX = 1476462 GN=tgt PE=3 SV=1
MKFFEIEKTSESKARAGVINTDHGQIQTPIFMPVGTVASVKTVHQRELKEDIKAQIILGNTYHLMLRPTMDIMEKAGGLHQFMNWDLPILTDSGGYQVFSLAKSRKITEEGVKFKSHIDGSLHFMSPEVSMQIQRQIGADIFMAFDECIAYPSDYNAVKTSMELTHRWLKRCITWTEENKELYGHKQRLFPIVQGSCFSDLRKISAEVISEAGAEGNAIGGLSVGEPEPEMYRITNEVTDILPKDKPRYLMGVGTPWNILESIGFGVDMMDCVMPTRNARNAMLFTWQGVMNMKNERWKEDFSPLDEFGTSYVDSAYSKAYVRHLFVSKEYLAKQIASIHNLAFYLDLVKVAREHIVAGDFYQWKDSIIPQLKTRL

SEQ ID NO: 53865 - protein, 376 aa, unidentified
  source 1..376: note = Chryseobacterium zeae
  REGION 1..376: note = tr|A0A1N6ISQ4|A0A1N6ISQ4_9FLAO Queuine tRNA-ribosyltransferase OS=Chryseobacterium zeae; OX = 1416779 GN=tgt PE=3 SV=1
MKFFEIEKTSESKARAGVITTDHGQIQTPIFMPVGTVASVKAVHQRELKEDIKAQIILGNTYHLMLRPKMDIMEQAGGLHQFMNWDRPILTDSGGYQVFSLAKSRKITEEGVKFKSHIDGSMHFMSPEVSMQIQRQIGADIFMAFDECIAYPSDYNAVKTSMELTHRWLKRCIDWTEENKELYGHKQRLFPIVQGSCYSDLRKISAEVISEAGAEGNAIGGLSVGEPEDEMYRITNEVTDILPKDKPRYLMGVGTPWNILESIGFGVDMMDCVMPTRNARNAMLFTWQGVMNMKNEKWKADFSPLDEFGTSYVDQEYSKAYVRHLFVAKEYLAKQIASIHNLAFYLDLVKVAREHIVAGDFYQWKDQVIPQLKQRL

SEQ ID NO: 53866 - protein, 376 aa, unidentified
  source 1..376: note = Chryseolinea flava
  REGION 1..376: note = tr|A0A364XZ68|A0A364XZ68_9BACT Queuine tRNA-ribosyltransferase OS=Chryseolinea flava OX=2059302; GN = tgt PE=3 SV=1
MKFQLTATDPRSWARAGTLQTDHGEIQTPIFMPVGTAGSVKAIHQRELEHDIQAQIILGNTYHLYLRPGTEILEKAGGLHKFNGWNKPILTDSGGYQVYSLAENRKIVEEGVTFKSHIDGSKHHFTPESVMDIQRTIGADIIMAFDECTPYPCEYRYAKSSMGLTHQWLKRCVERIRTTEPKYGYEQVLFPIVQGSVFKDLREESATFIASQDQPGNAIGGLSVGEPHEDMYAMTSLVCSILPKEKPRYLMGVGTPENILECIALGIDMFDCVLPTRNARNGMLFTTEGIINIRNEKWKSDFSPIDAALGGYASTFYSRAYLRHLVINKEILGAQIASIHNLTFYLWLVKEARQQIIAGTFASWKEMMVKKVSRRL

SEQ ID NO: 53867 - protein, 376 aa, unidentified
  source 1..376: note = Chryseolinea serpens
  REGION 1..376: note = tr|A0A1M5N8C7|A0A1M5N8C7_9BACT Queuine tRNA-ribosyltransferase OS=Chryseolinea serpens OX=947013; GN = tgt PE=3 SV=1
MKFKLTSVDPKSAARTGILQTGHGEIQTPIFMPVGTAGSVKAVHQRELEYDVQAQIILGNTYHLYLRPGTDLLERAGGLHRFNGWSKPILTDSGGYQVYSLGANRKITEEGVIFKSHIDGSKHTFSPESVMDIQRIIGADIVMAFDECTPYPCEYAYAKNSMNMTHRWLKRCVDRMAETEPRYGYEQALFPIVQGSVYNDLRKMSAEFIASQDQPGNAIGGLSVGEPHEDMYAMTSLVCGILPQDKPRYLMGVGTPENILECIALGIDMFDCVMPTRNARNGMLFTTQGIINIRNERWKDDLSPIDATLGGYVSTFHSKAYLRHLIINKEILGAQIASIHNLTFYLWLVSEARKQIEAGTFTTWKNNMVKIVSQRL

SEQ ID NO: 53868 - protein, 376 aa, unidentified
  source 1..376: note = Chryseolinea sp.
  REGION 1..376: note = tr|A0A385SKD2|A0A385SKD2_9BACT Queuine tRNA-ribosyltransferase OS=Chryseolinea sp. KIS68-18; OX = 2321403 GN=tgt PE=3 SV=1
MKFKLTSVDPKSAARTGILQTGHGEIQTPIFMPVGTAGSVKAVHQRELELDVQAQIILGNTYHLYLRPGTELLERAGGLHRFNGWSKPILTDSGGYQVYSLGANRKITEEGVIFKSHIDGSKHTFSPESVMDIQRTIGADIVMAFDECTPYPCEYAYAKDSMNMTHRWLKRCVDRMAQTEPRYGYEQTLFPIVQGSVYNDLRKMSAEFIAAQDQPGNAIGGLSVGEPHEDMYAMTSLVCGILPQDKPRYLMGVGTPENILECIALGIDMFDCVMPTRNARNGMLFTTQGIINIRNERWKDDLSPIDATLGGYVSTFHSKAYLRHLIINKEILGAQIASIHNLTFYLWLVSEARKQIEAGTFTTWKNNMVKIVSQRL

SEQ ID NO: 53869 - protein, 379 aa, unidentified
  source 1..379: note = Chryseomicrobium excrementi
  REGION 1..379: note = tr|A0A2M9F262|A0A2M9F262_9BACL Queuine tRNA-ribosyltransferase OS=Chryseomicrobium excrementi; OX = 2041346 GN=tgt PE=3 SV=1
MTAIRYELLKKDKQTGARLGIVHTPHGSFETPTFMPVGTQATVKTMSPEEIKGMDAGIILSNTYHLWLRPGHEIIREAGGLHKFMNWDRAILTDSGGFQVFSLSDMRKIEEEGVHFRNHLNGDKLFLSPEKSMEVQNALGSDIMMAFDECPPYPASHEYMKASVERTSRWAERCMTAHTNTDKQGLFGIIQGGEYEDLRRQSAQDIISLDFPGYAIGGLSVGEPKDVMNRVLEFTTPLMPDNKPRYLMGVGSPDSLIDGAIRGVDMFDCVLPTRIARNGTMFTKKGRLVIKGAKFARDFGPVDETCDCYTCKNYSRAYLRHLFKADETFGLRLASTHNLHFLMNLMKEVRQAIREDRLLDFKEEFFEEYGYNKPNAKNF

SEQ ID NO: 53870 - protein, 370 aa, unidentified
  source 1..370: note = Chrysiogenales bacterium
  REGION 1..370: note = tr|A0A524K2M7|A0A524K2M7_9BACT Queuine tRNA-ribosyltransferase OS=Chrysiogenales bacterium; OX = 2528039 GN=tgt PE=3 SV=1
MFFEAIARDSRCSARTGRVTTKNGAFDTPAFMPVGTAGSVKALTPSQLDDAGAQIILANTYHLFLRPGTDVIKQFASLHRFMAWNKPILTDSGGFQIFSLQANARVSENGVRFKSHLDGTLFTLTPEDVVDIQNILDSDIQMVLDHFATHPASRAQDEKALKLTGLWAARARERFLKTKRGNFQFGIIQGGLHSDLRERSLYELAALDFEGYAIGGLSVGESLDDFQRILTPLAPQLPAAKPRYLMGSGTPEDILFAVENGIDMFDCVLPSRNARNGTLFTSRGIVKIKNQRYKCDQQPLDAGCDCYTCRNFSRAYLRHLFISREILASILNTIHNIHFYLDFMAKIRYAIKSHKFIEFKEDFLALYKGD

SEQ ID NO: 53871 - protein, 691 aa, unidentified
  source 1..691: note = Chthoniobacter flavus
  REGION 1..691: note = tr|B4D4C4|B4D4C4_9BACT Queuine tRNA-ribosyltransferase OS=Chthoniobacter flavus Ellin428; OX = 497964 GN=tgt PE=3 SV=1
MDTSLSHGRLNFHVEAHATGSSARAGTFRTAHSHVLTPLFMPVGTQATVKGQLTQSLEDAGSQILLANTYHLLLRPGPEVFRRIGGIHEFMSWRHSVLTDSGGFQIFSLPHSRAMTEEGAAFKSYLDGRTILLSPELSIETQKAIGSDIMMALDQCIPSTADAATARAALGITQRWAARSLEARGDSPQALFAIVQGALFPELRRESAAGLCEMPFDGFAIGGLAVGESRSERQDTCELTTQFLPQDRPRYLMGVGTPLDILEAVHRGVDMFDCIIPTQVAQRGGAFTSRGFLQLRRGVYKFAEAPLDPLCHCPTCTHFSRAYLHHLTKTGEHLGWQLIGQHNIYFYHQLMRDIRQSIFEDRFLALYREKRAFLHEPDADHPIKKQKPRRQMAFHRGNYEVHRAPEGFCSIRQISSGEIMHSRTPPMVEAHRLYIEQSDLAARLQISAEENTGASPEPLVIWDVGLGAAANAMAAILCYESQAAAGPVRPMHLISFENDLDPLRLAFQHNREFTYLRHAATAGILDEGRWQSPRHPGLSWTLVQGDFLASISRAPAPPDLIFFDMFSSKTDGAQWTLSAFREIFAACAGRAAELFTYTCSTPIRAALLASGFHIARGCGTVDKTDTTIALTPAALRTLSHLGYELLGAEWLAKWTRSSAKFPADVPADQQPAFEQAILGHPQFRLSPSIST

SEQ ID NO: 53872 - protein, 368 aa, unidentified
  source 1..368: note = Chthoniobacter flavus
  REGION 1..368: note = tr|B4DAJ0|B4DAJ0_9BACT Queuine tRNA-ribosyltransferase OS=Chthoniobacter flavus Ellin428; OX = 497964 GN=tgt PE=3 SV=1
MFTLLKADTATKARRGRLVTNHGVIETPIFMPVGTQGSVKAVSPAELREVHAQIILGNTYHLFVRPGMDVMKHFGGLHQFMNWDGPILTDSGGFQVFSLAKLRKITEEGVHFQNHLDGAPCFLGPREAMEIQAALGSDIAMLFDECPPFPCERDYAADSLARTLRWAARCKEVPTPGMKFGIVQGSSYPDLRRESAEALVSIGFDGYAVGGVSVGEPEPEMMAAIEASEPYLPADRPRYAMGLGTPPQMVEMVARGVDMFDCVLPTRLARNGTAFTAQGTVNLKNSPYIYDKGPIEEGCTCEACRNFSRGYLRHLVKAEEILGLRLISLHNLHFYLNLMWRMRQEIENGTFATFRQNFVTNYRHHREV

SEQ ID NO: 53873 - protein, 320 aa, unidentified
  source 1..320: note = Chthoniobacter sp.
  REGION 1..320: note = tr|A0A257X553|A0A257X553_9BACT Queuine tRNA-ribosyltransferase (Fragment) OS=Chthoniobacter sp. 12-60-6 OX=1970334 GN=B7Z47_04880 PE=3 SV=1
MSPSRLQFQLDAQASDSRARATTFHTLHGTIQSPLFMPVGTQATVKAQTPESLHTSGSQILLANTYHLLLRPGPDVFTKLGGIHKFMNWPGSVLTDSGGYQIFSLPHSRSMTEKGAVFQSYVDGQRILLSPELSIQTQRAIGSDIMMVLDQCIPSTADEKTTRAALQITQRWALRSLAAREDSPHSMFGIVQGALYPHLRRESAEGLMQIDFDGFAIGGLAVGEEKSEREDVCELTAALLPADRPRYLMGVGTPVDVLEAVHRGVDMFDCIIPTQVAKRGTAFTSRGIVELRRSAYKFSEDRLDPACTCPVCATHSRAYL

SEQ ID NO: 53874 - protein, 686 aa, unidentified
  source 1..686: note = Chthoniobacterales bacterium
  REGION 1..686: note = tr|A0A2W5Z0M0|A0A2W5Z0M0_9BACT Queuine tRNA-ribosyltransferase OS=Chthoniobacterales bacterium; OX = 2201154 GN=tgt PE=3 SV=1
MESSRLNFHLDAQATGSRARAATFRTLHNEVLTPLFMPVGTQATVKAQLPQTLEEAGSQILLVNTYHLLLRPGPEVFRRTGGIHGFMSWNRSVLTDSGGFQIFSLPHSRAITEEGAVFQSYLDGQTILLSPEVSIETQKAIGSDIMMALDHCIASTADEATARSAIEMTHRWAARSLAARGDSAQSIFAIVQGALFPELRRESAAQLSAMAFDGYAIGGLAVGESKDEREEMCEFTTELLPRDKPRYLMGVGTPLDILEAVHRGVDMFDCIMPTQLAQRGAVFTSRGFLQMRRSVYKYSEEKLDPTCNCPTCSRYSRAYLHHLTKTGETLGWQLLGKHNIHFYHQLMREIRASILADRFLELYREKRAFLHEADMDNPIRAQKSKRTKVLRLGNYEVHKAWEGFASIRQISSGEIMHSRTAPMEEARTLYIEQSNLAERLRLAANEDPATATTLIIWDVGLGAAANAMAAISCYEEQAAAGPVRPLRVVSFENDLDSLRLAFRHNRDFPYLRHSGPAAILTDGHWQSRQLPGLSWSLVPGDFLATLAHAPGPPDLIFYDMFSTRTSADQWTLNAFHRVFESCEENAAELFTYSCSTSNRASLLAAGFYVAKGRNAGEKLETTIALTPSALHLSNSSRHELLSTDWIAKWNRSAAKFPDEISPNDYSAFEQAIRSHQQFENSSQKRN

SEQ ID NO: 53875 - protein, 385 aa, unidentified
  source 1..385: note = Chthoniobacterales bacterium
  REGION 1..385: note = tr|A0A2W5YPK8|A0A2W5YPK8_9BACT Queuine tRNA-ribosyltransferase OS=Chthoniobacterales bacterium; OX = 2201154 GN=tgt PE=3 SV=1
MFELLKNEGKARRGRLTTAHGAIETPAFMPVGTQGSVKAVSPQELRELKAQIILGNTYHLFVRPGMEVIRYFGGLHRFMNWDGPILTDSGVYQIFSLAKLRKITEEGVAFQNHLDGTPTFISPEIAMEIQATLGSDIAMVLDECPPWPCEYDYAARSLEMTHRWAKRSKEISETGFRKPEYSDLSAIRNPKSQMVFGIVQGGTFEDLRRSSAQALAAMEFDGYAIGGVSVGEPEPEMMQAVEWSAPHLPENKPRYAMGLGTPPQLIELIARGVDMFDCVLPTRLARNGTAFTASGTLNLKNAEFTLQTGPLEEGCGCPACRDFSRGYIRHLVKAEEILGLRLITLHNLHFYLELMSRARDAIDHGTFPAFRAEFVSGYQKRAEPE

SEQ ID NO: 53876 - protein, 381 aa, Chthonomonas calidirosea
  REGION 1..381: note = tr|S0EWU1|S0EWU1_CHTCT Queuine tRNA-ribosyltransferase OS=Chthonomonas calidirosea (strain DSM 23976 / ICMP 18418 / T49) OX=1303518 GN=tgt; PE = 3 SV=1
MITSPSREEGVLGRCGLLYLPHATVETPVFMPVGTQATVKAMTPDELEEIGFGLILGNVYHLHLRPGEQLIARAGGLHRFEGWSGALLTDSGGYQVFSLSGLRRIGEEGVEFQSHIDGSRHLFTPQIVIEIERQLGADIIMAFDECPASTVSEEYIRQAMERTHRWAKICLEEHIRHGRMAVGGWPQALFGIVQGGISYELRAESARVLTELDFDGFAIGGLAVGEEAAVRNEIVAWTVRFLPENKPRYLMGVGTPVDILEAVRRGVDMFDCVLPTRNARNAQAFISEGVINLRNARYEQDFTPLDPKCECRVCRRHTRAYIRHLFKAKEILGPRLVTYHNLAFYHRLMRSIRHHLREGTFEVFYKSFRSTYQTEEETIDE

SEQ ID NO: 53877 - protein, 376 aa, unidentified
  source 1..376: note = Ciceribacter sp.
  REGION 1..376: note = tr|A0A4Q2TFU4|A0A4Q2TFU4_9RHIZ Queuine tRNA-ribosyltransferase OS=Ciceribacter sp. F8825; OX = 2509717 GN=tgt PE=3 SV=1
MHEKFEFKLKATSGKARLGEISMPRGVIRTPAFMPVGTVGTVKAMYLDQVRELGADIILGNTYHLMLRPGPERVARLGGLHELIRWPHPILTDSGGFQVMSLSGLRKLDEKGVTFKSHVDGSTHHMSPERSIEIQGLLDSDIQMQLDECVALPAEPKEIERAMEMSLRWAERCRIAFGEQPGKAMFGIVQGGDIPDLRIRSAEGLKQLDLKGYAVGGLAVGEPQAVMLDMLDITLPVLPSEKPRYLMGVGTPDDILKSVALGVDMFDCVMPTRSGRHGLAFTRRGKVNIRNARHAEDMRPLDEQSNCPASRDYSRAYLHHLVRSNEALGGMLLSWNNLAYYQELMQGIRKSIEEGRFADFMAETQEMWAKGDVEAA

SEQ ID NO: 53878 - protein, 375 aa, Citreicella sp.
  REGION 1..375: note = tr|A0A355QQ89|A0A355QQ89_9RHOB Queuine tRNA-ribosyltransferase OS=Citreicella sp. OX=1960284; GN = tgt PE=3 SV=1
MSQTSFTLHATDGAARTGVIATPRGEIRTPAFMPVGTAATVKAMLPESVRATGADILLGNTYHLMLRPGAERIDRLGGLHRFMNWDRPILTDSGGFQVMSLAGLRKLTEQGVTFRSHVDGSKHMLSPERSMEIQRLLGSDIVMAFDECPALPADRARIESSMRLSMRWAQRSRDAFGDRPGHMLFGIQQGGLEPDLREESAKALTGIGFDGYAVGGLAVGEGQEAMFACLDHAPGHLPVDKPRYLMGVGKPDDIVGAVKRGIDMMDCVLPSRSGRTGQVFTRQGVVNIKNARHQDDPRPLDEACSCPACRGYSRAYLHHVFRAQEMISGMLLTWHNLHYYQDLMQGMRDAIAEGRFAAWEAKFHADRAQGDIPPL

SEQ ID NO: 53879 - protein, 375 aa, Citreicella sp.
  REGION 1..375: note = tr|D0D416|D0D416_9RHOB Queuine tRNA-ribosyltransferase OS=Citreicella sp. SE45 OX=501479; GN = tgt PE=3 SV=1
MTRTSFTLTATDGAARTGVISTPRGEIRTPAFMPVGTAATVKAMMPENVRATGADILLGNTYHLMLRPTAERIARLGGLHRFMNWERPILTDSGGFQVMSLAALRKLTEEGVSFRSHIDGSRHMLTPERSMEIQRLLGSDIVMAFDECPALPADRTRIEESMRLSMRWAQRSRDAFGDRPGHMLFGIQQGGLEPDLREESAAALKAIGFDGYAVGGLAVGEGQEAMFGCLDHAPGFLPEDKPRYLMGVGKPDDIVGAVKRGIDMMDCVLPTRSGRTGQAWTRHGVVNIKNARHSDDPRPLDEQCSCPACTGYSRAYLHHVYRAGEMISGMLLSWHNLQYFQEIMQGMRDAIAEGRFAAWEAEFHAGRAEGDIGPL

SEQ ID NO: 53880 - protein, 381 aa, Citreimonas salinaria
  REGION 1..381: note = tr|A0A1H3GVE6|A0A1H3GVE6_9RHOB Queuine tRNA-ribosyltransferase OS=Citreimonas salinaria OX=321339; GN = tgt PE=3 SV=1
MPARDDMALTDFQVLARDGRARTGAITTPRGTIRTPAFMPVGTAATVKGMMPESVRDTGADILLGNTYHLMLRPGAERIDRLGGLHRFMNWDRPILTDSGGFQVMSLAGLRKLTEAGVTFKSHIDGSKHVLSPETSMENQRLLGSDIVMCFDECPALPADRARIEDSMRLSMRWAQRSRDAFGDRPGHMLFGIQQGGLEQDLREESAEALRAIGFDGYAIGGLAVGEGQEAMFGCLDFAPDQLPQDRPRYLMGVGKPDDIVGAVKRGVDMMDCVLPSRSGRTGQAWTRRGQVNLKNARHADDPRPLDEDCTCPACRNYSRAYLHHVQRAGEMIAGMLLTWHNLHYYQQLMNEMREAIAAGAFAAFENRFFAERAEGDIERR

SEQ ID NO: 53881 - protein, 459 aa, Citricoccus muralis
  REGION 1..459: note = tr|A0A3D9LHY3|A0A3D9LHY3_9MICC Queuine tRNA-ribosyltransferase OS=Citricoccus muralis OX=169134; GN = tgt PE=3 SV=1
MTHQTSPRNPAHAPGTNATPDAGPAPAAATPRDFSFGVGSRLTGPDGQPRPGRTGTITTPHGTIQTPAFIPVATQATVKAVLPEAMAELGAQALLANAYHLYLQPGADLLDEAGGLGQFMNWHGPTFTDSGGFQVMSLGSGFKKVIDMAGPKAPSGQGADDAVAPGKERLANVDEDGVWFKSHLNGDQHRFTPEVSVGIQHQLGADIMFAFDELTTLHNSRGYQEEALERTRRWAQRCLDEHARLTGERAAKPYQALFGVIQGAQYEDLRRQACGDLAAMRTGFPDGGGSGGDALEHGFDGYGIGGALEKANLGTIVGWCAEELPEDKPRHLLGISEPDDLFTSVENGADTFDCVSPTRVARTGAFYTADGRFNLPGAKYKRDFSPLEEGCDCYTCAHYTRAYIHHLIKAKEMVAHTLISIHNERFTVRLVDRIRVSIQDGTFWDLKDEVLGRYYAPKA

SEQ ID NO: 53882 - protein, 444 aa, Citricoccus sp.
  REGION 1..444: note = tr|A0A4V1HEU7|A0A4V1HEU7_9MICC Queuine tRNA-ribosyltransferase OS=Citricoccus sp. SGAir0253; OX = 2567881 GN=tgt PE=3 SV=1
MTDPTPGGAPGPAPAPASPRQVGFAVGTRLAGPRGEARAGRTGTLTTPHGTIATPAFIPVATQATVKAVLPEAMAGLGAQALLANAYHLYLQPGPDILDEAGGLGRFMNWPGPTFTDSGGFQVMSLGSGFKKVIDMKGPEAPSGRGADDAVAPGKERLATVDEDGVWFRSHLNGDRHRFTPEVSVGIQHQLGADVMFAFDELTTLHNSRGYQEEALERTRRWAQRCLDEHARLTGERAARPYQALFGVIQGAQYEDLRRKACRDLAAMTADFPDGEGGRMAHGFDGYGIGGALEKENLGTIVGWCVEELPEDRPRHLLGISEPDDLFTAVENGADTFDCVSPTRVARTGAFYTADGRYNLPGARYKRDFAPLEEGCDCYTCAHYTRAYIHHLIKAKEMVSHTLISIHNERFTVRLVDRMRAAIEDGTFWDLKDAVLGRYYAASR

SEQ ID NO: 53883 - protein, 375 aa, Citrobacter amalonaticus
  REGION 1..375: note = tr|A0A2S4S0K7|A0A2S4S0K7_CITAM Queuine tRNA-ribosyltransferase OS=Citrobacter amalonaticus; OX = 35703 GN=tgt PE=3 SV=1
MKFELDTTDGRARRGRLVFDRGVVETPAFMPVGTYGTVKGMTPEEVEATGAQIILGNTFHLWLRPGQEIMKLHGDLHDFMQWKGPILTDSGGFQVFSLGDIRKITEQGVHFRNPINGDPIFLDPEKSMEIQYDLGSDIVMIFDECTPYPADRDYAKRSMEMSLRWAKRSRDRFDGLGNKNALFGIIQGSVYEDLRDISVKGLVEIGFDGYAVGGLAVGEPKEDMHRILEHVCPQIPADKPRYLMGVGKPEDLVEGVRRGIDMFDCVMPTRNARNGHLFVTDGVVKIRNAKYKSDTSPLDAECDCYTCRNYSRAYLHHLDRCNEILGARLNTIHNLRYYQRLMAGLRKAIEEGKLESFVTDFYQRQGRPVPPLNVD

SEQ ID NO: 53884 - protein, 375 aa, Citrobacter amalonaticus
  REGION 1..375: note = tr|A0A0X8S5R1|A0A0X8S5R1_CITAM Queuine tRNA-ribosyltransferase OS=Citrobacter amalonaticus; OX = 35703 GN=tgt PE=3 SV=1
MKFELDTTDGRARRGRLVFDRGVVETPAFMPVGTYGTVKGMTPEEVEATGAQIILGNTFHLWLRPGQEIMKLHGDLHDFMQWKGPILTDSGGFQVFSLGDIRKITEQGVHFRNPINGDPIFLDPEKSMEIQYDLGSDIVMIFDECTPYPADWDYAKRSMEMSLRWAKRSRDRFDGLGNKNALFGIIQGSVYEDLRDISVKGLVEIGFDGYAVGGLAVGEPKEDMHRILEHVCPQIPADKPRYLMGVGKPEDLVEGVRRGIDMFDCVMPTRNARNGHLFVTDGVVKIRNAKHKSDTSPLDAECDCYTCRNYSRAYLHHLDRCNEILGARLNTIHNLRYYQRLMAGLRKAIEEGKLESFVTDFYQRQGRPVPPLNVD

SEQ ID NO: 53885 - protein, 375 aa, Citrobacter braakii
  REGION 1..375: note = tr|A0A1R0G055|A0A1R0G055_CITBR Queuine tRNA-ribosyltransferase OS=Citrobacter braakii OX=57706; GN = tgt PE=3 SV=1
MKFELDTTDGRARRGRLVFDRGVVETPAFMPVGTYGTVKGMTPEEVEATGAQIILGNTFHLWLRPGQEIMKLHGDLHDFMQWKGPILTDSGGFQVFSLGDIRKITEQGVHFRNPINGDPIFLDPEKSMEIQYDLGSDIVMIFDECTPYPADWDYAKRSMEMSLRWAKRSRDRFDSLGNKNALFGIIQGSVYEDLRDISVKGLVDIGFDGYAVGGLAVGEPKEDMHRILEHVCPQIPADKPRYLMGVGKPEDLVEGVRRGIDMFDCVMPTRNARNGHLFVTDGVVKIRNAKHKSDTSPLDAECDCYTCRNYSRAYLHHLDRCNEILGARLNTIHNLRYYQRLMAGLRKAIEEGKLESFVTDFYQRQGRPVPPVNVD

SEQ ID NO: 53886 - protein, 375 aa, Citrobacter farmeri
  REGION 1..375: note = tr|A0A223JNC2|A0A223JNC2_9ENTR Queuine tRNA-ribosyltransferase OS=Citrobacter farmeri OX=67824; GN = tgt PE=3 SV=1
MKFELDTTDGRARRGRLVFDRGVVETPAFMPVGTYGTVKGMTPEEVEATGAQIILGNTFHLWLRPGQEIMKLHGDLHDFMQWKGPILTDSGGFQVFSLGDIRKITEQGVHFRNPINGDPIFLDPEKSMEIQYDLGSDIVMIFDECTPYPADWDYAKRSMEMSLRWAKRSRDRFDGLGNKNALFGIIQGSVYEDLRDISVKGLVEIGFDGYAVGGLAVGEPKEDMHRILEHVCPQIPADKPRYLMGVGKPEDLVEGVRRGIDMFDCVMPTRNARNGHLFVTDGVVKIRNAKYKSDTSPLDAECDCYTCRNYSRAYLHHLDRCNEILGARLNTIHNLRYYQRLMAGLRKAIEEGKLESFVTDFYQRQGRPVPPLNVD

SEQ ID NO: 53887 - protein, 375 aa, Citrobacter freundii
  REGION 1..375: note = tr|A0A4P7Q686|A0A4P7Q686_CITFR Queuine tRNA-ribosyltransferase OS=Citrobacter freundii OX=546; GN = tgt PE=3 SV=1
MKFELDTTDGRARRGRLVFDRGVVETPAFMPVGTYGTVKGMTPEEVEATGAQIILGNTFHLWLRPGQEIMKLHGDLHDFMQWKGPILTDSGGFQVFSLGDIRKITEQGVHFRNPINGDPIFLDPEKSMEIQYDLGSDIVMIFDECTPYPADWDYAKRSMEMSLRWAQRSRDRFDSLGNKNALFGIIQGSVYEDLRDISVKGLVDIGFDGYAVGGLAVGEPKEDMHRILEHVCPQIPADKPRYLMGVGKPEDLVEGVRRGIDMFDCVMPTRNARNGHLFVTDGVVKIRNAKHKSDTSPLDAECDCYTCRNYSRAYLHHLDRCNEILGARLNTIHNLRYYQRLMAGLRKAIEEGKLESFVTDFYQRQGRPVPPVNVD

SEQ ID NO: 53888 - protein, 375 aa, Citrobacter freundii; identical to SEQ ID NO: 53885
  REGION 1..375: note = tr|A0A064E948|A0A064E948_CITFR Queuine tRNA-ribosyltransferase OS=Citrobacter freundii MGH 56; OX = 1439318 GN=tgt PE=3 SV=1

SEQ ID NO: 53889 - protein, 375 aa, Citrobacter gillenii
  REGION 1..375: note = tr|A0A3E2KWH1|A0A3E2KWH1_9ENTR Queuine tRNA-ribosyltransferase OS=Citrobacter gillenii OX=67828; GN = tgt PE=3 SV=1
MKFELDTTDGRARRGRLVFDRGVVETPAFMPVGTYGTVKGMTPEEVEATGAQIILGNTFHLWLRPGQEIMKLHGDLHDFMQWKGPILTDSGGFQVFSLGDIRKITEQGVHFRNPINGDPIFLDPEKSMEIQYDLGSDIVMIFDECTPYPADWDYAKRSMEMSLRWAQRSRDRFDSLGNKNALFGIIQGSVYEDLRDISVKGLVDIGFDGYAVGGLAVGEPKEDMHRILEHVCPQIPADKPRYLMGVGKPEDLVEGVRRGIDMFDCVMPTRNARNGHLFVTDGVVKIRNAKHKSDTSPLDAECDCYTCRNYSRAYLHHLDRCNEILGARLNTIHNLRYYQRLMAGLRKAIEEGKLESFVTDFYQRQGRPVPPVNVY

SEQ ID NO: 53890 - protein, 207 aa, Citrobacter koseri
  REGION 1..207: note = tr|A0A447USM7|A0A447USM7_CITKO Queuine tRNA-ribosyltransferase OS=Citrobacter koseri OX=545; GN = tgt_1 PE=3 SV=1
MKFELDTTDGRARRGRLVFDRGVVETPAFMPVGTYGTVKGMTPEEVEATGAQIILGNTFHLWLRPGQEIMKLHGDLHDFMQWKGPILTDSGGFQVFSLGDIRKITEQGVHFRNPINGDPIFLDPEKSMEIQYDLGSDIVMIFDECTPYPADWDYAKRSMEMSLRWAKRSRDRFDGLGNKNALFGIIQGSVYEDFTRYLRQRSGRDWL

SEQ ID NO: 53891 - protein, 375 aa, Citrobacter koseri; identical to SEQ ID NO: 53884
  REGION 1..375: note = sp|A8AK48|TGT_CITK8 Queuine tRNA-ribosyltransferase; OS = Citrobacter koseri (strain ATCC BAA-895 / CDC 4225-83 / SGSC4696) OX=290338 GN=tgt PE=3 SV=1

SEQ ID NO: 53892 - protein, 375 aa, Citrobacter murliniae
  REGION 1..375: note = tr|A0A4S3RXQ2|A0A4S3RXQ2_9ENTR Queuine tRNA-ribosyltransferase OS=Citrobacter murliniae OX=67829; GN = tgt PE=3 SV=1
MKFELDTTDGRARRGRLVFDRGVVETPAFMPVGTYGTVKGMTPEEVEATGAQIILGNTFHLWLRPGQEIMKLHGDLHDFMQWKGPILTDSGGFQVFSLGDIRKITEQGVHFRNPINGDPIFLDPEKSMEIQYDLGSDIVMIFDECTPYPADWDYAKRSMEMSLRWAKRSRDRFDGLGNKNALFGIIQGSVYEDLRDISVKGLVDIGFDGYAVGGLAVGEPKADMHRILEHVCPQIPADKPRYLMGVGKPEDLVEGVRRGIDMFDCVMPTRNARNGHLFVTDGVVKIRNAKHKSDTSPLDAECDCYTCRNYSRAYLHHLDRCNEILGARLNTIHNLRYYQRLMAGLRKAIEEGKLESFVTDFYQRQGRPVPPLNVD

SEQ ID NO: 53893 - protein, 375 aa, unidentified; identical to SEQ ID NO: 53885
  source 1..375: note = Citrobacter pasteurii
  REGION 1..375: note = tr|A0A0A1RWA3|A0A0A1RWA3_9ENTR Queuine tRNA-ribosyltransferase OS=Citrobacter pasteurii; OX = 1563222 GN=tgt PE=3 SV=1

SEQ ID NO: 53894 - protein, 375 aa, unidentified; identical to SEQ ID NO: 53885
  source 1..375: note = Citrobacter portucalensis
  REGION 1..375: note = tr|A0A4P7USF1|A0A4P7USF1_9ENTR Queuine tRNA-ribosyltransferase OS=Citrobacter portucalensis; OX = 1639133 GN=tgt PE=3 SV=1

SEQ ID NO: 53895 - protein, 375 aa, unidentified
  source 1..375: note = Citrobacter portucalensis
  REGION 1..375: note = tr|A0A5A9CK83|A0A5A9CK83_9ENTR Queuine tRNA-ribosyltransferase OS=Citrobacter portucalensis; OX = 1639133 GN=tgt PE=3 SV=1
MKFELDTTDGRARRGRLVFERGVVETPAFMPVGTYGTVKGMTPEEVEATGAQIILGNTFHLWLRPGQEIMKLHGDLHDFMQWKGPILTDSGGFQVFSLGDIRKITEQGVHFRNPINGDPIFLDPEKSMEIQYDLGSDVVMIFDECTPYPADWDYAKRSMEMSLRWAKRSRDRFDSLGNKNALFGIIQGSVYEDLRDISVKGLVDIGFDGYAVGGLAVGEPKEDMHRILEHVCPQIPADKPRYLMGVGKPEDLVEGVRRGIDMFDCVMPTRNARNGHLFVTDGVVKIRNAKHKSDTSPLDAECDCYTCRNYSRAYLHHLDRCNEILGARLNTIHNLRYYQRLMAGLRKAIEEGKLESFVTDFYQRQGRPVPPVNVD

SEQ ID NO: 53896 - protein, 375 aa, Citrobacter rodentium
  REGION 1..375: note = tr|A0A482PUI7|A0A482PUI7_CITRO Queuine tRNA-ribosyltransferase OS=Citrobacter rodentium OX=67825; GN = tgt PE=3 SV=1
MKFELDTTDGRARRGRLVFDRGVVETPAFMPVGTYGTVKGMTPEEVEATGAQIILGNTFHLWLRPGQEIMKLHGDLHDFMQWKGPILTDSGGFQVFSLGDIRKITEQGVHFRNPINGDPIFLDPEKSMEIQYDLGSDIVMIFDECTPYPADWDYAKRSMEMSLRWAKRSRERFDSLGNKNALFGIIQGSVYEDLRDISVKALVEIGFDGYAVGGLAVGEPKEDMHRILEHVCPQIPADKPRYLMGVGKPEDLVEGVRRGIDMFDCVMPTRNARNGHLFVTDGVVKIRNAKYKSDTSPLDAECDCYTCRNYSRAYLHHLDRCNEILGARLNTIHNLRYYQRLMAGLRKAIEEGKLESFVTGFYQRQGRPVPPLNVD

SEQ ID NO: 53897 - protein, 375 aa, Citrobacter sp.; identical to SEQ ID NO: 53884
  REGION 1..375: note = tr|A0A3S7D894|A0A3S7D894_9ENTR Queuine tRNA-ribosyltransferase OS=Citrobacter sp. CFNIH10; OX = 1920110 GN=tgt PE=3 SV=1

SEQ ID NO: 53898 - protein, 375 aa, Citrobacter sp.; identical to SEQ ID NO: 53885
  REGION 1..375: note = tr|A0A0J1KVK9|A0A0J1KVK9_9ENTR Queuine tRNA-ribosyltransferase OS=Citrobacter sp. MGH103; OX = 1686378 GN=tgt PE=3 SV=1

SEQ ID NO: 53899 - protein, 375 aa, Citrobacter werkmanii; identical to SEQ ID NO: 53885
  REGION 1..375: note = tr|A0A4Q4BKK6|A0A4Q4BKK6_9ENTR Queuine tRNA-ribosyltransferase OS=Citrobacter werkmanii OX=67827; GN = tgt PE=3 SV=1

SEQ ID NO: 53900 - protein, 375 aa, Citrobacter werkmanii; identical to SEQ ID NO: 53885
  REGION 1..375: note = tr|A0A090TYB8|A0A090TYB8_9ENTR Queuine tRNA-ribosyltransferase OS=Citrobacter werkmanii NBRC 105721 OX=1114921 GN=tgt PE=3 SV=1

SEQ ID NO: 53901 - protein, 375 aa, Citrobacter youngae; identical to SEQ ID NO: 53885
  REGION 1..375: note = tr|D4BD60|D4BD60_9ENTR Queuine tRNA-ribosyltransferase OS=Citrobacter youngae ATCC 29220; OX = 500640 GN=tgt PE=3 SV=1

SEQ ID NO: 53902 - protein, 375 aa, Citrobacter youngae; identical to SEQ ID NO: 53885
  REGION 1..375: note = tr|A0A549VAR7|A0A549VAR7_9ENTR Queuine tRNA-ribosyltransferase OS=Citrobacter youngae OX=133448; GN = tgt PE=3 SV=1

SEQ ID NO: 53903 - protein, 376 aa, unidentified
  source 1..376: note = Citromicrobium sp.
  REGION 1..376: note = tr|A0A2P0B599|A0A2P0B599_9SPHN Queuine tRNA-ribosyltransferase OS=Citromicrobium sp. RCC1897; OX = 1812182 GN=tgt PE=3 SV=1
MSTRFQFQISARSGAARTGTIQMMRGEIRTPAFMPVGTAATVKGMKPESVRAAGADIILGNTYHLMLRPGAERVARLGGLHKFMNWDRPILTDSGGYQVMSLSDLNKLTEEGVEFRSHLDGSKHMLTPERSMEIQRLLGSDIVMAFDECPRADRPLAEIEASMEMSMRWAKRSRDAFDAGGEHAAHAALFGIQQGALDEGMRRRSAEALSEIGFDGYAIGGLAVGEGQEAMFATLDFAPGQLPDDAPRYLMGVGKPDDLVGAVERGVDMFDCVLPTRSGRNGQAFTWDGPMNLRNARFAEDTDPLDSRCACPTCATYSRAYLHHLIKSGEMLGAMLLTEHNIGFYQQLMQAMRDAIAQDRFAAFARGFRDTYLRTG

SEQ ID NO: 53904 - protein, 374 aa, unidentified
  source 1..374: note = Citromicrobium sp.
  REGION 1..374: note = tr|A0A2D8B2J9|A0A2D8B2J9_9SPHN Queuine tRNA-ribosyltransferase OS=Citromicrobium sp. OX=2024827; GN = tgt PE=3 SV=1
MTTRFDFEISACSGLARTGTIRMQRGDIRTPAFMPVGTAATVKGMKPESVRAAGADIILGNTYHLMLRPGAERVARLGGLHKFMNWDRPILTDSGGYQVMSLSDLNKLTEEGVEFRSHLDGSKHMLSPERSMEIQRLLGSDIVMAFDECPRADRPLAEIEASMEMSMRWAKRSRNAFDAGGEHAGRAALFGIQQGALDERLRRRSADALTEIGFDGYAIGGLAVGEGQEAMFATLDFAPSQLPDDAPRYLMGVGKPDDLVGAVERGVDMFDCVLPTRSGRNGQAFTWNGALNLRNARFAEDTGPLDDRCACPTCATYSRAYLHHLIKSGEMLGAMLLTEHNIGFYQQLMAAMREAIAQDRFAAFASDFRRDYLG

SEQ ID NO: 53905 - protein, 408 aa, Clavibacter sp.
  REGION 1..408: note = tr|A0A388P1W3|A0A388P1W3_9MICO Queuine tRNA-ribosyltransferase OS=Clavibacter sp. OX=1871044; GN = tgt PE=3 SV=1
MSFSFEMQKEISGQLGRAGVISTPHGQIATPAFIPVGTKASVKSLAPEALTDLGAQAVLANAYHLYLQPGSETLDQAGGLGKFMNWNKPTFTDSGGFQVMSLGAGFKKVIDMSLGSLDSDEAMAESKERLAHVDDEGVTFKSHLDGSMHRFTPEISMQVQHQIGADIIFAFDELTTLHNTRKYQEQSLERTRLWAIRCLDEHKRLTDQRSDKPYQALFGVLQGAQYEDLRRKAAKDLSAMNSSGISFDGFGIGGALDKASLGQIVSWMSSELPRDKPRHLLGIGEPADLFAGVENGADTFDCVAPSREARTSAVYSENGRFNVSSATYKKDFSPIDKDCNCYTCNNFSRAYLNHLFRAKEMLASTLATIHNLAFTVRLVDRMRQAILDETFIEFKTEFLGRYQAKILD

SEQ ID NO: 53906 - protein, 374 aa, unidentified
  source 1..374: note = Cloacibacillus porcorum
  REGION 1..374: note = tr|A0A1B2I9H1|A0A1B2I9H1_9BACT Queuine tRNA-ribosyltransferase OS=Cloacibacillus porcorum; OX = 1197717 GN=tgt PE=3 SV=1
MFEYKLTAQCPETGARAGEFTTPHGVIKTPVFMPVGTQATVKAMTPPELEGLGAQIILGNTYHLHMRPGEDIVEEAGGLHRFMGWNHPILTDSGGFQVFSLANINKIKEDGVKFRSHIDGSRHFMRPEDSMAIQQKLGSDIAMAFDECVSLPTTPEYSREAMERTIRWAGRCREYHSRPDQALFGIVQGALYESQRIECIERLEEIGFPGYGIGGLSVGESHAEMYRVLDALSPHMPQDKPRYLMGVGFPTNLVEGIARGIDMFDCVLPTRNGRNGQLLTSFGKMNIKNLAFARDYTPVDPNCGCYVCRNFTRAYLRHLYTAGEILAARLCSWHNLYFLVNLVNDARQAIIEGRFPAFRRNFMENFMEGAYLNE

SEQ ID NO: 53907 - protein, 377 aa, Cloacibacillus sp.
  REGION 1..377: note = tr|A0A1Y4G9W4|A0A1Y4G9W4_9BACT Queuine tRNA-ribosyltransferase OS=Cloacibacillus sp. An23; OX = 1965591 GN=tgt PE=3 SV=1
MFEYKIVARCPETGARAGEFTTPHGVIETPVFMPVGTQATVKAMTPDELEGLGAQIILGNTYHLHMRPGEDTVEEAGGLHRFMNWKRPILTDSGGFQVFSLAKLNKITDEGVEFRSHIDGSRHFMRPEDSMTIQQKLGSDIAMSFDECVSLPTTPEYSREALGRTIRWARRCREFHSRRDQALFGIVQGALYEDQRIECIERLEEIGGFPGYGIGGLSVGESHAEMYRVLDALNPHMPQDKPRYLMGVGFPTNLVEGVARGIDMFDCVLPTRNGRNGQLLTRFGKMNIKNLAFARDFTPVDPQCGCYVCRNFTRAYLRHLYMAGEILAARLCSWHNLYFLVNLMKEARRAIIEGRFPAFRRGFMENFMGGAYLDGRQ

SEQ ID NO: 53908 - protein, 377 aa, Cloacibacterium normanense
  REGION 1..377: note = tr|A0A1E5UBW5|A0A1E5UBW5_9FLAO Queuine tRNA-ribosyltransferase OS=Cloacibacterium normanense; OX = 237258 GN=tgt PE=3 SV=1
MQKFFEVEKNTSGKARAGKITTDHGEILTPIFMPVGTVASVKTVHQHELREDIKAQIILGNTYHLYLRPGMEIMQEAGGLHQFMNWEKPILTDSGGYQVFSLSSSRKMTEEGVKFKSHIDGSYHFISPEKSMEIQRQIGADIFMAFDECTPYPCEHNQAKLSMELTHRWLKRCIDWTNENQEIYGHKQHLFPIVQGSTYSDLRKISAEVISEAGADGNAIGGLSVGEPEEEMYRITDEVTDILPKDKPRYLMGVGTPWNIIESIGLGIDMMDCVMPTRNARNAMLFTWQGVMNMKNKKWEKDFSPLDEFGTSYVDRDYSKAYVRHLFVAKEYLAKQIASIHNLAFYLDLVKVAREHIIAGDFYEWKEQIIPQLKQRL

SEQ ID NO: 53909 - protein, 377 aa, Cloacibacterium normanense
  REGION 1..377: note = tr|A0A2S7I6Y1|A0A2S7I6Y1_9FLAO Queuine tRNA-ribosyltransferase OS=Cloacibacterium normanense; OX = 237258 GN=tgt PE=3 SV=1
MQKFFEVEKNTSGKARAGKITTDHGEILTPIFMPVGTVASVKTVHQHELREDIKAQIILGNTYHLYLRPGMEIMQEAGGLHKFMNWEKPILTDSGGYQVFSLSSSRKMTEEGVKFKSHIDGSYHFISPEKSMEIQRQIGADIFMAFDECTPYPCEYNQAKLSMELTHRWLKRCIDWTNENQEIYGHKQHLFPIVQGSTYSDLRKISAEVISAAGADGNAIGGLSVGEPEEEMYRITDEVTDILPKDKPRYLMGVGTPWNIIESIGLGIDMMDCVMPTRNARNAMLFTWQGVMNMKNKKWEKDFSPLDEFGTSYVDRDYSKAYVRHLFVAKEYLAKQIASIHNLAFYLDLVKVAREHIIAGDFYEWKEQIIPQLKQRL

SEQ ID NO: 53910 - protein, 370 aa, unidentified
  source 1..370: note = Cloacimonas acidaminovorans
  REGION 1..370: note = tr|B0VFL3|B0VFL3_CLOAI Queuine tRNA-ribosyltransferase OS=Cloacimonas acidaminovorans (strain Evry) OX=459349 GN=tgt PE=3 SV=1
MFNFTLQKTSGKARAGIMKTEHGEILTPVFMPVGTLGTVKAMSPKELEEVQAQIILGNTYHLYIRPGHTLIQKAGGLHQFISWNHPILTDSGGFQVMSLAALRKISKEGVKFQSHIDGSPHIFTPEKVIEIQEALGADIIMSFDECPPYPSTRKYVEKSLATTLDWAERGKKAFTNYKHQALFGIVQGGIYEDLREKSALELMEMDFDGYGIGGLAVGEEKEDLLRITSFLNDILPIDKPRYLMGVGTPSDLLNNIDRGIDMFDCVMPTRNARKGSIFTRYGKMIIKAARYKDDFSPIDPLCGCYTCTHFSRAYIRHLITMNEILGMRLTTIHSLWFYQELMQMARKAIWENKWNEFLAEMLPTLDRIVQ

SEQ ID NO: 53911 - protein, 376 aa, unidentified
  source 1..376: note = Clostridia bacterium
  REGION 1..376: note = tr|A0A2V2CVM7|A0A2V2CVM7_9FIRM Queuine tRNA-ribosyltransferase OS=Clostridia bacterium OX=2044939; GN = tgt PE=3 SV=1
MFKLLKQEGRARRGCFETPHGTVQTPVFMNVGTQGAIKGALSARDLKEIGCQVELSNTYHLHVRPGDELIKDMGGLHRFMTWDGPILTDSGGFQIFSLAKLRKINEDGVKFNSHVDGRHIFMGPEESMRIQANLGSDIAMAFDECIKIPSPKDYVSRSCDRTYRWLQRCKKALAEYNAMDDAVNPGQMLFGINQGAIFADIRVEHMKKIAELDLPGYAIGGLAVGESHQEMYDTIEAVEEYMPKDKPRYLMGVGTPGNIIECVHRGVDFFDCVMPARNGRHGHLFTWEGIINIKNEKYSRDTDPVDPQCRCPVCSRYSRAYLRHLFKAEEMLAMRLAVAHNLYFYNSLAERIRKSLESGNFEQFRHNFSEKLDKRI

SEQ ID NO: 53912 - protein, 384 aa, unidentified
  source 1..384: note = Clostridia bacterium
  REGION 1..384: note = tr|A0A523BPZ5|A0A523BPZ5_9FIRM Queuine tRNA-ribosyltransferase OS=Clostridia bacterium OX=2044939; GN = tgt PE=3 SV=1
MSVSFTVERGCPETKARRGHLETRHGGVETPAFMPVGTQGTVKVMTPEELRDVGAQIVLSNTYHLMLRPGADLIARAGGLHRFMHWEGPILTDSGGFQVFSLGHLRQVTPEGVIFRSHLDGSIHRLTPQQAMAVQEALGSDIAMCLDQCVAYPASGEEFARAVELTTRWAEICQKAHSRPDQALFGIIQGGTSADLRRRSCEEIVGLDFPGYAIGGLSVGEPKELLFEMLAVLEPLLPADRPRYLMGVGSPDLLLGAIAMGVDLFDCVLPTRMARNGTVLTSTGRLVVRNAHYAEDFSPLEPGCGCYACRHYTRAYIRHLLKAGEILGVRLTTIHNLYFTLSLLDRARQAIAAGTFARFSREFLSVYEAGERARKKEAMAVGGE

SEQ ID NO: 53913 - protein, 273 aa, unidentified
  source 1..273: note = Clostridiaceae bacterium
  REGION 1..273: note = tr|A0A355SI87|A0A355SI87_9CLOT Queuine tRNA-ribosyltransferase (Fragment) OS=Clostridiaceae bacterium OX=1898204 GN=DD426_14235 PE=3 SV=1
MDAVTYELIKKSTETDARLGILHTPHGDIETPVFMPVGTQASVKTMTPEELKEIGAKIILSNTYHLYIRPGERIIEKAGGLHKFMHWDRAILTDSGGYQVFSLSNLRDIKEEGVTFKSHLDGSKHFFTPEKAVQIQNSLGADIIMCFDECLPYPCDKDYASLALKRTIRWAKRCKDTHKNIEKQSLFGIIQGGMYKDLRLQSVNEMTDMDFPGYSIGGLSIGEPKKIMYEVLDWITPVMPQNKPRYLMGVGSPDCLIEGAIRGIDMFDCVLPT

SEQ ID NO: 53914 - protein, 377 aa, unidentified
  source 1..377: note = Clostridiaceae bacterium
  REGION 1..377: note = tr|A0A316N996|A0A316N996_9CLOT Queuine tRNA-ribosyltransferase OS=Clostridiaceae bacterium; OX = 1898204 GN=tgt PE=3 SV=1
MYKILCKDGSAKRGQLETVHGTVQTPVFMNVGTVGAMKGAVATTDLLNLKTQIVLSNTYHLHVRPGDDVVKKMGGIRKFMVWDNPVLTDSGGFQVFSLAGLRKIKEEGVYFHSHIDGKKIFMGPEESMQIQSNIASTIAMAFDECPPHPATREYMQNSVDRTTRWLERCKKEMARLNSLEDTLNPNQLLFGINQGGTFGDIRMEHAKRIADMDLDGYALGGLAVGETHQEMYDIIEKTVPYLPENKPTYLMGVGTPANILEAVERGVDFFDCVYPARNGRHGHAYTNHGKMNLLNAKYELDDRPLDETCDCPVCKHYSRAYIRHLLKAKETLGLRLMVTHNLYFYNTMMEEIRDAIEHKCFKEYKKKKLEQMKEETK

SEQ ID NO: 53915 - protein, 368 aa, unidentified
  source 1..368: note = Clostridiales bacterium
  REGION 1..368: note = tr|A0A3B9QEM1|A0A3B9QEM1_9FIRM Queuine tRNA-ribosyltransferase OS=Clostridiales bacterium UBA9857; OX = 2060923 GN=tgt PE=3 SV=1
MSQLEFRILHRSGNARVGKLKTAHGEISTPVFMPVGTQATVKALLPEDVWDTGSQIILCNAYHLFLRPGPDIVKAAGGLHQFMNWPGAILTDSGGFQIMSLAHLVSITDQEAVFRSHIDGSLVRFSPEDSIRVQAALGADIIMCLDHLTGWPVSRGDAREAMERTLLWARRAKKVEIGTHQSLFGIVQGSVYPELRRHCALELGAMDFPGYAVGGLSVGESKQQFYDILHYTCEFLPASKPRYLMGVGHPVDLIEGVMAGIDMFDCVLPTRNARHGRAFTFAGPLNLKNSKFATDFAPIEEGCDCRTCNSFSRAYVRHLFSAKESLAWTLVSIHNIRFFHRLMERTRQAVVDGSLANLRQQIQMLYPI

SEQ ID NO: 53916 - protein, 398 aa, unidentified
  source 1..398: note = Clostridiales bacterium
  REGION 1..398: note = tr|A0A133YEI0|A0A133YEI0_9FIRM Queuine tRNA-ribosyltransferase OS=Clostridiales bacterium KA00274; OX = 1497955 GN=tgt PE=3 SV=1
MRREEDMLSKNLTKEELAKKYPIWFELEHVCKQSGARAGILHTPHGDIATPTFMPVGTQATVKCMAPEEIWQMGSRILLANTYHLWMRPGEDIVAEAGGLHKFMNWPGAILTDSGGFQVWSLSDLRNIKEEGVHFRSELDGSAQFLSPEKAIQIENKLGADIIMAFDECAPYDADRNYIIDSASRTTRWLERCVKSHSRSKEQGLFGIIQGGMFADLRVQSAKEITSFDLPGYSVGGLSIGEPPALMNSMLDAVRPYLPGNKPHYLMGVGTPDYILEGALRGIDMFDCVLPTRIGRNGSALTWRGREIIRDAKNARCFEPIDANCTCYACKNYTRAYIRHLLKCKEIFGLRLMSWHNLQFLQDFTVALRKAIFADRSMDFRHDFYANSNYGAKQDFQS

SEQ ID NO: 53917 - protein, 358 aa, unidentified
  source 1..358: note = Clostridiales Family
  REGION 1..358: note = tr|A0A2V2FYB8|A0A2V2FYB8_9FIRM Queuine tRNA-ribosyltransferase (Fragment) OS=Clostridiales Family XIII bacterium OX=2137877 GN=DBX38_07675 PE=3 SV=1
MAVKNAVTYELIKTDSRTKARRGRIHTPHGDIETPVFMPVGTQGTVKAMRPEQVAEMGAKIILGNTYHLYLRPGHEIVKEAGGLHKFMNWNGAILTDSGGFQVFSLGKLRKITEEGVRFRSHIDGSLHMISPEKSMEIQNALGSDIMMAFDECAPYPADRSYVKDSFERTTRWLARCKEYHKNIENQSLFGIMQGGMYKDMRYESAMQIVEMDLPGYAIGGLSVGEPKEVMLDVMDDCVDYLPSDRPRYLMGVGSPDYLFEAVERGIDMCDCVLPTRIARHGLAMTSHGRVNIKNAKYERDWEPLDSECSCYTCRNYSRAYLRHLFKADEMLSSMLLSNHNLHFLINMMGKIREAIEE

SEQ ID NO: 53918 - protein, 379 aa, unidentified
  source 1..379: note = Clostridioides difficile
  REGION 1..379: note = tr|D5Q8U9|D5Q8U9_CLODI Queuine tRNA-ribosyltransferase OS=Clostridioides difficile NAP08; OX = 525259 GN=tgt PE=3 SV=1
MIKENFMYAVRYELIKTCKQSGARLGRLHTPHGIIETPIFMPVGTQATVKSMTPEELKEIGSQIILSNTYHLYMRPGHELIKRAGGLHNFMNWDKPILTDSGGFQVFSLGPLRKIKEEGVEFRSHLDGSKHFLTPEKAMEIQNALGSDIMMAFDECAPYPADREYVKNSLERTTRWLKRCKDAHNNTDKQALFGIIQGGMYKDLREQSAKEITSIDLPGYAIGGLSVGEPKPLMYDVLEHTTPLMPKDKPRYLMGVGSPDDLVEGVIRGVDMFDCVLPTRIARNGTAMTSQGKVVVRNATYAEDFTPLDPECDCYACKNYSRAYIRHLIKANEILGARLITTHNLHFLLNLMKQIRQAIMEDRLLDFRNEFFAKYGYEI

SEQ ID NO: 53919 - protein, 373 aa, unidentified
  source 1..373: note = Clostridioides difficile
  REGION 1..373: note = tr|A0A449LLD8|A0A449LLD8_CLODI Queuine tRNA-ribosyltransferase OS=Clostridioides difficile; OX = 1496 GN=tgt PE=3 SV=1
MYAVRYELIKTCKQSGARLGRLHTPHGIIETPIFMPVGTQATVKSMTPEELKEIGSQIILSNTYHLYMRPGHELIKRAGGLHKFMNWDKPILTDSGGFQVFSLGPLRKIKEEGVEFRSHLDGSKHFLTPEKAMEIQNALGSDIMMAFDECAPYPSDREYVKNSLERTTRWLKRCKDAHNNTDKQALFGIIQGGMYKDLREQSAKEITSIDLPGYAIGGLSVGEPKPLMYDVLEHTTPLMPQDKPRYLMGVGSPDDLVEGVIRGVDMFDCVLPTRIARNGTAMTSQGKVVVRNATYAEDFTPLDPECDCYACKNYSRAYIRHLIKANEILGARLITTHNLHFLLNLMKQIRQAIMEDRLLDFRNEFFAKYGYEI

SEQ ID NO: 53920 - protein, 372 aa, Clostridium aceticum
  REGION 1..372: note = tr|A0A0D8IDI6|A0A0D8IDI6_9CLOT Queuine tRNA-ribosyltransferase OS=Clostridium aceticum OX=84022; GN = tgt PE=3 SV=1
MALRYELIKECKQSGARLGKIHTKRGIIETPIFMPVGTQATVKTMTPEELKEIKSQIILSNTYHLYLRPGHELIKKAGGLHKFMNWDKPILTDSGGFQVFSLGDLRKISEEGVEFRSHLDGSKHFISPEKAVEIQNALGSDIMMVFDECAPYPADRDYVKNSLERTTRWAKRCKEAHKNIEDQNLFGIIQGGMYADLRKQSAEELLELDFPGYAVGGLSVGEPKPLMYEVLEHTTPLMPKNKPRYLMGVGSPDCLIEGAIRGIDMFDCVLPTRIARNGTAMTSQGKVVIKNAKYTEDFQGLDPECGCYTCRNYSKAYLRHLFKANEVLGLRLLSYHNLYFLLKLMEEIREAIKEDRLLDYRKSFFEKYGYDV

SEQ ID NO: 53921 - protein, 376 aa, Clostridium acetireducens
  REGION 1..376: note = tr|A0A1E8EXM2|A0A1E8EXM2_9CLOT Queuine tRNA-ribosyltransferase OS=Clostridium acetireducens DSM 10703 OX=1121290 GN=tgt PE=3 SV=1
MYKLIKMCGKAKRGEFVTPHGTIQTPVFMNVGTLAAIKGAVSTMDLKKIGCQVELSNTYHLHLRPGDKIIKKMGGLHKFMNWDRPILTDSGGFQVFSLANIRKIQEKGVYFNSHIDGRKIFMGPEESMQIQSNLGSTIAMAFDECVANPSPREYVERSVERTTRWLERCKIELDRLNSLPDTINKKQILFGINQGGVYDDIRIEHAKTIAKMNLEGYAIGGLAVGESHEEMYRIIDAVVPHLPKDKPLYLMGVGTPINILEAVDRGVDFFDCVLPARNGRHAHVFTKYGKINLLNAKYELDEKPIDEGCQCPACRHYSRAYIRHLFKAKEMLAMRLCVLHNLYFYNNLMKEIREAIEGDYFSQYKTQKLEQWGGKA

SEQ ID NO: 53922 - protein, 376 aa, Clostridium acetobutylicum
  REGION 1..376: note = sp|Q97GT3|TGT_CLOAB Queuine tRNA-ribosyltransferase; OS = Clostridium acetobutylicum (strain ATCC 824 / DSM 792 / JCM 1419 / LMG 5710 / VKM B-1787) OX=272562 GN=tgt PE= 3; SV = 1
MYTLLKKTGKVRRGRFETVHGTIETPVFMNVGTLAAIKGAVSSMDLKEINCQVELSNTYHLSLRPGDDVVKKLGGLHKFMNWDRPILTDSGGFQVFSLAEIRKIKEEGVYFNSHIDGRKIFMGPEESMKIQSNLASTIAMAFDECVENPSPREYVERSVERTTRWLVRCKEELDRLNSLPDTINKKQMLFGINQGGVYDDIRIEHAKTIAKMDLDGYAIGGLAVGETHEEMYRIIDAVVPHLPQDKPIYLMGVGTPSNILEAVSRGVDFFDCVLPARNGRHGHVFTKHGKINLRNEKFELDASPIDEGCQCPTCKHYSRAYIRHLFKAKEMLAMRLCVLHNLYFYNTLMEDIRNAIDADCFEEFKNEKLKAWAGKA

SEQ ID NO: 53923 - protein, 376 aa, Clostridium acidisoli
  REGION 1..376: note = tr|A0A1W1XBF9|A0A1W1XBF9_9CLOT Queuine tRNA-ribosyltransferase OS=Clostridium acidisoli DSM 12555; OX = 1121291 GN=tgt PE=3 SV=1
MYKLLKKSGKVRRGEFTTPHGVVQTPVFMNVGTLAAIKGAVSSMDLKEIGCQVELSNTYHLSLRPGDKIVRELGGLHKFMNWDRPILTDSGGFQVFSLAKMRKIKEEGVYFSSHIDGRKIFMGPEESMQIQSNLGSTIAMAFDECVENPATREYVEDSVARTTRWLERCKNEMDRLNSLDNTVNKNQMLFGINQGGTYEDIRIEHAKTISKLNLDGYAIGGLAVGETHEEMYRVIDAVVPHLPQDKPIYLMGVGLPSNILEAVSRGVDFFDCVLPARNGRHGHVFTKHGKINLLNAKYELDASPIDEGCKCPACKNYTRAYIRHLFKAKELLALRLCVLHNLYFYNKLMKDIRDAIDGDYFEEFKSEKLNDWAGRA

SEQ ID NO: 53924 - protein, 381 aa, unidentified
  source 1..381: note = [Clostridium] aldenense
  REGION 1..381: note = tr|A0A3E2WBY3|A0A3E2WBY3_9FIRM Queuine tRNA-ribosyltransferase OS=[Clostridium] aldenense; OX = 358742 GN=tgt PE=3 SV=1
MKYQVITKDGRAKRARMETVHGVIETPVFMNVGTVGAIKGAVSTDDLREINTQVELSNTYHLHVRTGDRLIKEFGGLHRFMNWDRPILTDSGGFQVFSLTKLRRIKEEGVYFNSHIDGHKIFMGPEESMQIQSNLGSTIAMAFDECPPSHASDEYIRQSVDRTTRWLRRCKEEMERLNSLPDTVNREQLLFGINQGGVVDEIRVEHARTIREMNLDGYAVGGLAVGESHEEMYHILDVTVPHLPEEKPVYLMGVGTPANILEAVDRGVDFFDCVYPSRNGRHGHVYTNHGKLNLFNQKYELDARPIEEGCGCPACRSYSRAYIRHLLKAKEMLGMRLCTLHNLYFYNTMMKEIRDAIEEHRYAEYKAAKLAGMESSAKSNE

SEQ ID NO: 53925 - protein, 381 aa, unidentified
  source 1..381: note = [Clostridium] aldenense
  REGION 1..381: note = tr|A0A413W1T9|A0A413W1T9_9FIRM Queuine tRNA-ribosyltransferase OS=[Clostridium] aldenense; OX = 358742 GN=tgt PE=3 SV=1
MKYQVITKDGRAKRARMETVHGVIETPVFMNVGTVGAIKGAVSTDDLREINTQVELSNTYHLHVRTGDRLIKEFGGLHRFMNWDRPILTDSGGFQVFSLTKLRKIKEEGVYFNSHIDGHKIFMGPEESMQIQSNLGSTIAMAFDECPPSHASDEYIRQSVDRTTRWLHRCKEEMARLNSLPDTVNREQLLFGINQGGVVDEIRVEHARTIREMDLDGYAVGGLAVGESHEEMYHILDVTVPHLPEEKPVYLMGVGTPANILEAVDRGVDFFDCVYPSRNGRHGHVYTNHGKLNLFNQKYELDARPIEEGCGCPACRSYSRAYIRHLLKAKEMLGMRLCTLHNLYFYNTMMKEIRDAIEEHRYAEYKAAKLAGMESSAKANE

SEQ ID NO: 53926 - protein, 376 aa, Clostridium algidicarnis
  REGION 1..376: note = tr|A0A2S6G104|A0A2S6G104_9CLOT Queuine tRNA-ribosyltransferase OS=Clostridium algidicarnis DSM 15099 OX=1121295 GN=tgt PE=3 SV=1
MMYKLLKTTGKVRRGEFKTPHGTIQTPVFMNVGTLAAIKGAVSSMDLKEIECQVELSNTYHLHLRPGDKVIKELGGIHEFMNWDRPILTDSGGFQVFSLASMRKIKEEGVYFNSHIDGRKIFMGPEESMQIQSNLASTISMAFDECIPNPSPREYVEASVDRTTRWLIRCKNELDRLNSLDDTINKKQMLFGINQGGVYEDIRIEHAKTISKLDLDGYAIGGLAVGESHEDMYRIIDSVVPHLPQDKPIYLMGVGLPKNILEAVERGVDFFDCVLPARNGRHGHVFTKSGKINIMNAKFELDKRPIDEGCDCPACKNYTRAYIRHLFKAKEMLAMRLCVLHNLYFYNKLMEEVRDSIDGDYFRDFKKQKLTEWGEI

SEQ ID NO: 53927 - protein, 378 aa, unidentified
  source 1..378: note = [Clostridium] algidixylanolyticum
  REGION 1..378: note = tr|A0A419TBE7|A0A419TBE7_9FIRM Queuine tRNA-ribosyltransferase OS=[Clostridium] algidixylanolyticum OX=94868 GN=tgt PE=3 SV=1
MNYKIIKKDGRAKRAELTTVHGTIQTPVFMNVGTVAAIKGAVSTDDLRDIKTQVQLSNTYHLHVRTGDKVIREFGGLHEFMNWDRPILTDSGGFQVFSLTGLRKIKEEGVYFQSHIDGHKIFMGPEESMQIQSNLGSTIAMAFDECPPHPATRKYMQDSVDRTTRWLDRSRIEMARLNSLPETLNKEQLLFGINQGGTYEDIRIAHAKTISAMDLDGYALGGLAVGESHFEMYRILEETVPYLPENKPIYLMGVGTPANILESVERGVDFFDCVYPSRNGRHGHVYTNYGKLNLFNSKFELDRRPIEEGCQCPACKSYSRAYIRHLLKAKEMLGMRLSVLHNLYFYNTMMEEIRDAIDNQCYGEYKERKLAKMAEGQS

SEQ ID NO: 53928 - protein, 378 aa, unidentified
  source 1..378: note = [Clostridium] aminophilum
  REGION 1..378: note = tr|A0A1I6JU71|A0A1I6JU71_9FIRM Queuine tRNA-ribosyltransferase OS=[Clostridium] aminophilum; OX = 1526 GN=tgt PE=3 SV=1
MEYKILATEGRAKRARMKTVHGTIETPVFMNVGTVAAIKGAVSTDDLRGIDTQVMLCNTYHLHVRTGDPLIHELGGLHSFTNWNKPILTDSGGFQVFSLAGLRKIKEEGVTFRSHIDGHKIFMGPEESMQIQSNLASTIAMAFDECPPALADREYVERSVARTVRWLKRCKTEMDRLNSLPETINKEQLLFGINQGGIIDDIRIRNAEEISELNLDGYAVGGLAVGESHEQMYHVLDEVVPHLPKEKPTYLMGVGTPANILEGVERGIDFFDCVYPSRNGRHANVYTNHGKMNLMNSKYAKDLRPMEEGCQCPACRSYTRAYIHHLFKAKEMLGMRLCVLHNLYFYNKMMEEIRDAIDSQRFAEYKKAKLESMAAGEQ

SEQ ID NO: 53929 - protein, 378 aa, unidentified
  source 1..378: note = [Clostridium] aminophilum
  REGION 1..378: note = tr|A0A1I0H0F1|A0A1I0H0F1_9FIRM Queuine tRNA-ribosyltransferase OS=[Clostridium] aminophilum; OX = 1526 GN=tgt PE=3 SV=1
MEYKILATEGRAKRARMKTVHGTIETPVFMNVGTVAAIKGAVSTDDLRGIDTQVMLCNTYHLHVRTGDPLIHELGGLHRFTNWNKPILTDSGGFQVFSLAGLRKIKEEGVTFRSHIDGHKIFMGPEESMQIQSNLASTIAMAFDECPPALADREYVERSVARTVRWLKRCKTEMDRLNSLPETINKEQLLFGINQGGIIDDIRIRNAEEISELNLDGYAVGGLAVGESHEQMYHVLDEVVPHLPKEKPTYLMGVGTPANILEGVERGIDFFDCVYPSRNGRHANVYTNHGKMNLMNSKYAKDLRPMEEGCQCPACRSYTRAYIHHLFKAKEMLGMRLCVLHNLYFYNKMMEEIRDAIDSQRFAEYKKAKLESMAAGEQ

SEQ ID NO: 53930 - protein, 376 aa, Clostridium amylolyticum
  REGION 1..376: note = tr|A0A1M6CVE8|A0A1M6CVE8_9CLOT Queuine tRNA-ribosyltransferase OS=Clostridium amylolyticum; OX = 1121298 GN=tgt PE=3 SV=1
MYKLLKKKNSVRRGEFHTPHGTIQTPVFMNVGTLAAIKGAVSSMDLKEIGCQVELSNTYHLHLRPGDEVVRKMGGLHKFMNWDRPILTDSGGFQVFSLAKLRQIKEEGVYFNSHIDGRRIFMGPEESMRIQSNLGSTIAMAFDECIPNPSTREYVLKSVDRTTRWLERCKIEMDRLNSLEGTVNNKQMLFGINQGGTYDDIRIEHAKTISKMNLDGYAIGGLAVGETHEEMYRIISSVVPYLPQDKPIYLMGVGLPSNILEAVERGVDFFDCVLPARNGRHGHVFTSTGKINIMNAKYELDDNPIDKGCGCPTCQHYSRAYIRHLFKAKEMLAMRLCVLHNLYFYNKLMEEIRNAIDGDYFEDYKEEKLHAWSGNV

SEQ ID NO: 53931 - protein, 376 aa, Clostridium argentinense
  REGION 1..376: note = tr|A0A0C1RAL1|A0A0C1RAL1_9CLOT Queuine tRNA-ribosyltransferase OS=Clostridium argentinense CDC 2741 OX=1418104 GN=tgt PE=3 SV=1
MYKLLKKSGNVRRGEFTTPHGVVQTPVFMNVGTLAAIKGAVSSMDLKEIGCQVELSNTYHLHLRPSDEVVKKMGGLHKFMNWDRPILTDSGGFQVFSLSSMRKIQEEGVYFNSHIDGKKIFMGPEESMQIQSNLASTIAMAFDECIPNPSSREYVEKSVARTTRWLERCKKEMDRLNSLPDTINKKQMLFGINQGGVYEDIRIEHAKTISKMNLDGYAIGGLAVGETHEEMYRIIEAVVPHLPEDKPIYLMGVGLPSNILEAVSRGVDFFDCVLPARNGRHGHVFTKYGKINLMNAKFELDDNPIDEGCQCPACKSYTRAYIRHLFKAKEMLAMRLCVLHNLYFYNKLMEDIRAAIDGDYFEDFKNEKLSQWGGKA

SEQ ID NO: 53932 - protein, 378 aa, unidentified
  source 1..378: note = [Clostridium] asparagiforme
  REGION 1..378: note = tr|C0CVK2|C0CVK2_9FIRM Queuine tRNA-ribosyltransferase OS=[Clostridium] asparagiforme DSM 15981 OX=518636 GN=tgt PE=3 SV=1
MEYKVITKDGRAKRAEMKTVHGTIQTPVFMNVGTVGAIKGAVSTDDLRQIGTQVELSNTYHLHVRTGDKLIREFGGLHRFMNWDRPILTDSGGFQVFSLTSLRKIKEEGVYFNSHIDGRKIFMGPEESMQIQSNLGSTIAMAFDECPPSHADEQYIRNSVERTTRWLARCKEEMDRLNALPDTINREQLLFGINQGGVVDSIRTWHADVIREMDLDGYAVGGLAVGESHEEMYHVLDVTVPHLPEEKPVYLMGVGTPANILEAVDRGVDFFDCVYPSRNGRHGHVYTNHGKLNLFNRKYELDARPIEEGCGCPACRSYSRAYIRHLLKAKEMLGMRLCTLHNLYFYNTMMEEIRDAIEEHRYADYKMRKLAGMEGSQE

SEQ ID NO: 53933 - protein, 378 aa, unidentified; identical to SEQ ID NO: 53932
  source 1..378: note = [Clostridium] asparagiforme
  REGION 1..378: note = tr|A0A413F9K5|A0A413F9K5_9FIRM Queuine tRNA-ribosyltransferase OS=[Clostridium] asparagiforme; OX = 333367 GN=tgt PE=3 SV=1

SEQ ID NO: 53934 - protein, 374 aa, unidentified
  source 1..374: note = Clostridium autoethanogenum
  REGION 1..374: note = tr|A0A3M0S4I1|A0A3M0S4I1_9CLOT Queuine tRNA-ribosyltransferase OS=Clostridium autoethanogenum; OX = 84023 GN=tgt PE=3 SV=1
MYKLLKKQGSARRGEFTTPHGVVQTPVFMNVGTLAAIKGAVSTCDLKEIGCQVELSNTYHLSLRPGDKIIRKLGGLHKFMNWDRPILTDSGGFQVFSLSKIRKIKEEGVYFNSHIDGSKIFMGPEESMQIQSNLASTVAMAFDECIENPSPKDYVQRSVERTTRWLKRCKVEMDRLNSLPDTINNKQMLFGINQGGVYDDIRIEHAKIISEMNLDGYAIGGLAVGETHEEMYRIIEKVVPHLPQDKPIYLMGVGTPANILEAVERGVDFFDCVLPARNGRHSHVFTSEGEINLLNAKYQLDDSPIDRGCQCPTCKNYTRAYIRHLFKAKEMLAMRLCVLHNLYFYNNLMKEIRDSIDGDYFPKYKKEKLEQWNQ

SEQ ID NO: 53935 - protein, 374 aa, unidentified; identical to SEQ ID NO: 53934
  source 1..374: note = Clostridium autoethanogenum
  REGION 1..374: note = tr|U5RVX1|U5RVX1_9CLOT Queuine tRNA-ribosyltransferase OS=Clostridium autoethanogenum DSM 10061 OX=1341692 GN=tgt PE=3 SV=1

SEQ ID NO: 53936 - protein, 377 aa, Clostridium baratii
  REGION 1..377: note = tr|A0A174Q0G2|A0A174Q0G2_9CLOT Queuine tRNA-ribosyltransferase OS=Clostridium baratii OX=1561; GN = tgt PE=3 SV=1
MSKRYTLLKKDGKARRGRFVTPHGTIETPVFMNVGTLAAIKGAVSSMDLKDIGCQVELSNTYHLHLRPSDKVVKELGGLHEFMNWDRPILTDSGGFQVFSLAGIRKIKEEGVYFNSHIDGKKIFMGPEESMQIQSNLASTIAMAFDECIEIPSPREYVEKSVERTTRWLERCKKEMDRLNSLPDTINKEQMLFGINQGATFKDIRIEHAKTITKMDLDGYAIGGLAVGETHEEMYEVIDAVVPYLPEDKPIYLMGVGTPANILEAVDRGVDFFDCVLPARNGRHGHVFTKNGKINIMNKKFELDKSPIDEGCECPACKHYTRAYIRHLFKAKEMLAMRLCVLHNLYFYNKLMEDIRKAIDEGRFKEFKEQKLKEWNI

SEQ ID NO: 53937 - protein, 377 aa, Clostridium baratii
  REGION 1..377: note = tr|A0A0F3FMB0|A0A0F3FMB0_9CLOT Queuine tRNA-ribosyltransferase OS=Clostridium baratii OX=1561; GN = tgt PE=3 SV=1
MSKRYTLLKKDGKARRGRFVTPHGTIETPVFMNVGTLAAIKGAVSSMDLKDIGCQVELSNTYHLHLRPSDKVVKELGGLHEFMNWDRPILTDSGGFQVFSLAGIRKIKEEGVYFNSHIDGKKIFMGPEESMQIQSNLASTIAMAFDECIEIPSPRDYVEKSVARTTRWLERCKKEMDRLNSLPDTINKEQMLFGINQGATFKDIRIEHAKTIAKMDLDGYAIGGLAVGETHEEMYEVIDTVVPYLPEDKPIYLMGVGTPANILEAVDRGVDFFDCVLPARNGRHGHVFTKNGKINIMNKKFELDKSPIDEGCECPACKHYTRAYIRHLFKAKEMLAMRLCVLHNLYFYNKLMEDIRNAIDEGRFKEFKEQKLKEWNI

SEQ ID NO: 53938 - protein, 373 aa, Clostridium bartlettii
  REGION 1..373: note = tr|R5X4Z0|R5X4Z0_9CLOT Queuine tRNA-ribosyltransferase OS=Clostridium bartlettii CAG:1329; OX = 1263063 GN=tgt PE=3 SV=1
MSAIRYELIKTCKQSGARLGILHTPHGSIETPIFMPVGTQATVKAMTPEELKEIGSQIILSNTYHLYMRPGHELVKEAGGLHKFMNWDKPILTDSGGFQVFSLGPLRKITEEGVTFKSHLDGSRHFISPEKAMEIQNALGSDIMMAFDECAPYPADREYVKNSLERTTRWLQRCKDAHKNTENQALFGIIQGGMYKDLREQSAKEITAIDLPGYAIGGLSVGEPKPLMYEVLEYTTPLMPVDKPRYLMGVGSPDDLIEGVIRGVDMFDCVLPTRIARNGTAMTSQGKVVVRNAAYAKDFTPLDPECDCYCCKNYTKAYIRHLVKANEILAARLITTHNLRFLLKLMEQVRQAIREDRLLDFREEFFTKYGYEL

SEQ ID NO: 53939 - protein, 378 aa, Clostridium beijerinckii
  REGION 1..378: note = tr|A6LTM9|A6LTM9_CLOB8 Queuine tRNA-ribosyltransferase OS=Clostridium beijerinckii (strain ATCC 51743 / NCIMB 8052) OX=290402 GN=tgt PE=3 SV=1
MSKRYTLLKKDGKARRGQFETPHGTIQTPVFMNVGTLAAIKGAVSSMDLKEIGCQVELSNTYHLHLRPSDKVVKKLGGLHKFMNWDRPILTDSGGFQVFSLAKMRKIKEEGVYFNSHIDGKKIFMGPEESMQIQSNLASTIAMAFDECIENPAPREYVERSVERTTRWLERCKNEMDRLNSMPDTINKEQMLFGINQGGVYEDIRIKHAKEITKMDLDGYAIGGLAVGETHEEMYRVIDAVVPHLPEDKPIYLMGVGTPSNILEAVDRGVDFFDCVLPARNGRHGNVFCSEGKLNLMNAKYELDDRPIDDGCECPTCKNYTRAYIRHLFKAKEMLAMRLCVLHNLYFYNKLMKDIRDAIEGGYFKQFKEEKLSQWEGR

SEQ ID NO: 53940 - protein, 378 aa, Clostridium beijerinckii; identical to SEQ ID NO: 53939
  REGION 1..378: note = tr|A0A0K2MGJ9|A0A0K2MGJ9_CLOBE Queuine tRNA-ribosyltransferase OS=Clostridium beijerinckii NRRL B-598 OX=1428454 GN=tgt PE=3 SV=1

SEQ ID NO: 53941 - protein, 386 aa, unidentified
  source 1..386: note = [Clostridium] bolteae
  REGION 1..386: note = tr|N9YWY1|N9YWY1_9FIRM Queuine tRNA-ribosyltransferase OS=[Clostridium] bolteae 90B8; OX = 997897 GN=tgt PE=3 SV=1
MKYQVITKDGRAKRARMETVHGTVETPVFMNVGTVGAIKGAVSTDDLREIGTQVELSNTYHLHVRTGDKLIREFGGLHRFMNWDRPILTDSGGFQVFSLAGLRKIKEEGVYFNSHIDGHKIFMGPEESMQIQSNLGSTIAMAFDECPPSHASDDYIRHSVERTTRWLARCKTEMERLNSLPDTVNRQQLLFGINQGGVVDEIRMEHARTIREMDLDGYAVGGLAVGESHEEMYHILDVTVPCLPEDKPVYLMGVGTPANILEAVDRGVDFFDCVYPSRNGRHGHVYTNQGKLNLFNQKYELDSRPIEEGCGCPACRSYSRAYIRHLLKAKEMLGMRLCTLHNLYFYNTMMKEIRDAIEEHRYAEYKAAKLAGMEGSGRAISTASDE

SEQ ID NO: 53942 - protein, 386 aa, unidentified; identical to SEQ ID NO: 53941
  source 1..386: note = [Clostridium] bolteae
  REGION 1..386: note = tr|A0A412YY83|A0A412YY83_9FIRM Queuine tRNA-ribosyltransferase OS=[Clostridium] bolteae OX=208479; GN = tgt PE=3 SV=1

SEQ ID NO: 53943 - protein, 386 aa, Clostridium bolteae; identical to SEQ ID NO: 53941
  REGION 1..386: note = tr|A8S1J2|A8S1J2_CLOBW Queuine tRNA-ribosyltransferase OS=Clostridium bolteae (strain ATCC BAA-613 / WAL 16351) OX=411902 GN=tgt PE=3 SV=1

SEQ ID NO: 53944 - protein, 386 aa, Clostridium bolteae
  REGION 1..386: note = tr|R5F6Y4|R5F6Y4_9CLOT Queuine tRNA-ribosyltransferase OS=Clostridium bolteae CAG:59; OX = 1263064 GN=tgt PE=3 SV=1
MKYQVITKDGRAKRARMETVHGTVETPVFMNVGTVGAIKGAVSTDDLREIGTQVELSNTYHLHVRTGDKLIREFGGLHRFMNWDRPILTDSGGFQVFSLAGLRKIKEEGVYFNSHIDGHKIFMGPEESMQIQSNLGSTIAMAFDECPPSHAGDDYIRHSVERTTRWLARCKTEMERLNSLPDTVNRQQLLFGINQGGVVDEIRMEHARTIREMDLDGYAVGGLAVGESHEEMYHILDVTVPCLPEDKPVYLMGVGTPANILEAVDRGVDFFDCVYPSRNGRHGHVYTNQGKLNLFNQKYELDSRPIEEGCGCPACRSYSRAYIRHLLKAKEMLGMRLCTLHNLYFYNTMMKEIRDAIEEHRYAEYKAAKLAGMEGSGRAISTASDE

SEQ ID NO: 53945 - protein, 378 aa, unidentified
  source 1..378: note = Clostridium bornimense
  REGION 1..378: note = tr|W6S4A4|W6S4A4_9CLOT Queuine tRNA-ribosyltransferase OS=Clostridium bornimense; OX = 1216932 GN=tgt PE=3 SV=1
MAKYTLLKKDGNAKRGRFETVHGVIETPVFMNVGTLAAIKGAVSSMDLKDIGCQVELSNTYHLHLRPGDKVVKAMGGLHKFMNWDRPILTDSGGFQVFSLASMRKIKEEGVYFSSHIDGKKIFMGPEESMQIQSNLASTIAMAFDECIPNPSERPYVLDSVARTTRWLERCKNEMDRLNSLEDTINKDQLLFGINQGGIYEDIRIAHAKEIVKMDLDGYAIGGLAVGETHEEMYRTIDAVAPHMPENKPLYLMGVGLPSNILEAVDRGVDFFDCVLPARNGRHGHVFTAHGKINLKNAKYELDSTPIDEGCQCPACKHYSKAYIRHLFKAKELLAMRLCVLHNLYFYNKLMEDIRAAIDGGYFKSFKEEKLASWQGKA

SEQ ID NO: 53946 - protein, 376 aa, Clostridium botulinum
  REGION 1..376: note = sp|A5I6E9|TGT_CLOBH Queuine tRNA-ribosyltransferase; OS = Clostridium botulinum (strain Hall / ATCC 3502 / NCTC 13319 / Type A) OX=441771 GN=tgt PE=3 SV=1
MYKLLKKSGKARRGEFTTPHGVIQTPVFMNVGTLAAIKGAVSSMDLKEIGCQVELSNTYHLHLRPGDEVVKKMGGLHKFMNWDRPILTDSGGFQVFSLSKIRKIQEEGVYFNSHIDGRKIFMGPEESMRIQSNLASTIAMAFDECVENPAPREYVEKSVERTTRWLHRCKDEMNRLNSLPDTINNKQMLFGINQGGTYEDIRIEHAKTIAKMDLDGYAIGGLAVGESHEDMYRIIDAVVPHLPEDKPIYLMGVGIPSNILEAVDRGVDFFDCVLPARNGRHAHVFTKEGKINLLNAKFELDDRPIDEGCQCPACKHYTRSYIRHLFKAKEMLAMRLCVLHNLYFYNNLMEEIRDAIDGNYFKEYKERKLKEWGGRA

SEQ ID NO: 53947 - protein, 376 aa, Clostridium botulinum
  REGION 1..376: note = sp|C3KTD0|TGT_CLOB6 Queuine tRNA-ribosyltransferase; OS = Clostridium botulinum (strain 657 / Type Ba4) OX=515621; GN = tgt PE=3 SV=1
MYKLLKKSGKARRGEFTTPHGVIQTPVFMNVGTLAAIKGAVSSMDLKEIGCQVELSNTYHLHLRPGDEVVKKMGGLHKFMNWDRPILTDSGGFQVFSLSKIRKIQEEGVYFNSHIDGRKIFMGPEESMRIQSNLASTIAMAFDECVENPAPREYVEKSVERTTRWLHRCKDEMNRLNSLPDTINNKQMLFGINQGGTYEDIRIEHAKTIAKMDLDGYAIGGLAVGESHEDMYRIIDAVVPHLPEDKPIYLMGVGIPSNILEAVDRGVDFFDCVLPARNGRHAHVFTKEGKINLLNAKFELDDRPIDEGCQCPACKHYTRSYIRHLFKAKEMLAMRLCVLHNLYFYNNLMEEIRDAIDGDYFKEYKERKLKEWGGRA

SEQ ID NO: 53948 - protein, 378 aa, Clostridium butyricum
  REGION 1..378: note = tr|C4IKT5|C4IKT5_CLOBU Queuine tRNA-ribosyltransferase OS=Clostridium butyricum E4 str. BoNT E BL5262 OX=632245 GN=tgt PE=3 SV=1
MSKRYTLLKKDGKARRGQFVTPHGTIQTPVFMNVGTLAAIKGAVSSMDLKDIGCQVELSNTYHLHLRPTDTVVNKMGGLHKFMNWDRPILTDSGGFQVFSLSAMRKIKEEGVYFNSHIDGKKIFMGPEESMQIQSNLASTIAMAFDECIPNPSTREYVERSVARTTRWLERCKIEMDRLNSKDDTINKEQMLFGINQGGVYEDIRIAHAKEITKMDLDGYAIGGLAVGESHEDMYRIIDAVVPHLPEDKPIYLMGVGTPENILEAVDRGVDFFDCVLPARNGRHGNVYTSEGKLNLMNAKFELDEKPIDETCQCPACKHYTRSYIRHLFKAKEMLAMRLCVLHNLYFYNKLMEEIRTAIDGGYYKEFKEKKLQEWKVK

SEQ ID NO: 53949 - protein, 378 aa, Clostridium butyricum; identical to SEQ ID NO: 53948
  REGION 1..378: note = tr|A0A0N8VX66|A0A0N8VX66_CLOBU Queuine tRNA-ribosyltransferase OS=Clostridium butyricum OX=1492; GN = tgt PE=3 SV=1

SEQ ID NO: 53950 - protein, 376 aa, Clostridium cadaveris
  REGION 1..376: note = tr|A0A1I2MQ54|A0A1I2MQ54_9CLOT Queuine tRNA-ribosyltransferase OS=Clostridium cadaveris OX=1529; GN = tgt PE=3 SV=1
MYKLLKKSGKVRRGEFHTPHGVIQTPVFMNVGTLAAIKGAVSTMDLKEIGCQVELSNTYHLHLRPGDKVVKELGGLHQFMNWDRPILTDSGGFQVFSLASMRSIKEEGVYFNSHIDGRRIFMGPEESMQIQSNLASTIAMAFDECIPNPSSRDYVERSVARTTRWLERCKTEMDRLNDLPDTINKQQMLFGINQGGVYEDIRIEHAKTIAKMDLDGYAIGGLAVGETHEEMYRIIDAVVPYLPEDKPIYLMGVGTPENILEAVSRGVDFFDCVLPARNGRHGHVFTKNGKINLFNAKYELDKKPIDEGCQCPACKHYTRAYIRHLFKAKEMLAMRLCVLHNLYFYNTLFSDIRNAIDEDRFEEFKKEKLDQWSSRS

SEQ ID NO: 53951 - protein, 376 aa, Clostridium carboxidivorans
  REGION 1..376: note = tr|C6PXQ0|C6PXQ0_9CLOT Queuine tRNA-ribosyltransferase OS=Clostridium carboxidivorans P7; OX = 536227 GN=tgt PE=3 SV=1
MYKLLKKCGKARRGEFATPHGVIQTPVFMNVGTLAAIKGGVSSMDLKEIGCQVELSNTYHLHLRPSDEVVKKMGGLHKFMNWDRPILTDSGGFQVFSLAKMRKIKEEGVYFNSHIDGRKIFMGPEESMRIQSNLASTIAMAFDECIHNPSPRDYVEQSVARTTRWLQRCKDEMDRLNSLPDTINNKQMLFGINQGGIFEDIRIEHAKTISKMSLDGYAIGGLAVGESHEEMYRVIDAVVPYLPEDKPIYLMGVGIPSNILEAVDRGVDFFDCVLPARNGRHGHVFTKEGKINLFNAKYELDSKPIDEGCQCPACKHYSRAYIRHLFKAKEILAMRLCVLHNLYFYNNMMQEIRDAIDGDYFAEYKSEKLKQWNGRA

SEQ ID NO: 53952 - protein, 378 aa, Clostridium carnis
  REGION 1..378: note = tr|A0A3P6JJ56|A0A3P6JJ56_9CLOT Queuine tRNA-ribosyltransferase OS=Clostridium carnis OX=1530; GN = tgt PE=3 SV=1
MSKRYTLLKKDGKARRGQFETPHGTIQTPVFMNVGTLAAIKGAVSSMDLKEIGCQVELSNTYHLHLRPTDKVVRELGGLHEFMNWDRPILTDSGGFQVFSLSAMRKIKEEGVYFNSHIDGKKIFMGPEESMQIQSNLASTIAMAFDECIPNPSTREYVENSVARTTRWLERCKKEMDRLNSMPDTINKEQMLFGINQGGTYEDIRIAHAKEITKLDLDGYAIGGLAVGESHEDMYRIIDAVVPHLPEDKPIYLMGVGTPENILEAVSRGVDFFDCVLPARNGRHGNVYTKEGKLNLMNAKYELDKKPIEEGCECPACKHYTRAYIRHLFKAKEMLAMRLCVLHNLYFYNKLMAEIRDAIDDGCFEEFKEEKLKSWGNK

SEQ ID NO: 53953 - protein, 378 aa, Clostridium cavendishii
  REGION 1..378: note = tr|A0A1M6ABI3|A0A1M6ABI3_9CLOT Queuine tRNA-ribosyltransferase OS=Clostridium cavendishii DSM 21758 OX=1121302 GN=tgt PE=3 SV=1
MSKRYTLIKKDGKARRGEFRTPHGVIQTPVFMNVGTLAAIKGAVSSMDLKDIRCQVELSNTYHLHLRPGDNVVKKMGGLHKFMNWDRPILTDSGGFQVFSLAGMRKIKEEGVYFSSHIDGRKIFMGPEESMQIQSNLASTIAMAFDECIPNPSTREYVEKSVERTTRWLERCKIEMDRLNSLEDTINKEQMLFGINQGGVYEDIRIEHAKTITKMDLDGYAIGGLAVGETHEEMYRVIDAVVPHLPEDKPIYLMGVGTPENILEAVERGVDFFDCVLPARNGRHGHLFTSEGSIKLMNAKYELDARPIDEKCDCPACKNYTRAYIRHLFKAKEMLAMRLCVLHNLYFYNKLMEEVRAAIDANCYSEFKEQKLKEWGKK

SEQ ID NO: 53954 - protein, 379 aa, Clostridium celatum
  REGION 1..379: note = tr|L1QDY1|L1QDY1_9CLOT Queuine tRNA-ribosyltransferase OS=Clostridium celatum DSM 1785; OX = 545697 GN=tgt PE=3 SV=1
MSKRYTLLKKDGKARRGRFVTPHGTIETPVFMNVGTLAAIKGAVSSMDLKEIGCQVELSNTYHLHLRPSDRVVAKMGGLHKFMNWDRPILTDSGGFQVFSLSGMRKIKEEGVYFNSHIDGKKIFMGPEESMQIQSNLASTIAMAFDECIPNPSTREYVINSVARTNRWLDRCIAEMKRLNSLPETINKEQMLFGINQGGCYEDIRIEHAKHLAKLDMDGYAIGGLAVGETHEEMYRVIDAVVPHLPQDKPIYLMGVGTPENILEAVERGVDFFDCVLPARNGRHGHVFNSEGKINLMNAKFELDERPIDEGCQCPACKNYTRSYIRHLFKAKEMLAMRLCVLHNLYFYNKLMEEIREAIDNGNYAEFKAKKLKEWNIKK

SEQ ID NO: 53955 - protein, 379 aa, unidentified
  source 1..379: note = [Clostridium] celerecrescens
  REGION 1..379: note = tr|A0A084JRM6|A0A084JRM6_9FIRM Queuine tRNA-ribosyltransferase OS=[Clostridium] celerecrescens; OX = 29354 GN=tgt PE=3 SV=1
MNYKIVAKDGRAKRAEVTTVHGTIQTPVFMNVGTVGAIKGAVSTDDLREIRTQVELSNTYHLHVRTGDKLIKEFGGLHKFMNWDRPILTDSGGFQVFSLTGLRKIKEEGVYFQSHIDGHKIFMGPEESMQIQSNLASTIAMAFDECPPHPATREYMQNSVDRTTRWLERCRVEMAKLNSHPDTLNKDQLLFGINQGGTYEDIRITHAKTISAMDLDGYALGGLAVGESHEEMYRILDETVPYLPENKPTYLMGVGTPANILEAVDRGVDFFDCVYPSRNGRHGHVYTNHGKMNLFNTKYELDHRPIEEGCGCPACRSYSRAYIRHLLKAKEMLGMRLCVLHNLYFYNTMMEEIRDAIENHRYGEYKEQKLSGMMAGQTT

SEQ ID NO: 53956 - protein, 379 aa, unidentified
  source 1..379: note = [Clostridium] celerecrescens
  REGION 1..379: note = tr|A0A2M8ZC12|A0A2M8ZC12_9FIRM Queuine tRNA-ribosyltransferase OS=[Clostridium] celerecrescens 18A OX=1286362 GN=tgt PE=3 SV=1
MNYKIVAKDGRAKRAEVTTVHGTIQTPVFMNVGTVGAIKGAVSTDDLREIRTQVELSNTYHLHVRTGDKLIKEFGGLHKFMNWDRPILTDSGGFQVFSLTGLRKIKEEGVYFQSHIDGRKIFMGPEESMQIQSNLASTIAMAFDECPPHPATREYMQNSVDRTTRWLERCQAEMAKLNSQPDTLNKDQLLFGINQGGTFEDIRIAHAKTISAMDLDGYALGGLAVGESHEEMYRILDETVPHLPENKPTYLMGVGTPANILEAVDRGVDFFDCVYPSRNGRHGHVYTNHGKMNLFNTKYELDHRPIEEGCGCPACRSYSRAYLRHLLKAKEMLGMRLCVLHNLYFYNTMMEEIRDAIENHRYGEYKEQKLSGMMAGQTT

SEQ ID NO: 53957 - protein, 376 aa, unidentified
  source 1..376: note = [Clostridium] cellulosi
  REGION 1..376: note = tr|A0A078KST4|A0A078KST4_9FIRM Queuine tRNA-ribosyltransferase OS=[Clostridium] cellulosi; OX = 29343 GN=tgt PE=3 SV=1
MFELIKMEGRARRGRLKTVHGEVETPAFMNVATSAAIKGGISALDLVGLKCQVALCNTYHLHLRPGDEVIRDLGGLHKFMNWQRPILTDSGGFQVFSLSSLRKITEEGVHFASHIDGRRIFMGPEESMRIQANLGSTIAMAFDECVANPAEYEYAKKSSERTIRWLYRCKEELDRLKADGVAVNKEQMLFGINQGATYDDLRIDNMKKIAELDLDGYAIGGLAVGESAEEMYHIIDCVEQYMPQNKVRYLMGVGTPLNIIEAVSLGVDIFDCVMPSRNARHAHVFTWSGKRNLMNAKYERDTLPIDPECDCPTCRNFSRAYIHHLFKAQEMLAMRLSVMHNLYFYNTLMQKIRNALDNGTFNEFRKRVSEKIDKRI

SEQ ID NO: 53958 - protein, 378 aa, Clostridium cellulovorans
  REGION 1..378: note = tr|D9SMV7|D9SMV7_CLOC7 Queuine tRNA-ribosyltransferase OS=Clostridium cellulovorans (strain ATCC 35296 / DSM 3052 / OCM 3 / 743B) OX=573061; GN = tgt PE=3 SV=1
MAEYKLLKKEKNARRGEFKTVHGTIQTPVFMNVGTLAAIKGAVSSMDLKEIGCQVELSNTYHLHLRPGDNIVRDMGGLHKFMNWDRPILTDSGGFQVFSLAGMRKIKEEGVHFSSHIDGKKIFMGPEESMQIQNNLASTIAMAFDECIPNPSTREYVIDSVARTTRWLERCKTEMDRLNSLPETINKDQLLFGINQGGTYEDIRIEHAKTITKMNLDGYAIGGLAVGESHEEMYKVIDAVVPHLPEDKPIYLMGVGLPSNILEAVERGVDFFDCVLPARNGRHGHVFTKEGKINLLNAKYEKDSKPIDEGCQCPACKNYTRAYIRHLFKAKEMLALRLCVLHNLYFYNKLMEDIRNAIDNDNFHNFKAEKLEQWNGRG

SEQ ID NO: 53959 - protein, 379 aa, unidentified
  source 1..379: note = [Clostridium] cf.
  REGION 1..379: note = tr|D6DH52|D6DH52_CLOSC Queuine tRNA-ribosyltransferase OS=[Clostridium] cf. saccharolyticum K10 OX=717608 GN=tgt PE=3 SV=1
MEYKILAKDGRAKRAQMKTVHGTIQTPVFMNVGTVAAIKGAVSTDDLKTIGTQVELSNTYHLHVRTGDKLIREFGGLHKFMHWDRPILTDSGGFQVFSLAGLRKIKEEGVYFNSHIDGRKIFMGPEESMQIQSNLGSTIAMAFDECPPSKASREYVQNSVERTTRWLKRCKAEMERLNSLPDTVNREQLLFGINQGAVYEDIRIAHAEEIGALDLDGYAVGGLAVGESHEEMYRILDAVVPHLPENKPTYLMGVGTPANILEAVDRGVDFFDCVYPSRNGRHGHVYTNHGKLNMFNAKYELDPRPIEEGCQCPACRSYSRAYIRHLMKAKEMLGMRLCVLHNLYFYNKMMEEIRDAIDNHCYAEYKERKLSGMAAGEKN

SEQ ID NO: 53960 - protein, 380 aa, Clostridium chauvoei
  REGION 1..380: note = tr|S6F0E6|S6F0E6_9CLOT Queuine tRNA-ribosyltransferase OS=Clostridium chauvoei JF4335; OX = 1351755 GN=tgt PE=3 SV=1
MSKKRYTLLKKDGAARRGRFETPHGTIETPVFMNVGTCAVIKGAVSTMDLKEIGCQVELSNTYHLHLRPSDKVVAKLGGLHEFMNWDRPILTDSGGFQVFSLSGMRKIKEEGVYFSSHIDGRKIFMGPEESMQIQSNLASTIAMAFDECIPNPSTREYVEKSVARTTRWLERCKVEMDRLNSLDDTINKEQMLFGINQGGCYEDIRIEHAKTITKMDLDGYAIGGLAVGETHEEMYRIIDAVVPYLPEDKPIYLMGVGTPENILEAVDRGVDFFDCVLPARNGRHGHVFTKNGKINLMNAKFELDTRPIDEGCQCPACRSYTRAYIRHLFKAKEMLAMRLCVLHNLYFYNKLMEDIRAAIDGGYYKEFKEQKIKEWNTKA

SEQ ID NO: 53961 - protein, 379 aa, Clostridium chromiireducens
  REGION 1..379: note = tr|A0A1V4IHN4|A0A1V4IHN4_9CLOT Queuine tRNA-ribosyltransferase OS=Clostridium chromiireducens; OX = 225345 GN=tgt PE=3 SV=1
MSKRYTLLKKDGKARRGQFETPHGTIQTPVFMNVGTLAAIKGAVSSMDLKEIGCQVELSNTYHLHLRPGDKVVYKLGGLHEFMNWDRPILTDSGGFQVFSLAKMRKIKEEGVYFNSHIDGKKIFMGPEESMQIQSNLASTIAMAFDECIENPATREYVERSVERTTRWLERCKIEMDRLNSMPETINKEQMLFGINQGGVYEDIRIKHAKEITQMDLDGYAIGGLAVGETHEEMYRVIDAVVPYLPEDKPIYLMGVGTPSNILEAVDRGVDFFDCVLPARNGRHGNVFCSEGKLNLMNAKFELDTRPIDEGCECPTCRNYTRAYIRHLFKAKEMLAMRLCVLHNLYFYNKLMADIRDAIDGGYFKEFKEKKLAQWEGRA

SEQ ID NO: 53962 - protein, 381 aa, unidentified
  source 1..381: note = [Clostridium] citroniae
  REGION 1..381: note = tr|A0A3E2V8N3|A0A3E2V8N3_9FIRM Queuine tRNA-ribosyltransferase OS=[Clostridium] citroniae; OX = 358743 GN=tgt PE=3 SV=1
MKYQVITKDQKAKRARMETVHGVIETPVFMNVGTVGAIKGAVSTDDLREIGTQVELSNTYHLHVRTGDKLIKEFGGLHKFMSWDRPILTDSGGFQVFSLTKLRKIKEEGVYFNSHIDGHKIFMGPEESMQIQSNLGSTIAMAFDECPPSHASYEYIRQSVDRTTRWLARCKEEMARLNGLPDTVNREQLLFGINQGGVVDEIRIQHAKTIREMDLDGYAVGGLAVGESHEEMYHILDVTVPHLPEDKPVYLMGVGTPANILEAVDRGVDFFDCVYPSRNGRHGHVYTNHGKLNLFNQKYELDSRPIEEGCGCPACRSYSRAYIRHLLKAKEMLGMRLCTLHNLYFYNTMMKEIRDAIEEHRYSEYKAAKLAGMESSLKANE

SEQ ID NO: 53963 - protein, 381 aa, unidentified
  source 1..381: note = [Clostridium] citroniae
  REGION 1..381: note = tr|A0A0J9CG32|A0A0J9CG32_9FIRM Queuine tRNA-ribosyltransferase OS=[Clostridium] citroniae WAL-19142 OX=742734 GN=tgt PE=3 SV=1
MKYQVITKDQKAKRARMETVHGVIETPVFMNVGTVGAIKGAVSTDDLREIGTQVELSNTYHLHVRTGDKLIKEFGGLHKFMSWDRPILTDSGGFQVFSLTKLRKIKEEGVYFNSHIDGHKIFMGPEESMQIQSNLGSTIAMAFDECPPSHASDEYIRQSVDRTTRWLARCKEEMARLNGLPDTVNREQLLFGINQGGVVDEIRIQHAKTIREMDLDGYAVGGLAVGESHEEMYHILDVTVPHLPEDKPVYLMGVGTPANILEAVDRGVDFFDCVYPSRNGRHGHVYTNHGKLNLFNQKYELDSRPIEEGCGCPACRSYSRAYIRHLLKAKEMLGMRLCTLHNLYFYNTMMKEIRDAIEEHRYSEYKAAKLAGMESSLKANE

SEQ ID NO: 53964 - protein, 386 aa, unidentified
  source 1..386: note = [Clostridium] clostridioforme
  REGION 1..386: note = tr|A0A227LPU2|A0A227LPU2_9FIRM Queuine tRNA-ribosyltransferase OS=[Clostridium] clostridioforme; OX = 1531 GN=tgt PE=3 SV=1
MKYQVITKDGRAKRARMETVHGTVETPVFMNVGTVGAIKGAVSTDDLREIGTQVELSNTYHLHVRTGDKLIKEFGGLHRFMNWDRPILTDSGGFQVFSLAGLRKIKEEGVYFNSHIDGHKIFMGPEESMRIQSNLGSTIAMAFDECPPSHASDDYIRHSVERTTRWLARCKTEMERLNSLPDTVNREQLLFGINQGGVVEEIRMEHARTIREMDLDGYAVGGLAVGESHEEMYHILDVTVPCLPEDKPVYLMGVGTPANILEAVDRGVDFFDCVYPSRNGRHGHVYTNQGKLNLFNQKYELDSRPIEEGCVCPACRSYSRAYIRHLLKAKEMLGMRLCTLHNLYFYNTMMKEIRDAIEEHRYAEYKAAKLAGMEGSSRATGTASDE

SEQ ID NO: 53965 - protein, 386 aa, unidentified
  source 1..386: note = [Clostridium] clostridioforme
  REGION 1..386: note = tr|A0A174I3L6|A0A174I3L6_9FIRM Queuine tRNA-ribosyltransferase OS=[Clostridium] clostridioforme; OX = 1531 GN=tgt PE=3 SV=1
MKYQVITKDGRAKRARMETVHGTVETPVFMNVGTVGAIKGAVSTDDLREIGTQVELSNTYHLHVRTGDKLIKEFGGLHRFMNWDRPILTDSGGFQVFSLAGLRKIKEEGVYFNSHIDGHKIFMGPEESMRIQSNLGSTIAMAFDECPPSHASDDYIRHSVERTTRWLARCKTEMERLNSLPDTVNREQLLFGINQGGVVEEIRMEHARTIREMDLDGYAVGGLAVGESHEEMYHILDVTVPCLPEDKPVYLMGVGTPANILEAVDRGVDFFDCVYPSRNGRHGHVYTNQGKLNLFNQKYELDSRPIEEGCGCPACRSYSRAYIRHLLKAKEMLGMRLCTLHNLYFYNTMMKEIRDAIEEHRYAEYKAAKLAGMEGSSRATGTASDE

SEQ ID NO: 53966 - protein, 386 aa, Clostridium clostridioforme
  REGION 1..386: note = tr|R7PLR0|R7PLR0_9CLOT Queuine tRNA-ribosyltransferase OS=Clostridium clostridioforme CAG:511 OX=1263066 GN=tgt PE=3 SV=1
MKYQVITKDGRAKRARMETVHGTVETPVFMNVGTVGAIKGAVSTDDLREIGTQVELSNTYHLHVRTGDKLIKEFGGLHRFMNWDRPILTDSGGFQVFSLAGLRKIKEEGVYFNSHIDGHKIFMGPEESMQIQSNLGSTIAMAFDECPPSHASDDYIRHSVERTTRWLARCKTEMERLNSLPDTVNREQLLFGINQGGVVEEIRMEHARTIREMDLDGYAVGGLAVGESHEEMYHILDVTVPCLPEDKPVYLMGVGTPANILEAVDRGVDFFDCVYPSRNGRHGHVYTNQGKLNLFNQKYELDSRPIEEGCGCPACRSYSRAYIRHLLKAKEMLGMRLCTLHNLYFYNTMMKEIRDAIEEHRYAEYKAAKLAGMEGSSRATGTASDE

SEQ ID NO: 53967 - protein, 386 aa, Clostridium clostridioforme; identical to SEQ ID NO: 53965
  REGION 1..386: note = tr|R6JTY3|R6JTY3_9CLOT Queuine tRNA-ribosyltransferase OS=Clostridium clostridioforme CAG:132 OX=1263065 GN=tgt PE=3 SV=1

SEQ ID NO: 53968 - protein, 376 aa, Clostridium cochlearium
  REGION 1..376: note = tr|A0A1G9HHZ3|A0A1G9HHZ3_CLOCO Queuine tRNA-ribosyltransferase OS=Clostridium cochlearium OX=1494; GN = tgt PE=3 SV=1
MYTLIKKCGNAKRGRFETPHGTIETPVFMNVGTLAAIKGAVSTMDLKEIGCQVELSNTYHLHLRPGDEVIKKMGGLHKFMNWDRPILTDSGGFQVFSLAKIRKIQEEGVYFNSHIDGRRIFMGPEESMRIQSNIASTIAMAFDECIPNPSTREYVEQSVARTTRWLERCKKEMDRLNSLPDTINKKQMLFGINQGGTYEDIRKAHAKTIVDMDLDGYAIGGLAVGETHEEMYRIIEEVAPIFPDNKPLYLMGVGLPSNILEAVDRGVDFFDCVLPARNGRHGHVFTKYGKINLMNAKFELDENPIDEGCECPACKHYSRAYIRHLFKAKEMLAMRLCVLHNLYFYNKLMEDIRKAIEGDYFKEFKKEKLHNWNGKA

SEQ ID NO: 53969 - protein, 376 aa, Clostridium cochlearium
  REGION 1..376: note = tr|A0A240AQP3|A0A240AQP3_CLOCO Queuine tRNA-ribosyltransferase OS=Clostridium cochlearium OX=1494; GN = tgt PE=3 SV=1
MYTLIKKCGNAKRGRFETPHGTIETPVFMNVGTLAAIKGAVSTMDLKEIGCQVELSNTYHLHLRPGDEVIKKMGGLHKFMNWDRPILTDSGGFQVFSLAKIRKIQEEGVYFNSHIDGRRIFMGPEESMRIQSNIASTIAMAFDECIPNPSTREYVEQSVARTTRWLERCKKEMDRLNSLPDTINKKQMLFGINQGGTYEDIRKAHAKTIVDMDLDGYAIGGLAVGETHEEMYRIIEEVAPIFPDNKPLYLMGVGLPSNILEAVDRGVDFFDCVLPARNGRHGHVFTKYGKINLMNAKFELDENPIDEGCECPACKHYSRAYIRHLFKAKEMLAMRLCVLHNLYFYNKLMEDIRKAIEGDYFKEFKKEKLQNWNGKA

SEQ ID NO: 53970 - protein, 378 aa, unidentified
  source 1..378: note = [Clostridium] cocleatum
  REGION 1..378: note = tr|A0A1I0C592|A0A1I0C592_9FIRM Queuine tRNA-ribosyltransferase OS=[Clostridium] cocleatum; OX = 69824 GN=tgt PE=3 SV=1
MAAISYELKHICKQSGARYGILHTPHGDVETPMFMPVGTLATVKGISPEMLKEMHSQVILANTYHLWLRPGEDVIAQAGGLHKFMNYNGPMLTDSGGFQVFSLGKTRKIEEEGVKFKSIIDGSSLFLSPEKAIEIQNKLGADIIMSFDECAPYPCTYEYMKNSMERTLRWAKRGKEAHKNTDKQALFGIVQGGEFPDLREHCAKELVAMDFPGYSIGGTSVGEPKDVMYKMVDDAIKWLPEDKPRYLMGVGNPIDLIECAIRGIDMYDCVLPTRVARHGAVMTSQGRLNINNEKFKYDFTPLDPECDCYACKNYTKAYIRHLHKCDEIFGKTLLSIHNVNFLLQLAKDIREAIKEDRLLDFKEEFLNKYGHDVYKRAF

SEQ ID NO: 53971 - protein, 376 aa, Clostridium colicanis
  REGION 1..376: note = tr|A0A151ARA5|A0A151ARA5_9CLOT Queuine tRNA-ribosyltransferase OS=Clostridium colicanis DSM 13634; OX = 1121305 GN=tgt PE=3 SV=1
MFKLHKKEKRARRGEFITPHGVIQTPVFMNVGTLAAIKGAVSTMDLKDIRCQVELSNTYHLHLRPGDKIIKQLGGLHKFMNWDRPILTDSGGFQVFSLSKIREIEEEGVTFRSHIDGRRIFMGPEESMQIQSNLASTIAMAFDECIENPSPRDYVEKSVARTTRWLERCKIEMDRLNSLPDTINKKQMLFGINQGGVYEDIRIAHAKEISKMDLDGYAIGGLAVGETHEEMYRIIEAVDPYLPEDKPRYLMGVGIPSNILEAVSRGVDFFDCVLPARNGRHGHVFTKYGKINLMNAKFELDSRPIDEGCDCPACQHYTRAYIRHLFKAKEMLAMRLCVLHNLYFYNKLMEDIRDAIDGGYFEDFKAQKLEEWGGRA

SEQ ID NO: 53972 - protein, 377 aa, Clostridium collagenovorans
  REGION 1..377: note = tr|A0A1M5YD15|A0A1M5YD15_9CLOT Queuine tRNA-ribosyltransferase OS=Clostridium collagenovorans DSM 3089 OX=1121306 GN=tgt PE=3 SV=1
MGQYTLLKRDGKTRRGEFKTVHGTIQTPVFMNVGTLAAIKGAVSSMDLKEIGCQVELSNTYHLHLRPTDKVVGELGGLHKFMNWDRPILTDSGGFQVFSLAAMRKIKEEGVYFNSHIDGRKIFMGPEESMQIQSNLASTIAMAFDECIPNPSTREYVENSVARTTRWLERCKKEMDRLNSLPDTINKDQMLFGINQGGTYEDIRIEHAKTISKMDLDGYAIGGLAVGESHEDMYKVIDAVVPHLPVDKPIYLMGVGTPANILEAVERGVDFFDCVLPARNGRHGHLFTKDGKINIMNAKYELDTKPIDEGCQCPACKHYTRAYIRHLFKAKEMLAMRLAVLHNLYFYNNLMQEIRDAIDADNFAGFKAKKLQEWGIK

SEQ ID NO: 53973 - protein, 376 aa, unidentified
  source 1..376: note = Clostridium combesii
  REGION 1..376: note = tr|A0A2G7HK87|A0A2G7HK87_9CLOT Queuine tRNA-ribosyltransferase OS=Clostridium combesii OX=39481; GN = tgt PE=3 SV=1
MYKLLKKSGKARRGEFTTPQGVIQTPVFMNVGTLAAIKGAVSSMDLKEIGCQVELSNTYHLHLRPGDEVVKKMGGLHKFMNWDRPILTDSGGFQVFSLSKIRKIQEEGVYFNSHIDGRKIFMGPEESMRIQSNLASTIAMAFDECVENPASREYVEKSVERTTRWLHRCKDEMNRLNSLPDTINNKQMLFGINQGGTYEDIRIEHAKTIAKMDLDGYAIGGLAVGESHEDMYRIIDAVVPHLPEDKPIYLMGVGIPSNILEAVDRGVDFFDCVLPARNGRHAHVFTKEGKINLLNAKFELDDKPIDEGCQCPACKHYTRSYIRHLFKAKEMLAMRLCVLHNLYFYNNLMEEIRDAIDGDYFKEYKERKLKEWGGRA

SEQ ID NO: 53974 - protein, 374 aa, unidentified; identical to SEQ ID NO: 53934
  source 1..374: note = Clostridium coskatii
  REGION 1..374: note = tr|A0A162LDT0|A0A162LDT0_9CLOT Queuine tRNA-ribosyltransferase OS=Clostridium coskatii OX=1705578; GN = tgt PE=3 SV=1

SEQ ID NO: 53975 - protein, 378 aa, Clostridium cylindrosporum
  REGION 1..378: note = tr|A0A0J8DAD3|A0A0J8DAD3_CLOCY Queuine tRNA-ribosyltransferase OS=Clostridium cylindrosporum DSM 605 OX=1121307 GN=tgt PE=3 SV=1
MEPVVKYELIKRCKQSGARLGRIHTPHGVIETPIFMPVGTQATVKAMTPHELKDIGSQIILSNTYHLFLRPGHKLIERAGGLHKFMNWDRPILTDSGGFQVFSLTDLRKIEEEGVTFKSHIDGSKQFLSPEKAMEIQNSLGADIMMAFDECPPYEADYDYTKKSLAMTLRWAERCLKSHSRPNDQALFGIIQGGMYKDLREEALDEMVKMDFPGYALGGLSIGEPQETMVKVLSWVAEKMPEHKPRYLMGIGSPDYIFEAVLNGIDMFDCVLQTRIARNGTVFTSNGRLVIKNAQYAEDMRPLDEECDCYACQNFTRGYIRHLFKAQEILGARLTTIHNLRFTLKLVEQIREAIKGDYLLDFRDEFYRKFGYTQKYTK

SEQ ID NO: 53976 - protein, 378 aa, Clostridium diolis; identical to SEQ ID NO: 53939
  REGION 1..378: note = tr|A0A2P8RKU3|A0A2P8RKU3_9CLOT Queuine tRNA-ribosyltransferase OS=Clostridium diolis OX=223919; GN = tgt PE=3 SV=1

SEQ ID NO: 53977 - protein, 379 aa, Clostridium disporicum
  REGION 1..379: note = tr|A0A174HZM0|A0A174HZM0_9CLOT Queuine tRNA-ribosyltransferase OS=Clostridium disporicum OX=84024; GN = tgt PE=3 SV=1
MSKRYTLLKKDGKARRGRFETPHGTIETPVFMNVGTLAAIKGGVSSMDLKEIGCQVELSNTYHLHLRPSDKVVAKMGGLHKFMNWDRPILTDSGGFQVFSLSSMRKIKEEGVYFNSHIDGKKIFMGPEESMQIQSNLASTIAMAFDECIPNPSTREYVLQSVARTNRWLERCKIEMDRLNSLPETINKEQMLFGINQGGCYEDIRIEHAKHIAKMDLDGYAIGGLAVGETHEEMYRVIDAVVPHLPEDKPIYLMGVGTPENILEAVDRGVDFFDCVLPARNGRHGHVFTGQGKINLMNAKFELDERPIDEGCECPACKHYTRSYIRHLFKAKEMLALRLCVLHNLYFYNKLMADIRTAIDNGTYSEFKEQKLREWNCKK

SEQ ID NO: 53978 - protein, 380 aa, Clostridium disporicum
  REGION 1..380: note = tr|A0A174DVL5|A0A174DVL5_9CLOT Queuine tRNA-ribosyltransferase OS=Clostridium disporicum OX=84024; GN = tgt PE=3 SV=1
MSKKRYTLLKKDGNARRGRFETPHGTIETPVFMNVGTLAAIKGAVSSMDLKEIGCQVELSNTYHLHLRPTDKVVAKMGGLHEFMNWDRPILTDSGGFQVFSLAGMRKIKEEGVYFNSHIDGKKIFMGPEESMQIQSNLASTIAMAFDECIPNPSTREYVEKSVARTNRWLDRCIAEMNRLNSLPETINKEQMLFGINQGGCYEDIRIEHAKHLASLDMDGYAIGGLAVGETHEEMYRVIEAVVPHLPEDKPIYLMGVGTPENIIEAVDRGVDFFDCVLPARNGRHGHVFTGEGKINLFNAKFELDNRPIDEGCQCPACKHYTRAYIRHLFKAKEMLAMRLCVLHNLYFYNKLMEDIRAAIDAGNYKEFKEQKLREWNIKK

SEQ ID NO: 53979 - protein, 376 aa, Clostridium drakei
  REGION 1..376: note = tr|A0A2U8DWQ6|A0A2U8DWQ6_9CLOT Queuine tRNA-ribosyltransferase OS=Clostridium drakei OX=332101; GN = tgt PE=3 SV=1
MYKLLKKSGKARRGEFTTAHGVIQTPVFMNVGTLAAIKGGVSSMDLKEIGCQVELSNTYHLHLRPGDEVVKKMGGLHKFMNWDRPILTDSGGFQVFSLAKMRKIKEEGVYFNSHIDGRKIFMGPEESMRIQSNLASTIAMAFDECIHNPSPRDYVEQSVARTTRWLQRCKDEMDRLNSLPDTINDKQMLFGINQGGIFEDIRIEHAKTISKMNLDGYAIGGLAVGESHEEMYRVIDAVVPYLPEDKPIYLMGVGIPSNILEAVDRGVDFFDCVLPARNGRHGHVFTKEGKINLFNAKYELDSKPIDEGCQCPACKNYSRAYIRHLFKAKEILAMRLCVLHNLYFYNNMMQEIRDAIDGNYFAEYKSEKLKQWNGRA

SEQ ID NO: 53980 - protein, 376 aa, Clostridium estertheticum
  REGION 1..376: note = tr|A0A1J0GH58|A0A1J0GH58_9CLOT Queuine tRNA-ribosyltransferase OS=Clostridium estertheticum subsp. estertheticum OX=1552 GN=tgt PE=3 SV=1
MYKLLKKSGKVRRGEFTTPHGTIQTPVFMNVGTLAVIKGAVSTMDLKEINCQVELSNTYHLHLRPTDTVVRKMGGLHKFMNWDRPILTDSGGFQVFSLSKMRKIKEEGVYFNSHIDGKKIFMGPEESMQIQSNLASTIAMAFDECIPNPSTKEYVVDSVARTTRWLERCKIEMDRLNSLSDTINNKQMLFGINQGGTYEDIRIEHAKTISKMDLDGYAIGGLAVGESHEEMYRIIDAVVPHLPQDKPIYLMGVGYPSNILEAVSRGVDFFDCVLPARNGRHGNVFTKDGRINMFNAKFELDAGPIDEGCNCPTCKHYTRAYIRHLFKAKEMLAMRLCVLHNLYFYNKLMEDIRDAIDNDCFEEFKAEKLAQWNEGK

SEQ ID NO: 53981 - protein, 379 aa, Clostridium fallax
  REGION 1..379: note = tr|A0A1M4UBS2|A0A1M4UBS2_9CLOT Queuine tRNA-ribosyltransferase OS=Clostridium fallax OX=1533; GN = tgt PE=3 SV=1
MSKDYTLLKKDGEARRGEFRTPHGTIQTPVFMNVGTLAAIKGAVSTMDLKEVGCQVELSNTYHLHLRPGDKVVKKMGGLHKFMNWDRPILTDSGGFQVFSLAGIRKIKEEGVYFNSHIDGKKIFMGPEESMQIQSNLASTIAMAFDECIEIPSPRDYVEKSVARTTRWLERCKKEMDRLNSLDDTINKKQMLFGINQGATFKDIRIEHAKTISKMDLDGYAIGGLAVGETHEEMYEIIETVVPYLPEDKPIYLMGVGLPSNILEAVDRGVDFFDCVLPARNGRHGHVFTKEGKINLFNAKFELDNRPIDEGCQCPACKNYTRAYIRHLFKAKEMLAMRLCVLHNLYFYNKLMEDIRNAIDNGNFKEFKKQKLEEWGGRA

SEQ ID NO: 53982 - protein, 376 aa, Clostridium felsineum
  REGION 1..376: note = tr|A0A1S8LKX8|A0A1S8LKX8_9CLOT Queuine tRNA-ribosyltransferase OS=Clostridium felsineum DSM 794; OX = 1121310 GN=tgt PE=3 SV=1
MYTLLKKTGKVRRGRFETVHGTIETPVFMNVGTLGAIKGAVSSMDLKEINCQVELSNTYHLSLRPGDDVIKKLGGLHKFMNWDRPILTDSGGFQVFSLAEIRKIKEEGVYFNSHIDGRKIFMGPEESMRIQSNIASTIAMAFDECIENPSPRDYVERSVERTTRWLVRCKEELDRLNSLPDTINKNQMLFGINQGGVYEDIRIEHAKTIAKMNLDGYAIGGLAVGETHEEMYRIIDAVVPHLPQDKPIYLMGVGTPTNILEAVSRGVDFFDCVLPARNGRHGHVFTKRGKINLRNEKFELDDTPIDEGCQCPTCKNYTRAYIRHLFKAKEMLAMRLCVLHNLYFYNTLMADIRKAIDEDRFEEFKNEKLEAWNGKA

SEQ ID NO: 53983 - protein, 380 aa, unidentified
  source 1..380: note = [Clostridium] fimetarium
  REGION 1..380: note = tr|A0A1I0QZC4|A0A1I0QZC4_9FIRM Queuine tRNA-ribosyltransferase OS=[Clostridium] fimetarium; OX = 99656 GN=tgt PE=3 SV=1
MENTYKLLKTDGLAKRGELHTVHGVIQTPVFMNVGTVAAIKGAVATTDLREIGTQVQLSNTYHLHVRPGDDVIRKMGGLHKFMNWDKPILTDSGGFQVFSLAGMRKIKEEGVTFHSHIDGRKIFMGPEESMQIQSNLASTIAMAFDECPPHPATREYMQDSVDRTTRWLNRCVIEMDRLNSLPDTLNKNQMLFGINQGGTYEDIRIEHAKVIADLNLPGYALGGLAVGESHEEMYRIIEQTVPYLPQNKPTYLMGVGTAANILESVDRGVDFFDCVYPSRNGRHGHLYTRFGKINIFNAKFETDSEPIEEGCQCPACKNYSRGYIRHLMKAKEMLGMRLCVLHNLYFYNHLMGEIRDAIDAGNYAQYKKDKLECLKTYDS

SEQ ID NO: 53984 - protein, 372 aa, Clostridium formicaceticum
  REGION 1..372: note = tr|A0A1D9FNJ0|A0A1D9FNJ0_9CLOT Queuine tRNA-ribosyltransferase OS=Clostridium formicaceticum; OX = 1497 GN=tgt PE=3 SV=1
MALTYELIKECKQSGARLGKIHTKRGTIETPIFMPVGTQATVKTMAPEELKEIKSQIILSNTYHLYLRPGHELVKKAGGLHKFMNWDKPILTDSGGFQVFSLGDLRKISEEGVEFRSHLDGSKHFISPEKAVEIQNALGSDIMMVFDECAPYPADRDYVKKSLERTTRWAKRCKEAHKNIEDQNLFGIIQGGMYADLRKQSAQELLELDFPGYAVGGLSVGEPKPLMYEVLEHTTPLMPKNKPRYLMGVGSPDCLIEGAIRGIDMFDCVLPTRIARNGTAMTSRGKVVIKNAKYTEDFEGLDPECSCYTCRNYSKAYLRHLFKANEVLGLRLLSYHNLYFLLKLMEEIREAIKEDRLLDYRKSFFQKYGYEV

SEQ ID NO: 53985 - protein, 376 aa, Clostridium frigidicarnis
  REGION 1..376: note = tr|A0A1I0VMG6|A0A1I0VMG6_9CLOT Queuine tRNA-ribosyltransferase OS=Clostridium frigidicarnis; OX = 84698 GN=tgt PE=3 SV=1
MYKLLKKSGKVRRGEFHTPHGVIQTPVFMNVGTLAAIKGAVSSMDLKDIGCQVELSNTYHLHLRPGDKVVRQMGGLHEFMNWDRPILTDSGGFQVFSLAGLRKIKEEGVYFSSHIDGRKIFMGPEESMQIQSNLGSTIAMAFDECIEIPSPREYVEKSVGRTVRWLERCKTEMDRLNSLPDTVNNKQMLFGINQGATFKDIRIEHAKTIAKMDLDGYAIGGLAVGETHEEMYDIIDTVVPYLPQDKPIYLMGVGLPSNILEAVSRGVDFFDCVLPARNGRHGHVFTKDGKINIMNAKFELDGSPIDEGCQCPACKNYTRSYIRHLFKAKEMLAMRLCVLHNLYFYNKLMEDIRNAIDGDYFEDFKKEKLEAWQGRA

SEQ ID NO: 53986 - protein, 380 aa, Clostridium gasigenes
  REGION 1..380: note = tr|A0A1H0UCW8|A0A1H0UCW8_9CLOT Queuine tRNA-ribosyltransferase OS=Clostridium gasigenes OX=94869; GN = tgt PE=3 SV=1
MSKKRYTLLKKEGKARRGRFETPHGTIETPVFMNVGTLAVIKGAVSSMDLKEIGCQVELSNTYHLHLRPSDDVVYKLGGLHKFMNWDRPILTDSGGFQVFSLAGMRKIKEEGVYFSSHIDGRKIFMGPEESMQIQSNLASSIAMAFDECIPNPSTRDYVEKSVERTTRWLERCKVEIDRLNELPQTINKEQMLFGINQGGCYDDIRIEHAKTITKMDLDGYAIGGLAVGETHEEMYKVIDAVVPHLPEDKPIYLMGVGLPSNILEAVERGVDFFDCVLPARNGRHGQVFTKNGKINLRNAKFQLDATPIDEGCECPACKNYTRAYIRHMFVAKEMLAMRLCVLHNLYFYNKLMEDIRAALDNGCFKQFKAQKLKEWDGRA

SEQ ID NO: 53987 - protein, 376 aa, Clostridium grantii
  REGION 1..376: note = tr|A0A1M5SJV5|A0A1M5SJV5_9CLOT Queuine tRNA-ribosyltransferase OS=Clostridium grantii DSM 8605; OX = 1121316 GN=tgt PE=3 SV=1
MFKLKNTDNRARRGEFITPHGTIQTPVFMNVGTLAAIKGAVSSMDLKDIGCQVELSNTYHLHLRPGDEVIKKLGGLHKFMNWDQPILTDSGGFQVFSLSKMRKIKEEGVYFNSHIDGRKIFMGPEESMQIQSNLASTIAMAFDECIENPSPRNYVLNSVDRTTRWLERCKNEMDKLNSQEDTINKKQMLFGINQGGVYEDIRIQHAKTISQFDLDGYAIGGLAVGETHEEMYRVIEAVEPFLPKDKPRYLMGVGMPSNILEAVSRGVDFFDCVLPARNGRHGHVFTSEGKINLFNAKFELDDRPIDEGCQCPACQNYTRAYIRHLFKAKEMLAMRLCVLHNLYFYNKLMEDIRIAIDENRFEEFKNEKLFQWNGKA

SEQ ID NO: 53988 - protein, 376 aa, Clostridium haemolyticum
  REGION 1..376: note = tr|A0A0A0ITY2|A0A0A0ITY2_CLOHA Queuine tRNA-ribosyltransferase OS=Clostridium haemolyticum NCTC 8350 OX=1443115 GN=tgt PE=3 SV=1
MFKLHKKEGSARRGEFITPHGVIQTPVFMNVGTLAAIKGAVSTMDLKDIRCQVELSNTYHLHLRPGDKVIKKLGGLHKFMNWDRPILTDSGGFQVFSLAKMREIKEEGVYFRSHIDGRKIFMGPEESMQIQSNLASTIAMAFDECVENPSTREYVQKSVERTTRWLERCKKEMDRLNSLDDTINKKQMLFGINQGGVYDDIRIAHAKEISKLDLDGYAIGGLAVGETHEEMYRVIEAVEPYLPQDKPRYLMGVGIPSNILEAVSRGVDFFDCVLPARNGRHGHVFTKYGKINLLNAKFELDDKPIDEECDCPACKHYTRAYIRHLFKAKEMLAMRLCVLHNLYFYNKLMEDIRDAIDGGYFADFKAQKLEEWGGRA

SEQ ID NO: 53989 - protein, 376 aa, Clostridium haemolyticum; identical to SEQ ID NO: 53988
  REGION 1..376: note = tr|A0A1V2Y8U9|A0A1V2Y8U9_CLOHA Queuine tRNA-ribosyltransferase OS=Clostridium haemolyticum; OX = 84025 GN=tgt PE=3 SV=1

SEQ ID NO: 53990 - protein, 380 aa, Clostridium hathewayi
  REGION 1..380: note = tr|R5THW4|R5THW4_9CLOT Queuine tRNA-ribosyltransferase OS=Clostridium hathewayi CAG:224; OX = 1263067 GN=tgt PE=3 SV=1
MNYKIIAKDGRAKRAEVNTVHGTIQTPVFMNVGTVGAIKGAVSTDDLKEIRTQVELSNTYHLHVRTGDKLIKEFGGLHRFMNWDRPILTDSGGFQVFSLTGLRKIKEEGVYFQSHIDGHRIFMGPEESMQIQSNLGSTIAMALDECPPHPATREYMINSVDRTTRWLERCKAEMARLNSLPDTINREQLLFGINQGGTYEDIRIRHAKTISAMDLDGYALGGLAVGESHEEMYRILDETVPYLPENKPTYLMGVGTPANILEAVDRGVDFFDCVYPSRNGRHGHVYTNQGKRNLFNSRYELDHSPIEEGCGCPACRSYSRAYIRHLLKAKEMLGMRLCVLHNLYFYNTMMEEIRDAIEQHRYAEYKAEKLAGMMAVQAEK

SEQ ID NO: 53991 - protein, 373 aa, unidentified
  source 1..373: note = [Clostridium] hiranonis
  REGION 1..373: note = tr|B6FYF6|B6FYF6_9FIRM Queuine tRNA-ribosyltransferase OS=[Clostridium] hiranonis DSM 13275 OX=500633 GN=tgt PE=3 SV=1
MYAVTYELIKTCKQSGARLGVLHTPHGDIETPIFMPVGTQATVKSMTPEELKEIGSQIILSNTYHLYLRPGHELVKKAGGLHEFMHWDKPILTDSGGFQVFSLGPLRKISEEGVEFRSHLDGSKHFLTPEKAMEIQNALGSDIMMAFDECAPYPASREYVKNSLERTTRWLERCKEAHKNPEKQALFGIIQGGMYKDLREQSAKEITAIDLPGYAIGGLSVGEPKPMMYDILEHTTPFMPVDKPRYLMGVGSPDDLIEGVIRGVDMFDCVLPTRIARNGTAMTSQGKVVVRNATYAEDFTPLDPECDCYTCRNYTKAYIRHLIKTNEMLGARLITTHNLHFLLKLMENIRQAIREDRLLDFREEFFTKYGYEL

SEQ ID NO: 53992 - protein, 373 aa, unidentified; identical to SEQ ID NO: 53991
  source 1..373: note = [Clostridium] hiranonis
  REGION 1..373: note = tr|A0A5C0T291|A0A5C0T291_9FIRM Queuine tRNA-ribosyltransferase OS=[Clostridium] hiranonis; OX = 89152 GN=tgt PE=3 SV=1

SEQ ID NO: 53993 - protein, 376 aa, Clostridium homopropionicum
  REGION 1..376: note = tr|A0A0L6ZDM9|A0A0L6ZDM9_9CLOT Queuine tRNA-ribosyltransferase OS=Clostridium homopropionicum DSM 5847 OX=1121318 GN=tgt PE=3 SV=1
MFKLIKKNGNARRGEFTTTHGVIQTPVFMNVGTLAAIKGAVSSMDLYEIGCQVELSNTYHLHLRPGDEIIKKLGGLHKFMNWDRPILTDSGGFQVFSLSQMRKIQEEGVYFNSHIDGKRIFMGPEESMQIQSNLASTIAMAFDECVENPSPRNYVEKSVDRTTRWLERCAKEMEKLNSQSDTINKRQMLFGINQGGVFDDIRIKHAKEISKFDLDGYAIGGLAVGETHEEMYRIIEAVEPYLPSNKPRYLMGVGIPSNILEAVSRGVDFFDCVLPARNGRHGHVFTKYGKINLFNAKYELDTKPIDEDCTCPACQHYTRAYIRHLFKAKEMLAMRLCVLHNLHFYNKLMEEIREAIEGDYFEDYKMGQLENWGGRA

SEQ ID NO: 53994 - protein, 377 aa, unidentified
  source 1..377: note = [Clostridium] hylemonae
  REGION 1..377: note = tr|C0C3B2|C0C3B2_9FIRM Queuine tRNA-ribosyltransferase OS=[Clostridium] hylemonae DSM 15053 OX=553973 GN=tgt PE=3 SV=1
MYEVLKRDGLAKRGRLQTVHGVIETPVFMNVGTAAAIKGAVSTEDLQEIKTQVELSNTYHLHVRPGDVVVKELGGLHKFMVWDKPILTDSGGFQVFSLAGLRRIKEEGVYFQSHIDGRKIFMGPEESMQIQSNLASTIAMAFDECPSSVADRNYIEKSVERTTRWLARCKKEMERLNSLPGTINPRQLLFGINQGGICEDIRIRHAKEIAAMDLDGYAVGGLAVGESHEDMYRILDAVVPHLPVDKPSYLMGVGTPANILEAVDRGIDFFDCVYPSRNGRHGHVYTNGGKLNLFNARYELDAGPIEEGCGCPACRTYSRAYIRHLLKAKEMLGMRLCVLHNLYFYNTMMEEIREAIEKGSYKEYKTKKLAKMAGQEV

SEQ ID NO: 53995 - protein, 379 aa, unidentified
  source 1..379: note = [Clostridium] indolis
  REGION 1..379: note = tr|A0A3P6KD29|A0A3P6KD29_9FIRM Queuine tRNA-ribosyltransferase OS=[Clostridium] indolis OX=69825; GN = tgt PE=3 SV=1
MPAVTYEHIKTCKQSGARLGIVHTPHGSFETPMFMPVGTKATVKTMSPEELHQMEAKIILGNTYHLWLQPGNDIIKKSGGLHQFMNWNGPILTDSGGFQVFSLSNLRKITEEGVEFRHHTNGSKLFLSPEKSMQIQNDLGSDIMMAFDECPPMPAEYKYVKDSIERTSRWAARCLQAHQRPEDQALFGIIQGGEYKDLRQQSAEELVALDFPGYAIGGLSVGEPKPVMYDMVSHTQQFMPKDKPRYLMGVGSPDALIECSIRGMDMFDCVLPTRIARNGTCMTSHGRVTIKNAKYAEDLGPLDENCDCYTCKNYSRAYIRHLIKAEETFGIRLTTYHNLHFLLKLMENIRQAIRDDRLLDFKEEFFEQYGLNVENPKNF

SEQ ID NO: 53996 - protein, 406 aa, unidentified
  source 1..406: note = [Clostridium] innocuum
  REGION 1..406: note = tr|N9VB55|N9VB55_CLOIN Queuine tRNA-ribosyltransferase OS=[Clostridium] innocuum 2959; OX = 999413 GN=HMPREF1094_00070 PE=3 SV=1
MTNYKNNNTFSFEIIKRIPGKLGRAGIIHTPHGDIKTPAFMSVGTKGEVKFVSMEDLYLIQAQAMLSNGYHLRNASFEIAENGGLASWSGWNGPTLTDSGGFQVMSLGSGMGKVVSMKRENDVINTDPKDRLAHVTEDGVRFHDPFTDQEDFIGPEESMQIQCRIGADIHMAYDELTSLADSYEYNVEALARTERWAIRSINEHKKHCDDLGYHQSLYGVLQGGRWEDLRRSTAKRFAEMDFDGYGLGGAFLKESLGDILRWCCEELPETKPRHLLGLSHPDDILIGTEMGADTFDCVAPTREARHGKLYTKHGPIKLSKFTDSPLLLDENCDCPTCQAGWTRGELRALWKSGSTEGKHKYFNLATLHNLRFIIRLTENTRQAILEDRFAEFKEAFLKCYYPQSEK

SEQ ID NO: 53997 - protein, 406 aa, Clostridium innocuum
  REGION 1..406: note = tr|A0A099HZF4|A0A099HZF4_CLOIN Queuine tRNA-ribosyltransferase OS=Clostridium innocuum OX=1522; GN = CIAN88_22315 PE=3 SV=1
MTNYKNNNTFSFEIIKRIPGKLGRAGIIHTPHGDIKTPAFMSVGTKGEVKFVSMEDLYLIQAQAMLSNGYHLRNASFEIAENGGLASWSGWNGPTLTDSGGFQVMSLGSGMGKVVSMKRENDVINTDPKDRLAHVTEDGVRFHDPFTDQEDFIGPEESMQIQCRIGADIHMAYDELTSLADSYEYNVEALARTERWAIRSINEHKKHCDDLGYHQSLYGVLQGGRWEDLRRSTAKRFAEMDFDGYGLGGAFLKESLGDILRWCCEELPETKPRHLLGLSHPDDILIGTEMGADTFDCVAPTREARHGKLYTKHGPIKLSKFTDSPLLLDENCDCPTCQAGWTRGELRALWKSGSIEGKHKYFNLATLHNLRFIIRLTENTRQAILEDRFAEFKEAFLKCYYPQSEK

SEQ ID NO: 53998 - protein, 406 aa, Clostridium innocuum; identical to SEQ ID NO: 53996
  REGION 1..406: note = tr|A0A174ZBI5|A0A174ZBI5_CLOIN Queuine tRNA-ribosyltransferase OS=Clostridium innocuum OX=1522; GN = tgt PE=3 SV=1

SEQ ID NO: 53999 - protein, 379 aa, Clostridium intestinale
  REGION 1..379: note = tr|A0A1M5Z2N3|A0A1M5Z2N3_9CLOT Queuine tRNA-ribosyltransferase OS=Clostridium intestinale DSM 6191 OX=1121320 GN=tgt PE=3 SV=1
MSKKYTLLKKNGKARRGRFETPHGTIETPVFMNVGTLAAIKGGVSSMDLKEIGCQVELSNTYHLHLRPSDKVVSNLGGLHKFMNWDRPILTDSGGFQVFSLSAMRKIKEEGVYFNSHIDGKKIFMGPEESMQIQSNLASTIAMAFDECVSNPSTREYVEKSVARTTRWLERCKVEMDRLNSLPDTINKEQMLFGINQGGVYDDIREEHAKTIAKMDLDGYAIGGLAVGETHEEMYRVIDAVVPHLPEDKPIYLMGVGLPSNILEAVERGVDFFDCVLPARNGRHGHVFTKSGKINLMNAKFELDSAPIDEGCECPTCKNYTRAYIRHLFKAKEMLAMRLCVLHNLYFYNKLMEDIRKAIDGDYFDEFKREKLEAWGGRA

SEQ ID NO: 54000 - protein, 379 aa, Clostridium intestinale
  REGION 1..379: note = tr|U2NQX4|U2NQX4_9CLOT Queuine tRNA-ribosyltransferase OS=Clostridium intestinale URNW; OX = 1294142 GN=tgt PE=3 SV=1
MSKKYTLLKKSGKARRGRFETPHGTIETPVFMNVGTLAAIKGGVSSMDLKEIGCQVELSNTYHLHLRPSDKVVRNLGGLHKFMNWDRPILTDSGGFQVFSLSAMRKIKEEGVYFNSHIDGKKIFMGPEESMQIQSNLASTIAMAFDECVSNPSTREYVEKSVDRTTRWLERCKVEMDRLNSLPDTINKEQMLFGINQGGVYDDIREEHAKTIAKMDLDGYAIGGLAVGETHEEMYRVIDAVVPHLPEDKPIYLMGVGLPSNILEAVERGVDFFDCVLPARNGRHGHVFTKSGKINLMNAKFELDSAPIDEGCECPTCKNYTRAYIRHLFKAKEMLAMRLCVLHNLYFYNKLMEDIRKAIDGDYFDEFKREKLEAWGGRA

SEQ ID NO: 54001 - protein, 382 aa, Clostridium isatidis
  REGION 1..382: note = tr|A0A343JAJ2|A0A343JAJ2_9CLOT Queuine tRNA-ribosyltransferase OS=Clostridium isatidis OX=182773; GN = tgt PE=3 SV=1
MSKKRYTLLKKDGKARRGRFETPHGTIETPVFMNVGTLAVIKGAVSTMDLKEIGCQVELSNTYHLHLRPSDKVVYKLGGLHKFMNWDRPILTDSGGFQVFSLSNIRKIKEEGVYFNSHIDGRKVFMGPEESMQIQSNLASTIAMAFDECIPNPSTREYVEKSVARTTRWLERCKAELDRLNSLDETINKEQMLFGINQGGCYEDIRIEHAKIIAKMDLDGYAIGGLAVGETHEEMYRIIDAVVPHLPEDKPIYLMGVGTPENILEAVDRGVDFFDCVLPARNGRHGHVFTKNGKINLMNAKFELDTRPIDEGCQCPTCRSYTRAYIRHLFKAKEMLAMRLCVLHNLYFYNKLMEDIRTAIENGNFSEFKEQRLREWKSGDCK

SEQ ID NO: 54002 - protein, 376 aa, Clostridium kluyveri
  REGION 1..376: note = tr|A0A1L5FBK1|A0A1L5FBK1_CLOKL Queuine tRNA-ribosyltransferase OS=Clostridium kluyveri OX=1534; GN = tgt PE=3 SV=1
MYKLLKKDGSSRRGEFSTPHGVVQTPVFMNVGTLAAIKGAVSTEDLKEIGCQIELSNTYHLSLRPGDEVIRKLGGLHKFMNWDRPILTDSGGFQVFSLSGMRKIKEEGVYFNSHIDGRKIFMGPEESMRIQSNLASTVAMAFDECVENPAPKEYVEDSVKRTTRWLKRCKTEIDRLNSIPHTINNKQMLFGINQGGVYDDIRVEHAKIISDMDLDGYAIGGLAVGETHEEMYRVLEKVVPNLPENKPIYLMGVGTPANILESVERGVDFFDCVMPSRNGRHSHVFTSYGVIHLLNAKYELDDNPIDSECSCPTCKSYTRAYIRHLFKAKEMLAMRLCVIHNLHFYNNLMKEIRESIDKGNFLQYKKEKLEKWNETV

SEQ ID NO: 54003 - protein, 376 aa, Clostridium kluyveri
  REGION 1..376: note = sp|B9E5Q6|TGT_CLOK1 Queuine tRNA-ribosyltransferase; OS = Clostridium kluyveri (strain NBRC 12016) OX=583346; GN = tgt PE=3 SV=1
MYKLLKKDGSSRRGEFSTPHGVVQTPVFMNVGTLAAIKGAVSTEDLKEIGCQIELSNTYHLSLRPGDEVIRKLGGLHKFMNWDRPILTDSGGFQVFSLSGMRKIKEEGVYFNSHIDGRKIFMGPEESMRIQSNLASTVAMAFDECVENPAPKEYVEDSVKRTTRWLKRCKIEIDRLNSMPHTINNKQMLFGINQGGVHDDIRMEHAKIISDMDLDGYAIGGLAVGETHEEMYRVLEKVVPNLPENKPIYLMGVGTPANILEAVERGVDFFDCVMPSRNGRHSHVFTSYGVIHLLNAKYELDDNPIDSECSCPTCKNYTRAYIRHLFKAKEMLAMRLCVIHNLYFYNNLMKEIRESIDKGNFLQYKKEKLEKWNETV

SEQ ID NO: 54004 - protein, 378 aa, unidentified; identical to SEQ ID NO: 53932
  source 1..378: note = [Clostridium] lavalense
  REGION 1..378: note = tr|A0A1I0HXK5|A0A1I0HXK5_9FIRM Queuine tRNA-ribosyltransferase OS=[Clostridium] lavalense; OX = 460384 GN=tgt PE=3 SV=1

SEQ ID NO: 54005 - protein, 376 aa, unidentified
  source 1..376: note = [Clostridium] leptum
  REGION 1..376: note = tr|A0A412B0J3|A0A412B0J3_9FIRM Queuine tRNA-ribosyltransferase OS=[Clostridium] leptum OX=1535; GN = tgt PE=3 SV=1
MYELKRKEGCARRGAFSTVHGTVQTPAFMNVATCGAIRGAVSALDLKELKCQVQLCNTYHLRLRPGDKVVKELGGIRKFTRWEGPVLTDSGGFQVFSLASLRNIKEEGVTFASHIDGRKIFMGPEESMHIQSNLASTIAMAFDECIENPAEYNYVKKSVARTTRWLRRCKREMSLLNSKDGTLNPHQLLFGINQGSTYEDLRVEHMKQIEDLDLDGYAIGGLAVGESAQEMYRIIEAVEPYMPEEKPRYLMGVGTPVNILEAVYRGIDLFDCVMPSRNARHGHLFTWTGIRNLNNAKYVLDDQPIDEACGCPVCQNYSRAYLHHLFKANEMLGMRLAVMHNIYFYNTLLEKIRFALDQGQFEAFYRQHRESLALRI

SEQ ID NO: 54006 - protein, 376 aa, unidentified
  source 1..376: note = [Clostridium] leptum
  REGION 1..376: note = tr|A7VX03|A7VX03_9FIRM Queuine tRNA-ribosyltransferase OS=[Clostridium] leptum DSM 753; OX = 428125 GN=tgt PE=3 SV=1
MYELKRKEGRARRGAFSTVHGTIQTPAFMNVATCGAIRGAVSALDLKELKCQVQLCNTYHLHLRPGDKVVKELGGIRKFTRWEGPVLTDSGGFQVFSLASLRNIKEEGVTFASHIDGRKIFMGPEESMHIQSNLASTIAMAFDECIENPAEYNYVKKSVARTTRWLRRCKREMSLLNSRDGTLNPHQLLFGINQGSTYEDLRVEHMKQIEELDLDGYAIGGLAVGEPAQEMYRIIEAVEPYMPEEKPRYLMGVGTPVNILEAVYRGIDLFDCVMPSRNARHGHLFTWAGIRNLNNAKYILDDQPIDEACDCPVCQNYSRAYLHHLFKANEMLGMRLAVMHNIYFYNTLLEKIRFALDQGQFEAFYRQHRESLALRI

SEQ ID NO: 54007 - protein, 376 aa, Clostridium leptum
  REGION 1..376: note = tr|R6N5N3|R6N5N3_9CLOT Queuine tRNA-ribosyltransferase OS=Clostridium leptum CAG:27; OX = 1263068 GN=tgt PE=3 SV=1
MYELKRKEGRARRGAFSTVHGTVQTPAFMNVATCGAIRGAVSALDLKELKCQVQLCNTYHLHLRPGDKVVKELGGIRKFTRWEGPVLTDSGGFQVFSLASLRNIKEEGVTFASHIDGRKIFMGPEESMHIQSNLASTIAMAFDECIENPAEYNYVKKSVARTTRWLRRCKREMSLLNSRDGTLNPHQLLFGINQGSTYEDLRVEHMKQIEELDLDGYAIGGLAVGESAQEMYRIIEAVEPYMPEEKPRYLMGVGTPVNILEAVYRGIDLFDCVMPSRNARHGHLFTWTGIRNLNNAKYILDDQPIDEACDCPICQNYSRAYLHHLFKANEMLGMRLAVMHNIYFYNTLLEKIRFALDQGQFEAFYRQHRESLALRI

SEQ ID NO: 54008 - protein, 376 aa, unidentified
  source 1..376: note = Clostridium liquoris
  REGION 1..376: note = tr|A0A2T0AZT5|A0A2T0AZT5_9CLOT Queuine tRNA-ribosyltransferase OS=Clostridium liquoris OX=1289519; GN = tgt PE=3 SV=1
MYKLIKKCGKTRRGEFTTPHGTVQTPVFMNVGTLGAIKGAVSSMDLKEIGCQVELSNTYHLHLRPGDKVIKQMGGLHKFMNWDRPILTDSGGFQVFSLAKIRKIKEEGVYFNSHIDGRKIFMGPEESMQIQSNIASTIAMAFDECISNPSPREYVENSVARTTRWLERCKIEMDRLNSLPDTINKKQMLFGINQGGTYDDIRIEHAKTIAKMNLDGYAIGGLAVGETHEEMYRIIDAVVPYLPEDKPIYLMGVGLPSNILEAVDRGVDFFDCVLPARNGRHGHVFTKEGKINLMNAKFELDGRPIDEGCQCPACKYYSRAYIRHLFKAKEMLAMRLCVLHNLYFYNNLMREIRDAIDGDYFPEFKEKKLTEWAGRA

SEQ ID NO: 54009 - protein, 374 aa, Clostridium ljungdahlii
  REGION 1..374: note = tr|A0A166S9N2|A0A166S9N2_9CLOT Queuine tRNA-ribosyltransferase OS=Clostridium ljungdahlii OX=1538; GN = tgt PE=3 SV=1
MYKLLKKQGSARRGEFTTPHGVVQTPVFMNVGTLAAIKGAVSTCDLKEIGCQVELSNTYHLSLRPGDKIIRKLGGLHKFMNWDRPILTDSGGFQVFSLSKIRKIKEEGVYFNSHIDGSKIFMGPEESMQIQSNLASTVAMAFDECIENPSPKDYVQRSVERTTRWLKRCKVEMDRLNSLPDTINNKQMLFGINQGGVYDDIRVEHAKIISDMNLDGYAIGGLAVGETHEEMYRIIEKVVPHLPQDKPIYLMGVGTPANILEAVERGVDFFDCVLPARNGRHCHVFTSEGEINLLNAKYQLDDSPIDRGCQCPTCKNYTRAYIRHLFKAKEMLAMRLCVLHNLYFYNNLMKEIRDSIDGDYFPKYKREKLEEWNQ

SEQ ID NO: 54010 - protein, 374 aa, Clostridium ljungdahlii; identical to SEQ ID NO: 53934
  REGION 1..374: note = tr|D8GRQ7|D8GRQ7_CLOLD Queuine tRNA-ribosyltransferase OS=Clostridium ljungdahlii (strain ATCC 55383 / DSM 13528 / PETC) OX=748727 GN=tgt PE=3 SV=1

SEQ ID NO: 54011 - protein, 375 aa, unidentified
  source 1..375: note = Clostridium luticellarii
  REGION 1..375: note = tr|A0A2T0BLN9|A0A2T0BLN9_9CLOT Queuine tRNA-ribosyltransferase OS=Clostridium luticellarii; OX = 1691940 GN=tgt PE=3 SV=1
MYKLLKKCGRIRRGEFTTPHGVVQTPVFMNVGTLAAIKGAVSTVDLKEIGCQIELSNTYHLSLRPGDEVIRELGGLHKFMNWDRPILTDSGGFQVFSLSDIRRIKEEGVYFNSHIDGSKIFMGPEESMRIQSNLASTVAMAFDECVKNPSPRDYVENSVKRTTRWLKRCKVEMDRLNSLPDTINREQMLFGINQGGVYDDIRIEHAKIISEMDLDGYAIGGLAVGETHEEMYRIIEKVIPYLPQNKPIYLMGVGTPENILEAVERGVDFFDCVLPARNGRHSHVFTSEGEINLLNAKYKLDGSPIDEKCSCPTCKNYSRAYIRHLFKAKEMLAMRLCVLHNLYFYNNLMKEIRNAIDGDYFHSYKREKLNQWENK

SEQ ID NO: 54012 - protein, 376 aa, Clostridium magnum
  REGION 1..376: note = tr|A0A162UCT0|A0A162UCT0_9CLOT Queuine tRNA-ribosyltransferase OS=Clostridium magnum DSM 2767; OX = 1121326 GN=tgt PE=3 SV=1
MYKLLKKCGNARRGEFTTPHGVVQTPVFMNVGTLAAIKGAVSSIDLEEIGCQVELSNTYHLHLRPGDEVVRKMGGLHKFMNWSRPILTDSGGFQVFSLSKMRKIKEEGVYFSSHIDGRKIFMGPEESMRIQSNLASTIAMAFDECIPNPSPREYVEDSVARTTRWLYRCKDELNRLNSLPDTINNKQMLFGINQGGIYEDIRIEHAKTIAKLDLDGYAIGGLAVGETHEEMYRIIDAVAPHLPQDKPIYLMGVGIPSNILEAVDRGVDFFDCVLPARNGRHGHVFTKDGKINLMNAKFELDANPIDEGCQCPACKHYSRAYIRHLFKAKELLAMRLCVLHNLYFYNNLMKEIREAIDGDYFQDYKKQKLEQWGGRA

SEQ ID NO: 54013 - protein, 421 aa, unidentified
  source 1..421: note = [Clostridium] methylpentosum
  REGION 1..421: note = tr|C0EF14|C0EF14_9FIRM Queuine tRNA-ribosyltransferase OS=[Clostridium] methylpentosum DSM 5476 OX=537013 GN=tgt PE=3 SV=1
MNYTKLVFANLLYTRFPFGATEKLWLTSEQNQAIIFLFDSMLEVFMYKLIKQEGDARRGEFHTVHGTVQTPAFMNVGTSAAIKGGISSYDLVDLKCQVELCNTYHLHVRPGDKVIRELGGLHKFMGWNRPILTDSGGFQVFSLSSLRTIQEEGVLFASHVDGKRIFMGPEDSMRIQSNLGSTIAMAFDECVENPSTHEYSQHSCERTTRWLYRCKAEMERLNAQPDTINPHQMLFGINQGCTYEDLRVWHMKEIRKLDLDGYAIGGLAVGEPKEEMYRIISAVTPHMPQDKPRYLMGVGKPTNIIEAVYRGVDLFDCVMPSRNARHGHVNTWEGVRNLMNNKYERDDSPIDPDCDCPTCRRHSRAYIRHLFKSKEMLANRLAVMHNLYFYNTLLERIREALDEGRFEEFRARYVPVLDERI

SEQ ID NO: 54014 - protein, 378 aa, unidentified
  source 1..378: note = Clostridium neonatale
  REGION 1..378: note = tr|A0A2A7MG85|A0A2A7MG85_9CLOT Queuine tRNA-ribosyltransferase OS=Clostridium neonatale OX=137838; GN = tgt PE=3 SV=1
MSKRYTLLKKDGNARRGQFETPHGTIQTPVFMNVGTLAAIKGAVSSMDLKEIGCQVELSNTYHLHLRPTDKVVRELGGLHEFMNWDRPILTDSGGFQVFSLSAMRKIKEEGVYFNSHIDGKKIFMGPEESMQIQSNLASTIAMAFDECIPNPSTREYVENSVARTTRWLERCKKEMDRLNSMPDTINKEQMLFGINQGGTYEDIRIAHAKEITKLDLDGYAIGGLAVGESHEDMYRIIDAVVPHLPEDKPIYLMGVGTPENILEAVSRGVDFFDCVLPARNGRHGNVYTKEGKLNLMNAKYELDKKPIEEGCECPACKHYTRAYIRHLFKAKEMLAMRLCVLHNLYFYNKLMAEIRDAIDDGCFEEFKEEKLKSWGNK

SEQ ID NO: 54015 - protein, 377 aa, Clostridium nexile
  REGION 1..377: note = tr|R6PF95|R6PF95_9CLOT Queuine tRNA-ribosyltransferase OS=Clostridium nexile CAG:348; OX = 1263069 GN=tgt PE=3 SV=1
MYKLLKRDGLAKRGEFHTVHGVIQTPVFMNVGTAAAIKGAVSTEDLQGIKTQVELSNTYHLHVRPGDQVVKKLGGLHKFMVWDKPILTDSGGFQVFSLAGLRKIKEEGVYFNSHIDGKKIFMGPEESMQIQSNLASTIAMAFDECPSSVATREYIQNSVERTTRWLARCKAEMARLNTLPDTINQHQMLFGINQGGIYEDIRIEHAKEIAKMDLDGYAIGGLAVGESHEEMYRILEAVVPYLPIEKPTYLMGVGTPANILEAVDRGVDFFDCVYPSRNGRHGHVYTNQGKLNLFNAKYELDDAPIEEGCQCPACRTYSRAYIRHLLKAKEMLGMRLCVLHNLYFYNNMMEEIRAAIEAGRYKEYKREKLAGMGIQEV

SEQ ID NO: 54016 - protein, 376 aa, Clostridium novyi
  REGION 1..376: note = tr|A0A0A0IS97|A0A0A0IS97_CLONO Queuine tRNA-ribosyltransferase OS=Clostridium novyi A str. 4570; OX = 1444290 GN=tgt PE=3 SV=1
MFKLHKKDGNARRGEFITPHGVIQTPVFMNVGTLAAIKGAVSTMDLKDIRCQVELSNTYHLHLRPGDKVIKQLGGLHKFMNWDRPILTDSGGFQVFSLAKMRKIKEEGVYFRSHIDGRKIFMGPEESMQIQSNLASTIAMAFDECVENPAPREYVEKSVARTTRWLERCKKEMDRLNSLDDTINKKQMLFGINQGGVYDDIRIAHAKEIAKLDLDGYAIGGLAVGETHEEMYRVIESVEPYLPQDKPRYLMGVGIPSNILEAVSRGVDFFDCVLPARNGRHGHVFTKYGKINLLNAKFELDTKPIDEGCDCPACRHYSRAYIRHLFKAKEMLAMRLCVLHNLYFYNKLMEDIRDAIDGGYFNDFKEQKLEEWGGRA

SEQ ID NO: 54017 - protein, 382 aa, Clostridium novyi
  REGION 1..382: note = tr|A0PZV6|A0PZV6_CLONN Queuine tRNA-ribosyltransferase OS=Clostridium novyi (strain NT); OX = 386415 GN=tgt PE=3 SV=1
MEGENKVFKVHKKDGNARRGEFITPHGVIQTPVFMNVGTLAAIKGAVSTMDLKDIRCQVELSNTYHLHLRPGDKVIKQLGGLHKFMNWDRPILTDSGGFQVFSLAKMRKIKEEGVYFRSHIDGRKIFMGPEESMQIQSNLASTIAMAFDECVENPAPREYVEKSVARTTRWLERCKKEMDRLNSLDDTINKKQMLFGINQGGVYDDIRIAHAKEIAKLDLDGYAIGGLAVGETHEEMYRVIESVEPYLPQDKPRYLMGVGIPSNILEAVSRGVDFFDCVLPARNGRHGHVFTKYGKINLLNAKFELDTKPIDEGCDCPACRHYSRAYIRHLFKAKEMLAMRLCVLHNLYFYNKLMEDIRDAIDGGYFNDFKEQKLEEWGGRA

SEQ ID NO: 54018 - protein, 376 aa, unidentified
  source 1..376: note = Clostridium oryzae
  REGION 1..376: note = tr|A0A1V4IVY7|A0A1V4IVY7_9CLOT Queuine tRNA-ribosyltransferase OS=Clostridium oryzae OX=1450648; GN = tgt PE=3 SV=1
MFKVLKRNGNAKRGTFTTPHGTVQTPVFMNVGTLAAIKGAVSSMDLKDIGCQVELSNTYHLHLRPGDKTVYKLGGLHKFMNWDRPILTDSGGFQVFSLASMRKIKEEGVYFNSHIDGRKIFMGPEESMQIQSNLASTIAMAFDECVENPSPRDYVKRSVERTTRWLYRCKDEMARLNSMETTINKKQMLFGINQGGVYDDLRIEHAKEISKLNLDGYAIGGLAVGETHEEMYRIIEAVVPHLPEDKPIYLMGVGTPINILEGVERGVDFFDCVLPARNGRHGHVYTHSGKINLLNAKYELDGSPIEEGCECPTCKNYTKAYIRHLFKAKEMLAMRLCVLHNLYFYNKLMEDIRKALDEDKFSEFKQKTVEQFSENI

SEQ ID NO: 54019 - protein, 373 aa, unidentified
  source 1..373: note = [Clostridium] paradoxum
  REGION 1..373: note = tr|A0A150FP78|A0A150FP78_CLOPD Queuine tRNA-ribosyltransferase OS=[Clostridium] paradoxum JW-YL-7 = DSM 7308 OX=1121328 GN=tgt PE=3 SV=1
MGAIRFELIKTCKQSGARLGKLYTPHGEIQTPIFMPVGTQATVKSMTPQELKEINSQIILSNTYHLYMRPGHKIVEKAGGLHKFMNWDRPILTDSGGFQVFSLGPLRKITEEGVEFRSHLDGSKHFISPEKAIEIQNSLGADIIMAFDECAPYPADRDYVKNSLERTTRWAKRCKDAHKNSDRQALFGIVQGGMYKDLREQSAKEIMDIGFPGYAIGGLSVGEPKELMYEVLDYTTPLLPKDKPRYLMGVGSPDDLLEGVIRGVDMFDCVLPTRIARNGTAMTSQGKVVVRNAQYAEDFTPLDPECDCYTCKNYTRAYIRHLIKANEILGARLITYHNLYFLLKLMENVRNAIKEDRLLDYKNEFFRKYGYTL

SEQ ID NO: 54020 - protein, 431 aa, Clostridium paraputrificum
  REGION 1..431: note = tr|A0A2X3B6Y5|A0A2X3B6Y5_9CLOT Queuine tRNA-ribosyltransferase OS=Clostridium paraputrificum; OX = 29363 GN=tgt PE=3 SV=1
MTDSTADQGNFSVVKQMDGEPGRAGIIRTPHGDVQTPAFIPVGTKATVKTLTPEQIRDTGAQAVLSNAYHLYLQPGPDIVEAAGGLTRFENWNGPTFTDSGGFQVMSLGVGFRKTLAMDVTGLQNDDILAPGKERNAFVDEEGVTFRSHIDGSSHRFTPEFSMGIQHKLGADIIFAFDELTTLMNTREYQESSVERTHRWAQRCLDEHDRLTRERNQVPGLAGDLAEGERPLQQLFGVVQGAQYEDLRRGAARGLVELSDAAEAAGKRGFAGYGIGGALEKQRLGEICRWVTDELPDDRPRHLLGISEPDDIFAAVAAGADTFDCVAPTRLARRGGVYTLDGKITLTNARFKTDFGPIDPEVESYTTLNYSRAYIHHLLKAKEFLAGTLCTIHNVYFMVKLVENIRASIIDGTFEEYRDEFLGRYYAGKKK

SEQ ID NO: 54021 - protein, 379 aa, Clostridium paraputrificum
  REGION 1..379: note = tr|A0A174ATR9|A0A174ATR9_9CLOT Queuine tRNA-ribosyltransferase OS=Clostridium paraputrificum; OX = 29363 GN=tgt PE=3 SV=1
MSKRYTLLKKDGKARRGRFVTPHGTVETPVFMNVGTLAAIKGAVSSMDLKEIGCQVELSNTYHLHLRPSDKVVYKMGGLHEFMNWDRPILTDSGGFQVFSLSGMRKIKEEGVYFSSHIDGKKIFMGPEESMQIQSNLASTIAMAFDECIPIPSTREYVEKSVARTTRWLERCKVEMDRLNSLPETINKEQMLFGINQGATFKDIRIEHAKTIAKMDLDGYAIGGLAVGETHEEMYEIIDAVVPYLPEDKPIYLMGVGTPANILEAVDRGVDFFDCVLPARNGRHGHVFTKDGKINLMNAKFELDKRPIDEGCQCPACKSYTRGYIRHLFKAKEMLAMRLCVLHNLYFYNKLMEDIRAAIDGGYYKEFKEQKLKEWNIKA

SEQ ID NO: 54022 - protein, 376 aa, Clostridium pasteurianum
  REGION 1..376: note = tr|A0A1D9N412|A0A1D9N412_CLOPA Queuine tRNA-ribosyltransferase OS=Clostridium pasteurianum; OX = 1501 GN=tgt PE=3 SV=1
MYKLLKTTGKVRRGEFTTTHGVIQTPVFMNVGTLAAIKGAVSTMDLKEINCQVQLSNTYHLSLRPGNKIVKQLGGLHKFMNWDRPILTDSGGFQVFSLSNIRKIKEEGVYFSSHIDGRKIFMGPEESMQIQSNLASTIAMAFDECIPNPSSRSYVENSVARTTRWLQRCKDEMDRLNSLEDTINKKQMLFAINQGGIYDDIRIEHAKTISKFDLDGYAIGGLAVGETHEEMYRIIDVVVPHLPQNKPIYLMGVGLPSNILEAVSRGVDFFDCVLPARNGRHGHVFTKYGKINLFNAKYELDSSPIDEGCECPACRNYSRAYIRHLFKAKEMLALRLCVLHNLYFYNKLMEDIRNSIDGDYFEEFKKEKLNMWDGKA

SEQ ID NO: 54023 - protein, 376 aa, Clostridium pasteurianum; identical to SEQ ID NO: 54022
  REGION 1..376: note = tr|A0A0H3J492|A0A0H3J492_CLOPA Queuine tRNA-ribosyltransferase OS=Clostridium pasteurianum DSM 525 = ATCC 6013 OX=1262449 GN=tgt PE=3 SV=1

SEQ ID NO: 54024 - protein, 380 aa, Clostridium perfringens
  REGION 1..380: note = sp|Q0TP15|TGT_CLOP1 Queuine tRNA-ribosyltransferase; OS = Clostridium perfringens (strain ATCC 13124 / DSM 756 / JCM 1290 / NCIMB 6125 / NCTC 8237 / Type A) OX=195103 G; N = tgt PE=3 SV=1
MTKKRYTLLKKDGKARRGEFVTPHGTIQTPVFMNVGTLAAIKGAVSSMDLKEIGCQVELSNTYHLHLRPGDKIVKQMGGLHNFMNWDRPILTDSGGFQVFSLAGMRKIKEEGVYFNSHIDGRKIFMGPEESMQIQSNLGSTIAMAFDECIPNPSTREYVEKSVARTTRWLERCKKEMDRLNSLDDTVNKEQMLFGINQGGVYEDIRIEHAKTIREMDLDGYAIGGLAVGETHEEMYRVIDAVVPHLPEDKPIYLMGVGLPSNILEAVERGVDFFDCVLPARNGRHGHVFTKEGKINLMNAKFELDARPIDEGCQCPACKNYTRAYIRHLFKAKEMLAMRLCVLHNLYFYNKLMEDIRDAIDGGYFAEFKAKKLEEWNGRA

SEQ ID NO: 54025 - protein, 380 aa, Clostridium perfringens; identical to SEQ ID NO: 54024
  REGION 1..380: note = sp|Q0SRN5|TGT_CLOPS Queuine tRNA-ribosyltransferase; OS = Clostridium perfringens (strain SM101 / Type A); OX = 289380 GN=tgt PE=3 SV=1

SEQ ID NO: 54026 - protein, 376 aa, unidentified
  source 1..376: note = [Clostridium] polysaccharolyticum
  REGION 1..376: note = tr|A0A1I0DLZ1|A0A1I0DLZ1_9FIRM Queuine tRNA-ribosyltransferase OS=[Clostridium] polysaccharolyticum OX=29364 GN=tgt PE=3 SV=1
MYRLITQDGQAKRGEFHTVHGVIQTPVFMNVGTAAAIKGAVSTMDLQKIGTQVELSNTYHLHVRPGDKVVKQLGGLHKFMVWDKPILTDSGGFQVFSLAGLRKIKEEGVYFQSHIDGRRIFMGPEESMQIQSNLASTIAMAFDECPPHPATREYMQNSVDRTTRWLERCIKEMKRLNELPDTINKKQMLFGINQGGTFADIRIEHAKRISEMDLDGYALGGLAVGESHEEMYDIIEKTVPYLPLEKPTYLMGVGTPANILEAVERGVDFFDCVYPSRNGRHGHAYTNHGKMNLLNARYELDDRPMEEGCQCPVCQTYSRAYIRHLLKAKEMLGLRMLVTHNLYFYNKMMEEIRDAIEHHRFKEYKKAKLEGMAQGE

SEQ ID NO: 54027 - protein, 376 aa, unidentified
  source 1..376: note = [Clostridium] populeti
  REGION 1..376: note = tr|A0A1I6IR00|A0A1I6IR00_9FIRM Queuine tRNA-ribosyltransferase OS=[Clostridium] populeti OX=37658; GN = tgt PE=3 SV=1
MYRLITRDNNAKRGEFHTVHGTIQTPVFMNVGTAAAIKGAVSTLDLQAIDTQVELSNTYHLHVRPGDLVVKKMGGLHKFMVWDKPILTDSGGFQVFSLAGLRKIKEEGVYFQSHIDGKRIFMGPEESMQIQSNLASTIAMAFDECPPHPATRKYMQDSVDRTTRWLLRCKTEMERLNSLEDTINPKQMLFGINQGGTFADIRIEHARRISELDLDGYALGGLAVGESHEEMYEIIEQTVPYLPLEKPTYLMGVGTPANILEAVERGVDFFDCVYPSRNGRHGHAYTNHGKMNLLNAKYELDERPIEEGCQCPVCKTYSRAYIRHLLKAKEMLGLRFLVTHNLYFYNKMMEEIRMAIEEHRFQEYKRDKLARMAEGE

SEQ ID NO: 54028 - protein, 379 aa, Clostridium puniceum
  REGION 1..379: note = tr|A0A1S8TE77|A0A1S8TE77_9CLOT Queuine tRNA-ribosyltransferase OS=Clostridium puniceum OX=29367; GN = tgt PE=3 SV=1
MSKKYTLLKKDGNARRGQFETPHGTIQTPVFMNVGTIAVIKGAVSTMDLKEIGCQVELSNTYHLHLRPTDKVVSKLGGLHKFMNWDRPILTDSGGFQVFSLAKMRKIKEEGVYFNSHIDGRKIFMGPEESMQIQSNLASTIAMAFDECIENPAPRDYVERSVARTTRWLERCKNEMDRLNSLPGTINKEQMLFGINQGGVYEDIRIKHAKEIAKMDLDGYAIGGLAVGETHEEMYKVINAVVPHLPEDKPIYLMGVGTPSNILEAVERGVDFFDCVLPARNGRHGNVFCKEGKLNLMNAKYELDTRPIDEGCECPACKSYTRAYIRHLFKAKEMLAMRLCVLHNLYFYNKLMEDIRDAIDGGYFKEFKEEKLRSWEGRS

SEQ ID NO: 54029 - protein, 376 aa, Clostridium putrefaciens
  REGION 1..376: note = tr|A0A381J8S6|A0A381J8S6_9CLOT Queuine tRNA-ribosyltransferase OS=Clostridium putrefaciens; OX = 99675 GN=tgt PE=3 SV=1
MMYKLLKTSGKVRRGEFKTPHGTIQTPVFMNVGTLAAIKGAVSSMDLKEIECQVELSNTYHLHLRPGDKVINKLGGIHEFMNWDRPILTDSGGFQVFSLASMRKIKEEGVYFNSHIDGRKIFMGPEESMQIQSNLASTIAMAFDECIPNPSSREYVEASVDRTTRWLTRCKNELDRLNSLECTINKKQMLFGINQGGVYEDIRIEHAKTISKLDLDGYAIGGLAVGESHEDMYRIIDSVVPHLPQDKPIYLMGVGLPKNILEAVERGVDFFDCVLPARNGRHGHVFTKSGKINIMNAKFELDKSPIDEGCDCPTCKHYTRAYIRHLFKAKEMLAMRLCVLHNLYFYNKLMEEIRDSIDGDYFSDYKKQKLTEWGEV

SEQ ID NO: 54030 - protein, 374 aa, unidentified
  source 1..374: note = Clostridium ragsdalei
  REGION 1..374: note = tr|A0A1A6AQT7|A0A1A6AQT7_9CLOT Queuine tRNA-ribosyltransferase OS=Clostridium ragsdalei P11; OX = 1353534 GN=tgt PE=3 SV=1
MYKLLKKQGSARRGEFTTPHGVVQTPVFMNVGTLAAIKGAVSTCDLKEIGCQVELSNTYHLSLRPGDKIIRKLGGLHKFMNWDRPILTDSGGFQVFSLSKIRKIKEEGVYFNSHIDGSKIFMGPEESMQIQSNLASTVAMAFDECIENPSPKDYVERSVERTTRWLKRCKVEMDRLNSLPDTINNKQMLFGINQGGVYDDIRIEHAKIISEMNLDGYAIGGLAVGETHEEMYRIIEKVVPHLPQDKPIYLMGVGTPANILEAVERGVDFFDCVLPARNGRHSHVFTSQGELNLLNAKYQLDDFPIDRGCQCPTCKNYTRAYIRHLFKAKEMLAMRLCVLHNLYFYNNLMKEIRDSIDGDYFPKYKREKLEEWNQ

SEQ ID NO: 54031 - protein, 376 aa, Clostridium roseum
  REGION 1..376: note = tr|A0A1S8MHX6|A0A1S8MHX6_9CLOT Queuine tRNA-ribosyltransferase OS=Clostridium roseum OX=84029; GN = tgt PE=3 SV=1
MYTLLKKTGKVRRGRFETVHGTIETPVFMNVGTLGAIKGAVSSMDLKEINCQVELSNTYHLSLRPGDDVIKKLGGLHKFMNWDRPILTDSGGFQVFSLAEIRKIKEEGVYFNSHIDGRKIFMGPEESMRIQSNIASTIAMAFDECIENPSPRDYVERSVERTTRWLVRCKEELDRLNSLPDTINKNQMLFGINQGGVYEDIRIEHAKTIAKMNLDGYAIGGLAVGETHEEMYRIIDAVVPHLPQNKPIYLMGVGTPTNILEAVSRGVDFFDCVLPARNGRHGHVFTKHGKINLRNEKFELDDAPIDEGCQCPTCKNYTRAYIRHLFKAKEMLAMRLCVLHNLYFYNTLMADIRKAIDEDRFEEFKNEKLEAWNGKA

SEQ ID NO: 54032 - protein, 379 aa, Clostridium saccharobutylicum
  REGION 1..379: note = tr|A0A1S8MYY6|A0A1S8MYY6_CLOSA Queuine tRNA-ribosyltransferase OS=Clostridium saccharobutylicum; OX = 169679 GN=tgt PE=3 SV=1
MSKRYTLLKKDGNARRGQFVTPHGTIQTPVFMNVGTLAAIKGAVSSMDLKDIGCQVELSNTYHLHLRPSDKVVSKLGGLHKFMNWDRPILTDSGGFQVFSLSAMRKIKEEGVYFNSHIDGRKIFMGPEESMQIQSNLASTIAMAFDECIENPAPREYVLKSVARTTRWLERCKKEMDRLNSMPDTINKEQMLFGINQGGVYEDIRIAHAKEITKMDLDGYAIGGLAVGESHEDMYRVIEAVVPHLPEDKPIYLMGVGTPTNILEAVERGVDFFDCVLPARNGRHGNVYTKEGKLNLMNAKFELDERPIDEGCQCPACKNYTRAYIRHLFKAKEMLAMRLCVLHNLYFYNKLMEDIRAAIDGEYFKEFKEQKLKEWEGRA

SEQ ID NO: 54033 - protein, 379 aa, Clostridium saccharobutylicum
  REGION 1..379: note = tr|U5MST1|U5MST1_CLOSA Queuine tRNA-ribosyltransferase OS=Clostridium saccharobutylicum DSM 13864 OX=1345695 GN=tgt PE=3 SV=1
MSKRYTLLKKDGNARRGQFVTPHGTIQTPVFMNVGTLAAIKGAVSSMDLKDIGCQVELSNTYHLHLRPSDKVVSKLGGLHKFMNWDRPILTDSGGFQVFSLSAMRKIKEEGVYFNSHIDGRKIFMGPEESMQIQSNLASTIAMAFDECIENPAPREYVLKSVARTTRWLERCKKEMDRLNSMPDTINKEQMLFGINQGGVYEDIRIAHAKEITKMDLDGYAIGGLAVGESHEDMYRVIEAVVPHLPEDKPIYLMGVGTPANILEAVERGVDFFDCVLPARNGRHGNVYTKEGKLNLMNAKFELDERPIEEGCQCPACKNYTRAYIRHLFKAKEMLAMRLCVLHNLYFYNKLMEDIRAAIDGDYFKEFKEQKLKEWEGRA

SEQ ID NO: 54034 - protein, 391 aa, Clostridium saccharolyticum
  REGION 1..391: note = tr|D9R4P6|D9R4P6_CLOSW Queuine tRNA-ribosyltransferase OS=Clostridium saccharolyticum (strain ATCC 35040 / DSM 2544 / NRCC 2533 / WM1) OX=610130; GN = tgt PE=3 SV=1
MPGRPGQEKEMQMNYKIIARDGRAKRGSVTTVHGTVQTPVFMNVGTVGAIKGAVSTDDLREIKTQVELSNTYHLHVRTGDKLIKEFGGLHRFMNWDRPILTDSGGFQVFSLTGLRKIKEEGVYFQSHIDGHRIFMGPEESMQIQSNLASTIAMAFDECPPHPATREYMQNSVDRTTRWLERCRNEMARLNSLPDTLNKEQLLFGINQGGTFEDIRIAHAKTISAMDLDGYALGGLAVGESHEEMYRILEETVPYLPENKPTYLMGVGTPANILESVDRGVDFFDCVYPSRNGRHGHVYTNHGKMNLFNIKYELDHKPIEEGCGCPACRSYSRAYIRHLLKAKEMLGMRLCVLHNLYFYNTMMEEIRDAIENHRYGEYKEQKLDRMMAGQTS

SEQ ID NO: 54035 - protein, 379 aa, Clostridium saccharoperbutylacetonicum
  REGION 1..379: note = tr|M1MEI3|M1MEI3_9CLOT Queuine tRNA-ribosyltransferase OS=Clostridium saccharoperbutylacetonicum N1-4(HMT) OX=931276 GN=tgt PE=3; SV = 1
MSKRYTLLKKDGKARRGQFETPHGTIQTPVFMNVGTLAAIKGAVSSMDLKEIGCQVELSNTYHLHLRPGDKVVKALGGLHEFMNWDRPILTDSGGFQVFSLAKMRKIKEEGVYFNSHIDGKKIFMGPEESMQIQSNLASTIAMAFDECIENPAPREYVERSVARTTRWLERCKDEMDRLNSQPDTINKEQMLFGINQGGVYEDIRIKHAQEIVKLDLDGYAIGGLAVGETHEEMYRVIDAVVPHLPEDKPIYLMGVGTPNNILEAVERGVDFFDCVLPARNGRHGNVFCGEGKLNLMNAKYELDTRPIDEGCQCPTCKNYTRAYIRHLFKAKEMLAMRLCVLHNLYFYNKLMADIRTAIDGGYFKEFKEKKLIEWQGKA

SEQ ID NO: 54036 - protein, 380 aa, Clostridium sartagoforme
  REGION 1..380: note = tr|R9BVF6|R9BVF6_9CLOT Queuine tRNA-ribosyltransferase OS=Clostridium sartagoforme AAU1; OX = 1202534 GN=tgt PE=3 SV=1
MSKKRYTLLKKDGEARRGRFETPHGTIETPVFMNVGTLAVIKGAVSTMDLKEIGCQVELSNTYHLHLRPSDKVVASLGGLHNFMNWDRPILTDSGGFQVFSLSGMRKIKEEGVYFSSHIDGKKIFMGPEESMQIQSNLASTIAMAFDECIPNPSTRDYVEKSVARTTRWLERCKKEMDRLNSLPETINKEQMLFGINQGGCYEDIRIEHAKTITKMDLDGYAIGGLAVGETHEEMYRIIDAVVPYLPEDKPIYLMGVGTPSNILEAVDRGVDFFDCVLPARNGRHGHVFTKEGKINLMNAKFELDTRPIDEGCQCPACKSYTRAYIRHLFKAKEMLALRLCVLHNLYFYNKLMEEIRGAIDGGYFKEFKDEKLKEWNGKA

SEQ ID NO: 54037 - protein, 380 aa, Clostridium sartagoforme
  REGION 1..380: note = tr|A0A4S2DPZ5|A0A4S2DPZ5_9CLOT Queuine tRNA-ribosyltransferase OS=Clostridium sartagoforme; OX = 84031 GN=tgt PE=3 SV=1
MSKKRYTLLKKDGKARRGRFETPHGTIETPVFMNVGTLAVIKGAVSTMDLKEIGCQVELSNTYHLHLRPSDKVVAELGGLHKFMNWDRPILTDSGGFQVFSLSGMRKIKEEGVYFSSHIDGKKIFMGPEESMQIQSNLASTIAMAFDECIPNPSTRDYVEKSVARTTRWLERCKVEMDRLNSLPETINKEQMLFGINQGGCYEDIRIEHAKTITKMDLDGYAIGGLAVGETHEEMYRVIDAVVPHLPEDKPIYLMGVGLPSNILEAVDRGVDFFDCVLPARNGRHGHVFTRDGKINLMNAKFELDTRPIDEGCQCPACKSYTRAYIRHLFKAKEMLAMRLCVLHNLYFYNKLMEDIRNAIDGGYFKEFKEEKLKEWNGRA

SEQ ID NO: 54038 - protein, 376 aa, Clostridium scatologenes
  REGION 1..376: note = tr|A0A0E3K3X0|A0A0E3K3X0_CLOSL Queuine tRNA-ribosyltransferase OS=Clostridium scatologenes; OX = 1548 GN=tgt PE=3 SV=1
MYKLLKKSGKARRGEFTTAHGVIQTPVFMNVGTLAAIKGGVSSMDLKEIGCQVELSNTYHLHLRPGDEVVKKMGGLHKFMNWDRPILTDSGGFQVFSLAKMRKIKEEGVYFNSHIDGRKIFMGPEESMRIQSNLASTIAMAFDECIHNPSPRDYVEQSVARTTRWLQRCKDEMDRLNSLPDTINNKQMLFGINQGGIFEDIRIEHAKTISKMNLDGYAIGGLAVGESHEEMYRVIDAVVPYLPEDKPIYLMGVGIPSNILEAVDRGVDFFDCVLPARNGRHGHVFTKEGKINLFNAKYELDSKPIDEGCQCPACKNYSRAYIRHLFKAKEILAMRLCVLHNLYFYNNMMQEIRDAIDGNYFAEYKSEKLKQWNGRA

SEQ ID NO: 54039 - protein, 377 aa, Clostridium scindens
  REGION 1..377: note = tr|B0NBB7|B0NBB7_CLOS5 Queuine tRNA-ribosyltransferase OS=Clostridium scindens (strain ATCC 35704 / DSM 5676 / VPI 13733 / 19) OX=411468 GN=tgt; PE = 3 SV=1
MYELLKKDGLAKRGRLHTVHGVIETPVFMNVGTAAAIKGAVSTTDLQEIKTQVELSNTYHLHVRPGDEVIKKLGGLHKFMVWDKPILTDSGGFQVFSLAGLRRIKEEGVYFNSHIDGRKIFMGPEESMQIQSNLASTIAMAFDECPSSIAEKDYIEKSVDRTTRWLIRCKKEMERLNSLPDTINQEQMLFGINQGGIYEDIRIRHAKEIADLHLDGYAIGGLAVGESHEDMYRILDAVVPHLPQNAPTYLMGVGTPANILEAVDRGVDFFDCVYPSRNGRHGHVYTRHGKLNLYNARYELDERPIEEGCRCPACRTYSRAYIRHLLKAKEMLGMRLCVLHNLYFYNSMMEEIRQAIEEGRYQEYKKEKLDGLMSGRE

SEQ ID NO: 54040 - protein, 380 aa, Clostridium septicum
  REGION 1..380: note = tr|A0A386PHA8|A0A386PHA8_CLOSE Queuine tRNA-ribosyltransferase OS=Clostridium septicum OX=1504; GN = tgt PE=3 SV=1
MSKKRYTLLKKDGEARRGRFETPHGTIETPVFMNVGTCAVIKGAVSTMDLKEIGCQVELSNTYHLHLRPSDKVVANLGGLHQFMNWDRPILTDSGGFQVFSLSGMRKIKEEGVYFSSHIDGRKIFMGPEESMQIQSNLASTIAMAFDECIPNPSTREYVEKSVARTTRWLERCKNEMDRLNSLDNTINKEQMLFGINQGGCYEDIRIEHAKTITKMDLDGYAIGGLAVGETHEEMYRIIEAVVPHLPEDKPIYLMGVGTPENILEAVDRGVDFFDCVLPARNGRHGHVFTKNGKINLMNAKFELDTRPIDEGCQCPACKSYTRAYIRHLFKAKEMLAMRLCVLHNLYFYNKLMEEIRNAIDGEYFKEFKEQKLKEWNTKA

SEQ ID NO: 54041 - protein, 376 aa, Clostridium sp.
  REGION 1..376: note = tr|A0A099S4H3|A0A099S4H3_9CLOT Queuine tRNA-ribosyltransferase OS=Clostridium sp. HMP27; OX = 1487921 GN=tgt PE=3 SV=1
MYKLLKKDGNARRGEFTTPHGVVQTPVFMNVGTLGVIKGAVSSMDLKEIGCQVELSNTYHLHLRPGDNVIKKLGGLHKFMNWDRPILTDSGGFQVFSLAGIRKIQEEGVYFNSHIDGRRIFMGPEESMQIQSNIASTIAMAFDECIPNPSTREYVENSVARTTRWLERCVKEMDRLNTLPDTINKEQMLFGINQGGTYEDIRIAHAKEIVKMDLDGYAIGGLAVGETHEEMYRVIDAVAPHLPEDKPIYLMGVGLPSNILEAVDRGVDFFDCVLPARNGRHGHVFTKEGKINLINAKFELDDRPIDEGCQCPACRDYSRAYIRHLFKAKEMLAMRLCVLHNLHFYNNLMQEIRDAIDAGNFKEYKERKLAEWGGRA

SEQ ID NO: 54042 - protein, 376 aa, Clostridium sp.
  REGION 1..376: note = tr|A0A386H2Y7|A0A386H2Y7_9CLOT Queuine tRNA-ribosyltransferase OS=Clostridium sp. JN500901; OX = 2068654 GN=tgt PE=3 SV=1
MYKLLKKCGKIRRGEFTTPHGVIQTPVFMNVGTLAAIKGAVSTVDLRKIGCQVELSNTYHLHLRPGDEVIKKLGGIHKFMNWDRPILTDSGGFQVFSLSKMRNIKEEGVYFNSHIDGRKIFMGPEESMRIQSNLASTIAMAFDECIPNPSPKDYVERSVERTTRWLARCKAELDRLNKLPDTINKQQMLFGINQGGTYDDLRIKHAKEIASMDLDGYAIGGLAVGETHDEMYRIIDAVVPNLPQDKPIYLMGVGLPSNILEAVDRGVDFFDCVLPARNGRHGHVFTKNGKINLMNAKYELDSKPIDDKCNCPTCRNYSRAYIRHLFKAKEMLAMRLCVLHNLYFYNNMMQEIRNAIDGDYFKEYKEQKLNDWNGRA

SEQ ID NO: 54043 - protein, 379 aa, unidentified
  source 1..379: note = [Clostridium] sphenoides
  REGION 1..379: note = tr|A0A381JNJ0|A0A381JNJ0_9FIRM Queuine tRNA-ribosyltransferase OS=[Clostridium] sphenoides; OX = 29370 GN=tgt PE=3 SV=1
MNYKIVAKDGRAKRAEVTTVHGTIQTPVFMNVGTVGAIKGAVSTDDLREIRTQVELSNTYHLHVRTGDKLIREFGGLHKFMSWDRPILTDSGGFQVFSLTGLRKIKEEGVYFQSHIDGRKIFMGPEESMQIQSNLASTIAMAFDECPPHPATREYMQNSVDRTTRWLERCQAEMAKLNSQPDTLNKDQLLFGINQGGTFEDIRIAHAKTISAMDLDGYALGGLAVGESHEEMYRILDETVPYLPENKPTYLMGVGTPANILEAVDRGVDFFDCVYPSRNGRHGHVYTNHGKMNLFNTKYELDHRPIEEGCGCPACRSYSRAYIRHLLKAKEMLGMRLCVLHNLYFYNTMMEEIRDAIENHRYGEYKEQKLSGMMAGQTT

SEQ ID NO: 54044 - protein, 378 aa, unidentified
  source 1..378: note = [Clostridium] spiroforme
  REGION 1..378: note = tr|A0A1Y4ETT9|A0A1Y4ETT9_9FIRM Queuine tRNA-ribosyltransferase OS=[Clostridium] spiroforme; OX = 29348 GN=tgt PE=3 SV=1
MTAISYELKHVCKQSGARYGILHTPHGDVETPMFMPVGTLATVKGISPEMLKEMHSQVILANTYHLWLRPGEDVIEKAGGLHKFMNYDGPMLTDSGGFQVFSLGKTRKIEEEGVKFKSIIDGSALFLSPEKAIEIQNKLGADIIMSFDECAPYPCTYEYMKDSMERTLRWAKRGKEAHKNTDKQALFGIVQGGEYADLRERCAKELVKMDFPGYSIGGTSVGEPKDVMYKMVDDAVKWLPEDKPRYLMGVGNPIDLIECAIRGIDMYDCVLPTRVARHGAVMTSMGRININNEKYKYDYTPLDPNCDCYTCKNYTKSYIRHLHKCDEIFGKTLLSIHNVNFLLKLASDIRQAIKEDRLLDFKEEFLDKYGHDVYKRAF

SEQ ID NO: 54045 - protein, 386 aa, unidentified
  source 1..386: note = [Clostridium] spiroforme
  REGION 1..386: note = tr|B1C319|B1C319_9FIRM Queuine tRNA-ribosyltransferase OS=[Clostridium] spiroforme DSM 1552 OX=428126 GN=tgt PE=3 SV=1
MLALKEVNMAAISYELKHVCKQSGARYGILHTPHGDVETPMFMPVGTLATVKGISPEMLKEMHSQVILANTYHLWLRPGEDVIEKAGGLHKFMNYDGPMLTDSGGFQVFSLGKTRKIEEEGVKFKSIIDGSALFLSPEKAIEIQNKLGADIIMSFDECAPYPCTYEYMKDSMERTLRWAKRGKEAHKNTDKQALFGIVQGGEYADLRERCAKELVKMDFPGYSIGGTSVGEPKDVMYKMVDDAVKWLPEDKPRYLMGVGNPIDLIECAIRGIDMYDCVLPTRVARHGAVMTSIGRININNEKYKYDYTPLDPNCDCYTCKNYTKSYIRHLHKCDEIFGKTLLSIHNVNFLLKLASDIRQAIKEDRLLDFKEEFLDKYGHDVYKRAF

SEQ ID NO: 54046 - protein, 376 aa, Clostridium sporogenes
  REGION 1..376: note = tr|A0A1V9IS01|A0A1V9IS01_CLOSG Queuine tRNA-ribosyltransferase OS=Clostridium sporogenes OX=1509; GN = tgt PE=3 SV=1
MYKLLKKSGKARRGEFTTPHGVIQTPVFMNVGTLAAIKGAVSSMDLKEIGCQVELSNTYHLHLRPGDEVVKKMGGLHKFMNWDRPILTDSGGFQVFSLSKIRKIQEEGVYFNSHIDGRKIFMGPEESMRIQSNLASTIAMAFDECVENPAPREYVEKSVERTTRWLHRCKDEMNRLNSLPDTINNKQMLFGINQGGTYEDIRIEHAKTIAKMDLDGYAIGGLAVGESHEDMYRIIDAVVPHLPEDKPIYLMGVGIPSNILEAVDRGVDFFDCVLPARNGRHAHVFTKEGKINLLNAKFELDDKPIDEGCQCPACKHYTRSYIRHLFKAKEMLAMRLCVLHNLYFYNNLMEEIRDAIDGDYFKEYKERKLKEWGGRA

SEQ ID NO: 54047 - protein, 376 aa, Clostridium sporogenes
  REGION 1..376: note = tr|A0A1V9I7L2|A0A1V9I7L2_CLOSG Queuine tRNA-ribosyltransferase OS=Clostridium sporogenes OX=1509; GN = tgt PE=3 SV=1
MYKLLKKSGNARRGEFTTPHGVIQTPVFMNVGTLAAIKGAVSSMDLKEIGCQVELSNTYHLHLRPGDEVVKKMGGLHKFMNWDRPILTDSGGFQVFSLSKIRNIQEEGVYFNSHIDGRKIFMGPEESMRIQSNLASTIAMAFDECVENPAPREYVEKSVERTTRWLHRCKDEMDRLNSLSDTINNKQMLFGINQGGIYEDIRIEHAKTIAKMDLDGYAIGGLAVGESHEDMYRIIDAVVPHLPEDKPIYLMGVGTPSNILEAVDRGVDFFDCVLPARNGRHAHVFTKEGKINLLNAKFELDDRPIDEGCQCPACKHYTRSYIRHLFKAKEMLAMRLCVLHNLYFYNNLMQEIRNAIDGDYFKEYKERKLQQWGGKA

SEQ ID NO: 54048 - protein, 375 aa, Clostridium sulfidigenes
  REGION 1..375: note = tr|A0A084J952|A0A084J952_9CLOT Queuine tRNA-ribosyltransferase OS=Clostridium sulfidigenes; OX = 318464 GN=tgt PE=3 SV=1
MYKLLKKSGKVRRGEFVTPHGTIQTPVFMNVGTLAAIKGAVSSMDLKEIGCQVELSNTYHLHLRPGDEVVKKMGGLHEFMNWDRPILTDSGGFQVFSLASMRKIKEEGVYFSSHIDGRKIFMGPEESMQIQSNLASTIAMAFDECIPNPSSREYVEKSVARTTRWLERCKVEMDRLNADPNTINKKQMLFGINQGGVYEDIRIEHAKTIRKLDLDGYAIGGLAVGESHEDMYRIIDAVVPYLPEDKPIYLMGVGTPENILEAVSRGVDFFDCVLPARNGRHGHVFTKYGKINIMNAKFELDKNPIDEGCDCPTCRHYTRGYIRHLFKAKEMLAMRLCVLHNLYFYNILMEDIRNAIDGDYFEEFKNQRLSEWGKK

SEQ ID NO: 54049 - protein, 380 aa, unidentified
  source 1..380: note = [Clostridium] symbiosum
  REGION 1..380: note = tr|U2DH28|U2DH28_CLOSY Queuine tRNA-ribosyltransferase OS=[Clostridium] symbiosum ATCC 14940 OX=411472 GN=tgt PE=3 SV=1
MEYKILYKDGRAKRAEMKTVHGTVQTPVFMNVGTVGAIKGAVSTDDLKEIGTQVELSNTYHLHVRTGDKLIKQFGGLHKFMNWDRPILTDSGGFQVFSLSGLRKIKEEGVYFNSHIDGRKIFMGPEESMQIQSNLGSTIAMAFDECPSSVASREYVQASVDRTTRWLERCREEMKRLNAQPDTVNREQLLFGINQGAIYEDIRIGHAKTISKMELDGYAVGGLAVGETHEEMYRILDAVVPHLPEDKPTYLMGVGTPANILEAVDRGVDFFDCVYPTRNGRHSHVYTNHGKMNLLNAKYELDKKPIEEGCGCPACRSYSRAYIRHLFKAKEMLGMRLCVLHNLYFYNKMMEEIRDAIEHHRYAEYKTAKLAGMMAGEEAK

SEQ ID NO: 54050 - protein, 380 aa, unidentified
  source 1..380: note = [Clostridium] symbiosum
  REGION 1..380: note = tr|E7GP74|E7GP74_CLOSY Queuine tRNA-ribosyltransferase OS=[Clostridium] symbiosum WAL-14163 OX=742740 GN=tgt PE=3 SV=1
MEYKILYKDGRAKRAEMKTVHGTVQTPVFMNVGTVGAIKGAVSTDDLKEIGTQVELSNTYHLHVRTGDKLIKQFGGLHKFMNWDRPILTDSGGFQVFSLSGLRKIKEEGVYFNSHIDGRKIFMGPEESMQIQSNLGSTIAMAFDECPSSVASREYVQASVDRTTRWLERCREEMKRLNAQPDTVNREQLLFGINQGAIYEDIRIGHAKTISKMELDGYAVGGLAVGETHEEMYRILDAVVPHLPEDKPTYLMGVGTPANILEAVDRGVDFFDCVYPTRNGRHSHVYTNHGKMNLLNAKYELDKKPIEEGCGCPACRSYSRAYIRHLFKAKEMLGMRLCVLHNLYFYNKMMEEIRDAIEHHRYAEYKAAKLAGMMAGEEAK

SEQ ID NO: 54051 - protein, 380 aa, Clostridium symbiosum; identical to SEQ ID NO: 54050
  REGION 1..380: note = tr|A0A174LJ98|A0A174LJ98_CLOSY Queuine tRNA-ribosyltransferase OS=Clostridium symbiosum OX=1512; GN = tgt PE=3 SV=1

SEQ ID NO: 54052 - protein, 380 aa, Clostridium symbiosum
  REGION 1..380: note = tr|A0A413JGS6|A0A413JGS6_CLOSY Queuine tRNA-ribosyltransferase OS=Clostridium symbiosum OX=1512; GN = tgt PE=3 SV=1
MEYKILYNDGRAKRAEMKTVHGTVQTPVFMNVGTVGAIKGAVSTDDLKEIGTQVELSNTYHLHVRTGDKLIKQFGGLHKFMNWDRPILTDSGGFQVFSLSGLRKIKEEGVYFNSHIDGRKIFMGPEESMQIQSNLGSTIAMAFDECPSSVASREYVQASVDRTTRWLERCREEMKRLNAQPDTVNREQLLFGINQGAIYEDIRIGHAKTISKMELDGYAVGGLAVGETHEEMYRILDAVVPHLPEDKPTYLMGVGTPANILEAVDRGVDFFDCVYPTRNGRHSHVYTNHGKMNLLNAKYELDKKPIEEGCGCPACRSYSRAYIRHLFKAKEMLGMRLCVLHNLYFYNKMMEEIRDAIEHHRYAEYKAAKLAGMMAGEEAK

SEQ ID NO: 54053 - protein, 379 aa, unidentified
  source 1..379: note = Clostridium taeniosporum
  REGION 1..379: note = tr|A0A1D7XID5|A0A1D7XID5_9CLOT Queuine tRNA-ribosyltransferase OS=Clostridium taeniosporum; OX = 394958 GN=tgt PE=3 SV=1
MSKRYTLLKKDGKARRGEFVTPHGTIQTPVFMNVGTLAAIKGAVSSMDLKEIGCQVELSNTYHLHLRPTDKVVSKLGGLHKFMNWDRPILTDSGGFQVFSLSAMRKIKEEGVYFSSHIDGRKIFMGPEESMQIQSNLASTIAMAFDECIPNPSTREYVERSVARTTRWLERCKEEMDRLNSLPDTINKEQMLFGINQGGIYEDIRIAHAKEIVKMDLDGYAIGGLAVGESHEDMYRIIDAVAPHLPEDKPIYLMGVGTPTNILEAIDRGVDFFDCVLPARNGRHGNVYTNEGKLNLMNAKHELDERPIEEGCQCPACKHYTRAYIRHLFKAKEMLAMRLCVLHNLYFYNNLMQEVRDAIDGGYFKEFKNKKIAAWEDRK

SEQ ID NO: 54054 - protein, 376 aa, Clostridium tagluense
  REGION 1..376: note = tr|A0A401UJJ5|A0A401UJJ5_9CLOT Queuine tRNA-ribosyltransferase OS=Clostridium tagluense OX=360422; GN = tgt PE=3 SV=1
MYKLLKKSGKVRRGEFTTPHGIIQTPVFMNVGTQGVIKGAVSSMDLKEINCQVELSNTYHLHLRPTDKVVRQMGGLHKFMNWDRPILTDSGGFQVFSLAAMRKIKEEGVYFNSHIDGKKIFMGPEESMQIQSNLGSTIAMAFDECIPNPSTKEYVVDSVARTTRWLERCKIEMDRLNSLPGTVNNKQMLFGINQGGTDADIRIEHAKTITKMNLDGYAIGGLAVGESHEDMYRIIDAVVPHLPQDKPIYLMGVGYPSNILEAVSRGVDFFDCVLPARNGRHGHVFTSDGKINIMNAKFELDAAPIDEGCQCPACKHYTRAYIRHLFKAKEMLAMRLCVLHNLYFYNKLMEDIRSAIDNDCFEEFKAEKLAKWNENA

SEQ ID NO: 54055 - protein, 378 aa, Clostridium tepidiprofundi
  REGION 1..378: note = tr|A0A151B807|A0A151B807_9CLOT Queuine tRNA-ribosyltransferase OS=Clostridium tepidiprofundi DSM 19306 OX=1121338 GN=tgt PE=3 SV=1
MGEYKLLKKSGKVRRGEFKTVHGVIQTPVFMNVGTLAAIKGAVSTMDLKEIRCQVELSNTYHLHLRPGDEIVKKMGGLHKFMNWDRPILTDSGGFQVFSLSGIRKIKEEGVYFSSHIDGRKIFMGPEESMQIQSNLGSTIAMAFDECIPNPSPREYVERSVARTTRWLERCKNELDRLNSLPNTVNKEQMLFGINQGGTYEDIRIEHAKTISKMNLDGYAIGGLAVGETHDEMYRIIDAVVPYLPQDKPIYLMGVGLPSNILEAVSRGVDFFDCVLPARNGRHGHVFTKNGKINLFNKKYELDDSPIDEGCQCPACRNYSRAYIRHLFKAKEMLAMRLCVLHNLYFYNKLMEDIRDAIDNDYFDEFKEQKLQEWNGKA

SEQ ID NO: 54056 - protein, 376 aa, unidentified
  source 1..376: note = Clostridium tepidum
  REGION 1..376: note = tr|A0A1S9IAA9|A0A1S9IAA9_9CLOT Queuine tRNA-ribosyltransferase OS=Clostridium tepidum OX=1962263; GN = tgt PE=3 SV=1
MYKLLKKSGKARRGEFTTPHGVIQTPVFMNVGTLAAIKGAVSSMDLKEIGCQVELSNTYHLHLRPGDEVVKKMGGLHKFMNWDRPILTDSGGFQVFSLSKIRKIQEEGVYFNSHIDGRKIFMGPEESMQIQSNLASTIAMAFDECIENPAPREYVEKSVERTTRWLHRCKDEMDRLNSLPDTINKKQMLFGINQGGTYEDIRIEHAKTIAKMDLDGYAIGGLAVGESHEDMYRIIDAVVPHLPEDKPIYLMGVGIPSNILEAVDRGVDFFDCVLPARNGRHAHVFTKGGKINLLNAKFELDDRPIDEGCQCPACKHYTRSYIRHLFKAKEMLAMRLCVLHNLYFYNNLMQEIRDAIDGDYFKEYKERKLKEWGGRA

SEQ ID NO: 54057 - protein, 376 aa, Clostridium tetani
  REGION 1..376: note = tr|A0A4V1LDA9|A0A4V1LDA9_CLOTA Queuine tRNA-ribosyltransferase OS=Clostridium tetani OX=1513; GN = tgt PE=3 SV=1
MYTLIKKCGNAKRGRFETPHGTIETPVFMNVGTLGVIKGAVSTMDLKEIGCQVELSNTYHLHLRPGDKVIKKMGGLHKFMNWDRPILTDSGGFQVFSLAKIRKIQEEGVYFNSHIDGRRIFMGPEESMRIQSNIASTIAMAFDECIPNPSTREYVENSVARTTRWLERCKKEMDRLNSLPDTINKKQMLFGINQGGTYDDIRKSHAKTIVDMDLDGYAIGGLAVGETHEEMYRVIDEVAPIFPDNKPLYLMGVGLPSNILEAVDRGVDFFDCVLPARNGRHGHVFTKYGKINLMNAKFELDGNPIDEGCECPACKHYSRAYIRHLFKAKEMLAMRLCVLHNLYFYNKLMEDIRKAIESDYFKEFKEEKLHNWNGKA

SEQ ID NO: 54058 - protein, 376 aa, Clostridium tetani
  REGION 1..376: note = sp|Q892A0|TGT_CLOTE Queuine tRNA-ribosyltransferase; OS = Clostridium tetani (strain Massachusetts / E88); OX = 212717 GN=tgt PE=3 SV=1
MYTLIKKCGNAKRGRFETPHGTIETPVFMNVGTLGVIKGAVSSMDLKEIGCQVELSNTYHLHLRPGDEVIKKMGGLHKFMNWDRPILTDSGGFQVFSLAKIRKIQEEGVYFNSHIDGRRIFMGPEESMRIQSNIASTIAMAFDECIPNPSTREYVENSVARTTRWLERCKKEMDRLNSLPDTINKKQMLFGINQGGTYEDIRKAHAKTIVDMDLDGYAIGGLAVGETHEEMYRVIDEVAPIFPDNKPLYLMGVGLPSNILEAVDRGVDFFDCVLPARNGRHGHVFTKYGKINLMNAKFELDGNPIDEGCECPACKHYSRAYIRHLFKAKEMLAMRLCVLHNLYFYNKLMEDIRKAIEGDYFKEFKEEKLHNWSGKA

SEQ ID NO: 54059 - protein, 376 aa, Clostridium tetanomorphum
  REGION 1..376: note = tr|A0A037ZC03|A0A037ZC03_CLOTT Queuine tRNA-ribosyltransferase OS=Clostridium tetanomorphum DSM 665 OX=1230342 GN=tgt PE=3 SV=1
MYKLIKRCGRTRRGEFITPHGTIQTPVFMNVGTLGAIKGAVSSMDLKEIGCQVELSNTYHLHLRPGDKIIKQMGGLHKFMNWDRPILTDSGGFQVFSLSSIRRIKEEGVYFNSHIDGKKIFMGPEESMQIQSNIASTIAMAFDECIPNPSTREYVEDSVARTTRWLERCKIEMDRLNSLPDTINKKQMLFGINQGGTYEDIRIEHAKTITKMDLDGYAIGGLAVGETHDEMYRIIDAVVPHLPQDKPIYLMGVGLPSNILEAVDRGVDFFDCVLPARNGRHGHVFTKEGKINLMNAKFELDGRPIDEGCQCPACRHYTRAYIRHLFKAKEMLAMRLCVLHNLYFYNNLMQEIRDAIDGDYFSEFKERKLKEWGGRA

SEQ ID NO: 54060 - protein, 373 aa, unidentified
  source 1..373: note = [Clostridium] thermoalcaliphilum
  REGION 1..373: note = tr|A0A1V4IA15|A0A1V4IA15_9FIRM Queuine tRNA-ribosyltransferase OS=[Clostridium] thermoalcaliphilum OX=29349 GN=tgt PE=3 SV=1
MAAIKFELIKTCKQSGARLGKLYTPHGVIETPIFMPVGTQATVKAMTPEALKEINSQIILSNTYHLYMRPGHKLVEKAGGLHKFMNWDRPILTDSGGFQVFSLGPLRKITEEGVEFRSHLDGSKHFISPEKATEIQNSLGSDIMMVFDECAPYPADRDYVKNSLERTTRWAKRCKDAHKNPDRQALFGIVQGGMYKDLREQSAREIMEIDFPGYAIGGLSVGEPKHLMYEVLDYTTPLLPKDKPRYLMGVGSPDDLLEGVIRGVDMFDCVLPTRIARNGTAMTSQGKVVVRNAKYAEDFTPLDPECDCYTCKNYTRAYIRHLVKANEILGSTLITHHNLYFLLKLMENVRKAIMEDRLLDYKKEFFQKYGYEI

SEQ ID NO: 54061 - protein, 378 aa, Clostridium thermobutyricum
  REGION 1..378: note = tr|A0A1V4SX53|A0A1V4SX53_9CLOT Queuine tRNA-ribosyltransferase OS=Clostridium thermobutyricum DSM 4928 OX=1121339 GN=tgt PE=3 SV=1
MSKRYTLLKKDGKARRGRFVTPHGTVETPVFMNVGTLAAIKGAVSSMDLKDIGCQVELSNTYHLHLRPSDKTVAKLGGLHKFMNWDRPILTDSGGFQVFSLASMRKIKEEGVYFNSHIDGRKIFMGPEESMQIQSNLASTIAMAFDECIPIPSTREYVEKSVERTTRWLKRCKKEMDRLNSLPETINKEQMLFGINQGATFKDIRVAHAEEIKKLDLDGYAIGGLAVGETHEEMYEIIDEVVPHLPEDKPIYLMGVGTPENILEAVDRGVDFFDCVLPARNGRHGQVFTANGKINLMNAKFEFDTRPIDEGCGCPACKNYTRAYIRHLFKAKEMLAMRLTVLHNLYFYNKLMEEIREAIDNDCYKEFKEKKLKDWNKK

SEQ ID NO: 54062 - protein, 378 aa, Clostridium thermobutyricum; identical to SEQ ID NO: 54061
  REGION 1..378: note = tr|N9XR29|N9XR29_9CLOT Queuine tRNA-ribosyltransferase OS=Clostridium thermobutyricum; OX = 29372 GN=tgt PE=3 SV=1

SEQ ID NO: 54063 - protein, 376 aa, Clostridium thermopalmarium; identical to SEQ ID NO: 53971
  REGION 1..376: note = tr|A0A2T0AX83|A0A2T0AX83_9CLOT Queuine tRNA-ribosyltransferase OS=Clostridium thermopalmarium DSM 5974 OX=1121340 GN=tgt PE=3 SV=1

SEQ ID NO: 54064 - protein, 377 aa, Clostridium tyrobutyricum
  REGION 1..377: note = tr|A0A4V1DIQ7|A0A4V1DIQ7_CLOTY Queuine tRNA-ribosyltransferase OS=Clostridium tyrobutyricum; OX = 1519 GN=tgt PE=3 SV=1
MYKLLKKQGNARRGQLTTVHGVVQTPVFMNVGTLAAIKGAVSSVDLRNIGCQVELSNTYHLSLRPGDEVIRKLGGLHKFMNWDRPILTDSGGFQVFSLAKIRKIKEEGVYFSSHIDGRKIFMGPEESMRIQSNLASTIAMAFDECIENPSPREYVQKSVERTTRWLERCKAEMNRLNSMPDTINRKQMLFGINQGGTYDDIRIEHAKAISDLNLDGYAIGGLAVGETSEEMYRIIEKVVPHLPQDKPIYLMGVGTPTNILEAVERGVDFFDCVLPARNGRHSHVFTDHGQLNLLNAKYELDDSPIDYNCSCPVCKNYSRAYIRHLFKAKEMLAMRLCVMHNLYFYNNLMSEIRDAIDGNYFPKYKEQKIQQWNESKK

SEQ ID NO: 54065 - protein, 377 aa, Clostridium tyrobutyricum; identical to SEQ ID NO: 54064
  REGION 1..377: note = tr|W6N3N6|W6N3N6_CLOTY Queuine tRNA-ribosyltransferase OS=Clostridium tyrobutyricum DIVETGP OX=1408889 GN=tgt PE=3 SV=1

SEQ ID NO: 54066 - protein, 378 aa, Clostridium uliginosum
  REGION 1..378: note = tr|A0A1I1PQ20|A0A1I1PQ20_9CLOT Queuine tRNA-ribosyltransferase OS=Clostridium uliginosum; OX = 119641 GN=tgt PE=3 SV=1
MSKKYTLLKKNGKARRGRFVTPHGTIETPVFMNVGTLAAIKGAVSSMDLKEIECQVELSNTYHLHLRPSDKVVRELGGLHKFMNWDRPILTDSGGFQVFSLSGMRKIKEEGVYFNSHIDGKRIFMGPEESMQIQSNLASTIAMAFDECIPNPSTREYVENSVNRTTRWLERCKIEMDKLNSSQDTLNKEQMLFGINQGGVYEDIRIKHAKTITKMDLDGYAIGGLAVGETHEEMYRIIDAVVPHLPEDKPIYLMGVGTPANILEAVDRGVDFFDCVLPARNGRHGHLFTKDGKFNILNAKFELDDRPIDEGCKCPACQHYTRAYIRHLFKAKEMLAMRLCVLHNLYFYNNLMKEIRDAIDGDYFKDFKEQKLREWQII

SEQ ID NO: 54067 - protein, 380 aa, unidentified
  source 1..380: note = Clostridium ventriculi
  REGION 1..380: note = tr|A0A174BB65|A0A174BB65_CLOVE Queuine tRNA-ribosyltransferase OS=Clostridium ventriculi OX=1267; GN = tgt PE=3 SV=1
MAIKRYTLLKKDGKARRGQFVTPHGTIQTPVFMNVGTLAAIKGAVSSMDLKEIGCQVELSNTYHLHLRPTDKVVKQLGGLHEFMNWDRPILTDSGGFQVFSLASMRKIKEEGVYFNSHIDGRKIFMGPEESMQIQSNLASTIAMAFDECIENPAPRDYVINSVNRTTRWLERCKKEMDRLNSLDTTINKEQLLFGINQGGTYEDIRIEHAKEIAKMDLDGYAIGGLAVGESHEDMYRIIDAVVPHLPEDKPIYLMGVGTPENILEAVSRGVDFFDCVLPARNGRHGHVFTSHGKINLMNAKFELDKSPIDEGCQCPACKNYTRAYIRHLFKAKEMLAMRLCVLHNLYFYNKLMEDIRAAIDGDYFEEFKAKKLEEWSRRA

SEQ ID NO: 54068 - protein, 379 aa, Clostridium vincentii
  REGION 1..379: note = tr|A0A2T0BBK7|A0A2T0BBK7_9CLOT Queuine tRNA-ribosyltransferase OS=Clostridium vincentii OX=52704; GN = tgt PE=3 SV=1
MSKRYTLLKKEGKARRGRFVTPHGTIETPVFMNVGTLAAIKGAVSSMDLKEIGCQVELSNTYHLHLRPSDEVIYKMGGLHSFMNWDKPILTDSGGFQVFSLAKMRKIKEEGVYFNSHIDGSKIFMGPEESMQIQSHLASTIAMAFDECVSNPSTREYVERSVDRTTRWLERCKIEIDRLNLLPSTINKEQMLFGINQGGVYDDIRIEHAKTITKMDLDGYAIGGLAVGESHEDMYRVIDAVVPYLPEDKPIYLMGVGTPENILEAVDRGIDFFDCVLPARNGRHGSVFTKNGKINLLNAKFQLDSKPIDEGCQCPACKSYTRAYIRHLFKAKELLALRLCVLHNLYFYNKLMADIRDALDGGYFKEFKEEKLKQWNLNA

SEQ ID NO: 54069 - protein, 379 aa, unidentified
  source 1..379: note = Cnuella takakiae
  REGION 1..379: note = tr|A0A1M5FNW3|A0A1M5FNW3_9BACT Queuine tRNA-ribosyltransferase OS=Cnuella takakiae OX=1302690; GN = tgt PE=3 SV=1
MAALQFNLEHTDSASAARAGTITTDHGTIQTPIFMPVGTVGSVKGVTQQQLKTDVQAQIILGNTYHLYLRPGMETMEAAGGLHRLMNWDRPILTDSGGYQVFSLAGTRKINEEGVTFRSHIDGNKHLFTPEKVMDIERSIGADIMMAFDECPPANSTFKYAENSMHLTHRWLDRCWNHFNNTPDRYGHTQNLFPIVQGAVFHDLRKASCEYIASKGATGNAIGGLSVGEPEEVMYEIAALCCEHLPKDKPRYLMGVGTPWNILENIALGVDMFDCVMPTRNGRNAMLFTTKGVINIDNKKWERDFSPIDPGLENEWSQYYSKAYVRHLFKAGELLGYTIASVQNLAFYLWLVREARKHILAGDFMSWKNELVPVLKTRL

SEQ ID NO: 54070 - protein, 378 aa, Cobetia crustatorum
  REGION 1..378: note = tr|A0A558HG31|A0A558HG31_9GAMM Queuine tRNA-ribosyltransferase OS=Cobetia crustatorum OX=553385; GN = tgt PE=3 SV=1
MRKECFMSFEKLATDGRARRGRMTFPRGTVETPAFMPVGTYGTVKGMTPESIKEIGAEMILGNTFHLWLRPGTEVIEAHGDLHDFAQWDKPILTDSGGFQVFSLGKTRKITEQGVHFRSPVDGSKVFMGPEESMAVQRSLGSDIVMIFDECTPYPATHDEARKSMEMSLRWAQRSYDAHGGSPSALFGIIQGGMYPDLREQSLEGLKKIDFDGYAIGGLSVGEPKEEMIKALDYLPEWMPEDKPRYLMGVGKPEDLVEGVRRGVDMFDCVMPTRNARNGHLFTPTGTVKIRNAVHKRDTSPLDPECDCYTCTNFSRGYLHHLDRCGEMLGSMLNTIHNLRYYQTVMAGLRGAIEAGTLQDFVEQFYAARGLPVPPLAD

SEQ ID NO: 54071 - protein, 378 aa, Cobetia marina
  REGION 1..378: note = tr|A0A4Y4GM19|A0A4Y4GM19_COBMA Queuine tRNA-ribosyltransferase OS=Cobetia marina OX=28258 GN=tgt; PE = 3 SV=1
MRKECFMSFEKLATDGRARRGRMTFPRGTVETPAFMPVGTYGTVKGMTPESIKEIGAEIILGNTFHLWLRPGTEVIEAHGDLHDFAQWDKPILTDSGGFQVFSLGKTRKITEQGVHFRSPVDGSKVFMGPEESMAVQRSLGSDIVMIFDECTPYPATHDEARKSMEMSLRWAQRSRDAHGDSPSALFGIIQGGMYPDLREKSLEGLKKIDFDGYAIGGLSVGEPKDEMIKVLDYLPEWMPEDKPRYLMGVGKPEDLVEGVRRGVDMFDCVMPTRNARNGHLFTPTGTVKIRNAVHKHDTSPLDPDCDCYTCTNFSRGYLHHLDRCGEMLGSMLNTIHNLRYYQTVMAGLRGAIEAGTLQDFVEQFYAARGLPVPPLAD

SEQ ID NO: 54072 - protein, 372 aa, Cobetia marina
  REGION 1..372: note = tr|A0A4U1LSI1|A0A4U1LSI1_COBMA Queuine tRNA-ribosyltransferase OS=Cobetia marina OX=28258 GN=tgt; PE = 3 SV=1
MSFEKLATDGRARRGRMTFPRGTVETPAFMPVGTYGTVKGMTPESIKEIGAEIILGNTFHLWLRPGTEVIEAHGDLHDFAQWDKPILTDSGGFQVFSLGKTRKITEQGVHFRSPVDGSKVFMGPEESMAVQRSLGSDIVMIFDECTPYPATHDEARKSMEMSLRWAQRSRDAHGDSPSALFGIIQGGMYPDLREKSLEGLKKIDFDGYAIGGLSVGEPKDEMIKVLDYLPEWMPEDKPRYLMGVGKPEDLVEGVRRGVDMFDCVMPTRNARNGHLFTPTGTVKIRNAVHKHDTSPLDPDCDCYTCTNFSRGYLHHLDRCGEMLGSMLNTIHNLRYYQTVMAGLRGAIEAGTLQDFVEQFYAARGLPVPPLAD

SEQ ID NO: 54073 - protein, 372 aa, Cobetia sp.; identical to SEQ ID NO: 54072
  REGION 1..372: note = tr|A0A3T0K9V5|A0A3T0K9V5_9GAMM Queuine tRNA-ribosyltransferase OS=Cobetia sp. ICG0124 OX=2053669; GN = tgt PE=3 SV=1

SEQ ID NO: 54074 - protein, 378 aa, Cobetia sp.
  REGION 1..378: note = tr|A0A2E4Q3P7|A0A2E4Q3P7_9GAMM Queuine tRNA-ribosyltransferase OS=Cobetia sp. OX=1873876 GN=tgt; PE = 3 SV=1
MRKECFMSFEKLATDGRARRGRMTFPRGTVETPAFMPVGTYGTVKGMTPESIKDIGAEIILGNTFHLWLRPGTEVIEAHGDLHDFAQWDKPILTDSGGFQVFSLGKTRKITEQGVHFRSPVDGSKVFMGPEESMAVQRSLGSDIVMIFDECTPYPATHDEARKSMEMSLRWAQRSYDAHGDSPSALFGIIQGGMYPDLREKSLEGLKKIDFDGYAIGGLSVGEPKDEMIKVLDYLPEWMPEDKPRYLMGVGKPEDLVEGVRRGVDMFDCVMPTRNARNGHLFTPTGTVKIRNAVHKRDTSPLDPDCDCYTCTNFSRGYLHHLDRCGEMLGSMLNTIHNLRYYQTVMAGLRGAIEAGTLQDFVEQFYAARGLPVPPLAD

SEQ ID NO: 54075 - protein, 373 aa, Cocleimonas flava
  REGION 1..373: note = tr|A0A4R1FCD1|A0A4R1FCD1_9GAMM Queuine tRNA-ribosyltransferase OS=Cocleimonas flava OX=634765; GN = tgt PE=3 SV=1
MDFTLKHSDKSNNNLARRGELNFPRGTVQTPAFMPVGTYGTVKSMKPEEIKDLGAEIILGNTFHLMLRPGTDIIEKHGDLHDFMNWDKPILTDSGGFQVFSLAKMRKITEEGVHFRSPVNGDKVLLSPEVSMDIQRKLGSDIVMIFDECTPYPAGLSEARESMELSLRWAKRSKEAHADNPSALFGIVQGGMHAELRTTSAQGLQEIGFDGYAIGGLSVGEPKDERDHVLEVTTPLLPADKPRYLMGVGKPEDIVESVRRGVDMFDCVIPTRNARNGFLFTRFGELKLRNSKHQADTGPIDPECGCYTCQNYSRSYLRHLDKCSEMLGAHLNTVHNLYYYQELMRGIRAAIENDSFDAFADDFYAQRENKENV

SEQ ID NO: 54076 - protein, 376 aa, unidentified
  source 1..376: note = Cognatishimia maritima
  REGION 1..376: note = tr|A0A1M5J1P2|A0A1M5J1P2_9RHOB Queuine tRNA-ribosyltransferase OS=Cognatishimia maritima; OX = 870908 GN=tgt PE=3 SV=1
MTSRFSFDLKATDGKARTGVISTPRGEIRTPAFMPVGTAATVKAMMPESVRATGADILLGNTYHLMLRPTAERIDRLGGLHKFMNWERPILTDSGGFQVMSLAGLRKLTEKGVTFQSHIDGSKHELTPERSMEIQKLLGSDIVMCFDECPALPADRDRIAESMRLSMRWAERSKDAFGDRPGHALFGIQQGGLEEDFREESAKALREIEFDGYAVGGLAVGEGQEAMFSVLDFAPDQLPVDKPRYLMGVGKPDDIVGAVKRGIDMMDCVLPSRSGRTGQCFTRHGVVNIKNARHADDPRPLDESCGCPACQNYSRAYLHHVFRSNEMISGMLLTWHNLQYFQDIMQGMRDAIEAGTFEAWERDFHQARAQGDIEPV

SEQ ID NO: 54077 - protein, 378 aa, unidentified
  source 1..378: note = Cognatiyoonia koreensis
  REGION 1..378: note = tr|A0A1I0PQ03|A0A1I0PQ03_9RHOB Queuine tRNA-ribosyltransferase OS=Cognatiyoonia koreensis; OX = 364200 GN=tgt PE=3 SV=1
MSICMTFSFSLHHTDGKARTGVISTPRGDIRTPAFMPVGTAATVKAMMPESVAATGADILLGNTYHLMLRPTAERIDRLGGLHKFMNWDKPILTDSGGFQVMSLSDLRKLTEEGVTFKSHIDGSKHHLTPERSMEIQKLLGSDIVMCFDECPALPADRSRINESMQLSMRWAQRSRDAFGDRPGHALFGIQQGGLEEDLRAESAEALRAIEFEGYAVGGLAVGEGQEAMFSVLDFAPDQLPVEKPRYLMGVGKPDDIVGAVKRGIDMMDCVLPSRSGRTGQAFTHRGVVNIKNARHADDPRPLDADCACPACSNYSRAYLHHVFRAQEMISGMLLTWHNLHYFQDIMQGMRDAIAIGRFAEWEKTFHAGRAAGDIAPL

SEQ ID NO: 54078 - protein, 375 aa, unidentified
  source 1..375: note = Cognatiyoonia sediminum
  REGION 1..375: note = tr|A0A1M5LJ02|A0A1M5LJ02_9RHOB Queuine tRNA-ribosyltransferase OS=Cognatiyoonia sediminum; OX = 1508389 GN=tgt PE=3 SV=1
MGGFSFEKLGQDGKARTGVIHTPKGDIRTPAFMPVGTAATVKAMMPESVAATGAEILLGNTYHLMLRPTAERINNLGGLHKFMNWSKPILTDSGGFQVMSLAGLRKLTEEGVTFQSHIDGSKHHLTPERSMEIQRLLGSDIVMCFDECPALPADRDRIAESMRLSMRWAQRSRDAFGDRLGYALFGIQQGGLEQDFREESAEALKSIGFDGYAIGGLAVGEGQDAMFGCLDFAPDQLPEDKPRYLMGVGKPDDIVGAVKRGVDMMDCVLPSRSGRTGQVFTRRGVINIKNARHADDPRPLDEHCTCPACRNYSRAYLHHVFRSNEMIAGMLLTWHNLHYFQEIMQGMRDAIAAGTFDAWEADFHAMRAQGDIDPI

SEQ ID NO: 54079 - protein, 402 aa, Cohaesibacter gelatinilyticus
  REGION 1..402: note = tr|A0A285NDQ3|A0A285NDQ3_9RHIZ Queuine tRNA-ribosyltransferase OS=Cohaesibacter gelatinilyticus; OX = 372072 GN=tgt PE=3 SV=1
MTEKTTTSISNQDPDRMGLGLPTPDPKPEKFGFKLLAQDGKARRGEVSMPRGTIRTPAFMPVGTAATVKFMYPGQVRDLGADVILGNTYHLMLRPGAERIHSLGGLHKFANWKYPILTDSGGFQVMSLAKLRKMSEQGVEFKSHIDGVKHFMSPERSIEIQCQLGSDIQMQLDECTRLPASEDEIERAMQLSLRWAERCKIEFGDRPGQAMFGIVQGGDIPRLREESAQSLKDMDLKGYSIGGLAVGEPQQVMLDMLEVTCPVLPEDKPRYLMGVGTPDDLIESVSRGVDMFDCVMPTRAGRHGLAFTRYGKVNLKNARHKDDHRPLDPLSHCPAARDYSRAYLYHLVKSNEALGSMLLTWNNLAYYQELMQGMRDAIEAGRFEDHKVEVKEGWARGDIPTL

SEQ ID NO: 54080 - protein, 404 aa, Cohaesibacter marisflavi
  REGION 1..404: note = tr|A0A1I5I972|A0A1I5I972_9RHIZ Queuine tRNA-ribosyltransferase OS=Cohaesibacter marisflavi; OX = 655353 GN=tgt PE=3 SV=1
MTDQMQMSETTPPLGADRMNKGQPVPNPAPTEFGFKLLATDGKARRGEVFMPRGTIRTPAFMPVGTAATVKFMYPGQVRDLGADVILGNTYHLMLRPGAERVDALGGLHKFANWPYPILTDSGGFQVMSLAQLRKMSEEGVEFKSHIDGAKFMMTPERSIEIQCLLGSDIQMQLDECTRLPAKEIEIEKAMQLSLRWAERCKTQFGDRPGQAMFGIVQGGDIPRLREESARALKAMDLKGYSIGGLAVGEPQAVMLDILDVTCPILPENKPRYLMGVGTPDDLMEAVSRGVDMFDCVMPTRAGRHGLAFTRFGKVNLKNARHKDDPRPLDPESDCPAARDYSRAYLYHLVKSNEALGAMLLSWNNLAYYQSLMQGMRDAIEAGRFEDHKAEVKEGWARGDMPAL

SEQ ID NO: 54081 - protein, 386 aa, Cohaesibacter sp.
  REGION 1..386: note = tr|A0A2N5XTL3|A0A2N5XTL3_9RHIZ Queuine tRNA-ribosyltransferase OS=Cohaesibacter sp. H1304; OX = 2067669 GN=tgt PE=3 SV=1
MGLGQPLPDPRPTDFSFKLIATDGKARRGEVSMPRGTIRTPAFMPVGTAATVKFMYPGQVRDLGADVILGNTYHLMLRPGAERIANLGGLHKFANWPYPILTDSGGFQVMSLAKLRKMSEQGVEFKSHIDGAKYMMSPERSIEIQCLLGSDIQMQLDECTRLPASEEDIEKAMQLSLRWAERCKTQFGDRPGQAMFGIVQGGDIPRLREESALALKAMDLKGYSIGGLAVGEPQDVMLDMLGITCPLLPENKPRYLMGVGTPDDLIEAVSQGVDMFDCVMPTRAGRHGLAYTRFGKVNLKNARHKDDHRPLDPESNCPASRDYSRAYLYHLTKSNEALASMLLTWNNLAYYQTLMQNMRDAIEAGHFVDHKAAVKEAWAKGDMPAL

SEQ ID NO: 54082 - protein, 404 aa, Cohaesibacter sp.
  REGION 1..404: note = tr|A0A285M809|A0A285M809_9RHIZ Queuine tRNA-ribosyltransferase OS=Cohaesibacter sp. ES.047; OX = 1798205 GN=tgt PE=3 SV=1
MTEQTTSATATPPLGSDRMGKGQPLPEPRPTDFTFKLNATDGAARCGEVTMPRGTIRTPAFMPVGTAATVKFMYPGQVRDLGADVILGNTYHLMLRPGAERIAELGGLHKFANWPYPILTDSGGFQVMSLAKLRKMSEKGVEFKSHIDGVKYMMTPERSIEIQCLLGSDIQMQLDECTRLPASEEEIEKAMQLSLRWAERCKTQFGDRPGQAMFGIVQGGDIPRLREESALALKALDLKGYSIGGLAVGEPQEVMLDMLGITCPLLPDNKPRYLMGVGTPDDLIESVSRGVDMFDCVMPTRAGRHGLAYTRFGKINLKNARHKDDPRPLDPESACPAARDYSRAYLYHLVKSNEALGSMLLTWNNLAYYQDLMQGMRDAISEGRFTDHKASVKEAWTRGDIPAL

SEQ ID NO: 54083 - protein, 377 aa, unidentified
  source 1..377: note = Cohnella kolymensis
  REGION 1..377: note = tr|A0A0C2QFH4|A0A0C2QFH4_9BACL Queuine tRNA-ribosyltransferase OS=Cohnella kolymensis OX=1590652; GN = tgt PE=3 SV=1
MAVTYELIKTCRQTGARLGRLHTPHGVIDTPTFMPVGTQATVKGMSPEELKDLGAQIILSNTYHLFLRPGHELVKEAGGLHRFMNWDRPILTDSGGFQVFSLSEMRKITEEGVAFRSHINGDKMSLTPESATHVQNALGADIMMAFDECPPFPADYEYVKQSTERTSRWAERCLRAHQRPGDQALFGIVQGGMHKDLRKKSAKDLTSLDFPGYSIGGLSVGEPKALMYEVLEETVPLLPGSKPRYLMGVGSPDALIEGSIRGIDMFDCVLPTRIARNGTLMTSQGRMVVRNAKYTGDFGPLDPECSCYACRSYSRAYIRHLVKADEMFGLRLTTIHNLHFLVNLMHEVRQAIREDRLADFRDQFFEKYGMAENESGF

SEQ ID NO: 54084 - protein, 377 aa, Cohnella luojiensis
  REGION 1..377: note = tr|A0A4Y8MAW5|A0A4Y8MAW5_9BACL Queuine tRNA-ribosyltransferase OS=Cohnella luojiensis OX=652876; GN = tgt PE=3 SV=1
MAVKYELLKTCAQTGARLGRLHTPHGVIDTPTFMPVGTQASVKGMSPEELKSLNAQIILSNTYHLFLRPGHELVKEAGGLHKFMNWDRPILTDSGGFQVFSLSEMRKITEQGVEFRSHINGDKLSLTPESATQVQNALGADIIMAFDECPPYPAEYEYVKQSTERTSRWAERCLQAHGRPHDQALFGIVQGGMHKDLRKQSALDLTSLDFPGYAMGGLSVGEPKHLMYEMLEETIHLLPSDKPRYLMGVGSPDALLDGSIRGVDMFDCVLPTRIARNGTLMTSQGRMVVRNAKYTSDFGPLDPECTCYACRNYSRAYIRHLIKADEMFGLRLTTIHNLHFLVNLMAQVRDAIREDRLGTFRDQFFEKYGMAHNDSGF

SEQ ID NO: 54085 - protein, 377 aa, unidentified
  source 1..377: note = Cohnella lupini
  REGION 1..377: note = tr|A0A3D9IRI9|A0A3D9IRI9_9BACL Queuine tRNA-ribosyltransferase OS=Cohnella lupini OX=1294267; GN = tgt PE=3 SV=1
MAVKYELIKTCAQTGARLGRLHTPHGIIDTPTFMPVGTQASVKGMSPEELKSLGAQIILSNTYHLFLRPGHELVKEAGGLHKFMNWERPILTDSGGFQVFSLSEMRKITEQGVEFRSHINGDKLSLTPESATQVQNALGADIMMAFDECPPYPAEYEYVKQSTERTSRWAERCLKAHGRPHDQALFAIVQGGMHKDLRKQSALDLTSLDFPGYAMGGLSVGEPKPLMYEMLEETIHLLPSDKPRYLMGVGSPDALLDGSIRGVDMFDCVLPTRIARNGTLMTSQGRMVVRNAKYANDFGPLDPECTCYACQNYSRAYIRHLIKADEMFGLRLTTIHNLHFLVKLMEQVREAIREDRLGSFRDEFFEKYGMAHNDSGF

SEQ ID NO: 54086 - protein, 377 aa, Cohnella phaseoli
  REGION 1..377: note = tr|A0A3D9KP53|A0A3D9KP53_9BACL Queuine tRNA-ribosyltransferase OS=Cohnella phaseoli OX=456490; GN = tgt PE=3 SV=1
MAVKYELIKTCAQTGARLGRLHTPHGVIDTPTFMPVGTQASVKGMSPEELKSLGAQIILSNTYHLFLRPGHELVKEAGGLHRFMNWDRPILTDSGGFQVFSLSEMRKITEEGVEFRSHINGDKLSLTPESATQVQNALGSDILMAFDECPPYPAEYEYVKQSTERTSRWAERCLKAHQRPHDQALFGIVQGGMHKDLRKMSAMDLTSLDFPGYAIGGLSVGESKPLMYEMLEETVPHLPSHKPRYLMGVGSPDALLEGSIRGVDMFDCVLPTRIARNGTLMTSQGRMVVRNAKYTNDFSPLDPECSCYACRNYSRAYIRHLIKADEMFGLRLTTIHNLHFLVQLMAQVREAIREDRLGTFRDEFFEKYGMAHNESGF

SEQ ID NO: 54087 - protein, 378 aa, Cohnella sp.
  REGION 1..378: note = tr|A0A1I1ARE2|A0A1I1ARE2_9BACL Queuine tRNA-ribosyltransferase OS=Cohnella sp. OV330 OX=1855288; GN = tgt PE=3 SV=1
MPAITYELIKTCAQTGARLGRVHTPHGVIDTPTFMPVGTQATVKGISPEELKDLNAQIILSNTYHLFVRPGHELVRAAGGLHKMMNWDRPILTDSGGFQVFSLAQMRKITEEGVTFRSHLNGDKLFLSPEVATAVQNALGPDIMMAFDECPPYPAEYAYVKQSTERTSRWAERCLKAHARPHDQGLFAIVQGGMHKDLRAQSAADLTSLDFPGYAIGGLSVGESKEIMYEVLDHTVPLLPSNKPRYLMGVGSPDALVEGSIRGVDMFDCVLPTRIARNGTLMTSEGRVVVKNAKYAEDFGPLDPKCDCYACRNYSRSYVRHLIRADEMFGLRLTTIHNLHFLVNLMSQVRQAIRDDRLGDFRDEFFEAYGMATNESGF

SEQ ID NO: 54088 - protein, 377 aa, Cohnella sp.
  REGION 1..377: note = tr|A0A231RFB6|A0A231RFB6_9BACL Queuine tRNA-ribosyltransferase OS=Cohnella sp. CIP 111063; OX = 1955714 GN=tgt PE=3 SV=1
MAVKYELIKTCAQTGARLGRLHTPHGVIDTPTFMPVGTQASVKGMSPEELKSLGAQIILSNTYHLFLRPGHELVREAGGLHRFMNWDRPILTDSGGFQVFSLSEMRKITEEGVEFRSHINGDKLSLTPESATHVQNALGADIMMAFDECPPYPAEYEYVKQSTERTSRWAERCLKAHERSHDQALFGIVQGGMHKDLRKMSAADLTSLDFPGYAIGGLSVGEPKPLMYEMLEETVPHLPSHKPRYLMGVGSPDALLEGSIRGVDMFDCVLPTRIARNGTLMTSQGRMVVRNAKYTNDFSPLDPECSCYACRNYSRAYIRHLIKADEMFGLRLTTIHNLHFLVQLMVQVREAIREDRLGTFRDEFFEKYGMAHNESGF

SEQ ID NO: 54089 - protein, 374 aa, unidentified
  source 1..374: note = Coleofasciculus chthonoplastes
  REGION 1..374: note = tr|B4VTJ0|B4VTJ0_9CYAN Queuine tRNA-ribosyltransferase OS=Coleofasciculus chthonoplastes PCC 7420 OX=118168 GN=tgt PE=3 SV=1
MAQTYNSFSFQCQAWCSQTKARAGLLHSPHGLIETPRFMPVGTLATVKTLTPAQLEAAQAQIILANTYHLHLQPGEAIVQQAGGLHHFMGWQRPILTDSGGFQVFSLSKLRQISEEGVVFRSPRDGRLINLTPERSIAIQNALGADIIMAFDECPPYPASRAEIEASLERTDRWLKRCINAHTRADQQALFGIVQGGVYLDLRRQAAESLVSLDLPGYAIGGVSVGEPVDLIHDIVAATAPYLPIDKPRYLMGVGTYREMARAIASGVDLFDCVIPTRLGRHGAALVQGERWNLKNARFREDFSALDSTCPCYCCQNFSRAYLSHLVRSREVLGFMLISLHNVTELIRFTQSIREAILRDTFTTDFARWLVQRA

SEQ ID NO: 54090 - protein, 375 aa, Collimonas arenae
  REGION 1..375: note = tr|A0A561FY52|A0A561FY52_9BURK Queuine tRNA-ribosyltransferase OS=Collimonas arenae OX=279058; GN = tgt PE=3 SV=1
MLEFTLLKTEGKARRGRLKLNHGTVETPIFMPVGTYGSVKAMSPLELVEIEAQIILGNTFHLWLRPGTEVLDKFGGLHKFMAWDKPILTDSGGFQVFSLGAMRKITEEGVKFSSPINGDKLFLSPEVSMQIQKSLNSDIVMQFDECTPYEIDGRPATSEEAAQSMRMSLRWAKRSKNEFDQLENPNALFGIVQGGMFENLRDESLAGLEDVGFHGIAIGGLSVGEPKEEMMRVLEHIGPRLPAGKPHYLMGVGTPEDLVAGVENGVDMFDCVMPTRNARNGWLFTRFGDLKIKNARYKDDEKPLDETCGCYACRNFSRAYLHHLHRTGEILGARLNTIHNLHYYLDLMKNIRAALDVGQFSVFVAQFHLDRARGV

SEQ ID NO: 54091 - protein, 375 aa, Collimonas arenae
  REGION 1..375: note = tr|A0A0A1FAV9|A0A0A1FAV9_9BURK Queuine tRNA-ribosyltransferase OS=Collimonas arenae OX=279058; GN = tgt PE=3 SV=1
MLEFTLIKTEGKARRGRLKLNHGTVETPIFMPVGTYGSVKAMSPLELVEIEAQIILGNTFHLWLRPGTDIIDKFSGLHKFMGWDKPILTDSGGFQVFSLGAMRKITEEGVKFSSPINGDKLFLSPEVSMQIQKSLNSDIVMQFDECTPYEIDGRAATSEEAAQSMRMSLRWAKRSKNEFDQLENPNALFGIVQGGMFENLRDESLAGLQDVGFHGIAIGGLSVGEPKEEMMRVLEHIGPRLPADKPHYLMGVGTPEDLVAGVENGVDMFDCVMPTRNARNGWLFTRFGDLKIKNARYKDDEKPLDETCSCYACRNFSRAYLHHLHRTGEILGARLNTIHNLYYYLDLMKNIRAALDVGQFSVFVTQFHLDRARGV

SEQ ID NO: 54092 - protein, 386 aa, Collimonas fungivorans
  REGION 1..386: note = tr|G0AI15|G0AI15_COLFT Queuine tRNA-ribosyltransferase OS=Collimonas fungivorans (strain Ter331) OX=1005048 GN=tgt PE=3 SV=1
MQKSDAVNKKIMLEFTLLKTEGKARRGRLKLNHGVVETPIFMPVGTYGSVKAMSPLELVEIEAQIILGNTFHLWLRPGTDVIDKFRGLHKFMAWDKPILTDSGGFQVFSLGAMRKITEEGVKFSSPINGDKLFLSPEVSMQIQKSLNSDIVMQFDECTPYEIDGRPATSEEAAQSMRMSLRWAKRSKNEFDQLENPNALFGIVQGGMFENLRDESLAGLEDIGFHGIAIGGLSVGEPKEEMMRVLEHIGPRLPADKPHYLMGVGTPEDLVAGVENGVDMFDCVMPTRNARNGWLFTRFGDLKIKNARYKDDEKPLDETCGCYACRNFSRAYLHHLHRTGEILGARLNTIHNLHYYLDLMKNIRAALDVGQFSVFVTQFHLDRARGV

SEQ ID NO: 54093 - protein, 375 aa, Collimonas fungivorans
  REGION 1..375: note = tr|A0A127P7W3|A0A127P7W3_9BURK Queuine tRNA-ribosyltransferase OS=Collimonas fungivorans; OX = 158899 GN=tgt PE=3 SV=1
MLEFTLLKTEGKARRGRLKLNHGVVETPIFMPVGTYGSVKAMSPLELVEIEAQIILGNTFHLWLRPGTDVIDKFSGLHKFMAWDKPILTDSGGFQVFSLGAMRKITEEGVKFSSPINGDKLFLSPEVSMQIQKSLNSDIVMQFDECTPYEIDGRPATSEEAAQSMRMSLRWAKRSKNEFDQLENPNALFGIVQGGMFENLRDESLAGLEDVGFHGIAIGGLSVGEPKEEMMRVLEHIGPRLPADKPHYLMGVGTPEDLVAGVENGVDMFDCVMPTRNARNGWLFTRFGDLKIKNARYKDDEKPLDETCGCYACRNFSRAYLHHLHRTGEILGARLNTIHNLHYYLDLMKNIRAALDVGQFGVFVTQFHLDRARGV

SEQ ID NO: 54094 - protein, 375 aa, Collimonas pratensis
  REGION 1..375: note = tr|A0A127PZP0|A0A127PZP0_9BURK Queuine tRNA-ribosyltransferase OS=Collimonas pratensis OX=279113; GN = tgt PE=3 SV=1
MLEFTLIKTEGKARRGRLKLNHGTVETPIFMPVGTYGSVKAMSPLELVEIEAQIILGNTFHLWLRPGTDVIDKFSGLHKFMAWDKPILTDSGGFQVFSLGAMRKITEEGVKFSSPINGDKLFLSPEVSMQIQKSLNSDIVMQFDECTPYEIDGRPATSEEAAQSMRMSLRWAKRSKNEFDQLENPNALFGIVQGGMFENLRDESLAGLEDVGFHGIAIGGLSVGEPKEEMMRVLEHIGPRLPADKPHYLMGVGTPEDLVAGVENGVDMFDCVMPTRNARNGWLFTRFGDLKIKNARYKDDEKPLDETCGCYACRNFSRAYLHHLHRTGEILGARLNTIHNLHYYLDLMKNIRAALDVGQFSVFVTQFHLDRARGV

SEQ ID NO: 54095 - protein, 375 aa, Collimonas sp.; identical to SEQ ID NO: 54094
  REGION 1..375: note = tr|A0A2A9KBB8|A0A2A9KBB8_9BURK Queuine tRNA-ribosyltransferase OS=Collimonas sp. PA-H2 OX=1881062; GN = tgt PE=3 SV=1

SEQ ID NO: 54096 - protein, 375 aa, Collimonas sp.
  REGION 1..375: note = tr|A0A1I1JPG4|A0A1I1JPG4_9BURK Queuine tRNA-ribosyltransferase OS=Collimonas sp. OK412 OX=1801619; GN = tgt PE=3 SV=1
MLEFTLLKTEGKARRGRLKLNHGTVETPIFMPVGTYGSVKAMSPLELVEIEAQIILGNTFHLWLRPGTEVLDKFGGLHKFMAWDKPILTDSGGFQVFSLGAMRKITEEGVKFSSPINGDKLFLSPEVSMQIQKSLNSDIVMQFDECTPYEIDGRPATSEEAAQSMRMSLRWAKRSKNEFDQLENPNALFGIVQGGMFENLRDESLAGLEDVGFHGIAIGGLSVGEPKEEMMRVLEHIGPRLPAGKPHYLMGVGTPEDLVAGVENGVDMFDCVMPTRNARNGWLFTRFGDLKIKNARYKDDEKPLDETCGCYACRNFSRAYLHHLHRTGEILGARLNTIHNLHYYLDLMKNIRAALDVGQFSVFVTRFHLDRARGV

SEQ ID NO: 54097 - protein, 379 aa, Collinsella aerofaciens
  REGION 1..379: note = tr|A4EAN0|A4EAN0_9ACTN Queuine tRNA-ribosyltransferase OS=Collinsella aerofaciens ATCC 25986 OX=411903 GN=tgt PE=3 SV=1
MDQSLFKFDLIAEDPTTHARAGVLHTPHGDIETPIFMPVGTKANVKGIPTETVKQLGAQIVLANTYHLSMRPGEDTIAELGGLHKFMNWHGPILTDSGGFQVFSHNDAVKLTDEGVRFIVNDYDGRHVFWTPEDNMEIAMKLGSDICMQLDQCPGYPATRAYVERAVELSSMWAERCYNAHTRDDQALFGIVQGGMHLDLRLRSLRHLEECGDFPGYGIGGYSVGEDHETMFETLAPLVSEYMPKHKPRYLMGVGNPTTLVRGVGVGIDMFDCVLPTRTGRMGTAFSSEGRLNFRNARFAHDDGPIDPTCTCPVCTGGYSRALIRHMVTQKEMLGGILLSMHNIYYLLNLMQRARQAIIEGRYGAFVSDWMNSPAAVDY

SEQ ID NO: 54098 - protein, 379 aa, Collinsella aerofaciens
  REGION 1..379: note = tr|A0A174J634|A0A174J634_9ACTN Queuine tRNA-ribosyltransferase OS=Collinsella aerofaciens; OX = 74426 GN=tgt PE=3 SV=1
MDQNLFKFDLIAEDPTTHARAGVLHTPHGDIETPIFMPVGTKANVKGIPTETVKKLGAQIVLANTYHLSMRPGEDTIAELGGLHKFMNWHGPILTDSGGFQVFSHNDAVKLTDEGVRFIVNDYDGRHVFWTPEDNMEIAMKLGSDICMQLDQCPGYPATRAYVERAVELSSMWAERCYKAHTRDDQALFGIVQGGMHLDLRLRSLRHLEECGDFPGYGIGGYSVGEDHETMFETLAPLVSEYMPKHKPRYLMGVGNPTTLVRGVGVGIDMFDCVLPTRTGRMGTAFSSEGRLNFRNARFAHDDGPIDPTCTCPVCTGGYSRALIRHMVTQKEMLGGILLSMHNIYYLLNLMQRARQAIIEGRYGAFVSDWMNSPAAVDY

SEQ ID NO: 54099 - protein, 379 aa, Collinsella intestinalis
  REGION 1..379: note = tr|C4F7J2|C4F7J2_9ACTN Queuine tRNA-ribosyltransferase OS=Collinsella intestinalis DSM 13280 OX=521003 GN=tgt PE=3 SV=1
MDQSLFKYEIVAEDPKTHARAGILHTPHGDIETPIFMPVGTKANVKGIPTETVKDLGAQIVLANTYHLAMRPGADTVAELGGLHDFMNWHGPILTDSGGFQIFSHSDAVKLTDEGVRFIATDYDGSHVFWTPEDNMEIAMKLGSDICMQLDQCPGYPATCKFVERAVELSSMWAERCYKAHTRDDQALFGIVQGGMHLDLRLRSLKHLEEIGDFPGYGIGGYSVGEPHEVMFETLEPLVSEHMPRHKPRYLMGVGNPTTLVRGVGCGVDMFDCVLPTRTGRMGTAFSSTGRMNLKNAKFARDPRPIDEKCTCPVCTGGYSRALIRHMVTQKEMLGGILLSQHNIYFLLDLMRRARQAIIDGRYAEFQAEWLAGEGAVDF

SEQ ID NO: 54100 - protein, 264 aa, Collinsella intestinalis
  REGION 1..264: note = tr|A0A5K1JPU6|A0A5K1JPU6_9ACTN Queuine tRNA-ribosyltransferase OS=Collinsella intestinalis; OX = 147207 GN=tgt PE=4 SV=1
MRFIATDYDGSHVFWTPEDNMEIAMKLGSDICMQLDQCPGYPATRKFVERAVELSSMWAERCYKAHTRDDQALFGIVQGGMHLDLRLRSLKHLEEIGDFPGYGIGGYSVGEPHEVMFETLEPLVSEHMPRHKPRYLMGVGNPTTLVRGVGCGVDMFDCVLPTRTGRMGTAFSSTGRMNLKNAKFARDPRPIDEKCTCPVCTGGYSRALIRHMVTQKEMLGGILLSQHNIYFLLDLMRCARQAIIDGRYAEFQAEWLAGEGAVDF

SEQ ID NO: 54101 - protein, 379 aa, unidentified
  source 1..379: note = [Collinsella] massiliensis
  REGION 1..379: note = tr|A0A1Y3XU32|A0A1Y3XU32_9ACTN Queuine tRNA-ribosyltransferase OS=[Collinsella] massiliensis; OX = 1232426 GN=tgt PE=3 SV=1
MDQSLFTYDIIAEDPRTHARAGVLHTPHGDIGTPIFMPVGTRATVKGIPWETVRDLGAQIVLSNTYHLAMRPGADLIAELGGLHEFMNWHGPILTDSGGFQVFSHSDAVKLTNEGVRFIATDYDGSHVFWTPEDNMAIAQKLGSDICMQLDQCIGYPVERRDVERSTDLSSRWAERCYKAHTRPDQALFGIVQGGMHMDLRVKSLQRLEDMGDFPGYGIGGYSVGESHEVMFETLEPLAAEYMPRTKPRYLMGVGNPTTLVRGVACGIDMFDCVLPTRTGRMGTAFSSEGRLNFRNARFARDPRPVDEHCTCPVCTGGYTRAHIRHMVAQKEMLGGILLSMHNIYYLLDLMRRARQAIIEGRYKAFVRDWMDSPAAADY

SEQ ID NO: 54102 - protein, 379 aa, Collinsella sp.
  REGION 1..379: note = tr|A0A412T228|A0A412T228_9ACTN Queuine tRNA-ribosyltransferase OS=Collinsella sp. AF16-8; OX = 2292215 GN=tgt PE=3 SV=1
MDQNLFKFDLIAEDPTTHARAGVLHTPHGDIETPIFMPVGTKANVKGIPTETVKQLGAQIVLANTYHLSMRPGEDTIAELGGLHKFMNWHGPILTDSGGFQVFSHNDAVKLTDEGVRFIVNDYDGRHVFWTPEDNMEIAMKLGSDICMQLDQCPGYPATRAYVERAVELSSMWAERCYKAHTRDDQALFGIVQGGMHLDLRLRSLRHLEECGDFPGYGIGGYSVGEDHETMFETLAPLVSEYMPKHKPRYLMGVGNPTTLVRGVGVGIDMFDCVLPTRTGRMGTAFSSEGRLNFRNARFAHDDGPIDPTCTCPVCTGGYSRALIRHMVTQKEMLGGILLSMHNIYYLLNLMQRARQAIIEGRYGAFVSDWMNSPAAVDY

SEQ ID NO: 54103 - protein, 379 aa, Collinsella sp.
  REGION 1..379: note = tr|A0A374VIX8|A0A374VIX8_9ACTN Queuine tRNA-ribosyltransferase OS=Collinsella sp. OM07-12; OX = 2292328 GN=tgt PE=3 SV=1
MDQSLFKFDLIAEDPTTHARAGVLHTPHGDIETPIFMPVGTKANVKGIPTETVKQLGAQIVLANTYHLSMRPGEDTIAELGGLHKFMNWHGPILTDSGGFQVFSHNDAVKLTDEGVRFIVNDYDGRHVFWTPEDNMEIAMKLGSDICMQLDQCPGYPATRAYVERAVELSSMWAERCYKAHTRDDQALFGIVQGGMHLDLRLRSLRHLEECGDFPGYGIGGYSVGEDHETMFETLAPLASEYMPKHKPRYLMGVGNPTTLVRGVGVGIDMFDCVLPTRTGRMGTAFSSEGRLNFRNARFAHDDGPIDPTCTCPVCTGGYSRALIRHMVTQKEMLGGILLSMHNIYYLLNLMQQARQAIIEGRYGAFVSDWMNSPAAVDY

SEQ ID NO: 54104 - protein, 385 aa, Collinsella stercoris
  REGION 1..385: note = tr|B6G9I5|B6G9I5_9ACTN Queuine tRNA-ribosyltransferase OS=Collinsella stercoris DSM 13279; OX = 445975 GN=tgt PE=3 SV=1
MAEEPHMDQSLFKYEIVAEDPKTHARAGVLHTPHGDIETPIFMPVGTKANVKGIPTETVKDLGAQIVLANTYHLAMRPGADTIAELGGLHTFMNWHGPILTDSGGFQIFSHSDAVKLTDESVRFIATDYDGSHVFWTPEDNMDIAMKLGSDICMQLDQCPGYPATRKFVERAVELSSIWAERCYKAHTRDDQALFGIVQGGMHLDLRLRSLKHLEEIGDFPGYGIGGYSVGEPHEVMFETLEPLVSEHMPRLKPRYLMGVGNPTTLVRGVGCGIDMFDCVLPTRTGRMGTAFSSQGRMNLKNAKFAKDPRPIDEKCTCPVCTGGYSRALIRHMVTQKEMLGGILLSQHNIYFLLDLMRRARQAIIDGRYAEFQAEWMASEGAADF

SEQ ID NO: 54105 - protein, 379 aa, Collinsella tanakaei
  REGION 1..379: note = tr|A0A3E4QPE2|A0A3E4QPE2_9ACTN Queuine tRNA-ribosyltransferase OS=Collinsella tanakaei OX=626935; GN = tgt PE=3 SV=1
MDQSLFTYDIVAEDPKTHARAGILHTPHGDIETPIFMPVGTKANVKGIPTETVKGLGAQIVLANTYHLAMRPGADLIDELGGLHNFMNWHGPILTDSGGFQVFSHNDAVKLTDEGVRFIATDYDGSHVFWTPEDNMAIAQKLGSDICMQLDQCPGYPATRKYVERAVELSSMWAERCYKAHTRPDQALFGIVQGGMHLDLRLRSLKHLEECGDFPGYGIGGYSVGEDHETMFETLEPLVSEHMPRQKPRYLMGVGNPTTLVRAVGMGVDMFDCVLPTRTGRMGTAFSSQGRLNFRNAKFAHDAGPIDEKCTCPVCTGGYSRALIRHMVTQKEMLGGILLSQHNIYFLLDLMRRARQAIIDGRYAEFRDEWMQNAGAKDY

SEQ ID NO: 54106 - protein, 379 aa, Collinsella tanakaei
  REGION 1..379: note = tr|G1WJU8|G1WJU8_9ACTN Queuine tRNA-ribosyltransferase OS=Collinsella tanakaei YIT 12063; OX = 742742 GN=tgt PE=3 SV=1
MDQSLFTYDIVAEDPKTHARAGILHTPHGDIETPIFMPVGTKANVKGIPTETVKGLGAQIVLANTYHLAMRPGADLIDELGGLHNFMNWHGPILTDSGGFQVFSHNDAVKLTDEGVRFIATDYDGSHVFWTPEDNMAIAQKLGSDICMQLDQCPGYPATRKYVERAVELSSMWAERCYKAHTRPDQALFGIVQGGMHLDLRLRSLKHLEECGDFPGYGIGGYSVGEDHETMFETLEPLVSEHMPRQKPRYLMGVGNPTTLVRAVGMGVDMFDCVLPTRTGRMGTAFSSQGRLNFRNAKFAHDAGPIDEKCTCPVCTGGYSRALIRHMVTQKEMLGGILLSQHNIYFLLDLMRRARQAIIDGRYAEFRDEWMQSAGARDY

SEQ ID NO: 54107 - protein, 376 aa, unidentified
  source 1..376: note = Colwellia beringensis
  REGION 1..376: note = tr|A0A222GDS4|A0A222GDS4_9GAMM Queuine tRNA-ribosyltransferase OS=Colwellia beringensis; OX = 1967665 GN=tgt PE=3 SV=1
MKFELLTKDGKARRGRLTFDRGTVETPAFMPVGTYGTVKGMKTEEVADTGAEILLGNTFHLMLRPGTEIIEQHGGLHGFMNWDKPILTDSGGFQVFSLGKMRKITEEGVKFSSPVNGEKIMLTPERSMEVQNSLGSDIVMIFDECTPYPASHEESKVSMELSLRWAQRSKDAHEGNLNALFGIVQGGMYEDLREVSVNGLTSIGFDGYAIGGLSVGEPKEDMIRILDHTAPLIPENKPRYLMGVGKPEDLVEGVRRGIDMFDCVMPTRNARNGHLFVTNGVIKIRNARHKTDTGPLDPECDCYTCKNYSRAYLHHLDKCNEILGSQLNTMHNLRFYQRVMQGLRGAIEQGKLDEFVADFYALRDLPVPPLAGSEAE

SEQ ID NO: 54108 - protein, 390 aa, Colwellia chukchiensis
  REGION 1..390: note = tr|A0A1H7GA59|A0A1H7GA59_9GAMM Queuine tRNA-ribosyltransferase OS=Colwellia chukchiensis; OX = 641665 GN=tgt PE=3 SV=1
MTEKKDNATAQAMQFSLLNTDGKARRGRLTFERGTVETPAFMPVGTYGTVKGMKTEEVEATGADILLGNTFHLMLRPGTDIIEQHGGLHGFMNWQKPILTDSGGFQVFSLGKMRKITEEGVKFSSPVNGEKIMLTPERSMAVQNSLGSDIVMIFDECTPYPASHEAAKVSMELSLRWAQRSKDAHQGNKNALFGIVQGGMYEDLREVSVNGLTDIGFDGYAIGGLSVGEPKEDMIRILDHTAPLIPENKPRYLMGVGKPEDLVEGVRRGIDMFDCVMPTRNARNGHLFVTNGVIKIRNARHKTDTGPLDPDCDCYTCKNYSRAYLHHLDKCNEILGSQLNTVHNLRFYQRVMQGLRDAIEQGKLEQFVAEFYALRDLPVPPLAGTDPATQ

SEQ ID NO: 54109 - protein, 385 aa, Colwellia demingiae
  REGION 1..385: note = tr|A0A5C6QM47|A0A5C6QM47_9GAMM Queuine tRNA-ribosyltransferase OS=Colwellia demingiae OX=89401; GN = tgt PE=3 SV=1
MTETVKNKMKYELITTDGKARRGRLTFDRGVVETPAFMPVGTYGTVKGMKPEEVEATGAHIILGNTFHLMLRPGTDIIEQHGGLHNFMNWNGPILTDSGGFQVFSLGKMSKITEEGVRFSSPVNGEKIMLTPERSMEVQRSLNSDIVMIFDECTPYPASHKESKDSMELSLRWAQRSKDAHGDSPNALFGIVQGGMYEDLREVSVAGLKAIEFDGYAIGGLSVGEPKEDMVRILDHTAPLIPKNKPRYLMGVGKPEDLVEGVRRGIDMFDCVMPTRNARNGHLFVNTGVIKIRNASHKTDTAALDDTCDCYTCKNYSRAYLHHLDKCKEILGSQLNTLHNLHFYQKVMQGLRDAIEQGKLDTFVEEFYALRGLPVPPLAEGSQQV

SEQ ID NO: 54110 - protein, 371 aa, Colwellia hornerae
  REGION 1..371: note = tr|A0A5C6QDB3|A0A5C6QDB3_9GAMM Queuine tRNA-ribosyltransferase OS=Colwellia hornerae OX=89402; GN = tgt PE=3 SV=1
MKYQLINTDGKARRGRLTFDRGTVETPAFMPVGTYGTVKGMKMEDVEATGAEIILGNTFHLMLRPGTEIVEQFGGLHNFINWQKPILTDSGGFQVFSLGKMRKITEEGVKFSSPINGDKIMLTPERSMEVQRSLDADVVMIFDECTPYPASHEESKSSMELSLRWAQRSKVAHGDNQSALFGIVQGGMYEDLREVSVKGLKDIEFDGYAIGGLSVGEPKEDMIRILDHTTPLIPENKPRYLMGVGKPEDLVEGVRRGIDMFDCVMPTRNARNGHLFVTNGVIKIRNASHKTDTGPLDSECDCYTCKNYSRAYLHHLDKCNEILGSQLNTLHNLHFYQRVMKGLRAAIEQGKLDDFVNEFYALRGLPVPELK

SEQ ID NO: 54111 - protein, 385 aa, unidentified
  source 1..385: note = Colwellia marinimaniae
  REGION 1..385: note = tr|A0A1Z5HZA6|A0A1Z5HZA6_9GAMM Queuine tRNA-ribosyltransferase OS=Colwellia marinimaniae; OX = 1513592 GN=tgt PE=3 SV=1
MTKTVKNKMTYELITTDGKARRGRLTFDRGVVETPAFMPVGTYGTVKGMKPEDVAATGADIILGNTFHLMLRPGTDIIEQHGGLHGFMNWHKPILTDSGGFQVFSLGKTRKITEEGVRFSSPVNGEKIMLTPERSIEVQRSLNSDIVMIFDECTPYPASHKESKDSMELSLRWAQRSKDAHGDSPNALFGIVQGGMFEDLREVSVAGLQAIDFDGYAIGGLSVGEPKEDMIRILDHTTPLIPKNKPRYLMGVGKPEDLVEGVRRGIDMFDCVMPTRNARNGHLFVNTGVIKIRNAAHKTDTGPLDDTCDCYTCKNYSRAYLHHLDKCKEILGSQLNTLHNLHFYQKVMQGLRDAIEQGRLDAFVEEFYALRGLPVPPLATGSKQV

SEQ ID NO: 54112 - protein, 385 aa, Colwellia psychrerythraea
  REGION 1..385: note = tr|Q487A2|Q487A2_COLP3 Queuine tRNA-ribosyltransferase OS=Colwellia psychrerythraea (strain 34H / ATCC BAA-681) OX=167879 GN=tgt PE=3 SV=1
MTETVKNKMKYELITTDGKARRGRLTFDRGVVETPAFMPVGTYGTVKGMKAEEVEATGAHIILGNTFHLMLRPGTDIIEQHGGLHDFMNWNGPILTDSGGFQVFSLGKMSKITEEGVRFSSPVNGEKIMLTPERSMEVQRSLNSDIVMIFDECTPYPASHKESKDSMELSLRWAQRSKDAHGDSPNALFGIVQGGMYEDLREVSVAGLKAIEFDGYAIGGLSVGEPKEDMVRILDHTAPLIPKNKPRYLMGVGKPEDLVEGVRRGIDMFDCVMPTRNARNGHLFVNTGVIKIRNAAHKTDVAPLDDTCDCYTCKNYSRAYLHHLDKCKEILGSQLNTLHNLHFYQKVMQGLRDAIEQGKLDAFVEEFYALRGLPVPPLAEGSKQV

SEQ ID NO: 54113 - protein, 385 aa, Colwellia psychrerythraea
  REGION 1..385: note = tr|A0A099KHR2|A0A099KHR2_COLPS Queuine tRNA-ribosyltransferase OS=Colwellia psychrerythraea; OX = 28229 GN=tgt PE=3 SV=1
MTEVVKNKMKYELITTDGKARRGRLTFDRGVVETPAFMPVGTYGTVKGMKAEEVEDTGAHIILGNTFHLMLRPGIDIIEQHGGLHDFMNWQGPILTDSGGFQVFSLGKMSKITEEGVRFSSPVNGEKIMLTPERSMEVQRSLNSDIVMIFDECTPYPASHKESKDSMELSLRWAQRSKDAHGDSPNALFGIVQGGMYEDLREVSVAGLKAVEFDGYAIGGLSVGEPKEDMIRILDHTAPLIPKNKPRYLMGVGKPEDLVEGVRRGIDMFDCVMPTRNARNGHLFVNTGVIKIRNAAHKTDVSPLDDTCDCYTCKNYSRAYLHHLDKCKEILGSQLNTLHNLHFYQKVMQGLRAAIEQGRLDAFVEEFYALRDLPVPPLAEGSKQV

SEQ ID NO: 54114 - protein, 385 aa, Colwellia sp.
  REGION 1..385: note = tr|A0A2N1CAL3|A0A2N1CAL3_9GAMM Queuine tRNA-ribosyltransferase OS=Colwellia sp. 75C3 OX=888425; GN = tgt PE=3 SV=1
MTEVVKNKMKYELITTDGKARRGRLTFDRGVVETPAFMPVGTYGTVKGMKAEEVAATGAHIILGNTFHLMLRPGTDIIEQHGGLHDFMNWSGPILTDSGGFQVFSLGKMSKITEEGVRFSSPVNGEKIMLTPERSMEVQRSLNSDIVMIFDECTPYPASHKESKDSMELSLRWAQRSKDAHGDSPNALFGIVQGGMYEDLREVSVAGLKAIEFDGYAIGGLSVGEPKEDMVRILDHTAPLIPKNKPRYLMGVGKPEDLVEGVRRGIDMFDCVMPTRNARNGHLFVNTGVIKIRNAAHKTDVAPLDDTCDCYTCKNYSRAYLHHLDKCKEILGSQLNTLHNLHFYQKVMQGLRDAIEQGKLDAYVEEFYALRGLPVPALAEGSKQV

SEQ ID NO: 54115 - protein, 375 aa, Colwellia sp.; identical to SEQ ID NO: 51559
  REGION 1..375: note = tr|A0A2G2EK22|A0A2G2EK22_COLSX Queuine tRNA-ribosyltransferase OS=Colwellia sp. OX=56799 GN=tgt; PE = 3 SV=1

SEQ ID NO: 54116 - protein, 377 aa, unidentified
  source 1..377: note = Colwelliaceae bacterium
  REGION 1..377: note = tr|A0A2D6RHY9|A0A2D6RHY9_9GAMM Queuine tRNA-ribosyltransferase OS=Colwelliaceae bacterium; OX = 2026726 GN=tgt PE=3 SV=1
MQYQLLAKDGKARRGRLTFERGTVETPAFMPVGTYGTVKGMKTEEIKDIGAEIILGNTFHLMLRPGTDIIEQHGDLHDFINWDKPILTDSGGFQVFSLGAMRKITEEGVKFSSPVNGEKIMLTPERSMEVQRKLGSDIVMIFDECTPYPATHQEAKDSMEMSLRWAQRSKDAHDGNPNALFGIVQGGMYEDLREVSVEGLKAIDFDGYAIGGLSVGEPKEDMVRILDHTTPLIPEDKPRYLMGVGKPEDLVEGVRRGIDMFDCVMPTRNARNGHLFVSDGVVKIRNAKNKTDTGPLDPECDCYTCKNYSKAYLHHLDKCNEILGSQLNTIHNLRFYQRVMKGLRDAIEAGKLDEFVEDFYAKRGLPVPPLAEGSQQV

SEQ ID NO: 54117 - protein, 422 aa, unidentified
  source 1..422: note = Comamonadaceae bacterium
  REGION 1..422: note = tr|A0A2H0IYC2|A0A2H0IYC2_9BURK Queuine tRNA-ribosyltransferase OS=Comamonadaceae bacterium CG12_big_fil_rev_8_21_14_0_65_59_15 OX=1973952 GN=tgt PE=3; SV = 1
MTHDHHHDHPHDHPHDHKPQPVIQFDQLRTDPPLPETGYVGSHARRGTITLAHGMVQTPIFMPVGTYGTVKGVLPSSLEDMGAQIILGNTFHLWMRPGLDVMQNFGGLHDFERWKKPILTDSGGFQVWSLGAMRKITEEGVHFSSPVNGDKLFMSPEVSMQIQTTLNSDIAMQLDECTPYLSVEPKTKGQITTESEARKSMEMSLRWAKRSQAEFERLGNPNALFGIVQGGMFEHLRQESLEALVEMDLPGYAVGGVSVGEPKDEMLRIMAHTPHRLPWHKPRYLMGVGTPEDLVEGVAQGVDMFDCVMPTRNARNGTLFTRFGDLKMRNSRHRSDHAPLDATCTCYTCQGITRPNGMVSGGFSRAYLHHLDRCGEMLAPMLLSIHNLHYYLNLMREMRAALDAGTFGAFRAQFKADRTRGV

SEQ ID NO: 54118 - protein, 390 aa, unidentified
  source 1..390: note = Comamonadaceae bacterium
  REGION 1..390: note = tr|A0A3M6RJR5|A0A3M6RJR5_9BURK Queuine tRNA-ribosyltransferase OS=Comamonadaceae bacterium NML180582 OX=2478746 GN=tgt PE=3 SV=1
MLQFQLLATDASSHARRGALTLNHGVVQTPIFMPVGTYGTVKGVMPRSLEEMGAQIILGNTFHLWMRPGLDVMRSFGGLHAFEQWHKPILTDSGGFQVWSLGSMRKITEEGVHFASPVNGDKLFMSPEVSMQIQTALNSDVVMQLDECTPYETNGHITTEAQARQSMEMSLRWARRSQEEFARLNNPNALFGIVQGGMFEHLRQESLEQLVAMDFPGYAVGGVSVGEPKEEMRRIMAHTPHRLPREKPRYLMGVGTPEDLVEGVACGVDMFDCVMPTRNARNGTIFTRYGDLKIRNARHKADHQPLDPSCTCHACAGSSGVSWENGGREGFSRAYLHHLDRCGEMLGPMLTTIHNLHYYLNLMREVRQALEQNRFAAFRQQFAADRARGV

SEQ ID NO: 54119 - protein, 390 aa, Comamonas aquatica
  REGION 1..390: note = tr|A0A1B2D736|A0A1B2D736_9BURK Queuine tRNA-ribosyltransferase OS=Comamonas aquatica OX=225991; GN = tgt PE=3 SV=1
MLQFELLTTDPTSHARRGTLTLNHGKVQTPIFMPVGTYGTVKGVMPRSLEEMGAQIILGNTFHLWMRPGLDIMKTFGGLHGFEKWNKPILTDSGGFQVWSLGAMRKITEEGVHFQSPVNGDKLFMSPEVSMQIQTILNSDIVMQLDECTPYETNGHKTTEAEARKSMEMSRRWAQRSKDEFERLENPNALFGIVQGGMYTNLREESLQALVEMDFPGYAVGGVSVGEPKDEMLEIMAHTPHLLPTHKPRYLMGVGTPEDLVQGVADGVDMFDCVMPTRNARNGTVFTRYGDLKLRNARHKSDHQPLDTTCTCHACAGASGVSWDNGGRDGFSRAYLHHLDRCGEMLGPMLTTIHNLHYYLNLMQEVRNALDAGTFAQFRAQFKADRARGV

SEQ ID NO: 54120 - protein, 390 aa, Comamonas aquatica
  REGION 1..390: note = tr|A0A014NLG9|A0A014NLG9_9BURK Queuine tRNA-ribosyltransferase OS=Comamonas aquatica DA1877; OX = 1457173 GN=tgt PE=3 SV=1
MLQFELLTTDPTSHARRGTLTLNHGKVQTPIFMPVGTYGTVKGVMPRSLEEMGAQIILGNTFHLWMRPGLDIMKTFGGLHGFEKWNKPILTDSGGFQVWSLGAMRKITEEGVHFQSPVNGDKLFMSPEVSMQIQTILNSDIVMQLDECTPYETNGHKTTEAEARKSMEMSRRWAQRSKDEFERLENPNALFGIVQGGMYTNLREESLQALVEMDFPGYAVGGVSVGEPKDEMLEIMAHTPHLLPANKPRYLMGVGTPEDLVQGVADGVDMFDCVMPTRNARNGTVFTRYGDLKLRNARHKSDHQPLDTTCTCHACAGASGVSWDQGGRDGFSRAYLHHLDRCGEMLGPMLTTIHNLHYYLNLMQEVRNALDAGTFAQFRAQFKADRARGV

SEQ ID NO: 54121 - protein, 390 aa, Comamonas kerstersii
  REGION 1..390: note = tr|A0A0W7Z4Y2|A0A0W7Z4Y2_9BURK Queuine tRNA-ribosyltransferase OS=Comamonas kerstersii OX=225992; GN = tgt PE=3 SV=1
MLQFELLKTDPTSHARRGKLTLNHGVVQTPIFMPVGTYGTVKGVMPRSLEEMGAQIILGNTFHLWMRPGLDIMKTFGGLHGFEKWNKPILTDSGGFQVWSLGAMRKITEEGVHFQSPVNGDKLFMSPEVSMQIQTVLNSDIVMQLDECTPYETNGKKTTEAEARKSMEMSRRWAKRSKDEFERLENPNALFGIVQGGMYTNLRQESLEALVEMDFPGYAVGGVSVGEPKDEMLEIMAHTPHLLPANKPRYLMGVGTPEDLVQGVADGVDMFDCVMPTRNARNGTVFTRYGDLKLRNARHKTDHQPLDTTCTCHACAGKSGVSWDDGGRDGFSRAYLHHLDRCGEMLGPMLTTIHNLHYYLNLMQEIRDALEAGAFAEFRAKFKADRVRGV

SEQ ID NO: 54122 - protein, 390 aa, Comamonas kerstersii
  REGION 1..390: note = tr|A0A1V0BIJ3|A0A1V0BIJ3_9BURK Queuine tRNA-ribosyltransferase OS=Comamonas kerstersii OX=225992; GN = tgt PE=3 SV=1
MLQFELLKTDPTSHARRGKLTLNHGVVQTPIFMPVGTYGTVKGVMPRSLEEMGAQIILGNTFHLWMRPGLDIMKTFGGLHGFEKWNKPILTDSGGFQVWSLGAMRKITEEGVHFQSPVNGDKLFMSPEVSMQIQTVLNSDIVMQLDECTPYETNGKKTTEAEARKSMEMSRRWAKRSKDEFERLENPNALFGIVQGGMYTNLRQESLEALVEMDFPGYAVGGVSVGEPKDEMLEIMAHTPHLLPANKPRYLMGVGTPEDLVQGVADGVDMFDCVMPTRNARNGTVFTRYGDLKLRNARHKTDHQPLDTTCTCHACAGKSGVSWDDGGRDGFSRAYLHHLDRCGEMLGPMLTTIHNLHYYLNLMQEIRDALEAGTFAEFRAKFKADRARGV

SEQ ID NO: 54123 - protein, 397 aa, unidentified
  source 1..397: note = Comamonas serinivorans
  REGION 1..397: note = tr|A0A1Y0EU46|A0A1Y0EU46_9BURK Queuine tRNA-ribosyltransferase OS=Comamonas serinivorans; OX = 1082851 GN=tgt PE=3 SV=1
MPALTFDLLATDPASHARRGRLTLNHGVVQTPIFMPVGTYGTVKGVMPRSLHDMGAQIILGNTFHLWMRPGLDVMQSFGGLHGFEQWDKPILTDSGGFQVWSLGAMRKITEEGVHFQSPVNGDKLFMSPEVSMQIQTILNSDIVMQLDECTPYETNGHNTTEAEARQSMEMSRRWALRSQAEFERLGNPNALFGIVQGGMFKHLRQESLEALVEMDFPGYAVGGVSVGEPKDEMLDIMAHTPHRLPAHKPRYLMGVGTPEDLVQGVAEGVDMFDCVMPTRNARNGTIFTRYGDLKIRNARHKTDHQPIDTTCSCYACAGSPGADGAGLSWDQGGRAGFSRAYLHHLDRCGEMLGPMLTTIHNLHYYLNLMQEIRDALDAGTFAQFRLRFQQDRARGV

SEQ ID NO: 54124 - protein, 390 aa, Comamonas sp.
  REGION 1..390: note = tr|A0A0M2DUQ9|A0A0M2DUQ9_9BURK Queuine tRNA-ribosyltransferase OS=Comamonas sp. E6 OX=364029; GN = tgt PE=3 SV=1
MLQFDLLKTDPTSHARRGTLTLNHGKVQTPIFMPVGTYGTVKGVMPRSLEEMGAQIILGNTFHLWMRPGLDIMKSFGGLHDFEKWDKPILTDSGGFQVWSLGAMRKITEEGVHFQSPVNGDKLFMSPEVSMQIQTILNSDIVMQLDECTPYETNGKKTTEAEARKSMEMSRRWAKRSKEEFQRLENPNALFGIVQGGMYTNLREESLQGLLEIDFPGYAVGGVSVGEPKDEMLEIMAHTPHLLPANKPRYLMGVGTPEDLVQGVADGVDMFDCVMPTRNARNGTIFTRYGDLKIRNARHKVDHQPIDTTCTCHACAGKSGVSWDDGGREGFSRAYLHHLDRCGEMLGPMLTTIHNLHYYLNLMQEIRNALDAGSFAQFRTQFKADRARGV

SEQ ID NO: 54125 - protein, 390 aa, Comamonas sp.
  REGION 1..390: note = tr|A0A1D2S4U3|A0A1D2S4U3_9BURK Queuine tRNA-ribosyltransferase OS=Comamonas sp. SCN 65-56; OX = 1660095 GN=tgt PE=3 SV=1
MLQFNLLATDPASHARRGRLTLNHGVIQTPIFMPVGTYGTVKGVMPRSLHEMGAQIILGNTFHLWMRPGLDIVKGFGGLHGFEQWHKPILTDSGGFQVWSLGAMRKITEDGVHFASPVNGDKLFLSPEVSMQIQTVLNSDIVMQLDECTPYETDGHATTEPEARKSMEMSLRWAGRSQAEFARLANPNALFGIVQGGMFEHLREESLQALTAMDFPGYAIGGVSVGEPKEDMLRIMGHTPHRLPAHKPRYLMGVGTPEDLVEGVACGVDMFDCVMPTRNARNGTLFTRFGDLKIRNARHKDDHQPLDPSCTCHACAGSEGVSWNDGGRGGFSRAYLHHLDRCGEMLGPMLATIHNLHYYLNLMQEIRDALDAGEYPRFRARFAQERAHGV

SEQ ID NO: 54126 - protein, 390 aa, Comamonas terrigena
  REGION 1..390: note = tr|A0A2A7UZU2|A0A2A7UZU2_COMTR Queuine tRNA-ribosyltransferase OS=Comamonas terrigena OX=32013; GN = tgt PE=3 SV=1
MLQFDLLKTDPTSHARRGTVTLNHGKVQTPIFMPVGTYGTVKGVMPRSLEEMGAQIILGNTFHLWMRPGLDIMKSFGGLHGFEKWDKPILTDSGGFQVWSLGSMRKITEEGVHFQSPVNGDKLFMSPEVSMQIQTILNSDIVMQLDECTPYETNGKKTTEAEARKSMEMSRRWALRSKQEFERLGNPNALFGIVQGGMYTNLREESLQALVEMDFPGYAVGGVSVGEPKDEMLEIMAHTPHLLPAHKPRYLMGVGTPEDLVQGVADGVDMFDCVMPTRNARNGTIFTRYGDLKLRNARHKVDHQPIDTTCTCHACAGTSGVSWDDGGRDGFSRAYLHHLDRCGEMLGPMLTTIHNLHYYLNLMQEVRDALDAGTFAAFRQKFAQDRSRGV

SEQ ID NO: 54127 - protein, 390 aa, Comamonas testosteroni
  REGION 1..390: note = tr|A0A076PMK7|A0A076PMK7_COMTE Queuine tRNA-ribosyltransferase OS=Comamonas testosteroni TK102; OX = 1392005 GN=tgt PE=3 SV=1
MLQFDLLKTDPNSHARRGTLTLNHGKVQTPIFMPVGTYGTVKGVMPRSLEEMGAQIILGNTFHLWMRPGLDIMKSFGGLHDFEKWDKPILTDSGGFQVWSLGAMRKITEEGVHFQSPVNGDKLFMSPEVSMQIQTILNSDIVMQLDECTPYETNGKKTTEAEARKSMEMSRRWAKRSKEEFQRLENPNALFGIVQGGMYTNLREESLQGLLEIDFPGYAVGGVSVGEPKDEMLEIMAHTPHLLPANKPRYLMGVGTPEDLVQGVADGVDMFDCVMPTRNARNGTIFTRYGDLKIRNARHKVDHQPIDTTCTCHACAGKSGVSWDDGGRDGFSRAYLHHLDRCGEMLGPMLTTIHNLHYYLNLMQEIRNALDAGTFTEFRARFKADRARGV

SEQ ID NO: 54128 - protein, 390 aa, Comamonas testosteroni
  REGION 1..390: note = tr|A0A1Y1J5Q0|A0A1Y1J5Q0_COMTE Queuine tRNA-ribosyltransferase OS=Comamonas testosteroni OX=285; GN = tgt PE=3 SV=1
MLQFDLLKTDPTSHARRGTLTLNHGKVQTPIFMPVGTYGTVKGVMPRSLEEMGAQIILGNTFHLWMRPGLDIMKSFGGLHDFEKWDKPILTDSGGFQVWSLGAMRKITEEGVHFQSPVNGDKLFMSPEVSMQIQTILNSDIVMQLDECTPYETNGKKTTEAEARKSMEMSRRWAKRSKEEFQRLENPNALFGIVQGGMYTNLREESLQGLLEIDFPGYAVGGVSVGEPKDEMLEIMAHTPHLLPANKPRYLMGVGTPEDLVQGVADGVDMFDCVMPTRNARNGTIFTRYGDLKIRNARHKVDHQPIDTTCTCHACAGKSGVSWDDGGREGFSRAYLHHLDRCGEMLGPMLTTIHNLHYYLNLMQEIRNALDAGTFAQFRAQFKADRARGV

SEQ ID NO: 54129 - protein, 390 aa, Comamonas thiooxydans; identical to SEQ ID NO: 54128
  REGION 1..390: note = tr|A0A176TP11|A0A176TP11_9BURK Queuine tRNA-ribosyltransferase OS=Comamonas thiooxydans OX=363952; GN = tgt PE=3 SV=1

SEQ ID NO: 54130 - protein, 390 aa, Comamonas thiooxydans; identical to SEQ ID NO: 54124
  REGION 1..390: note = tr|A0A096EJK4|A0A096EJK4_9BURK Queuine tRNA-ribosyltransferase OS=Comamonas thiooxydans OX=363952; GN = tgt PE=3 SV=1

SEQ ID NO: 54131 - protein, 377 aa, unidentified
  source 1..377: note = Commensalibacter intestini
  REGION 1..377: note = tr|G6F166|G6F166_9PROT Queuine tRNA-ribosyltransferase OS=Commensalibacter intestini A911; OX = 1088868 GN=tgt PE=3 SV=1
MTEPKFHWTKQAQHHNARAGTLHTAHGDVQTPTFMPVGTAGTVKAMTMDAVRSTGAGIVLGNTYHLMLRPGAELVHELGGLHKFMDWSGPILTDSGGFQVMSLGDLRKLDEDGVTFRSHIDGSAHRLTPESSTDIQYLLDATITMCFDECPALPASYETIKKSMQLSMRWAERSRNQFKNRPGYAQFGIVQGGIEPDLRAESVEALTNIGFEGYAVGGLAVGEPQEQMFSTLDFTTPLMPTDKPRYLMGVGTPDDMLGAIERGIDMFDCVMPTRAGRTARAYTSRGTLNMKNACHIHDPRPIDPECDCPACSKHSRAYLTHLFRSKEILAAMLLTWHNIAYYQRLMRIIRQAIVDDNLTEVAATLRANWQKRRLVCG

SEQ ID NO: 54132 - protein, 380 aa, unidentified
  source 1..380: note = Commensalibacter intestini
  REGION 1..380: note = tr|A0A251ZX41|A0A251ZX41_9PROT Queuine tRNA-ribosyltransferase OS=Commensalibacter intestini; OX = 479936 GN=tgt PE=3 SV=1
MTEPKFHWTKQAQHHNARAGTLHTAHGDVQTPTFMPVGTAGTVKAMTMDAVRSTGAGIVLGNTYHLMLRPGAELVHELGGLHKFMDWSGPILTDSGGFQVMSLGDLRKLDEDGVTFRSHIDGSAHRLTPESSTDIQYLLDATITMCFDECPALPASYETIKKSMQLSMRWAERSRNQFKNRPGYAQFGIVQGGIEPDLRAESVEALTNIGFEGYAVGGLAVGEPQEQMFSTLDFTTPLMPTDKPRYLMGVGTPDDMLGAIERGIDMFDCVMPTRAGRTARAYTSRGTLNMKNACHIHDPRPIDPECDCPACSKHSRAYLTHLFRSKEILAAMLLTWHNIAYYQRLMRIIRQAIVDDNLTEVAATLRANWQKGDWSVDEWN

SEQ ID NO: 54133 - protein, 380 aa, unidentified
  source 1..380: note = Commensalibacter sp.
  REGION 1..380: note = tr|W7E253|W7E253_9PROT Queuine tRNA-ribosyltransferase OS=Commensalibacter sp. MX01; OX = 1208583 GN=tgt PE=3 SV=1
MTQPKFHWTKQAQHKNARAGTLHTAHGDVQTPTFMPVGTVGTVKAMTMDAVRSTGAGIVLGNTYHLMLRPGAELVHELGGLHQFMDWPGPILTDSGGFQVMSLGDLRQLDEDGVTFRSHLDGSAHRLTPESSTDIQYLLDATITMCFDECPALPATYDTIAKSMRLSMRWAERSRKQFKNRPGYAQFGIVQGGIEPDLRAESVEALTNIGFEGYAIGGLAVGEPQEQMFSTLDFTTHLMPTDKPRYLMGVGTPDDMLGAIERGIDMFDCVMPTRAGRTGRAYTSRGTLNMKNACHIHDPRPIDPECDCLACSKHSRAYMTHLFRAKEILGAMLLTWHNIAYYQRLMRTIRQAIIEDNLTETAATLRANWAKGDWSVDEWN

SEQ ID NO: 54134 - protein, 380 aa, unidentified
  source 1..380: note = Commensalibacter sp.
  REGION 1..380: note = tr|A0A318N6D5|A0A318N6D5_9PROT Queuine tRNA-ribosyltransferase OS=Commensalibacter sp. ESL0284; OX = 2070537 GN=tgt PE=3 SV=1
MTSLKFHWTQQAQDHKARAGILHTAHGDVITPTFMPVGTVGTVKAMTMDAVRSTGAGIVLGNTYHLMLRPGAELIHELGGLHKFMDWSGPILTDSGGFQVMSLGALRKLNEEGVTFRSHIDGSTYKLTPESSTDIQYLLDATITMCFDECPALPASHDTIASSMRMSMRWAERSRKRFKTRPGYAQFGIVQGGIEPDLRIESAEALNKIGFEGYAIGGLAVGEPQEQMFETLDVTVPYLPSDKPRYLMGVGTPQDMLGSVMRGIDMFDCVMPTRAGRTGRAYTSRGTLNMKNACHIHDRRPIDPECDCLACSKHSRAYIHHLFRSKEILGAMLLTWHNLAYYQRLMRTIHQAILDQNLEEKATELHNDWNKGDWKLDEWN

SEQ ID NO: 54135 - protein, 371 aa, Conchiformibius steedae
  REGION 1..371: note = tr|A0A3P2A9K4|A0A3P2A9K4_9NEIS Queuine tRNA-ribosyltransferase OS=Conchiformibius steedae; OX = 153493 GN=tgt PE=3 SV=1
MLKFTLHKTDGHARRGTLELNHGTVETPVFMPVGTYGSVKAMTPQNLHDINAQIILGNTYHLWLRPGLDVIERFGGLHQFIGWDKPILTDSGGFQVFSLSDMRKLTEEGCTFKSPINGDKLFLSPEISMKIQTVLNSDIVMQLDECTPGEATHQQARQSLQMSLRWAERSKTAFEDLRNPNALFGIVQGAMYEDLREESLRGLEELDFPGLAIGGLSVGEPKPEMYRMLRAVGPMLPAHKPHYLMGVGTPEDLVYGVAHGVDMFDCVMPTRNARNGWLFTRFGDIKIKNAKHKHDTRPLDESCSCYACQHFSRAYLYHLHRAGEILGAQLNTIHNLHFYQVIMAEMREAIEQGKFADWQAQFHENRAKGTD

SEQ ID NO: 54136 - protein, 396 aa, Conexibacter sp.
  REGION 1..396: note = tr|A0A2T4UDY9|A0A2T4UDY9_9ACTN Queuine tRNA-ribosyltransferase OS=Conexibacter sp. Seoho-28; OX = 2133960 GN=tgt PE=3 SV=1
MSALEIQHRDPGTLARAGVLRTPHGEIRTPAFVPLATKATVKSLLPHEVAELGYDMVLGNTFHLFLDPGHERIRRFRGLHEFMGWRAPIITDSGGFQVFSMGHGTVADEVKGRAPMGQERMGKILAIEEDGVAFRSYLNGETLFMGPETSMEIQGALGSDIALVFDECTPFNVTREYTQRSTERTHRWLDRCLAWHDARGPEGQLVYGISQGGVHEDLRVESTQAVASRPVDGIAIGGSLGADKPQMYEVVSWATAAIADDPRPRHLLGIGEVDDLIRGVELGIDTFDCAMPTRLGRHGVAVVNDPERRWRVDLTAGRFKDSDEPLLEGCPCPACALGYTRGYLRYLVHARELTGQRLLTLHNLAYLSRLMQRLRAAIAEGTLAATAAALRAGELP

SEQ ID NO: 54137 - protein, 408 aa, Conexibacter woesei
  REGION 1..408: note = tr|D3F8U2|D3F8U2_CONWI Queuine tRNA-ribosyltransferase OS=Conexibacter woesei (strain DSM 14684 / JCM 11494 / NBRC 100937 / ID131577) OX=469383; GN = tgt PE=3 SV=1
MALLDVQHRDPGSLARTGVLNLAHGQVRTPAFVPLATKGTIKGLEPREVAALGYDMVLGNTFHLFLAPGEELVRELGGLHEFMRWQAPIITDSGGFQVFSMGHGTVADEIKGRRAPGNPTERSGAILGIEEEGVRFRSYIDGGERFMAPETSMEVQAALGSDIALAFDECTPFHVTREYTERSTERTHRWLDRCIAWHEQHPTPGQVLYSISQGGVYEDLRRAATRHVAQTTAPGVAIGGSLGADKPQMYEVVSWATDELEKVAPEKPRHLLGIGEIDDLVRGVELGIDTFDCAMPTRIGRHGMALVPDPARRWRIDLTKGRMKHVNEPIMDDCPCPACSEGFTRAYLHYLFGAHELTALRLVTLHNLSFIARLMADLRAAVATGTLAEVAAAVRAGAAPGALASAAA

SEQ ID NO: 54138 - protein, 376 aa, unidentified
  source 1..376: note = Confluentibacter sp.
  REGION 1..376: note = tr|A0A2N3HJG1|A0A2N3HJG1_9FLAO Queuine tRNA-ribosyltransferase OS=Confluentibacter sp. 3B; OX = 1909700 GN=tgt PE=3 SV=1
MIFELKAKDTQSKARAGVITTDHGVIETPIFMPVGTVATVKGVHQRELKNDINPDIILGNTYHLYLRPQTHVIEKAGGLHKFMNWDRNILTDSGGYQVYSLSANRKIKEEGVKFKSHIDGSYHVFTPENVMEIQRSIGADIIMAFDECTPYPCEYNYAKRSMHMTHRWLDRCINHLEKVPFKYDYSQAFFPIVQGSTYKDLRMQSAEYIANAGAVGNAIGGLSVGEPAEEMYAMTEVVCNILPEDKPRYLMGVGTPINILENIALGIDMFDCVMPTRNARNGMLFTAYGTINIKNKKWEEDFSPIDDMGITFVDTEYTKAYLRHLFMVNELLGKQIATIHNLGFYLWLVREARKHILAGDFKIWKDNMIKQMDNRL

SEQ ID NO: 54139 - protein, 376 aa, unidentified
  source 1..376: note = Confluentimicrobium lipolyticum
  REGION 1..376: note = tr|A0A238KJ65|A0A238KJ65_9RHOB Queuine tRNA-ribosyltransferase OS=Confluentimicrobium lipolyticum; OX = 1524263 GN=tgt PE=3 SV=1
MAPRFNFDLQATDGKARTGVISTPRGEIRTPAFMPVGTAATVKAMMPESVAATGADILLGNTYHLMLRPTAERIDRLGGLHKFMNWDKPILTDSGGFQVMSLSDLRKMNEKGVTFRSHIDGSRHTLTPERSMEIQKLLGSDIVMCFDECTPFPAEEKVALESMRMSMRWADRSKEAFGDRPGYALFGIQQGSVYRDQREESAEKLRAIGFDGYAVGGLAVGEGQENMFSVLDYAPDMLPTDKPRYLMGVGKPDDIVGAVKRGIDMMDCVLPSRSGRTGQVFTRRGVVNIKNARHQDDPRPLDEHCTCPACSNYSRAYLHHVFRAQEIISSMLLTWHNLHYYQELMAGLRSAIAENRFDAFEKAFHAGRADGDIEQL

SEQ ID NO: 54140 - protein, 376 aa, unidentified
  source 1..376: note = Confluentimicrobium sp.
  REGION 1..376: note = tr|A0A2E3UHA1|A0A2E3UHA1_9RHOB Queuine tRNA-ribosyltransferase OS=Confluentimicrobium sp.; OX = 1931204 GN=tgt PE=3 SV=1
MAERFNFHVNSRDGMARQGVISTPRGDIRTPAFMPVGTAATVKAMMPESVAATGADILLGNTYHLMLRPTAERIDRLGGLHRFMNWQKPILTDSGGFQVMSLTGLRKLTEQGVKFKSHIDGSEHMLTPERSMEIQRLLGSDIVMCFDECPALPAPEERVAESMRMSMRWAARSRDAFGDRPGHALFGIQQGGVTRDLRAESAEKLRAIGFDGYAVGGLAVGEGQEAMFGVLDYATDMLPEDKPRYLMGVGKPDDIVGAVARGIDMMDCVLPSRSGRTGQVFTRRGVVNIKNARHQDDPRPLDEACACPACRGYSRAYLHHVFRAQEIISSMLLTWHNLHYYQELMQGIREAIAAGTFGAFQADFHAQRAEGDIAPL

SEQ ID NO: 54141 - protein, 376 aa, unidentified
  source 1..376: note = Confluentimicrobium sp.
  REGION 1..376: note = tr|A0A0N7FWQ6|A0A0N7FWQ6_9RHOB Queuine tRNA-ribosyltransferase OS=Confluentimicrobium sp. EMB200-NS6 OX=1609966 GN=tgt PE=3 SV=1
MAERFNFHVNSRDGMARQGVISTPRGDIRTPAFMPVGTAATVKAMMPESVAATGADILLGNTYHLMLRPTAERIDRLGGLHRFMNWQKPILTDSGGFQVMSLTGLRKLTEQGVKFKSHIDGSEHMLTPERSMEIQRLLGSDIVMCFDECPALPAPEERVAESMRMSMRWAARSRDAFGDRPGHALFGIQQGGVTRDLRAESAEKLRAIGFDGYAVGGLAVGEGQEAMFGVLDYATDMLPEDKPRYLMGVGKPDDIVGAVARGIDMMDCVLPSRSGRTGQVFTRRGVVNIKNARHQDDPRPLDETCACPACRGYSRAYLHHVFRAQEIISSMLLTWHNLHYYQELMQGIREAIAAGRFEAFQADFHAQRAEGDIAPL

SEQ ID NO: 54142 - protein, 366 aa, Congregibacter litoralis
  REGION 1..366: note = tr|A4ADH0|A4ADH0_9GAMM Queuine tRNA-ribosyltransferase OS=Congregibacter litoralis KT71; OX = 314285 GN=tgt PE=3 SV=1
MKFERISSDGVARRSRLHFDRGVVETPAFMPVGTYGTVKGMLPRDVEALGAQIILGNTFHLWLRPGTDVISAHGDLHDFMQWQGPILTDSGGFQVFSLGEMRKISEEGVSFRSPVDGDKVFLDPEKSMEIQRALGSDIVMIFDECTPYPATREEAETSMELSLRWAKRSRAAHGDSKAALFGIVQGGMYGDLRARSLEGLVEIGFDGYAIGGLSVGEPKDEMLSVLETLQPLMPEEYPRYLMGVGTPADLLEGVRRGIDMFDCVMPTRNARNGHLFTSSGTIKIRNARHRHSTAPLDENCGCYTCANFSRAYLHHLDKCNEILGSQLNTLHNLHYYQDHMRGIRDAIEEKRLDAFAEDYYRSQSMG

SEQ ID NO: 54143 - protein, 384 aa, unidentified
  source 1..384: note = Conservatibacter flavescens
  REGION 1..384: note = tr|A0A2M8S2R4|A0A2M8S2R4_9PAST Queuine tRNA-ribosyltransferase OS=Conservatibacter flavescens; OX = 28161 GN=tgt PE=3 SV=1
MKYELHKTNGRARRGRLIFERPQGTFTVETPAFMPVGTYGTVKGMTPEEVRATGAEILLGNTFHLWLRPGQEVMRKHGDLHDFMQWHRPILTDSGGFQVFSLGKLRKITEEGVKFQNPINGEKIFLSPEKSMEIQYDLGSDVVMIFDECTPYPATFDYAKNSMEMSLRWAKRSRQRFDELGNKNALFGIIQGGTYEELRKISVEGLVEIGFDGYAVGGLAVGEPKEDMHRILEYVTPKIPMDKPRYLMGVGKPEDLVEGVRRGIDMFDCVMPTRNARNGHLFVSNGIVKIRNAKYRDDTTPLDPECDCYTCKHYTKSYLYHLDKCGEILGARLNTIHNLRYYQRLMEQIRAAIEQERFESFVQEFYAKIGKPVPPIDSYHPFEG

SEQ ID NO: 54144 - protein, 373 aa, unidentified
  source 1..373: note = Consotaella salsifontis
  REGION 1..373: note = tr|A0A1T4LUM9|A0A1T4LUM9_9RHIZ Queuine tRNA-ribosyltransferase OS=Consotaella salsifontis; OX = 1365950 GN=tgt PE=3 SV=1
MTETFQFRLLAEDGRARRGEISMPRGTIRTPAFMPVGTAGTVKAMYPDQVRELGADIILGNTYHLMLRPGAERVARLGGLHEFARWPHPILTDSGGFQIMSLAALRKLKESGVTFRSHVDGQVHELSPERSIEIQGLLDSDIQMQLDECIRLPAEREEIERAMELSLRWAERSAAAFGEQPGKAMFGIVQGGDQPDLRIRSAERLSAMNLKGYAVGGLAVGEPQSVMLEMLDVTLPAMPHAKPRYLMGVGTPDDLLESVRRGIDMFDCVMPTRAGRHGLAYTRFGKLNLKNARHAEDSRPLDEQSDCSAARDYSRAYLHHLVKANEILGAMLLTWVNLSYYQFLMQGIRDAIEAGRYDDYVASVKEGWARGEA

SEQ ID NO: 54145 - protein, 405 aa, unidentified
  source 1..405: note = Convivina intestini
  REGION 1..405: note = tr|A0A2U1D5X3|A0A2U1D5X3_9LACT Queuine tRNA-ribosyltransferase OS=Convivina intestini OX=1505726; GN = tgt PE=3 SV=1
MTNQKPAVWYEHLHTEKHTGARRGRIHTPHGVFETPMFMPVGTQGAVKGVDARTLKEIGSQFILSNTYHLWVRPGDELIAEAGGLHKYMGWDQAILTDSGGFQVFSLSDARKLKEEGVTFQNHVNGDRMFLSPEVAMRIQNNLGSDVMMQLDEAIPYFEPYDYVKESMQRSLRWADRAQQYHKKTDSQALFGIVQGAGFRALRTESAQELVKMDLPGYAVGGLSVGESKTEMNRVLDFTMPLLPEDKPRYLMGVAAPDSLIDSVMRGIDMFDCVLPTRIGRKGTLMTRHGRVVIRNSKYKNDFTPIDADLSYYSDNAIRTNQFGNLAQYDIPGYNPFQTLTRSYLHHLFNAHELLGAQIASAHNLRFLLQFMEDMRRAIENDELLEFREQVMEEYGYNKPNARLF

SEQ ID NO: 54146 - protein, 377 aa, Coprobacillus cateniformis
  REGION 1..377: note = tr|E7GAM2|E7GAM2_9FIRM Queuine tRNA-ribosyltransferase OS=Coprobacillus cateniformis; OX = 100884 GN=tgt PE=3 SV=1
MEGFWYELKHVCKQSGARYGILHTPHGDVETPMFMPVGTLATVKGISPEQLKEMNSQVILSNTYHLWLRPGEDVVKQAGGLHKFMNYDGPILTDSGGFQVFSLGKTRKIEEEGVTFKSIVDGKKLFLSPEKAIQIQNDLGADIIMSFDECAPYPCTHDYMKNSVERTLRWAKRGKDAHQRDDQALFGIVQGGEFEDLREFSAKELVKMDFPGYSIGGTSVGEPKDVMYKMIDDAIQWLPVDKPRYLMGVGNPIDLIEGAMRGIDMFDCVLPTRVARHGALMTHYGRMNINNEKFKYDFTPIDDKCHCYTCRNYTRAYLRHLHKCDEIFGKSLLSIHNVAFLLQLSEDIRNAIQEDRLLDFKEEFLDHYGRDVYERAF

SEQ ID NO: 54147 - protein, 377 aa, Coprobacillus sp.
  REGION 1..377: note = tr|R5Q3S3|R5Q3S3_9FIRM Queuine tRNA-ribosyltransferase OS=Coprobacillus sp. CAG:235; OX = 1262854 GN=tgt PE=3 SV=1
MKDFWYELKHVCKQSGARYGILHTPHGDVETPMFMPVGTLATVKGIAPEMLKEMGSQVILSNTYHLWLRPGEDIVAKAGGLHKFMNYDGPMLTDSGGFQVFSLGKTRKIKEEGVYFKSIIDGKSLFLSPEKAIDIQNKLGADMIMSLDECAPYPATYDYMKHSVERTIRWAKRGKEAHHNEKQALFGIVQGGEYPDLREKCAKALVEMDFPGYSIGGTSVGEPKNVMYKMVEDAIQWLPEDKPRYLMGVGNPIDLIEAAIRGIDMYDCVLPTRVARHGALMTHHGRMNINNEKFKEDFTPIDPECDCYTCRNYTRAYLRHLHKSDELFGKTLLSIHNVRFLLQLSEDIRKAIQEDRLLDFKEEFLDKYGRDVYKRAF

SEQ ID NO: 54148 - protein, 377 aa, Coprobacillus sp.
  REGION 1..377: note = tr|A0A1Q6N131|A0A1Q6N131_9FIRM Queuine tRNA-ribosyltransferase OS=Coprobacillus sp. CAG:235_29_27; OX = 1896995 GN=tgt PE=3 SV=1
MKDFWYELKHVCKQSGARYGILHTPHGDVETPMFMPVGTLATVKGIAPEMLKEMGSQVILSNTYHLWLRPGEDIVAKAGGLHKFMNYDGPMLTDSGGFQVFSLGKTRKIKEEGVYFKSIIDGKSLFLSPEKAIDIQNKLGADMIMSLDECAPYPATYDYMKHSVERTIRWAKRGKEAHHNEKQALFGIVQGGEYPDLREKCAKALVEMDFPGYSIGGTSVGEPKDVMYKMVEDAVQWLPEDKPRYLMGVGNPIDLIEAAIRGIDMYDCVLPTRVARHGALMTHHGRMNINNEKFKEDFTPIDPECDCYTCRNYTRAYLRHLHKSDELFGKTLLSIHNVRFLLQLSEDIRKAIQEDRLLDFKEEFLDKYGRDVYKRAF

SEQ ID NO: 54149 - protein, 376 aa, unidentified
  source 1..376: note = Coprobacter fastidiosus
  REGION 1..376: note = tr|A0A495WKG7|A0A495WKG7_9BACT Queuine tRNA-ribosyltransferase OS=Coprobacter fastidiosus NSB1; OX = 1349822 GN=tgt PE=3 SV=1
MDFELQYTDPCSRARAGKITTDHGCINTPIFMPVGTVASVKAVHLHELKEDIKAQIILGNTYHLYLRPGLDTLEKAGGLHKFNGWDRPILTDSGGFQVFSLSENRKLTEEGAHFRSHIDGSKHLFTPEKVVDIQRIIGSDIMMALDECPPGQSDYSYAKKSLQLTQRWLERGWKHFCETEGKYGYKQTFFPIVQGCVYPDLRKDAAKHVAQLEADGNAIGGLAVGEPTEKMYEMIDVVNEILPTDKPRYLMGVGTPANILEGIERGIDMFDCVMPTRNGRNGMLFTANGIMNMRNKKWADDFSPIDPDGTSYVDHQYSKAYLRHLFISNEILAMQIASVHNLAFYVWLTQEARKHILNGTFKTWKDEMIIRVTHRL

SEQ ID NO: 54150 - protein, 376 aa, unidentified
  source 1..376: note = Coprobacter fastidiosus
  REGION 1..376: note = tr|A0A354M525|A0A354M525_9BACT Queuine tRNA-ribosyltransferase OS=Coprobacter fastidiosus; OX = 1099853 GN=tgt PE=3 SV=1
MDFELQYTDPCSRARAGKITTDHGCINTPIFMPVGTVASVKAVHLHELKEDIKAQIILGNTYHLYLRPGLDTLEKAGGLHKFNGWDRPILTDSGGFQVFSLSENRKLTEEGAHFRSHIDGSKHLFTPEKVVDIQRIIGSDIMMALDECPPGQSDYSYAKKSLQLTQRWLERGWKHFCETEGKYGYKQTFFPIVQGCVYPDLRKDAAKHVAQLGADGNAIGGLAVGEPTEKMYEMIDVVNEILPTDKPRYLMGVGTPANILEGIERGVDMFDCVMPTRNGRNGMLFTANGIMNMRNKKWADDFSPIDPDGTSYVDHQYSKAYLRHLFISNEILAMQIASVHNLAFYVWLTQEARKHILNGTFKTWKDEMIIRVTHRL

SEQ ID NO: 54151 - protein, 376 aa, unidentified
  source 1..376: note = Coprobacter secundus
  REGION 1..376: note = tr|A0A0B2JG13|A0A0B2JG13_9BACT Queuine tRNA-ribosyltransferase OS=Coprobacter secundus OX=1501392; GN = tgt PE=3 SV=1
MDFTLEYTDANSDARAGTITTDHGIITTPIFMPVGTVASVKAVHLHELKDDIKAQIILGNTYHLYLRPGLDILEKAGGLHKFNGWDRPILTDSGGFQVFSLSDNRKLTEEGAYFRSHIDGSKHLFTPENVVDTQRIIGSDIMMALDECTPGQADYQYAKKSLALTQRWLERGWRHFCETEGLYGYRQTFFPIVQGCVYPDLRRDAAMHVAQLGADGNAIGGLAVGEPTEKMYEMIEVVNEILPKDKPRYLMGVGTPANILEGIERGVDMFDCVMPTRNGRNGMLFTRNGIMNMRNKKWADDFSPIDEDGTSYVDRQYSKAYLRHLFISDEILAMQIASIHNLAFYVWLTQEARRQIISGTFKSWKKDMVQRVTHRL

SEQ ID NO: 54152 - protein, 376 aa, unidentified
  source 1..376: note = Coprobacter sp.
  REGION 1..376: note = tr|A0A316SLN5|A0A316SLN5_9BACT Queuine tRNA-ribosyltransferase OS=Coprobacter sp. OX=1941478; GN = tgt PE=3 SV=1
MDFELQHTDTNSCARAGKITTDHGTIDTPIFMPVGTLGSVKAVHIHELKEDIKAQIILGNTYHLYLRPGLEILKQAGGLHKFNGWDRPILTDSGGFQVFSLSGIRKLKEEGVHFRSHIDGSKHLFTPENVVDTERIIGADIMMALDECTPGDADYSYAKKSLALTQRWLERGWKHYLETEGLYGYKQAYFPIVQGCVYPDLRIEAAKHVAALGADGNAIGGLAVGEPTEKMYEMIEIVNDILPKDKPRYLMGVGTPANILEGIERGVDMFDCVMPTRNGRNGMLFTSNGIMNMRNKKWADDFSPIDENGTSYVDKVYSKAYLRHLFISDEILAMQIASIHNLAFYVWLSQEARRHILTGTFKSWKDEMLQRVTTRL

SEQ ID NO: 54153 - protein, 377 aa, Coprococcus catus
  REGION 1..377: note = tr|D4J9W6|D4J9W6_9FIRM Queuine tRNA-ribosyltransferase OS=Coprococcus catus GD/7; OX = 717962 GN=tgt PE=3 SV=1
MYQIVATDGRAKSAHMETVHGVIETPVFMNVGTIAAIKGAVATTDLKEIGTQVELSNTYHLHVRPGDQIVKQLGGLHKFMNWDRPILTDSGGFQVFSLKGLRKIKEEGVYFQSHIDGHKIFMGPEESMQIQSNLGSTIAMAFDECAPYPATREYMINSVNRTTRWLERCKKKMQELNDAEGTVNPHQLLFGINQGGTYADIRVNHARTIRDMDLDGYAIGGLAVGETHEEMYRILDEVVPELPQNKPTYLMGVGTPANILEGVDRGIDFFDCVYPSRNGRHGHVYTNHGKLNLFNAKFELDDRPIEEGCQCPACRNYTRAYIRHLLKAKEMLGMRLCVLHNLYFYNHLMEEIRLAIREHRYSEFKKSKLEGFLSKED

SEQ ID NO: 54154 - protein, 377 aa, Coprococcus catus; identical to SEQ ID NO: 54153
  REGION 1..377: note = tr|A0A3E2TQ84|A0A3E2TQ84_9FIRM Queuine tRNA-ribosyltransferase OS=Coprococcus catus OX=116085; GN = tgt PE=3 SV=1

SEQ ID NO: 54155 - protein, 377 aa, Coprococcus comes
  REGION 1..377: note = tr|A0A3E4GSW2|A0A3E4GSW2_9FIRM Queuine tRNA-ribosyltransferase OS=Coprococcus comes OX=410072; GN = tgt PE=3 SV=1
MYELIKRDGRAKRGRFHTVHGVIETPVFMNVGTIAAIKGAVSTADLEEIGTQVELSNTYHLHVRPGDQVVKKLGGLHKFMTWDKPILTDSGGFQVFSLAGLRKIKEEGVYFNSHLDGRKIFMGPEESMQIQSNLASTIAMAFDECPSSVAERKYMQASVERTTRWLARCKEEMARLNSLDDTINKHQMLFGINQGGVYEDIRIEHAQQIAEMDLDGYAVGGLAVGETHEEMYRILDAVVPCLPVAKPTYLMGVGTPANILEAVDRGVDFFDCVYPSRNGRHGHVYTKHGKLNLFNAKFELDERPIEEGCQCPACRRYSRAYIRHLLKAKEMLGMRLCVLHNLYYYNHLMEDIRGAIEEGRYAQFKKETLAKMEEKED

SEQ ID NO: 54156 - protein, 377 aa, Coprococcus comes
  REGION 1..377: note = tr|A0A173XE40|A0A173XE40_9FIRM Queuine tRNA-ribosyltransferase OS=Coprococcus comes OX=410072; GN = tgt PE=3 SV=1
MYELIKRDGRAKRGRFHTVHGVIETPVFMNVGTIAAIKGAVSTADLEEIGTQVELSNTYHLHVRPGDQVVKKLGGLHKFMAWDKPILTDSGGFQVFSLAGLRKIKEEGVYFNSHIDGRKIFMGPEESMQIQSNLASTIAMAFDECPSSVAERKYMQASVERTTRWLARCKEEMARLNSLDDTINKHQMLFGINQGGVYEDIRIEHAQQIAEMDLDGYAVGGLAVGETHEEMYRILDAVVPRLPVARPTYLMGVGTPANILEAVDRGVDFFDCVYPSRNGRHGHVYTKHGKLNLFNAKFELDERPIEEGCQCPACRRYSRAYIRHLLKAKEMLGMRLCVLHNLYYYNHLMEDIREAIEEGRYARFKKETLAKMEEKED

SEQ ID NO: 54157 - protein, 377 aa, Coprococcus eutactus
  REGION 1..377: note = tr|A0A412IRH6|A0A412IRH6_9FIRM Queuine tRNA-ribosyltransferase OS=Coprococcus eutactus OX=33043; GN = tgt PE=3 SV=1
MYKILCKDGRAKRAEFQTVHGTVQTPLFMNVGTAAAIKGAVATTDLKDIGCQIELSNTYHLHVRPGDKIVKQMGGLHKFMYWDRPILTDSGGFQVFSLAGLRKIKEEGVTFNSHIDGRKIFMGPEESMQIQSNLASTIAMAFDECAPALADRQYVENSVARTARWLVRCKNEMERLNSLPDTINKNQLLFGINQGAIYDDIRIDHAKRISELDLPGYAIGGLAVGESAEQMYHILDVTVPHLPEDRPTYLMGVGTPANILEAVDRGVDFFDCVYPSRNGRHAHVYTKHGKLNLKNARFETDDRPIEEGCGCPACQHYSRAYIRHLLKANEMLGMRFCVLHNLYFYNNMMKEIREAIEEGRYQSYKKSMLESLAGGEQ

SEQ ID NO: 54158 - protein, 377 aa, Coprococcus eutactus
  REGION 1..377: note = tr|A8SXR3|A8SXR3_9FIRM Queuine tRNA-ribosyltransferase OS=Coprococcus eutactus ATCC 27759; OX = 411474 GN=tgt PE=3 SV=1
MYKILCKDGRAKRAEFQTVHGTVQTPLFMNVGTAAAIKGAVATTDLKDIGCQIELSNTYHLHVRPGDKIVKQMGGLHKFMYWDRPILTDSGGFQVFSLAGLRKIKEEGVTFNSHVDGRKIFMGPEESMQIQSNLASTIAMAFDECAPALADRQYVENSVARTARWLVRCKNEMERLNSLPDTINKNQLLFGINQGAIYDDIRIDHAKRISELDLPGYAIGGLAVGESAEQMYHILDVTVPHLPEDRPTYLMGVGTPANILEAVDRGVDFFDCVYPSRNGRHAHVYTKHGKLNLKNARFETDDRPIEEGCGCPACQHYSRAYIRHLLKANEMLGMRFCVLHNLYFYNNMMKEIREAIEEGRYQSYKKSMLESLAGGEQ

SEQ ID NO: 54159 - protein, 377 aa, Coprococcus sp.
  REGION 1..377: note = tr|S2ZQ23|S2ZQ23_9FIRM Queuine tRNA-ribosyltransferase OS=Coprococcus sp. HPP0048; OX = 1078091 GN=tgt PE=3 SV=1
MYQLIKRDGLAKRGRLKTVHGVIETPVFMNVGTAAAIKGAVSTEDLQGIKTQVELSNTYHLHVRPGDEVVKKLGGLHKFMVWDKPILTDSGGFQVFSLAGLRKIKEEGVYFHSHIDGKKIFMGPEESMQIQSNLASTIAMAFDECPSSVADRNYIQHSVDRTVRWLERCKKEMARLNSLEDTINKQQMLFGINQGGIYEDIRIEHAKRIAELDLDGYALGGLAVGESHEDMYRIIDATVPYLPQDKPTYLMGVGTPANILEAVDRGVDFFDCVYPSRNGRHGHVYTNHGKMNLFNAKYELDDRPIEEGCQCPACRKYSRAYIRHLLKAKEMLGMRLCVLHNLYFYNNMMEEIRTAIEEGRYKEYKKQKLEGFTRGQI

SEQ ID NO: 54160 - protein, 377 aa, Coprococcus sp.
  REGION 1..377: note = tr|A0A1Q6MJP9|A0A1Q6MJP9_9FIRM Queuine tRNA-ribosyltransferase OS=Coprococcus sp. CAG:131_42_139; OX = 1896997 GN=tgt PE=3 SV=1
MYKILCKDGRAKRAEFQTVHGTVQTPLFMNVGTAAAIKGAVATTDLKDIGCQIELSNTYHLHVRPGDKIVKQMGGLHKFMYWDRPILTDSGGFQVFSLAGLRKIKEEGVTFNSHVDGRKIFMGPEESMQIQSNLASTIAMAFDECAPALADRQYVENSVARTARWLVRCKNEMERLNSLPDTINKNQLLFGINQGAIYEDIRIDHAKRISELDLPGYAIGGLAVGETAEQMYHILDVTVPYLPEDRPTYLMGVGTPANILEAVDRGVDFFDCVYPSRNGRHAHVYTKHGKMNLKNARFETDDRPIEEGCGCPACQHYSRAYIRHLLKANEMLGMRFCVLHNLYFYNNMMKDIREAIEEGRYQSYKKSMLESLAGGEE

SEQ ID NO: 54161 - protein, 364 aa, Coprothermobacter proteolyticus
  REGION 1..364: note = tr|B5Y8Y3|B5Y8Y3_COPPD Queuine tRNA-ribosyltransferase OS=Coprothermobacter proteolyticus (strain ATCC 35245 / DSM 5265 / BT) OX=309798 GN=tgt PE=3; SV = 1
MFEIFKETDKGRTGQLSLNHGIVTTPVYMPVATRGAIRVAPLNELKQLGYSLILNNTYHLVLRPGLEVLEKIGGTHRFMGWDKNVLTDSGGFQIYSLKHSMKIRNNGLEFRSPIDGTKFFFTPEFVARAQNIIGSDIAMQLDVCLGYPASESEAKKAMDVTLRWGERFLSVEPLQGQKRFGIVQGGFSKRLRRESAALTASLPFDGFAIGGLSVGEPEELMYELTYEVLDALPKQAPKYMMGVGDPVQIVELASMGIDMFDCVQPTRHARHGWVYSWQDGPQVIVRGKYKFDFRPLEYQPQYTYGYLHHLFKAGEPLGLFVATVENLSYMADLTRKLRAAIEGGSVDSLKEEIRYQWRKRIIGE

SEQ ID NO: 54162 - protein, 364 aa, Coprothermobacter sp.
  REGION 1..364: note = tr|A0A348VDJ2|A0A348VDJ2_9BACT Queuine tRNA-ribosyltransferase OS=Coprothermobacter sp. OX=55509; GN = DCR68_03165 PE=3 SV=1
MFEILKETDKGRTGQLSLNHGVVTTPVYMPVATRGAIRVAPLNELEQLGYGLILNNTYHLVLRPGLEVLERIGGTHRFMGWDKNVLTDSGGFQIYSLKHSMKIRNNGLEFRSPIDGTKFFFTPEFVAQAQNIIGSDIAMQLDVCLGYPARESEAKKAMDVTIRWGERFLSVEPLQGQKRFGIVQGGFSKRLRRESAVLTASLPFDGFAIGGLSVGEPEELMYELTYEVLDALPKQAPKYMMGVGDPVQIVELACMGIDMFDCVQPTRHARHGWVYSWQDGPQVIVRGKHKFDFRPLEYQPQYTYGYLHHLFKAGEPLGLFIATVENLSYMADLMQKLRAAIEGGSVDSLKKEIRYQWRKRIIGE

SEQ ID NO: 54163 - protein, 372 aa, Coraliomargarita akajimensis
  REGION 1..372: note = tr|D5EJJ4|D5EJJ4_CORAD Queuine tRNA-ribosyltransferase OS=Coraliomargarita akajimensis (strain DSM 45221 / IAM 15411 / JCM 23193 / KCTC 12865 / 04OKA010-24) OX=58335 5 GN=tgt PE=3 SV=1
MYTLLKECDGARRGVFKTRHGEIQTPIFMPVGTQATVKGMTPAQIDEVGAQIILGNTYHLNIRPGSKLVEEMGGLHQFMNWNKPILTDSGGFQVFSLSKLRKITEAGIEFRSHLDGRKLFLDPKGCYQIQAELGTDIAMVLDECPPFPCDRDACESAVSRTVRWAGEFLDHAKSEGFIERGHHVFGIIQGSTYDDLRQHCGEQLAAMDFPGYAVGGVSVGEPEEEMLKQVAACAPVMPKDKPRYVMGVGTPPQLLRMITLGMDMFDCVMPTRLARHANAFTPYGTINLKNERFKYDNQPIMDADNYTCRNFSRAYLRHLIMAKELLASTLLSIHNVHFFLDLMAQARSHIEAGDYLKWSQDWIERYNSADCS

SEQ ID NO: 54164 - protein, 344 aa, Coraliomargarita sp.
  REGION 1..344: note = tr|R7L7W3|R7L7W3_9BACT Queuine tRNA-ribosyltransferase OS=Coraliomargarita sp. CAG:312; OX = 1262865 GN=tgt PE=3 SV=1
MPVGTQATVKAMTPLQVEETGAQIILANTYHLNIRPTSELIAGFGGLHGFMNWEKPILTDSGGFQAFSLSKLRKITEDGIAFNSHLDGAKKFLSPESCMRIQKNLGSDICMVLDECIPYPCEKKACLKSVERTLRWAKRCLEEYRSIGLPEAQRLAFGIVQGGCYEDIRQYCAEKLSEMDFPGYAIGGVSVGEPEEQMLFQVDVSAQKLPLQKPRYVMGVGTPPQILKMIALGADMFDCVMPTRLARHACAFTLDGEINLKNAKYALDQSPLDESIPSYASKFSRAYIRHLIKCNEMLACTLLSIHNITFFQVLTRQAREHIESGDFEEWSDAWIARYNANNAN

SEQ ID NO: 54165 - protein, 370 aa, Coraliomargarita sp.
  REGION 1..370: note = tr|A0A2E0NGA1|A0A2E0NGA1_9BACT Queuine tRNA-ribosyltransferase OS=Coraliomargarita sp. OX=2024828; GN = tgt PE=3 SV=1
MFKLLKECGSARRGVLTTRHGEIQTPIFMPVGTQATVKAMTPSQVEDVGAQIILGNTYHLNLRPGSKLVEAMGGLHKFMNWEKPILTDSGGFQVFSLAQLRKVKEEGIEFRSHLDGKKLFLGPKECYQIQAELGTDIAMVLDECPPFPCERTACESAVQRTIRWAQEFKNHADNDGFIERGHHVFGIIQGSIYDDLRIQCAEALADLNFPGYAVGGVSVGEPEEEMIRQVAACAPVMPREKPRYVMGVGTPPQLLQMIGLGMDMFDCVMPTRLARHANVFTVDGLINLKNERYKHDDTPIMNADNYTCRNFSRAYLRHLVQAKELLASTLLSIHNLHFFLDLMSQARAHIEAGDYDAWSKAWIERFTFKD

SEQ ID NO: 54166 - protein, 374 aa, unidentified
  source 1..374: note = Corallincola sp.
  REGION 1..374: note = tr|A0A368NG84|A0A368NG84_9GAMM Queuine tRNA-ribosyltransferase OS=Corallincola sp. C4 OX=2282215; GN = tgt PE=3 SV=1
MQYELLGTDGRARRGRLVFERGTVETPAFMPVGTYGTVKGMTPEEVADSGAQILLGNTFHLWLRPGVEIMEAHGDLHDFMQWQGPILTDSGGFQVFSLGDIRKITEEGVHFRHPINGDKIFLDPETSMDVQYSLGSDIVMIFDECTPYPATHEQAKTSMELSLRWAARSRNRFDEANNPNALFGIIQGGIYEDLRDQSLEGLMAVGFDGYAVGGLAVGEPKEEMHKVLEYIVPKIPEDKPRYLMGVGKPEDLVEGVRRGIDMFDCVMPTRNARNGHLFVDDGVIKIRNAVHKTDTGPLDPTCDCYTCKNYSRAYLHHLDRCNEILGARLNTIHNLRFYQRVMEGLRGAIEQGKLDDFVTEFYAKRSMPVPELKD

SEQ ID NO: 54167 - protein, 398 aa, Corallococcus coralloides
  REGION 1..398: note = tr|A0A410RQL8|A0A410RQL8_CORCK Queuine tRNA-ribosyltransferase OS=Corallococcus coralloides; OX = 184914 GN=tgt PE=3 SV=1
MVDEQGREKGEKGDTRVPPGLVRFELLHEDQSGTKARRGRLNTPHGPIETPIFMPVGTVGSVKGVGPDDLKTLDAQIILGNTYHLMLRPTDALVGEMGGLHRFISWDRPMLTDSGGFQVFSLSEKRKITEEGAAFQSHLDGSRHFLTPERSIEIQETLGADVIMAFDECPPSTEDRAYLEKSLARTTRWLHRCVKAWGRERSSLFGIVQGGLHDDLRKRHAEEICSVDLPGYALGGYSVGEAPEAMHAGVAYSAPLLPRDKPRYLMGVGTPLDLVTCVEQGVDMFDCVLPTRCARNGLLFTSEGKLVIRNAAYAKDPRPVDPACSCYTCRTFSRSYLRHLFAAGEILAMRLNTLHNLHYFLDLMAQVRRAIAEDRFAAFARDFRARAVAQEAERKGGR

SEQ ID NO: 54168 - protein, 398 aa, Corallococcus coralloides
  REGION 1..398: note = tr|H8MU08|H8MU08_CORCM Queuine tRNA-ribosyltransferase OS=Corallococcus coralloides (strain ATCC 25202 / DSM 2259 / NBRC 100086 / M2); OX = 1144275 GN=tgt PE=3 SV=1
MVDEQGREKGEKGDTRVPPGLVRFELLHEDQSGTKARRGRLNTPHGPIETPIFMPVGTVGSVKGVGPDDLKTLDAQIILGNTYHLMLRPTDALVGEMGGLHRFISWDRPMLTDSGGFQVFSLSEKRKITEEGAAFQSHLDGSRHFLSPERSIEIQETLGADVIMAFDECPPSTEDRAYLEKSLARTTRWLHRCVKAWSRERSSLFGIVQGGLHDDLRKRHAEEVCAVDLPGYALGGYSVGEAPEAMHAGVAYSAPLLPRDKPRYLMGVGTPLDLVTCVEHGVDMFDCVLPTRCARNGLLFTSEGKLVIRNAAYAKDPRPVDPACSCYTCRTFSRSYLRHLFAAGEILAMRLNTLHNLHYFLDLMAQVRRAIAEDRFAAFARDFRAKAVAQEAERKGGR

SEQ ID NO: 54169 - protein, 389 aa, Corallococcus exiguus
  REGION 1..389: note = tr|A0A5C5DLR9|A0A5C5DLR9_9DELT Queuine tRNA-ribosyltransferase OS=Corallococcus exiguus OX=83462; GN = tgt PE=3 SV=1
MAVRFELLNTDPTGARTGILHTRKGSFPTPMFMPVATHAGFRHLAMEEVKETGAKVLLANTYHLMLRPGPEVFERFGGIHPFMGWDGAVLTDSGGFQIFSLPEDRLITEKGAHFRSFYDNSRRLLSPESSIAMQQAINSEIMMVLDVCIDSRTDEAGTREAMERTHRWAVRSLAAKESKPTGQALFGIVQGGVHPALRDESAAFLTQLPFDGFAIGGLAVGETKVERDTMTERATASLPQDKPRYLMGVGTPTDLLEAVLRGVDMFDCIIPTKMAQQGYAYTFQGLVRITRTVYQLDDGPLDPECDCYVCKRYTRGYLQHLMRGKHHLGSRFLSVHNVRHYQRLMERVREGILRNGYAQTYRELKAAIATPKDLKDEALASAATLKDVG

SEQ ID NO: 54170 - protein, 395 aa, Corallococcus exiguus
  REGION 1..395: note = tr|A0A5C5DRP4|A0A5C5DRP4_9DELT Queuine tRNA-ribosyltransferase OS=Corallococcus exiguus OX=83462; GN = tgt PE=3 SV=1
MVDEQRKEKGDTRVPPGLVRFELLHEDASGTKARRGRLNTPHGPIETPIFMPVGTVGSVKGVGPDDLKTLDAQIILGNTYHLMLRPGEPLVGEMGGLHRFISWDRPMLTDSGGFQVFSLSEKRKITEEGAAFQSHLDGSRHFLSPERSIEIQETLGADVIMAFDECPPSTEDRAYLEKSLARTTRWLHRCVKAWGRERSSLFGIVQGGLHEDLRKRHAEEICAVDLPGYALGGYSVGEAPEAMHAGVAYSAPLLPRDKPRYLMGVGTPLDLVTCVEHGVDMFDCVLPTRCARNGLLFTSEGKLVIRNAAYAKDPRPVDPACSCYTCRTFSRSYLRHLFAAGEILAMRLNTLHNLHYFLDLMAQVRRAIAEDRFATFARDFRAKAVAQEAERKGGR

SEQ ID NO: 54171 - protein, 398 aa, Corallococcus sp.
  REGION 1..398: note = tr|A0A3A8K5S4|A0A3A8K5S4_9DELT Queuine tRNA-ribosyltransferase OS=Corallococcus sp. CA053C; OX = 2316732 GN=tgt PE=3 SV=1
MVDEQRDEQRKEKGDTRVPPGLVRFELLHEDTGTKARRGRLHTPHGPIETPIFMPVGTVGSVKGVGPDDLFNLDAQIILGNTYHLMLRPGEPLISEMGGLHRFISWDRPMLTDSGGFQVFSLSEKRKITEEGAAFQSHLDGSRHSLSPERSIAIQETLGADVIMAFDECPPSTEDRPYLEKSLARTTRWLHRCVKAWSRERSSLFGIVQGGLHEDLRKRHAEEICAVDLPGYALGGYSVGEAPEAMHAGVAYSAPLLPRDRPRYLMGVGTPLDLVTCVEQGVDMFDCVLPTRCARNGLLFTSEGKLVIRNAAYARDPRPVDPACSCYTCRTFSRAYLRHLFAAGEILAMRLNTLHNLHYFLTLMADVRRAIAEDRFAAFARDFRARSHAQEAERTRGR

SEQ ID NO: 54172 - protein, 389 aa, Corallococcus sp.
  REGION 1..389: note = tr|A0A3A8LEP6|A0A3A8LEP6_9DELT Queuine tRNA-ribosyltransferase OS=Corallococcus sp. CA053C; OX = 2316732 GN=tgt PE=3 SV=1
MAVRFELLNTDPTGARTGILHTRKGSFPTPMFMPVATHAGFRHLGMEEVKETGAKVLLANTYHLMLRPGAEVFERFGGIHPFMGWDGAVLTDSGGFQIFSLPEDRLITEKGAHFRSFYDNSRQLLSPESSIAMQQAINSEIMMVLDVCIDSRTDEAGTREAMERTHRWAVRSLAAKEARNTGQALFGIVQGGVHPALRDASAEFLTQLPFDGFAIGGLAVGETKVERDTMTERATAALPQDKPRYLMGVGTPTDLLEAVLRGVDMFDCIIPTKMAQQGYAYTFQGLVRITRTAYRLEDGPLDPECDCYVCKRYTRGYLQHLMRGKHHLGSRFLSVHNVRHYQKLMERIREGILRNGYAQTYRELKAAVATPKDLKDEAAATAVTLKDVG

SEQ ID NO: 54173 - protein, 382 aa, unidentified
  source 1..382: note = Coriobacteriaceae bacterium
  REGION 1..382: note = tr|A0A0A8B3U0|A0A0A8B3U0_9ACTN Queuine tRNA-ribosyltransferase OS=Coriobacteriaceae bacterium 68-1-3 OX=1531429 GN=tgt PE=3 SV=1
MTLFEYRIEGRSGHARAGSYETAHGTFQTPMFMPVGTHATVKGVTTDQLHQIKSQVVLANTYHLYMRPGVDLVEEAGGIQKFMNYDGPMLTDSGGFQLFSLDHMMKVDRDGVSFQARDYDGSRHRWTPESNMDIQQRIGADICMQLDQCIGYPAKKEDVRASTKLSWEWAKRCCDAHTRPDQALFAIVQGGMHLDLRLESVEELVRIDSESRAAGGRGFQGYGIGGYSVGEPHDVMFETLGAVCQAMPEGKLRYLMGVGNPTTLVRAVREGVDMFDCVLPTRTGRMGTAFSSEGRMNLRNAKFARDFSPLDRSCTCPVCRNHTRAYIRHLVKQKEMLGGILLSIHNLHFLIDLMARAREAILADAYEDFYREWMASPGADDY

SEQ ID NO: 54174 - protein, 371 aa, unidentified
  source 1..371: note = Coriobacteriaceae bacterium
  REGION 1..371: note = tr|A0A1V1RG09|A0A1V1RG09_9ACTN Queuine tRNA-ribosyltransferase OS=Coriobacteriaceae bacterium EMTCatB1 OX=1927122 GN=tgt PE=3 SV=1
MHSFEIEAADGATGARAGVFHTAHGPVRTPVFMPVGTRATVKGITPDALEALGAQVVLANTYHLFLRPGADVVAEAGGLHSFMNWKRAILTDSGGFQIFSLADTLKLDDDGVTFRSIVDGAWHRWTPEDNVRIQEQLGADVIMQLDQCPPYPAEEAFVAEAVRRSAAWAKRCAAAHEREDQALFGIVQGGLYQHLRRESIERLGEIGFPGYGIGGYSVGEPHELMLESLAEVSALLPADRPRYLMGVGNPTTIVQAIALGVDMFDCVLPTRTARLGTAFSSQGRLNLRNAKFSRDFGPLDPECSCPVCASYTRAYIRHLVNMKEMLGAILLTTHNLHFLLDLVRRARGAILAGQYAAFVRAWMDGPGADDY

SEQ ID NO: 54175 - protein, 382 aa, unidentified
  source 1..382: note = Coriobacteriales bacterium
  REGION 1..382: note = tr|A0A133Z8T8|A0A133Z8T8_9ACTN Queuine tRNA-ribosyltransferase OS=Coriobacteriales bacterium DNF00809 OX=1588753 GN=tgt PE=3 SV=1
MSLFTFDIHAQSGSARAASYITAHGSFQTPMFMPVGTHATVKGLTVEHLHQLKAQVVLANTYHLYMRPGVEVIEAAGGVHKFMNYDGPMLTDSGGFQLFSLDKMMKISSEGVRFHAYDYDGSKHFWTPETNMDIQQRIGADICMQLDQCIGYPAEKSQVAASTKLSWEWARRCAYAHTRPDQALFGIVQGGMHRDLRLESIKQLVDVHNDARRDGFAGFGGFGIGGYSVGEPHDVMFQTLGDVCAAMPADKPRYLMGVGNPTTLVRAVRVGVDMFDCVLPTRTGRMGTAFSSTGRMNMRNACYTRDFSPLDATCSCWVCQNHTRAYIRHLVKQGEMLGGILLSMHNIHFLINLMARAREAICADAYEDFYEEWMHSPAANDY

SEQ ID NO: 54176 - protein, 378 aa, unidentified
  source 1..378: note = Coriobacteriales bacterium
  REGION 1..378: note = tr|A0A437UWE2|A0A437UWE2_9ACTN Queuine tRNA-ribosyltransferase OS=Coriobacteriales bacterium OH1046 OX=2491116 GN=tgt PE=3 SV=1
MSAYFKFDIVAEDAETHARAGVLHTAHGDIPTPIFMPVGTKATVKGLLMDTVAALGTKILLANTYHLAMRPGAETVAELGGLHDFMQWHGPILTDSGGFQVFSHGDHVDLSDDGVRFRTVDYDGSYVIWTPEENMRIQQLLGADIAMQLDQCPGYPAERSFVERAVELSSLWAERCWNAHTRDDQALFGIVQGGMHLDLRIRSLEHLEGCGNFCGYGIGGYSVGESHELMFETLAPLASEHMPKRKPRYLMGVGNPTTLVRGVACGIDMFDCVLPTRKARMGTAFSHEGRTNLKNARFARDAGPLDPACPCPVCTGGYTRAYLHHLVRQKEMLGGILLSMHNICFLLDLMARARQAIIEHRYAEFVSAWMDSAAAADF

SEQ ID NO: 54177 - protein, 395 aa, unidentified
  source 1..395: note = Coriobacteriia bacterium
  REGION 1..395: note = tr|A0A316RTY8|A0A316RTY8_9ACTN Queuine tRNA-ribosyltransferase OS=Coriobacteriia bacterium; OX = 2052159 GN=tgt PE=3 SV=1
MCGCGEDKLWGAGEAVDESRWFTYDVVAEDPATHARAGVFHTPHGDIPTPIFMPVGTKATVKGILPETLERMGTKILLNNLYHLSQRPGADLVERMGGVHRFMRWGGPILTDSGGFQVFSHEQFFKLSDEGVRFRAVDYDGRWQEWTPEQNMRIAQQLGADIVMQLDQCVGYPATRAKVARSVELSSMWADRCFASHTRKDQALFGIVQGGMHLDLRVRSIEHLENAGDFPGYGIGGYSVGEDHETMFESLAPLCAEHMPRNKPRYLMGVGNPTTLVNGVAAGIDMFDCVLPTRTARTGTAFSNEGRINLKNARFRDDERPLDEGCGCPACAGGFSRAYIHHMVRQKEMLGSILISEHNIYYLLDLMRRARESIISGTYGEFVSGWMASPAANDW

SEQ ID NO: 54178 - protein, 371 aa, unidentified
  source 1..371: note = Coriobacteriia bacterium
  REGION 1..371: note = tr|A0A316P0A0|A0A316P0A0_9ACTN Queuine tRNA-ribosyltransferase OS=Coriobacteriia bacterium; OX = 2052159 GN=tgt PE=3 SV=1
MFEYDLIATDPVCAARLGCLHTPHGDVQTPIFMPVGTQATVKGITNPQLEDLHAQIILANTYHLYLRPGIDIIREAGGIHGFMHWDHPVLTDSGGFQIFSLADTLELDADGVNFRSIVDGSKHRWTPEDNMRVQEAIGADIIMQLDQCTHYPATKEEVAAAVERSASWAARCKAAHTREDQALFGIVQGGVFEDLRLESAQRVSELDLPGYGIGGYSVGEDHELMLAQLGTVTAALPANKPRYLMGVGNPTTLVRAVALGVDMFDCVLPTRTGRMGTAFSSTGRMNMRNAKYARDFGPLDEQCTCPTCRNHTRAYIRHLVKMDEMLGGILLSIHNVHFLLDLMRRAREAIAAGEYAAFERAWMESEAANDY

SEQ ID NO: 54179 - protein, 379 aa, Coriobacterium glomerans
  REGION 1..379: note = tr|F2N871|F2N871_CORGP Queuine tRNA-ribosyltransferase OS=Coriobacterium glomerans (strain ATCC 49209 / DSM 20642 / JCM 10262 / PW2); OX = 700015 GN=tgt PE=3 SV=1
MDQIRFGFDVVAREPGGSARAAVLATPHGDIETPIFMPVGTKATVKGIPTATVRELGAQIVLANTYHLSMRPGPDVIAALGGIHRFMNWHGPILTDSGGFQVFSHKDAVTLSNEGVRFIAGDYDGSHVFWSPEDNMAIAEKLGADICMQLDQCPGYPAERSFVERAVELSSAWAERCWRAHSRCDQALFGIVQGGMHLDLRLRSLAHLESCGDFIGYGIGGYSVGESHETMFQTLAPLVSEHMPQSKPRYLMGVGNPTTLLKAIAAGVDMFDCVLPTRTGRMGTAFSSEGRLNLRNARFALDDAPIDPGCACPVCSGGYTRALIRHLVVQREMLGGILLSEHNIFYLLDLMKRARRAIIDGRYSAFLSQWLDSPAAQDY

SEQ ID NO: 54180 - protein, 390 aa, unidentified
  source 1..390: note = Corticibacter populi
  REGION 1..390: note = tr|A0A3M6QZT2|A0A3M6QZT2_9BURK Queuine tRNA-ribosyltransferase OS=Corticibacter populi OX=1550736; GN = tgt PE=3 SV=1
MLQFELLATDSSSHARRGTLTLNHGQVQTPIFMPVGTYGTVKGVMPRSLEEMGAQIILGNTFHLWMRPGLDVMGGFGGLHGFEQWHKPILTDSGGFQVWSLGDMRKITEEGVHFASPVNGDKLFMSPEVSMQIQTVLNSDIVMQLDECTPYETKGHITTEDEARRSMEMSIRWARRSKAEFERLGNPNALFGIVQGGMFEHLREESLQQLLELDFPGYAVGGVSVGEPKDEMRRIMAHTPHRLPRHKPRYLMGVGTPEDLVEGVACGVDMFDCVMPTRNARNGTVFTRYGDLKLRNARHKSDHQPLDATCTCHACAGTSGVAWADGGRGGFSRAYLHHLDRCGEMLGPMLTTIHNLHYYLNLMREIRAALDAGRFGEFRQRFASDRARGV

SEQ ID NO: 54181 - protein, 418 aa, Corynebacterium accolens
  REGION 1..418: note = tr|C0WHU5|C0WHU5_9CORY Queuine tRNA-ribosyltransferase OS=Corynebacterium accolens ATCC 49725 OX=525260 GN=tgt PE=3 SV=1
MKDLSFDIDKRLPEGPGKHGRSGVIHTPHGDIATPAFIPVATKATVKTLTPEQIRATGTQAILSNAYHLYLQPGHDIVDEAGGVAKFENWHGPTYTDSGGFQVMSLGVGFKKVIAMDLADLTEKDIRAAKRERMAKVDEEGVDFRSIIDGSKHRFTPEKSMQIQHGLGADIMFAFDELTTLIDSRTYQEESVARTHRWAQRCLEEHDRLTRERYHRPKQSLWGVVQGAQYEDLRRQATRGLLELDRAAREKGQRGFGGFGIGGALEKQNLGTIVGWVCDELPDDKPRHLLGISEPDDIFTAVEAGADTFDCVAPTRLARRGGVYTLDGRLNLTNARFKRDFKGVDEEFGGYVTENYSRAYLHHLLKAKEFLAGTLCTIHNVEFMVRLVDNIRAAINGGYYEDYRDEFLGRYYAASKAR

SEQ ID NO: 54182 - protein, 418 aa, Corynebacterium accolens
  REGION 1..418: note = tr|E0MUV9|E0MUV9_9CORY Queuine tRNA-ribosyltransferase OS=Corynebacterium accolens ATCC 49726 OX=862512 GN=tgt PE=3 SV=1
MKDLSFDIDKRLPEGPGKHGRSGIIHTPHGDIATPAFIPVATKATVKTLTPEQIRATGTQAILSNAYHLYLQPGHDIVDEAGGVAKFENWHGPTYTDSGGFQVMSLGVGFKKVIAMDLADLTEKDIRAAKKERMAKVDEEGVDFRSIIDGSKHRFTPEKSMQIQHGLGADIMFAFDELTTLIDSRTYQEESVARTHRWAQRCLEEHDRLTRERYHRPKQSLWGVVQGAQYEDLRRQATRGLLELDRAAREKGQRGFGGFGIGGALEKQNLGTIVGWVCDELPDDKPRHLLGISEPDDIFTAVEAGADTFDCVAPTRLARRGGVYTLDGRLNLTNARFKRDFKGVDEEFGGYVTENYSRAYLHHLLKAKEFLAGTLCTIHNVEFMVRLVDNIRAAINGGYYEDYRDEFLGRYYAASKAR

SEQ ID NO: 54183 - protein, 415 aa, Corynebacterium afermentans
  REGION 1..415: note = tr|A0A1N6V2W2|A0A1N6V2W2_9CORY Queuine tRNA-ribosyltransferase OS=Corynebacterium afermentans; OX = 38286 GN=tgt PE=3 SV=1
MTDVTFEAHTQLEPAPGRHGRTGVIHTPHGDIQTPAFIPVATKATVKTLTPEQIRQTGAQAILSNAYHLYLQPGPDIVDEAGGVAAFENWHGPTYTDSGGFQVMSLGVGFKKVLAMDVAGLTDSDIRAANKDRMARVDDDGVDFKSVIDGSSHRFTPEVSMQIQHQLGADIMFAFDELTTLVDTRAYQVHSVERTRRWARRCLLEHDRLTTARSGKPLQSLWGVVQGAQYEDLRRSAVRGLLDLDKEARAEGRRGFGGFGIGGALEKENLGTIVGWVTDELPVDMPRHLLGISEPDDIFTAVEAGADTFDCVAPTRLGRRGGVYTLDGRMNLAGARFKRDFAGVDEEFGGYVSENYSRAYIHHLLKAKEFLAGTLCTMHNLEFMIRLVDNIRAAIDAGDYEAYRDEFLGRYYAAN

SEQ ID NO: 54184 - protein, 422 aa, Corynebacterium ammoniagenes
  REGION 1..422: note = tr|D5NVB6|D5NVB6_CORAM Queuine tRNA-ribosyltransferase OS=Corynebacterium ammoniagenes DSM 20306 OX=649754 GN=tgt PE=3 SV=1
MSHEHSDDLSFDVTTRLGDGSPGKHGRTGVIHTPHGDIQTPAFIPVATKATVKTLTPEQIKSTGAQAILSNAYHLYLQPGHDIVDEAGGVAAFENWDGPTYTDSGGFQVMSLGVGFKKVLAMDVAKLTEGDIRAAKKERLAHVDEDGVDFRSFIDGSKHRFTPEFSMQIQHGLGADIMFAFDELTTLVDTRLYQEASVDRTHRWAKRCLEEHERLTNERTHRPKQSLWGVVQGAQYEDLRRQATRGLVQLSDEAEAEGKRGFGGFGIGGALEKENLGTIVGWCSDELPENKPRHLLGISEPDDMFTAIEAGADTFDCVAPTRLGRRGGVYTLDGRMNLMGAKFKRDFSGVDEEFGGYVSENYSRAYIHHLLKAKEFLAGTLCTIHNLQFMISLVDNIRKSIDGGYYEAYRDEFMGRYYANKK

SEQ ID NO: 54185 - protein, 433 aa, Corynebacterium amycolatum
  REGION 1..433: note = tr|A0A1V2C0C5|A0A1V2C0C5_CORAY Queuine tRNA-ribosyltransferase OS=Corynebacterium amycolatum; OX = 43765 GN=tgt PE=3 SV=1
MSQSRTTGFDVVKQIEGARGRAGTIHTPHGDIATPAFIPVGTKATVKTLTPEQVRSTGAQAMLSNAYHLYLQPGEEIVDQAGGLAKFSNWNGPTFTDSGGFQVLSLGAGFKKTLAMDVTGMQKDDIVAEGKERNAFVDEDGVTFRSHIDGSEHRFTPEVSMRIQHALGADIMMAFDELTTLMNTRGYQEASVERTHRWARRCLEAHNELTVSRGQVDGHVTSLDDGQFPIQQLFGVVQGAQYEDLRRKAARGLVELSREFEDAGQLGFHGYGIGGAIEKQNLGLICGWVNDELPDDRARHLLGISEPDDIFAAVEAGADTFDCVAPTRLARRGGVYTLDGRMTLTNARFKNDFRPVDAEVPSYTSLNYSRAYLHHLLKAKEYLAGTLCTIHNLFFMVQLVENIRAAILEDRFFEYRDEFMGRYYANGGRAVGN

SEQ ID NO: 54186 - protein, 433 aa, Corynebacterium amycolatum
  REGION 1..433: note = tr|A0A376C947|A0A376C947_CORAY Queuine tRNA-ribosyltransferase OS=Corynebacterium amycolatum; OX = 43765 GN=tgt PE=3 SV=1
MSQSRTTGFDVVKQIEGARGRAGTIHTPHGDIATPAFIPVGTKATVKTLTPEQVRSTGAQAMLSNAYHLYLQPGEEIVDQAGGLAKFSNWNGPTYTDSGGFQVLSLGAGFKKTLAMDVTGMQKDDIVAEGKERNAFVDEDGVTFRSHIDGSEHRFTPEVSMRIQHALGADIMMAFDELTTLMNTRGYQEASVERTHRWARRCLEAHNELTVSRGQVDAHVHSLDDGQLPIQQLFGVVQGAQYEDLRRKAARGLVELSREFEDAGQLGFHGYGIGGAIEKQNLGLICGWVNDELPDDRARHLLGISEPDDIFAAVEAGADTFDCVAPTRLARRGGVYTLDGRMTLTNARFKNDFRPVDAEVPSYTSLNYSRAYLHHLLKAKEYLAGTLCTIHNLFFMVKLVENIREAILEDRFFEYRDEFMGRYYANGGRAVGN

SEQ ID NO: 54187 - protein, 424 aa, Corynebacterium appendicis
  REGION 1..424: note = tr|A0A1N7IPB4|A0A1N7IPB4_9CORY Queuine tRNA-ribosyltransferase OS=Corynebacterium appendicis CIP 107643 OX=1161099 GN=tgt PE=3 SV=1
MTDTSGTGSRVDLSFEVGTRLEEAPGRHGRTGVIHTPHGDIQTPAFIPVATKATVKTLTPEQIRQTGAQAILSNAYHLYLQPGPDIVDEAGGVAAFENWHGPTYTDSGGFQVMSLGVGFKKVLAMDVAGLTDEDIRAANKDRMARVDDDGVDFKSFIDGSSHRFTPEVSMQIQHQLGADIMFAFDELTTLVDTRAYQEHSVERTRQWARRCLIEHDRLSTARPHKPLQSLWGVVQGAQYEDLRRQATRGLIALDEEARAEGRRGFGGFGIGGALEKENLGTIVGWVTDELPEDKPRHLLGISEPDDLFTAIEAGADTFDCVAPTRLGRRGGVYTLDGRMNLMAARFRRDFSGVDEEFGGYVSENYSRAYIHHLLRAKEFLAGTLCTLHNLEFMVRLVDNIRAAIDAGDYEAYRDEFLGRYYAGH

SEQ ID NO: 54188 - protein, 421 aa, Corynebacterium aquilae
  REGION 1..421: note = tr|A0A1L7CDB4|A0A1L7CDB4_9CORY Queuine tRNA-ribosyltransferase OS=Corynebacterium aquilae DSM 44791 OX=1431546 GN=tgt PE=3 SV=1
MTQQHAGHTDTSFTLETHLDAPGHGRAGTIHTPHGDIQTPAFIPVGTKATVKTLTPEQIKDTGAQAVLSNAYHLYLQPGPDIVDEAGGVGAFENWDGPTYTDSGGFQVMSLGVGFKKVLAMDTAGLKETDIRAKSGERLAKVDEDGVDFRSVIDGSRHRFTPEVSMQIQHQLGADIIFAFDELTTLVDTRTYQEQSVARTHRWARRCLEEHNRQTQARADKPLQSLWGVVQGAQYEDLRRQATRGLIDLSKEFEDSGQRGFGGFGIGGALEKENLGTIVGWVCEELPEEKPRHLLGISEPDDLFTAVEAGADTFDCVAPTRLGRRGGVYTLDGRMNLMAARFKRDFNPIDPEVGGYASDNYSRAYIHHLLKAKEYLAGTLCTMHNLHFMIQLVDNIRASIIDGTYQEYKAEFMGRYYANKK

SEQ ID NO: 54189 - protein, 412 aa, Corynebacterium argentoratense
  REGION 1..412: note = tr|U3GXY4|U3GXY4_9CORY Queuine tRNA-ribosyltransferase OS=Corynebacterium argentoratense DSM 44202 OX=1348662 GN=tgt PE=3 SV=1
MSTFELRNTLDGSAHGRTGTIHTPHGDIQTPAFIPVATKATVKTLTPEQIRQCGAQAILSNAYHLYLQPGPDIVDEAGGVATFENWHGPTYTDSGGFQVMSLGVGFKKVLAMDTSGLKETDIKARGKDRMAHVDEDGVDFRSVIDGSKHRFTPEVSIQIQHQLGADIMFAFDELTTLVDTREYQESSVERTHRWARRCLEEHNRQTQLRADKPLQALWGVVQGAQYEDLRRQATRGLVSLSDEFEAEGMRGFGGYGIGGALEKENLGTIVQWVCDELPVDKPRHLLGISEPDDLFTAVEAGADTFDCVAPTRLGRRGGVYTLDGRMNLKGARFKRDFTPIDEELGGYVSENYTRAYIHHLLKAKEFLAGTLCTMHNLFFMLKLVDDIRASIDGGYYYEFRDEFMGRYYAGKK

SEQ ID NO: 54190 - protein, 413 aa, Corynebacterium atypicum
  REGION 1..413: note = tr|A0A075TTZ0|A0A075TTZ0_9CORY Queuine tRNA-ribosyltransferase OS=Corynebacterium atypicum; OX = 191610 GN=tgt PE=3 SV=1
MTALSFDLEARLDGELGRTGVIHTPHGDIRTPAFIPVATKATVKTLTPEQVRSTGAQAILSNAYHLYLQPGEDIVDEAGGVAAFENWHGPTYTDSGGFQVMSLGVGFRKVLAMDVAQLTETDIRAAKKERMALVDEDGVDFRSVIDGSKHWFTPEKSMQIQHGLGADIMFAFDELTTLIDTREYQEQSVARTHRWARRCLVEHQRLSEARAGKPEQSLWGVVQGAQYEDLRRRAARGLVELSQEAEAEGRRGFGGFGIGGALEKQNLGTIVRWVNEELPEGKPRHLLGISEPDDLFTAVANGADTFDCVAPTRLGRRGGVYTLDGRLNLKGARFKRDFSGVDEEFGGYVSENYSRAYIHHLLKAKEYLAGTLCTLHNVEFMVRLVDRMWQAIVDGDFFEFRDEFLGRYYAAKR

SEQ ID NO: 54191 - protein, 427 aa, Corynebacterium aurimucosum
  REGION 1..427: note = tr|A0A558GGQ1|A0A558GGQ1_9CORY Queuine tRNA-ribosyltransferase OS=Corynebacterium aurimucosum; OX = 169292 GN=tgt PE=3 SV=1
MTHPKPQLETDLSFDVKKELDLSGPAQPGKHGRTGVIHTPHGDIQTPAFIPVATKATVKTLTPEQIRLTGAQAILSNAYHLYLQPGHDIVDEAGGVAAFENWHGPTYTDSGGFQVMSLGVGFKKVLAMDVADLTDSDIRAAKKERMAQVDEDGVDFKSIIDGSTHRFTPEVSMQIQHGLGADIMFAFDELTTLVDTRTYQEESVERTRRWAQRCLDEHDRLTLARGPQKPRQSLWGVVQGAQYEDLRRQAARGLVELSDRAEANGRRGFGGFGIGGALEKENLGTIVGWVCDELPVDKPRHLLGISEPDDIFTAVEAGADTFDCVAPTRLARRGGVYTLDGRLNLTNARFKRDFAGVDEEFGGYVSENYSRAYLHHLLKAKEFLAGTLCTIHNLEFMIRLVDNIRESIDGGYYEAYRDEFLGRYYAK

SEQ ID NO: 54192 - protein, 427 aa, Corynebacterium aurimucosum
  REGION 1..427: note = tr|A0A2I1MW95|A0A2I1MW95_9CORY Queuine tRNA-ribosyltransferase OS=Corynebacterium aurimucosum; OX = 169292 GN=tgt PE=3 SV=1
MTHPKPQLETDLSFDVKKELDLSGPAQPGKHGRTGVIHTPHGDIQTPAFIPVATKATVKTLTPEQIRATGAQAILSNAYHLYLQPGHDIVDEAGGVATFENWHGPTYTDSGGFQVMSLGVGFKKVLAMDVAELTDSDIRAAKKERMAQVDEDGVDFKSVIDGSSHRFTPEVSMQIQHGLGADIMFAFDELTTLVDTRTYQEESVERTRRWAQRCLDEHDRLTLARGPQKPRQSLWGVVQGAQYEDLRRQAARGLVELSDRAEANGRRGFGGFGIGGALEKENLGTIVGWVCDELPVDKPRHLLGISEPDDLFTAVEAGADTFDCVAPTRLARRGGVYTLDGRLNLTNARFKRDFAGVDEEFGGYVSENYSRAYIHHLLKAKEFLAGTLCTIHNLEFMIRLVDNIRASIDGGYYEAYRDEFLGRYYAK

SEQ ID NO: 54193 - protein, 425 aa, Corynebacterium bovis
  REGION 1..425: note = tr|A0A3R8QKX1|A0A3R8QKX1_9CORY Queuine tRNA-ribosyltransferase OS=Corynebacterium bovis OX=36808; GN = tgt PE=3 SV=1
MSAEPTPSHHDTSFVAGTRLDSVDTSPSQGRTGVIHTPHGDIRTPAFIPVATKATVKTLTPEQIRSTGAEAILSNAYHLYLQPGPDIVDEAGGVAAFENWHGPTYTDSGGFQVMSLGVGYKKVLAMNTAGLAEADIIAQQKKRMAVVDEDGVDFKSIIDGSLHRFTPEVSMQIQHQLGADIMFAFDELTTLANTRLYQEQSVDRTHRWARRCLAEHDRLTRARPHRPLQSLWGVVQGAQYEDLRRAAARGLVALSREAEQEGRRGFGGFGIGGALEKENLGTIVSWVSEELPDDRPRHLLGISEPDDLFTAVAAGADTFDCVAPTRLGRRGGVYTLDGRLNLSAARFRRDFTPVDAEVGGYTSDNYTRAYIHHLLRAKEYLAGTLCTMHNIHFMVRLVAGIRQSIEDGRFEEYRDEFLGRYYAGR

SEQ ID NO: 54194 - protein, 417 aa, Corynebacterium callunae
  REGION 1..417: note = tr|M1TMU0|M1TMU0_9CORY Queuine tRNA-ribosyltransferase OS=Corynebacterium callunae DSM 20147 OX=1121353 GN=tgt PE=3 SV=1
MSDLSFTLKTKLADDTPGKHGRTGTIHTPHGDIQTPAFIPVATKATVKTLTPSQIRETGAQAILSNAYHLYLQPGPDIVDEAGGVSEFESWHGPTYTDSGGFQVLSLGSGFKKVLAMDTNNLTRNDIKAAKRERMALVDDDGVDFRSVIDGSKHRFTPEVSMQIQHQLGADIIFAFDELTTLIDTYDYQVESVERTRRWAERCLLEHERLTQERVEKPLQSLWGVVQGAQYEDLRRQAVRGLLDLDRQAVDAGRRGFGGFGIGGALEKENLGTIVGWVCDELPDEKPRHLLGISEPDDLFVAIEAGADTFDCVAPTRLGRRGGVYTLDGRVNLKGAKFKRDFRGIDEEIGGYASENFSRAYIHHLLKAKEFLAGTLCTMHNLYFMITLVDKIRESIDNGTYYDFKAEFLGRYYAAKI

SEQ ID NO: 54195 - protein, 423 aa, Corynebacterium camporealensis
  REGION 1..423: note = tr|A0A0F6QUB0|A0A0F6QUB0_9CORY Queuine tRNA-ribosyltransferase OS=Corynebacterium camporealensis; OX = 161896 GN=tgt PE=3 SV=1
MEKSTDLTQDLSFQVGTRLEQSGPGKHGRTGVIHTPHGDIQTPAFIPVATKATVKTLTPEQIRSTGAQAILSNAYHLYLQPGHDIVDEAGGVAAFENWQGPTYTDSGGFQVMSLGVGFKKVLAMDVANLTEQDIRAAKKERMAQVDEDGVDFRSFIDGSKHRFTPEFSMQIQHGLGADIMFAFDELTTLVDTRQYQEESVARTHRWAQRCLDEHDRLTRERAHRPKQSLWGVVQGAQYEDLRRQAARGLMQLSDAASDQGKRPFGGFGIGGALEKENLGTIVGWVCDELPEDKPRHLLGISEPDDLFTAVEAGADTFDCVAPTRLARRGGVYTLDGRLNLVNARFKRDFSGVDEEFGGYVSENYSRAYIHHLLKAKEFLAGTLCTMHNVEFMIRLVDNIRASIEGGYYEAYRDEFLGRYYAGK

SEQ ID NO: 54196 - protein, 417 aa, Corynebacterium canis
  REGION 1..417: note = tr|A0A5C5UET2|A0A5C5UET2_9CORY Queuine tRNA-ribosyltransferase OS=Corynebacterium canis OX=679663; GN = tgt PE=3 SV=1
MTQDTSFELHTRLESSPHGRTGTIHTPHGDIATPAFIPVGTKATVKTLTPEQVRSTGAQAVLGNAYHLYLQPGPEIVDAAGGLAAFQNWDGPTYTDSGGFQVMSLGVGFKKVLAMDTKGLTEADIRAKRKDRMAKVDEEGVDFRSVIDGSKHRFTPEVSMQIQHQLGADIMFAFDELTTLVDTRRYQEDSVARTHRWAQRCLDEHERLTQARAGKPLQSLWGVVQGAQYEDLRRRAARGLVELSTAAEAAGKRGFGGYGIGGALEKENLGTIVGWVCDELPEDRPRHLLGISEPDDLFTAIEYGADTFDCVAPTRLGRHGGVYTLDGRVNLTKAQFKRDFEPIDAELGGYVSENYSRAYIHHLLRAKEYLGGTLCTLHNLHFLVGLVDNIRAAITGGYYEEYRDEFLGRYYAAGSAK

SEQ ID NO: 54197 - protein, 422 aa, Corynebacterium casei
  REGION 1..422: note = tr|W5XQN6|W5XQN6_9CORY Queuine tRNA-ribosyltransferase OS=Corynebacterium casei LMG S-19264 OX=1285583 GN=tgt PE=3 SV=1
MSHEHSDDLSFDVTTRLGDGSPGKHGRTGVIHTPHGDIQTPAFIPVATKATVKTLTPEQIKSTGAQAILSNAYHLYLQPGHDIVDEAGGVGAFENWEGPTYTDSGGFQVMSLGVGFKKVLAMDVAKLTEVDIRAAKKERLAHVDEDGVDFRSFIDGSKHRFTPEVSMQIQHGLGADIMFAFDELTTLVDTRVYQEQSVERTHRWAKRCLDEHERLTNERTHRPKQSLWGVVQGAQYEDLRRQATRGLVQLSEQAEAEGKRGFGGFGLGGALEKENLGTIVGWCCDELPENKPRHLLGISEPDDMFTAIEAGADTFDCVAPTRLGRRGGVYTLDGRMNLMGARFKRDFRGIDEEFGGYVSENYSRAYIHHLLKAKEFLAGTLCTIHNLQFMISLVDNIRKSIDGGYYEAYRDEFMGRYYANKK

SEQ ID NO: 54198 - protein, 422 aa, Corynebacterium casei; identical to SEQ ID NO: 54197
  REGION 1..422: note = tr|G7HVR8|G7HVR8_9CORY Queuine tRNA-ribosyltransferase OS=Corynebacterium casei UCMA 3821; OX = 1110505 GN=tgt PE=3 SV=1

SEQ ID NO: 54199 - protein, 500 aa, unidentified
  source 1..500: note = Corynebacterium choanis
  REGION 1..500: note = tr|A0A3G6JBY3|A0A3G6JBY3_9CORY Queuine tRNA-ribosyltransferase OS=Corynebacterium choanis; OX = 1862358 GN=tgt PE=3 SV=1
MSGWLIVGRSSGLPAYGWVIRRAASVPVLLMITLDRMEQPQRTPDHQSSSAAPASAEASGIPAAGDGHTEVGGNAAAAAQPASAAGFREGFTLGTALAGSAHGRTGIIHTPHGDIHTPAFIPVGTKATVKTLTPDQIKLTGAQAILGNAYHLYLQPGADLVDEAGGLAKFARWDGPTYTDSGGFQVMSLGAGYKKVISMTAGEVSADEVRQKKDRLAHVDEEGVNFRSVIDGSKHRFTPEVSMAIQHQLGADIMFAFDELTTLVDSRRYQEQSVERTHRWAKRCLTAHNELTESRHGKPPQSLWGVVQGAHYEDLRRIATRGLVGLSQEFEAEGRRGFGGYGIGGALEKENLGTIVGWVCDELPADRPRHLLGISEPDDVFVAVENGADTFDCVAPTRLGRRGGVYTLDGRTNLKKACYTRDFRPVDAELGGYVSENFDRAYIHHLIKAKEFLAGTLCTIHNLFFMVTLVDNIRASIDGGYFAEYKQEFLGRYYAGQQRQ

SEQ ID NO: 54200 - protein, 418 aa, Corynebacterium coyleae
  REGION 1..418: note = tr|A0A1H4KG71|A0A1H4KG71_9CORY Queuine tRNA-ribosyltransferase OS=Corynebacterium coyleae; OX = 53374 GN=tgt PE=3 SV=1
MTQQTDTTFEVGTQLEPAPGRHGRTGVIHTPHGSIQTPAFIPVATKATVKTLTPEQIRSTGAQAILSNAYHLYLQPGPDIVDEAGGVAAFENWHGPTYTDSGGFQVMSLGVGFKKVLAMDTAGLTEGDIRAANKDRMARVDDDGVDFKSVIDGSSHRFTPEVSMQIQHQLGADIMFAFDELTTLVDTRAYQEHSVERTRRWARRCLIEHDRLTEVRADKPLQSLWGVVQGAQYEDLRRQAVHGLLDLHREALDEGRRGFGGFGIGGALEKENLGTIVGWVTDELPIDMPRHLLGISEPDDIFTAVEAGADTFDCVAPTRLGRRGGVYTLDGRMNLAGARFKRDFSGVDEEFGGYVSENFSRAYIHHLLKAKEFLAGTLCTIHNLEFMIRLVDNIRLAIDAGDYEAYRDEFLGRYYAGK

SEQ ID NO: 54201 - protein, 418 aa, Corynebacterium coyleae
  REGION 1..418: note = tr|A0A2I1X6H5|A0A2I1X6H5_9CORY Queuine tRNA-ribosyltransferase OS=Corynebacterium coyleae; OX = 53374 GN=tgt PE=3 SV=1
MTQQTDTTFEVGTQLEPAPGRHGRTGVIHTPHGSIQTPAFIPVATKATVKTLTPEQIRSTGAQAILSNAYHLYLQPGPDIVDEAGGVAAFENWHGPTYTDSGGFQVMSLGVGFKKVLAMDTAGLTEGDIRAANKDRMARVDDDGVDFKSVIDGSSHRFTPEVSMQIQHQLGADIMFAFDELTTLLDTRAYQEHSVERTRRWARRCLIEHDRLTEVRADKPLQSLWGVVQGAQYEDLRRQATHGLLDLHREALDEGRRGFGGFGIGGALEKENLGTIVGWVTDELPIDMPRHLLGISEPDDIFTAVEAGADTFDCVAPTRLGRRGGVYTLDGRMNLAGARFKRDFSGVDEEFGGYVSENYSRAYIHHLLKAKEFLAGTLCTIHNLEFMIRLVDNIRLAIDAGDYEAYRDEFLGRYYAGK

SEQ ID NO: 54202 - protein, 417 aa, unidentified
  source 1..417: note = Corynebacterium crudilactis
  REGION 1..417: note = tr|A0A172QX48|A0A172QX48_9CORY Queuine tRNA-ribosyltransferase OS=Corynebacterium crudilactis; OX = 1652495 GN=tgt PE=3 SV=1
MSDLSFTLNNRLPDQGPGKHGRTGVIHTPHGDIATPAFIPVATKATVKTLTPEQIRETGAQAILSNAYHLYLQPGPDIVDEAGGVSKFENWNGPTYTDSGGFQVMSLGSGFKKVLAMDTTNLTRNDIKAAKKERMALVDDDGVDFKSVIDGSKHRFTPEVSMQIQHQLGADIIFAFDELTTLIDTYDYQVESVERTRRWAQRCLLEHERLTQERVGKPLQSLWGVVQGAQFEDLRRQAVQGLLDLDRKAADEGRRGFGGFGIGGALEKENLGTIVGWVCDELPDEKPRHLLGISEPDDLFVAIEAGADTFDCVAPTRLGRRGGVYTLDGRMNLTGARFKRDFAGIDEEVGGYASENYSRAYIHHLLKAKEFLAGTLCTMHNLHFMITLVDKIRASIDDGTYYEFKEEFLGRYYAPKI

SEQ ID NO: 54203 - protein, 430 aa, Corynebacterium cystitidis
  REGION 1..430: note = tr|A0A1H9U781|A0A1H9U781_9CORY Queuine tRNA-ribosyltransferase OS=Corynebacterium cystitidis DSM 20524 OX=1121357 GN=tgt PE=3 SV=1
MTNQPTVPTEPTASLDDDLSFTIGDRLEQGPGRHGRTGVIHTPHGEIHTPAFIPVATKATVKTLTPEQIRNTGAQAILSNAYHLYLQPGHDIVDEAGGLARFSNWHGPTYTDSGGFQVMSLGVGFKKVLAMDTAKLSHEDIRAKDKERMAHVDDNGVDFKSFIDGSSHRFTPEVSMQIQHGLGADILFAFDELTTLVDTREYQEESVERTRRWAKRCIDEHTRLTRLRSARPKQSLWGVVQGAQYEDLRRQATRGLLELDRQARMEGKRGFGGFGIGGAIEKENLGTIVGWVTDELPEDKPRHLLGISEPDDIFAAVEAGADTFDCVAPTRLGRHGGVYTLDGRLNLTGARFKRDFRGVDEEFGGYVSQNYSRAYIHHLLKAKEFLAGTLCTMHNLEFMIRLVDNIRQSIQQGRFEEYRDSFLARYYRAI

SEQ ID NO: 54204 - protein, 431 aa, Corynebacterium deserti
  REGION 1..431: note = tr|A0A0M4CVM3|A0A0M4CVM3_9CORY Queuine tRNA-ribosyltransferase OS=Corynebacterium deserti GIMN1.010 OX=931089 GN=tgt PE=3 SV=1
MGGEARCTLDLAPMSDLSFTLNNKLADDAPGKHGRTGVIHTPHGDIATPAFIPVATKATVKTLTPEQIRETGAQAILSNAYHLYLQPGPDIVDEAGGVAAFENWHGPTYTDSGGFQVMSLGSGFKKVLAMDTTNLTRNDIKAAKKERMALVDEDGVDFKSVIDGSKHRFTPEVSMQIQHQLGADIIFAFDELTTLVDTYDYQVESVERTRRWAQRCLLEHERLTQERVDKPLQSLWGVVQGAQFEDLRRQAVKGLLDLDRQATDEGRRGFGGFGIGGALEKENLGTIVGWVCDELPDEKPRHLLGISEPDDLFVAVEAGADTFDCVAPTRLGRRGGVYTLDGRMNLTGARFKRDFKGIDEEVGGYASENYSRAYIHHLLKAKEFLAGTLCTMHNLHFMITLVDKIRASIDDGTYHEFKEEFLGRYYASKMS

SEQ ID NO: 54205 - protein, 430 aa, Corynebacterium diphtheriae
  REGION 1..430: note = tr|A0A5E5PKF2|A0A5E5PKF2_CORDP Queuine tRNA-ribosyltransferase OS=Corynebacterium diphtheriae; OX = 1717 GN=tgt PE=3 SV=1
MTDTTFELRTELDDAPGRHGRTGVIHTPHGDINTPAFIPVATKATVKTLTPQQIRDTGAQAILSNAYHLYLQPGPDIVDEAGGVSSFENWHGPTYTDSGGFQVMSLGVGFRKVLAMDTAGLVEGDIRAPKKDRYAQVDEDGVDFRSVIDGSRHRFTPEVSMQIQHRLGADIIFAFDELTTLVDTRQYQESSVERTHRWARRCLIEHDRLTREREGKPLQSLWGVVQGAQYEDLRRQAIRGLLDLDKEAEDNGRRGFGGFGIGGALEKENLGTIVGWVCDEIPQHKPRHLLGISEPDDLFTAIEAGADTFDCVAPTRLGRRGGVYTLDGRVNLTAARFKRDFRQVDEEFGGPIAEYSRAYIHHLFKAKEFLGGTLCTMHNVAFMIQLVDNIRSAINNGDFEAYRDEFLGRYYASKGGPAAAGRSGGMIYGV

SEQ ID NO: 54206 - protein, 430 aa, Corynebacterium diphtheriae
  REGION 1..430: note = tr|Q6NJZ0|Q6NJZ0_CORDI Queuine tRNA-ribosyltransferase OS=Corynebacterium diphtheriae (strain ATCC 700971 / NCTC 13129 / Biotype gravis); OX = 257309 GN=tgt PE=3 SV=1
MTDTTFELRTELDDAPGRHGRTGVIHTPHGDINTPAFIPVATKATVKTLTPQQIRDTGAQAILSNAYHLYLQPGPDIVDEAGGVSKFENWHGPTYTDSGGFQVMSLGVGFKKVLAMDTAGLVEGDIRAPKKDRYAQVDEDGVDFRSVIDGSRHRFTPEVSMQIQHRLGADIIFAFDELTTLVDTRQYQESSVERTHRWARRCLIEHDRLTREREGKPLQSLWGVVQGAQYEDLRRQAVRGLLDLDKEAEDNGRRGFGGFGIGGALEKENLGTIVGWVCDEIPQHKPRHLLGISEPDDLFTAIEAGADTFDCVAPTRLGRRGGVYTLDGRVNLTAARFKRDFRQVDEEFGGPIAEYSRAYIHHLFKAKEFLGGTLCTMHNVAFMIQLVDNIRSAINNGDFEAYRDEFLGRYYASKGGPAAAGRSGGMIYGV

SEQ ID NO: 54207 - protein, 421 aa, Corynebacterium doosanense
  REGION 1..421: note = tr|A0A097ID78|A0A097ID78_9CORY Queuine tRNA-ribosyltransferase OS=Corynebacterium doosanense CAU 212 = DSM 45436 OX=558173 GN=tgt PE=3 SV=1
MTDLSFDLGTQLEIGPGKHGRTGVIHTPHGDIRTPAFIPVATKATVKTLTPEQVSSTGAQAILSNAYHLYLQPGHDIVDEAGGVGRFENWQGPTYTDSGGFQVMSLGAGYKKVLAMDTKGLTRNDIKAGEKERLAHVDEDGVDFKSVIDGSYHRFTPEVSMQIQHSLGADIMFAFDELTTLVDSREYQANSVARTHRWAQRCLVEHDRLSTLRSTRPLQSLWGVVQGAQYEDLRRQATRGLIELSRQAEEEGRRGFGGFGIGGALEKENLGTIVGWVADELPLEKPRHLLGISEPDDLFVAVEAGADTFDCVSPTRLARRGGVYTLDGRMNLTAARFKRDFRGIDEEFGGHVSENYSRAYIHHLLKAKEFLAGTLCTMHNLQFMIALVDQMRDAIDDGHFEAFKVEFLGRYYANGGRAATF

SEQ ID NO: 54208 - protein, 432 aa, Corynebacterium durum
  REGION 1..432: note = tr|L1MDA2|L1MDA2_9CORY Queuine tRNA-ribosyltransferase OS=Corynebacterium durum F0235; OX = 1035195 GN=tgt PE=3 SV=1
MTEGTFHDTTFELGTRLEATPRNGDGGHGARHGRTGVIHTPHGDIATPAFIPVGTKASVKTLTPEQVRDAGAQAVLSNAYHLYLQPGPDIVDEAGGVAAFENWHGPTYTDSGGFQVMSLGVGFKKVLAMSTDGLKEHDIRARGKDRWAHVDEEGVNFRSVIDGSKHRFTPEISMQIQHQLGADIMFAFDELTTLLDTRLYQEQSVERTHRWAQRCLDEHDRLTRARVDKPLQSLWGVVQGAQYEDLRRQAARGLVELSDAAEAEGRRGFGGYGIGGALEKENLGTIVSWVCDELPELKPRHLLGISEPDDLFVAVEAGADTFDCVAPTRLGRRGGVYTLDGRINLTNARFTRDFTPIDAELGGYVSENYTRAYIHHLLKAKEFLAGTLCTLHNLHFMIGLVDKIRWSIDNGDYEAFRDDFLGRYYATGGRAQ

SEQ ID NO: 54209 - protein, 457 aa, Corynebacterium efficiens
  REGION 1..457: note = tr|Q8FU20|Q8FU20_COREF Queuine tRNA-ribosyltransferase OS=Corynebacterium efficiens (strain DSM 44549 / YS-314 / AJ 12310 / JCM 11189 / NBRC 100395) OX=196164 GN=tgtPE=3 SV=1
MDAPLAGPHPSEPGCGGLRTGKGMGAQPGQAVEWTTMSAEKTDLSFTLHNQLDDPAPGKHGRTGTIHTPHGDIHTPAFIPVATKATVKTLTPEQIRETGAQAILSNAYHLYLQPGPDIVDEAGGVSAFENWHGPTYTDSGGFQVMSLGSGFKKVLAMDTTNLTREDIKAANKERMAHVDDDGVDFKSFIDGSKHRFTPEVSMQIQHQLGADIIFAFDELTTLIDTYDYQVESVERTRRWAQRCLLEHERLTQERADKPLQSLWGVVQGAQYEDLRRQAVHGLLELDREAADEGRRGFGGFGIGGALEKENLGTIVGWVCDELPDDKPRHLLGISEPDDLFVAIEAGADTFDCVAPTRLGRRGGVYTLDGRLNLGSSRFKRDFRPIDEEVGGYVSQNYTRAYIQHLLKAKEFLAGTLCTMHNLHFMIKLVDDIRTSIDNGTYHEFKAEFLGRYYAGKR

SEQ ID NO: 54210 - protein, 435 aa, unidentified
  source 1..435: note = Corynebacterium endometrii
  REGION 1..435: note = tr|A0A4P7QFB2|A0A4P7QFB2_9CORY Queuine tRNA-ribosyltransferase OS=Corynebacterium endometrii; OX = 2488819 GN=tgt PE=3 SV=1
MTEPRELYPSTASDIPEAPLGQDLSFEVGTQLEPAPGRHGRTGVIHTPHGDIHTPAFIPVATKATVKTLTPEQIRSTGAQAILSNAYHLYLQPGHDLVDEAGGVAKFENWHGPTYTDSGGFQVMSLGVGFKKVLAMDTTNLKREDIRAADKERMARVDEDGVNFKSFIDGSKHRFTPEVSMQIQHGLGADILFAFDELTTLVDTRQYQEESVARTHRWAQRCLDEHHRLTQERSHRPRQSLWGVVQGAQYEDLRRQAARGLVDLSAQAEDAGKRGFGGYGIGGAIEKENLGTIVGWVCDELPVDKPRHLLGISEPDDLFAGIEAGADTFDCVAPTRLGRRGGVYTLDGRMNLKGSKFKRDFRGIDEEFGGYVSTHYSRAYIRHLLKANEFLAGTLCTMHNLEFMIALVDNARKAIDGGYYEEYRDAFMARYYAGA

SEQ ID NO: 54211 - protein, 410 aa, unidentified
  source 1..410: note = Corynebacterium epidermidicanis
  REGION 1..410: note = tr|A0A0G3GLX8|A0A0G3GLX8_9CORY Queuine tRNA-ribosyltransferase OS=Corynebacterium epidermidicanis; OX = 1050174 GN=tgt PE=3 SV=1
MTDTSFSLVSRLEQTKHGRTGTIHTPHGDIQTPAFIPVATKATVKTLTPEQIRETGAQAILSNAYHLYLQPGPDVVDEAGGVATFENWHGPTYTDSGGFQVMSLGVGFKKVLSMDANIAEGEVKARSKDRMAHVDEDGVDFRSVIDGSKHRFTPEVSMQIQHQLGADIMFAFDELTTLVDTKAYQEASVERTHRWAQRCLLEHDRLTHARPGKPLQSLWGVVQGAQYEDLRRKAARGLVQLSDAATAEGRRGFGGYGIGGALEKENLGTIVGWVNDELPVDKPKHLLGISEPDDIFTAVEAGADTFDCVAPTRLGRRGGVYTLDGRMTLTNARFKRDFTPIDAEVGGYVSENYTRAYIHHLLKAKEFLAGTLCTMHNLYFMIQLVDKIRATMESGDYWAFKEEFMGRYYR

SEQ ID NO: 54212 - protein, 460 aa, Corynebacterium falsenii
  REGION 1..460: note = tr|A0A418Q9C6|A0A418Q9C6_9CORY Queuine tRNA-ribosyltransferase OS=Corynebacterium falsenii; OX = 108486 GN=tgt PE=3 SV=1
MTDNARPQASADLSFEVHTRLRDCPDIDTVREQQIQAQQGAAQQQRTTEQHPASTRQFLGRTGTIHTPHGDIHTPAFIPVATKATVKTLTPEQVRSTGAQAILSNAYHLYLQPGPDIVDEAGGVAAFENWRGPTYTDSGGFQVMSLGVGYKKVLAMDTKGLSEKDIIAQQKKRMAVVDEDGVDFRSVIDGSKHRFTPEVSMQIQHELGADIMFAFDELTTLVNTRHYQEQSVARTHRWAARCLEEHQRQTDLRSHRPLQSLWGVVQGAQYEDLRRQAARGLVELSEQAESEGRRGFGGFGIGGALEKENLGTIVDWVCQELPEDKPRHLLGISEPDDLFTAIAAGADTFDCVAPTRLGRRGGVYTLDGRMNLAAARFKRDFSPIDAETGGYVSENYSRAYIHHLLKAKEFLAGTLCTLHNLHFMVGLVDQIRASIDEGRFAEFREQFLSRYYGDTWLDHI

SEQ ID NO: 54213 - protein, 428 aa, Corynebacterium flavescens
  REGION 1..428: note = tr|A0A3D1W7T5|A0A3D1W7T5_CORFL Queuine tRNA-ribosyltransferase OS=Corynebacterium flavescens; OX = 28028 GN=tgt PE=3 SV=1
MHKPPEIDLKRNLSFEIKTRLDDTSPGKHGRTGVIHTPHGDIKTPAFIPVATKATVKTLTPEQIRQTGAQAILSNAYHLYLQPGYDIVDEAGGLAEFENWHGPTYTDSGGFQVMSLGVGFKKVLAMEVANLTEGDVRAAKKERMAQVDEEGVDFKSIIDGSKHRFTPEKSMQIQHGLGADIMFAFDELTTLVDTRIYQEQSVARTHRWAKRCLDEHERLTNERTHRPKQSLWGVVQGAQYEDLRRKAARGLVQLSRAAEEAGRRPFGGFGIGGALEKENLGTIVGWVCDELPEDKPRHLLGISEPDDLFTAIEAGADTFDCVAPTRLGRRGGVYTLDGRLNLKNAQFKRDFSGIDEEFGGYVSENYSRAYIRHLLKANEFLAGTLCTMHNLEFMIRLVDNIRASIEGGYYAAYRDEFMGRYYADSSGM

SEQ ID NO: 54214 - protein, 428 aa, Corynebacterium flavescens
  REGION 1..428: note = tr|A0A1L7CJF1|A0A1L7CJF1_CORFL Queuine tRNA-ribosyltransferase OS=Corynebacterium flavescens; OX = 28028 GN=tgt PE=3 SV=1
MHKPPEIDLKRNLSFEIKTRLDDTSPGKHGRTGVIHTPHGDIKTPAFIPVATKATVKTLTPEQIRQTGAQAILSNAYHLYLQPGYDIVDEAGGLAEFENWHGPAYTDSGGFQVMSLGVGFKKVLAMEVANLTEGDVRAAKKERMAQVDEEGVDFKSIIDGSKHRFTPEKSMQIQHGLGADIMFAFDELTTLVDTRIYQEQSVARTHRWAKRCLDEHERLTNERTHRPKQSLWGVVQGAQYEDLRRKAARGLVQLSRAAEEAGRRPFGGFGIGGALEKENLGTIVGWVCDELPEDKPRHLLGISEPDDLFTAIEAGADTFDCVAPTRLGRRGGVYTLDGRLNLKNAQFKRDFSGIDEEFGGYVSENYSRAYIRHLLKANEFLAGTLCTMHNLEFMIRLVDNIRASIEGGYYAAYRDEFTGRYYADSSGM

SEQ ID NO: 54215 - protein, 428 aa, unidentified
  source 1..428: note = Corynebacterium frankenforstense
  REGION 1..428: note = tr|A0A1L7CQJ3|A0A1L7CQJ3_9CORY Queuine tRNA-ribosyltransferase OS=Corynebacterium frankenforstense DSM 45800 OX=1437875 GN=tgt PE=3 SV=1
MQTPAMDTDLSFRVDTRLDPAEAASGGHAVHGRTGVISTPHGEIATPAFIPVATKATVKTLTPEQVRSTGAQAILSNAYHLYLQPGEDIVDEAGGVAAFENWHGPTYTDSGGFQVMSQGVGFRKVLAMDLTDLTEADIRAVDKERKAHVDEDGVDFKSFIDGSLHRFTPERSMQIQHSLGADIMFAFDELTTLVDTRAYQESSVERTRRWAERCLVEHDRLTRERTHRPRQSLWGVVQGAQYEDLRRRAARGLIELSDAAQQRGARGFGGFGIGGALEKENLGTIVGWVCDELPEDKPRHLLGISEPDDLFTAVAAGADTFDCVAPTRLGRRGGVYTLDGRINLPAARFKRDFRGVDEEFGGYVSRNYSRAYLHHLLKAHEYLAGTLCTLHNLEFMVRLVDNMRAAIAEGRFAEYREEFLGRYYAGRK

SEQ ID NO: 54216 - protein, 431 aa, Corynebacterium freneyi
  REGION 1..431: note = tr|A0A095ZBY3|A0A095ZBY3_9CORY Queuine tRNA-ribosyltransferase OS=Corynebacterium freneyi DNF00450 OX=1287475 GN=tgt PE=3 SV=1
MTDSTANEENFTVVKQMDGEPGRAGIIRTPHGDVETPAFIPVGTKATVKTLTPEQIRATRAQAVLSNAYHLYLQPGPDIVEAAGGLTRFENWHGPTFTDSGGFQVMSLGVGFRKTLAMDVTGLQNDDIVAPGKERNAFVDEEGVTFRSHIDGSSHRFTPEVSMGIQHKLGADIIFAFDELTTLMNTRQYQEASVERTHRWAKRCLDEHERLTRERNQVPGRVGELAEGERPLQQLFGVVQGAQYEDLRRRAARGLVSLSDDAEAAGKLGFAGYGIGGALEKQRLGEICRWVTDELPEDRPRHLLGISEPDDIFAAVAAGADTFDCVAPTRLARRGGVYTLDGKITLTNARFKTDFGPIDPEVESYTSLNYSRAYIHHLLKAKEYLAGTLCTIHNVHFMVKLVENIRASILDGTFDEYRDEFLGRYYAGKKK

SEQ ID NO: 54217 - protein, 417 aa, unidentified
  source 1..417: note = Corynebacterium genitalium
  REGION 1..417: note = tr|D7WBH7|D7WBH7_9CORY Queuine tRNA-ribosyltransferase OS=Corynebacterium genitalium ATCC 33030 OX=585529 GN=tgt PE=3 SV=1
MTEQSVDLSFTLGTRLDGANGRTGVIHTPHGDIRTPAFIPVATKATVKTLTPEQVRAAGAQAILSNAYHLYLQPGSDIVDEAGGVAAFENWRGPTFTDSGGFQVMSLGVGFKKILAMDITDLTESDIRAANKDRMARVDDDGVDFKSVIDGSAHRFTPEKSMQIQHQLGADIMFAFDELTTLVDTRAYQEHSVERTRLWAQRCLEEHNRLTLARPGKPLQSLWGVVQGANYEDLRRQAVRGLLALDEEARAEARRGFGGFGIGGALEKEILGTITSWVTDELPEDKPRHMLGISEPDDLFTCIENGADTFDCVAPTRLGRRGGVYTLDGRMNLMAARFKRDFTGIDEEFGGYVSENYSRAYIHHLLKAKEFLAGTLCTLHNLEFMLRLVDNIRAAIDEGRFYEYRDEFLGRYYAGRG

SEQ ID NO: 54218 - protein, 415 aa, unidentified
  source 1..415: note = Corynebacterium genitalium
  REGION 1..415: note = tr|A0A3S0VRI8|A0A3S0VRI8_9CORY Queuine tRNA-ribosyltransferase OS=Corynebacterium genitalium; OX = 38288 GN=tgt PE=3 SV=1
MTDVTFEAHTQLEPAPGRHGRTGVIHTPHGDIQTPAFIPVATKATVKTLTPEQIRQTGAQAILSNAYHLYLQPGPDIVDEAGGVASFENWHGPTYTDSGGFQVMSLGVGFKKVLAMDVAGLTDSDIRAANKDRMARVDDDGVDFKSVIDGSSHRFTPEVSMQIQHQLGADIMFAFDELTTLVDTRAYQEHSVERTRRWARRCLLEHDRLTTARSGKPLQSLWGVVQGAQYEDLRRSAVRGLLDLDKEARAEGRRGFGGFGIGGALEKENLGTIVGWVTDELPVDMPRHLLGISEPDDIFTAVEAGADTFDCVAPTRLGRRGGVYTLDGRMNLAGARFKRDFAGVDEEFGGYVSENYSRAYIHHLLKAKEFLAGTLCTMHNLEFMIRLVDNIRAAIDAGDYEAYRDEFLGRYYAAN

SEQ ID NO: 54219 - protein, 479 aa, unidentified
  source 1..479: note = Corynebacterium geronticis
  REGION 1..479: note = tr|A0A3G6J2U5|A0A3G6J2U5_9CORY Queuine tRNA-ribosyltransferase OS=Corynebacterium geronticis; OX = 2079234 GN=tgt PE=3 SV=1
MGKRSGWGEWCCFPCQLMASGGGQRQIVMGKCSRRGSRRGSGRGGAKVAGMENRQVGQSPALDQDLSFDLRTELPEAQAEQPGKHGRTGVIHTPHGDIQTPAFIPVATKATVKTLTPEQIRQTGAQAILSNAYHLYLQPGQDVVDEAGGVAKFENWHGPTYTDSGGFQVMSLGVGFKKVLAMDTKGWDEKDIRARHKDRYAHVDEDGVDFRSVIDGSRHRFTPEVSMQIQHGLGADIMFAFDELTTLVDTRAYQESSVARTHRWARRCLIEHDRLTRERSHRPRQSLWGVVQGAQYEDLRRQATRGLLDLHQEALDEGRRGFGGFGVGGALEKENLGTIVGWVCDELPREMPRHLLGISEPDDLFTAIEAGADTFDCVAPTRLARRGGVYTLDGRLNLKNARFKRDFSGVDEEFGGYVSENYSRAYLHHLLKAKEFLAGTLCTMHNVEFMVRLVDNIRASIDNGTYAEFKAEFLGRYYT

SEQ ID NO: 54220 - protein, 425 aa, Corynebacterium glaucum
  REGION 1..425: note = tr|A0A1Q2HTE8|A0A1Q2HTE8_9CORY Queuine tRNA-ribosyltransferase OS=Corynebacterium glaucum; OX = 187491 GN=tgt PE=3 SV=1
MTAFTLSKELYDAPGKHGRTGTIHTPHGDIHTPAFIPVATKATVKTLTPEQIRLTEAQAILSNAYHLYLQPGADIVDEAGGVAAFENWHGPTYTDSGGFQVMSQGVGFQKVLAMDVAGLTDADIRAANKDRMARVDDDGVDFKSFIDGSSHRFTPEKSMQIQHQLGADIIFAFDELTTLVDTRQYQEHSVERTRRWAKRCLDEHDRLTRERKVTHPDRPEQSLWGVVQGAQYEDLRRQAARGLLELDEQARAEGKRGFGGFGIGGALEKENLGTIVGWVTDELPVDKPRHLLGISEPDDIFTAVEAGADTFDCVAPTRLARRGGVYTLDGRMNLTGARFKRDFAGIDEEFGGYVSQNYSRAYIHHLLKAKEFLAGTLCTIHNLEFMVRLVDNIRRAIDAGDYEAYRDEFMGRYYAGAKTQRRGLG

SEQ ID NO: 54221 - protein, 408 aa, Corynebacterium glucuronolyticum
  REGION 1..408: note = tr|C2GES1|C2GES1_9CORY Queuine tRNA-ribosyltransferase OS=Corynebacterium glucuronolyticum ATCC 51866 OX=548478 GN=tgt PE=3 SV=1
MSFHINHSDGAARTGVISTPHGDIQTPAFIPVATKATVKTLTPEQIRSTGAQAILSNAYHLYLQPGPDIVDEAGGVAAFENWHGPTYTDSGGFQVMSLGVGFKKVLAMDTANLTEQDIRAAKKDRMARVDEDGVDFRSVIDGSKHRFTPEKSMEIQHQLGADIIFAFDELTTLVDTRQYQEDSVARTHRWARRCLEAHEKLSNERTHRPEQQLWGVVQGAQYEDLRRQATRGLMELDREARAEGRRGFDGFGIGGALEKNQLGTIVGWVTDELPEDKPRHLLGISEPDDIFAAVAAGADTFDCVAPTRLGRRGGVYTLDGRLNLKAARFKRDFTPIDAELGGYVSENYTRAYIHHLLKAKEFLAGTLCTMHNLLFVVKLVDNIRYHLENGTFEEYRDEFMSRYYATGR

SEQ ID NO: 54222 - protein, 411 aa, Corynebacterium glucuronolyticum
  REGION 1..411: note = tr|A0A1W1U9S8|A0A1W1U9S8_9CORY Queuine tRNA-ribosyltransferase OS=Corynebacterium glucuronolyticum OX=39791 GN=tgt PE=3 SV=1
MSFHINHSDGAARTGVISTPHGDIQTPAFIPVATKATVKTLTPEQIRSTGAQAILSNAYHLYLQPGPDIVDEAGGVAAFENWHGPTYTDSGGFQVMSLGVGFKKVLAMDTANLTEQDIRAAKKDRMARVDEDGVDFRSVIDGSKHRFTPEKSMEIQHQLGADIIFAFDELTTLVDTRQYQEDSVARTHRWARRCLEAHERLSNERSHRPEQQLWGVVQGAQYEDLRRQATRGLMDLDRDARDAGRRGFDGFGIGGALEKNQLGTIVGWVTEELPDDKPRHLLGISEPDDIFAAVAAGADTFDCVAPTRLGRRGGVYTLDGRLNLKAARFKRDFTPIDAELGGYVSENYTRAYIHHLLKAKEFLAGTLCTMHNLLFVVKLVDNIRYHLENGTFEEYRDEFMSRYYATGRYKK

SEQ ID NO: 54223 - protein, 418 aa, Corynebacterium glutamicum; identical to SEQ ID NO: 52849
  REGION 1..418: note = tr|A0A072Z4R7|A0A072Z4R7_CORGT Queuine tRNA-ribosyltransferase OS=Corynebacterium glutamicum ATCC 14067 OX=1079988 GN=tgt PE=3 SV=1

SEQ ID NO: 54224 - protein, 418 aa, Corynebacterium glutamicum
  REGION 1..418: note = tr|A0A1R4FN12|A0A1R4FN12_CORGT Queuine tRNA-ribosyltransferase OS=Corynebacterium glutamicum; OX = 1718 GN=tgt PE=3 SV=1
MSDLSFTLNNKLADDAPGKHGRTGVIHTPHGDIATPAFIPVATKATVKTLTPEQIRETGAQAILSNAYHLYLQPGPDIVDEAGGVSAFENWHGPTYTDSGGFQVMSLGSGFKKVLAMDTTNLTRNDIKAAKKERMALVDEDGVDFKSVIDGSKHRFTPEVSMQIQHQLGADIIFAFDELTTLVDTYDYQVESVERTRRWAQRCLLEHERLTQERVGKPLQSLWGVVQGAQFEDLRRQAVKGLLDLDRQAADEGRRGFGGFGIGGALEKENLGTIVGWVCDELPEDKPRHLLGISEPDDLFVAVEAGADTFDCVAPTRLGRRGGVYTLDGRMNLTGARFKRDFKGIDEEVGGYASENYSRAYIHHLLKAKEFLAGTLCTMHNLYFMITLVDKIRASIDDGTYYEFKEEFLGRYYASKVS

SEQ ID NO: 54225 - protein, 437 aa, unidentified
  source 1..437: note = Corynebacterium glyciniphilum
  REGION 1..437: note = tr|X5DQH7|X5DQH7_9CORY Queuine tRNA-ribosyltransferase OS=Corynebacterium glyciniphilum AJ 3170 OX=1404245 GN=tgt PE=3 SV=1
MTESAVSPAPAAHDTTFELGTRVGSVDGAPAHGRTGVIHTPHGDIHTPAFIPVATKATVKTLTPEQVRSTGAEAMLSNAYHLYLQPGEDIVDTAGGVAAFENWHGPTYTDSGGFQVMSLGVGFKKVLAMDVANLTEGDIRAVKKERMALVDEDGVDFRSIIDGSKHRFTPEKSMQIQHGLGADIMFAFDELTTLVDTRLYQEESVERTHRWARRCLVEHDRLTGERSHRPLQSLWGVVQGAQYEDLRRQAARGLVELSKEAEEAGRRGFGGFGIGGALEKENLGVITGWVCDELPDEKPRHMLGISEPDDLFTAIAAGADTFDCVAPTRLARRGGVYTLDGRLNLMAGRHRRDFIPIDASLGGYVCDHYSRAYIHHLLRAKEFLAGTLCTLHNIHFMATLTRNIRTSIDEGRFEEYRDEFLGRYYADTPPELRGRQP

SEQ ID NO: 54226 - protein, 420 aa, unidentified
  source 1..420: note = Corynebacterium godavarianum
  REGION 1..420: note = tr|A0A556QE52|A0A556QE52_9CORY Queuine tRNA-ribosyltransferase OS=Corynebacterium godavarianum; OX = 2054421 GN=tgt PE=3 SV=1
MNPAHTDLSYTVGTELEPAPGRHGRTGTIHTPHGDIQTPAFIPVATKATVKTLTPEQIHQTGAQAILSNAYHLYLQPGPDIVDEAGGVAAFEHWDGPTYTDSGGFQVMSLGVGFKKVLAMDIADLDESDIRAANKDRMARVDDDGVDFKSVIDGSSHRFTPEVSMQIQHQLGADIMFAFDELTTLVDTRDYQEHSVERTRRWAKRCLDEHDRLTLARDGKPLQSLWGVVQGAQYEDLRRSAVRGLLDLDREAREEGKRGFGGFGIGGALEKENLGTIVGWVTDELPADKPRHLLGISEPDDIFTAVEAGADTFDCVAPTRLGRRGGVYTLDGRMNLTAARFKRDFAGVDEEFGGYVSQNYSRAYIHHLLKAKEFLAGTLCTMHNLEFMIRLVDNIRAAIDAGEYEAYRDEFMGRYYAKQR

SEQ ID NO: 54227 - protein, 420 aa, unidentified
  source 1..420: note = Corynebacterium gottingense
  REGION 1..420: note = tr|A0A3M0UD70|A0A3M0UD70_9CORY Queuine tRNA-ribosyltransferase OS=Corynebacterium gottingense; OX = 2041036 GN=tgt PE=3 SV=1
MNPAHTDLSYTVGTELEPAPGRHGRTGTIHTPHGDIQTPAFIPVATKATVKTLTPEQIHQTGAQAILSNAYHLYLQPGPDIVDEAGGVAAFEHWDGPTYTDSGGFQVMSLGVGFKKVLAMDIADLDESDIRAANKDRMARVDDDGVDFKSVIDGSSHRFTPEVSMQIQHQLGADIMFAFDELTTLVDTRDYQEHSVERTRRWAKRCLDEHDRLTLAREGKPLQSLWGVVQGAQYEDLRRSAVRGLLDLDREAREEGKRGFGGFGIGGALEKENLGTIVGWVTDELPADKPRHLLGISEPDDIFTAVEAGADTFDCVAPTRLGRRGGVYTLDGRMNLTAARFKRDFAGVDEEFGGYVSQNYSRAYIHHLLKAKEFLAGTLCTMHNLEFMIRLVDNIRAAIDAGEYEAYRDEFMGRYYAKQR

SEQ ID NO: 54228 - protein, 421 aa, unidentified
  source 1..421: note = Corynebacterium hadale
  REGION 1..421: note = tr|A0A269PGR5|A0A269PGR5_9CORY Queuine tRNA-ribosyltransferase OS=Corynebacterium hadale; OX = 2026255 GN=tgt PE=3 SV=1
MNPAHTDLSYTVGTELEPAPGRHGRTGTIHTPHGDIQTPAFIPVATKATVKTLTPEQIHQTGAQAILSNAYHLYLQPGPDIVDEAGGVAAFEHWDGPTYTDSGGFQVMSLGVGFKKVLAMDIADLDESDIRAANKDRMARVDDDGVDFKSVIDGSSHRFTPEVSMQIQHQLGADIMFAFDELTTLVDTRDYQEHSVERTRRWAQRCLDEHDRLTHAREGKPLQSLWGVVQGAQYEDLRRSAVRGLLDLDREAREEGKRGFGGFGIGGALEKENLGTIVGWVTDELPADKPRHLLGISEPDDIFTAVEAGADTFDCVAPTRLGRRGGVYTLDGRMNLTAARFKRDFAGVDEEFGGYVSQNYSRAYIHHLLKAKEFLAGTLCTMHNLEFMIRLVDNIRAAIDAGEYEAYRDEFMGRYYASTRD

SEQ ID NO: 54229 - protein, 446 aa, Corynebacterium halotolerans
  REGION 1..446: note = tr|M1P3P2|M1P3P2_9CORY Queuine tRNA-ribosyltransferase OS=Corynebacterium halotolerans YIM 70093 = DSM 44683 OX=1121362 GN=tgt PE=3 SV=1
MTSPEPASENSGSPAHPDTSFTLGTRLEQDGPGKHGRTGVIHTPHGDIATPAFIPVATKATVKTLTPEQIRSTGAQAILSNAYHLYLQPGHDIVDEAGGVGRFENWHGPTYTDSGGFQVMSLGSGFKKVLAMDTSGLSEADIKAAKKERKALVDEDGVDFRSVIDGSKHRFTPEKSMQIQHGLGADIMFAFDELTTLVDTRAYQEESVERTRRWAQRCLDEHDRLTHARVGKPKQSLWGVVQGAQYEDLRRQATRGLIALSDAAEAEGRRGFGGFGIGGALEKENLGTIVGWVCDELPEHKPRHLLGISEPDDLFTAVEAGADTFDCVAPTRLGRRGGVYTLDGRMNLTAARFKRDFAGVDEEFGGYVSENYSRAYIHHLLKAKEFLAGTLCTMHNLEFMIRLVDNIRAAIDAGDYEAYRDEFLGRYYAGGTPGRVRPNSGSTQRR

SEQ ID NO: 54230 - protein, 441 aa, unidentified
  source 1..441: note = Corynebacterium heidelbergense
  REGION 1..441: note = tr|A0A364VCQ8|A0A364VCQ8_9CORY Queuine tRNA-ribosyltransferase OS=Corynebacterium heidelbergense; OX = 2055947 GN=tgt PE=3 SV=1
MRPNPCAPQDPAPATDTWFQLCSRLEHVTRPGRDTAPALGRTGVLNTPHGIIRTPAFIPVATKATVKTLTPEQVKSTGAQAILSNAYHLYLQPGPDIVDEAGGVAAFENWRGPTYTDSGGFQVMSLGVGFKKVLAMDTSGLDTSDIVAQQAKRMAVVDEDGVDFRSVIDGSKHRFTPEVSMQIQHQLGADIMFAFDELTTLVNTRVYQERSVERTHRWAERCLAEHDRLTQARPHRPLQSLWGVVQGAQYEDLRRQAARGLVALSEQAEQRGCRGFGGYGIGGALEKENLGTIVDWVSQELPEEKPRHLLGISEPDDLFTAIAAGADTFDCVAPTRLGRRGGVYTLDGRINLTGARFRRDFSPIDAEVGGYVCENYSRAYIHHLLKAKEFLAGTLCTLHNLHFMVGLVDRIRQAIDEGRFEEYRDQFLSRYYGAEWKDHIG

SEQ ID NO: 54231 - protein, 441 aa, unidentified
  source 1..441: note = Corynebacterium heidelbergense
  REGION 1..441: note = tr|A0A364V859|A0A364V859_9CORY Queuine tRNA-ribosyltransferase OS=Corynebacterium heidelbergense; OX = 2055947 GN=tgt PE=3 SV=1
MRPNPCAPQDPAPATDTSFQLCSRLEHVTRPGRDTAPALGRTGVLNTPHGIIRTPAFIPVATKATVKTLTPEQVKSTGAQAILSNAYHLYLQPGPDIVDEAGGVAAFENWRGPTYTDSGGFQVMSLGVGFKKVLAMDTSGLNTSDIVAQQAKRMAVVDEDGVDFRSVIDGSKHRFTPEVSMQIQHQLGADIMFAFDELTTLVNTRVYQERSVERTHRWAERCLAEHDRLTQARPHRPLQSLWGVVQGAQYEDLRRQAARGLVALSEQAEQRGCRGFGGYGIGGALEKENLGTIVDWVSQELPEEKPRHLLGISEPDDLFTAIAAGADTFDCVAPTRLGRRGGVYTLDGRINLTGARFKRDFSPIDAEVGGYVCENYSRAYIHHLLKAKEFLAGTLCTLHNLHFMVGLVDRIRQAIDEGRFEEYRDQFLSRYYGAEWKDHIG

SEQ ID NO: 54232 - protein, 416 aa, Corynebacterium humireducens
  REGION 1..416: note = tr|A0A0B5D895|A0A0B5D895_9CORY Queuine tRNA-ribosyltransferase OS=Corynebacterium humireducens NBRC 106098 = DSM 45392 OX=1223515 GN=tgt PE=3 SV=1
MSRSDLSFTLGTELESAPGRHGRTGTIHTPHGDIRTPAFIPVATKATVKTLTPEQIEQTGAQAILSNAYHLYLQPGADIVDEAGGVGRFENWSGPTYTDSGGFQVMSQGSGYQKVISMDSSDAANGHLPAKKNMAKVDEDGVNFTSFIDGSRHRFTPEVSMQIQHQLGADIIFAFDELTTLMDTRAYQEASVDRTHRWAQRCLDEHDRLTRERADKPLQSLWGVVQGAQYEDLRRQATRGLVQLSDAAVDAGRRGFGGYGIGGALEKENLGTIVGWVCDELPRDKPRHLLGISEPDDMFTAIEAGADTFDCVAPTRLARRGGVYTLDGRMNLEGARFKRDFRGIDEEFGGYVSENYSRAYIRHLFKANEFLGMTLCTIHNLQFMIRLVDNIRDSIEGGYFEEYRAEFMGRYYANRR

SEQ ID NO: 54233 - protein, 413 aa, Corynebacterium imitans
  REGION 1..413: note = tr|A0A076NGZ1|A0A076NGZ1_9CORY Queuine tRNA-ribosyltransferase OS=Corynebacterium imitans; OX = 156978 GN=tgt PE=3 SV=1
MSTDLSFDVGTELGRARTGTIHTPHGDIQTPAFIPVATKATVKTLTPEQIRGTGAQAILSNAYHLYLQPGPEIVDEAGGVAAFENWHGPTYTDSGGFQVMSLGVGFKKVLAMDVADLHESDIRAANKDRMARVDDDGVDFKSFIDGSLHRFTPEVSMQIQHQLGADIMFAFDELTTLVDTREYQEHSVERTRRWAKRCLDEHDRLTRARTGKPLQSLWGVVQGAQYEDLRRQATRGLLELDRAAREEGKRGFGGFGIGGALEKENLGTIVGWVTDELPADKPRHLLGISEPDDIFTAVEAGADTFDCVAPTRLGRRGGVYTLDGRMNLAGARFKRDFSGVDEEFGGYVSENYSRAYIHHLLKAKEFLAGTLCTIHNLEFMIRLVDNIRAAIDAGDYEAYRDEFMGRYYANARK

SEQ ID NO: 54234 - protein, 482 aa, Corynebacterium jeikeium
  REGION 1..482: note = tr|Q4JSK5|Q4JSK5_CORJK Queuine tRNA-ribosyltransferase OS=Corynebacterium jeikeium (strain K411) OX=306537 GN=tgt PE=3 SV=1
MADNQENTSADAGAGAADLSFEVRTRLRDSESASAGAGAEGSAGAAASAGAGAEGSAGGSAGAGAGAGGSARLNGSAGALGRTGVIKTPHGNIHTPAFIPVATKATVKTLTPEQVRSTGAQAMLSNAYHLYLQPGPDIVDEGGGLAQFENWHGPTYTDSGGFQVMSLGVGYKKVLAMDTKGRSEADIIQQQKKRMAVVDEDGVDFRSVIDGSKHRFTPEVSMQIQHQLGADIMFAFDELTTLVNTRSYQEQSVARTHRWARRCLAEHQRLTDLRTHRPLQSLWGVVQGAQYEDLRRQAARGLVQLSEEAEAQGNRGFGGFGIGGALEKENLGTIVRWVAEELPEDKPRHLLGISEPDDLFTAIEAGADTFDCVAPTRLGRRGGVYTLDGRLNLMGARFKRDFSPIDAAVGGYVSENYSRAYIHHLLKAKEYLAGTLCTLHNLHFMVGLVDRIRESMEQGRFYEFREEFMGRYYGPTWRERLG

SEQ ID NO: 54235 - protein, 470 aa, Corynebacterium jeikeium
  REGION 1..470: note = tr|A0A381KIH6|A0A381KIH6_CORJE Queuine tRNA-ribosyltransferase OS=Corynebacterium jeikeium; OX = 38289 GN=tgt PE=3 SV=1
MADNQENTSADAGAGAADLSFEVRTRLRDSESASAGAGAEGSAGAAGSAGAGAAAAASGQANGGAGALGRTGVIKTPHGNIHTPAFIPVATKATVKTLTPEQVRSTGAQAMLSNAYHLYLQPGPDIVDEGGGLAAFENWHGPTYTDSGGFQVMSLGVGYKKVLAMDTKGRSEADIIQQQKKRMAVVDEDGVDFRSVIDGSKHRFTPEVSMQIQHQLGADIMFAFDELTTLVNTRSYQEQSVARTHRWARRCLAEHQRLTDLRTHRPLQSLWGVVQGAQYEDLRRQAARGLVQLSEEAEAQGNRGFGGFGIGGALEKENLGTIVRWVAEELPEDKPRHLLGISEPDDLFTAIEAGADTFDCVAPTRLGRRGGVYTLDGRLNLMGARFKRDFSPIDAAVGGYVSENYSRAYIHHLLKAKEYLAGTLCTLHNLHFMVGLVDRIRESMEQGRFYEFREEFMGRYYGPAWRERLG

SEQ ID NO: 54236 - protein, 414 aa, unidentified
  source 1..414: note = Corynebacterium kefirresidentii
  REGION 1..414: note = tr|A0A243VGJ1|A0A243VGJ1_9CORY Queuine tRNA-ribosyltransferase OS=Corynebacterium kefirresidentii; OX = 1979527 GN=tgt PE=3 SV=1
MDLSFDVGKRLPEGPGKHGRSGVIHTPHGDIQTPAFIPVATKATVKTLTPEQIRATGAQAILSNAYHLYLQPGHDIVDEAGGVAKFENWHGPTYTDSGGFQVMSLGVGFKKVLAMDVADLSDKDIRAAKKERMAQVDEDGVDFKSVIDGSKHRFTPEKSMQIQHGLGADIMFAFDELTTLVDTRTYQEESVARTHRWAKRCLDEHDRLTRERAHRPKQSLWGVVQGAQYEDLRRQATRGLLDLDRAAREEGKRGFGGFGIGGALEKENLGTIVGWVCDELPEDKPRHLLGISEPDDIFTAVEAGADTFDCVAPTRLARRGGVYTLDGRMNLTNARFKRDFAGVDEEFGGYVSENYSRAYLHHLLKAKEFLAGTLCTIHNVEFMIRLVDNIRAAIDGGYYEAYRDEFLGRYYAGK

SEQ ID NO: 54237 - protein, 374 aa, Corynebacterium kroppenstedtii
  REGION 1..374: note = tr|A0A133Z378|A0A133Z378_9CORY Queuine tRNA-ribosyltransferase OS=Corynebacterium kroppenstedtii; OX = 161879 GN=HMPREF1861_01851 PE=3 SV=1
MLTPEQIRATGAQAILSNAYHLYLQPGPDLIDEAGGVAAFENWHGPTYTDSGGFQVMSLGVGFKKVLAMDTKDIKPEDVKARHKERYAHVDDDGVNFRSVINGSKHRFTPEKSMQIQHGLGADIMFAFDELTTLMDSREYQEESVERTRRWAQRCLEEHNRLTEARVGKPLQSLWGVVQGAQYEDLRRHAAQSLVDMSDQFEAEGRRGFGGFGIGGALEKSALGTIVGWVTDVLPENKPRHLLGISEPDDLFTAIEAGADTFDCVSPTRLGRRGGVYTLDGRLSLKTARFTRDFRPIDNELEGYVSQYSRAYIHHLLKAKEFLAGTLCSIHNIQFIVSLVHNARQALIEDRFHEFRDEFLGRYYANGGRAPEWK

SEQ ID NO: 54238 - protein, 427 aa, Corynebacterium kroppenstedtii
  REGION 1..427: note = tr|C4LGK8|C4LGK8_CORK4 Queuine tRNA-ribosyltransferase OS=Corynebacterium kroppenstedtii (strain DSM 44385 / JCM 11950 / CIP 105744 / CCUG 35717); OX = 645127 GN=tgt PE =3 SV=1
MTESPTVAGSRATDTSFDVINSAGKARAGVIHTPHGDIPTPAFIPVATKATVKMLTPEQIRATGAQAILSNAYHLYLQPGPELVDEAGGVAKFENWHGPTYTDSGGFQVMSLGVGFKKVLAMDTKDIKPEDVKARHKERYAHVDEDGVNFRSVINGSKHRFTPEKSMQIQHGLGADIMFAFDELTTLMDSREYQEESVERTRRWAQRCLEEHNRLTETRAGKPLQSLWGVVQGAQYEDLRRHAAQSLVDMSDQFEAEGRRGFGGFGIGGALEKSALGTIVGWVTDVLPENKPRHLLGISEPDDLFTAIEAGADTFDCVSPTRLGRRGGVYTLDGRLSLKTARFTRDFRPIDDEIEGYVSQYSRAYIHHLLKAKEFLAGTLCSIHNIQFIVSLVHNARQALIEGRFHEYRDEFLGRYYANGGRAPEWK

SEQ ID NO: 54239 - protein, 415 aa, Corynebacterium kutscheri
  REGION 1..415: note = tr|A0A0F6QY57|A0A0F6QY57_9CORY Queuine tRNA-ribosyltransferase OS=Corynebacterium kutscheri; OX = 35755 GN=tgt PE=3 SV=1
MTDITFELGTELFDEPGKHGRTGTIHTPHGDIRTPAFIPVGTKATVKTLTPEQIRETGAQAVLSNAYHLYLQPGPDIVDEAGGVAAFENWHGPTYTDSGGFQVMSLGVGFKKVLAMNVKGWEEKDIRARHKDRLAKVDEDGVDFRSVIDGSRHRFTPEVSMQIQHQLGADIMFAFDELTTLIDTRTYQEESVARTHRWAQRCIDEHNRLTEQRVGKPLQSLWGVVQGAQYEDLRRQAARGLVEISNQAEAEGRRGFGGFGIGGALEKENLGTIVGWVCDELPKDKGRHLLGISEPDDLFTAIEAGADTFDCVAPTRLGRRGGVYTLDGRLNLTAARFKRDFTPVDAEFGGYVSENYTRAYIHHLFKAKEFLAGTLCTMHNVTFMIKLVDDIRFHMEAGSYAEFKKEFMGRYYASK

SEQ ID NO: 54240 - protein, 433 aa, unidentified
  source 1..433: note = Corynebacterium lactis
  REGION 1..433: note = tr|A0A0K2GYD6|A0A0K2GYD6_9CORY Queuine tRNA-ribosyltransferase OS=Corynebacterium lactis RW2-5; OX = 1408189 GN=tgt PE=3 SV=1
MSESKTVGFDVVKQIEGARGRAGVIHTPHGDIATPAFTPVATKATVKTLTPEQIRDTGAQAILSNAYHLYLQPGEDIVDEAGGVAAFENWRGPTYTDSGGFQVLSLGAGFKKTLAMDVSGLQKDDIVADGKERNAFVDEDGVTFRSHIDGSEHRFTPEVSMRIQHALGADILMAFDELTTLMNTRAYQESSVERTHRWARRCLQAHNELTDARGQVDGHADSLADGQLPLQQLFGVVQGAQYEDLRRKAARGLVELSREFEDAGKLGFHGFGIGGAIEKHNLGLICGWVNDELPDDRARHLLGISEPDDIFAAVEAGADTFDCVAPTRLARRGGVYTLDGRMTLTNARFKRDFRPVDAEVDSYTSLNYSRAYLHHLLKAKEYLAGTLCTIHNLYFMVHLVDNIRAAILEDRFYEYRDEFLGRYYANGGRAVGN

SEQ ID NO: 54241 - protein, 419 aa, Corynebacterium lipophiloflavum
  REGION 1..419: note = tr|C0XU34|C0XU34_CORLD Queuine tRNA-ribosyltransferase OS=Corynebacterium lipophiloflavum (strain DSM 44291 / CCUG 37336) OX=525263 GN=tgt PE=3 SV=1
MDDLSFEVGTEVGTEVGTARTGVIHTPHGDIATPAFIPVATKATVKTLTPEQIRRVGAQAILSNAYHLYLQPGPDIVDEAGGVAAFENWHGPTYTDSGGFQVMSLGVGYKKVLAMDTLHHNRNDIRAGEKERLAKVDEDGVDFKSFIDGSLHRFTPEVSMQIQHQLGADIIFAFDELTTLADTRVYQEQSVERTHRWARRCLDEHDRLTRVRADKPKQSLWGVIQGAQYEDLRRQATRGLLELDRQARGEGKRGFGGFGIGGALEKEHLGTIVGWVTDELPADKPRHLLGISEPDDIFAAVEAGADTFDCVAPTRLGRRGGVYTLDGRLNLTGARFKRDFTGIDEEFGGYVSENYSRAYIHHLLKAKEFLAGTLCTMHNLEFMIRLVDNIRAAIQDGTYPEFKAEFLGRYYAPAASPTQ

SEQ ID NO: 54242 - protein, 419 aa, unidentified
  source 1..419: note = Corynebacterium lowii
  REGION 1..419: note = tr|A0A0N8W0N2|A0A0N8W0N2_9CORY Queuine tRNA-ribosyltransferase OS=Corynebacterium lowii; OX = 1544413 GN=tgt PE=3 SV=1
MSDLFFEVGTRLDNDQPGKHGRTGVIHTPHGDIATPAFIPVATKATVKTLTPEQIRETGAQAILSNAYHLYLQPGPEIVDEAGGVAAFENWHGPTYTDSGGFQVMSLGVGFKKVLAMDVANLTKEDVRAAKKERLAKVDEDGVDFKSVIDGSAHRFTPEVSMQIQHHLGADIMFAFDELTTLVDSRAYQEESLVRTTRWAQRCLDEHHRLTLARPDKPKQSLWGVVQGAQYEDLRCKATRDLVSLSDAAEAQGKRGFGGFGIGGALEKENLGTIVGWVCDELPQHKPRHLLGISEPDDLFTAIEAGADTFDCVAPTRLGRRGGVYTLDGRLNLTNARFKRDFKGIDEEFGGYVSQNYSRAYIHHLLKAKEFLAGTLCTMHNLAFMVGLVDNIRAAIQAGDYEAYRDEFLGRYYQGTRAV

SEQ ID NO: 54243 - protein, 418 aa, Corynebacterium macginleyi
  REGION 1..418: note = tr|A0A3M0H236|A0A3M0H236_9CORY Queuine tRNA-ribosyltransferase OS=Corynebacterium macginleyi; OX = 38290 GN=tgt PE=3 SV=1
MKDLRFDIDKRLPEGPGKHGRSGVIHTPHGDIATPAFIPVATKATVKTLTPEQIRATGAQAILSNAYHLYLQPGHDVVDEAGGVAKFENWHGPTYTDSGGFQVMSLGVGFKKVIAMDLVDLTEKDIRAAKRERMAKVDDEGVDFRSIIDGSKHRFTPEKSMQIQHGLGADIMFAFDELTTLIDSRTYQEESVARTHRWAQRCLEEHDRLTRERHHRPKQSLWGVVQGAQYEDLRRQATRGLLDLDRAAREKGQRGFGGFGIGGALEKQNLGTIVGWVCDELPDDKPRHLLGISEPDDIFTAVEAGADTFDCVAPTRLARRGGVYTLDGRLNLTNARFKRDFAGIDEEWGGYVTENYSRAYLHHLLKAKEFLAGTLCTIHNVEFMVRLVDNIRAAINGDYYEDYRDEFLGRYYAASKAR

SEQ ID NO: 54244 - protein, 415 aa, Corynebacterium marinum
  REGION 1..415: note = tr|A0A0B6TIQ7|A0A0B6TIQ7_9CORY Queuine tRNA-ribosyltransferase OS=Corynebacterium marinum DSM 44953 OX=1224162 GN=tgt PE=3 SV=1
MTDLSFSLGTELESGPGRHGRTGVIHTPHGDIATPAFIPVATKATVKTLTPEQIRQTGAQAILSNAYHLYLQPGADIVDEAGGVGRFENWSGPTYTDSGGFQVMSQGSGFQKTISMDAAEAMANGHLPAKKNMAKVDEEGVDFTSFIDGSRHRFTPEVSMQIQHQLGADIIFAFDELTTLMDARDYQESSVERTRRWAQRCLVEHDRLTHERADKPLQSLWGVVQGAHYEDLRRQATRGLVELSDAAVDQGRRGFGGFGIGGALEKENLGTIVGWVCDELPKDKPRHLLGISEPDDMFTAVEAGADTFDCVAPTRLARRGGVYTLDGRMNLEGARFKRDFRGIDEEFGGYVSENYSRAYLRHLFKANEFLGMTLCTIHNLSFMIRLVDNIRASIDGGYFEEYRAEFLGRYYAGKG

SEQ ID NO: 54245 - protein, 427 aa, Corynebacterium maris
  REGION 1..427: note = tr|S5SRK2|S5SRK2_9CORY Queuine tRNA-ribosyltransferase OS=Corynebacterium maris DSM 45190; OX = 1224163 GN=tgt PE=3 SV=1
MTDTPRPAVNGSTDTTFTLGTELEKAPGRHGRTGVIHTPHGDIQTPAFIPVGTKATVKTLTPEQIRNTGAQAILSNAYHLYLQPGHDIVDEAGGLSAFTNWRGPTYTDSGGFQVMSLGSGFKKVLAMGTEGLSEADIKARDKERLAKVDEDGVDFKSFIDGSSHRFTPEFSMQIQHGLGADIMFAFDELTTLVDTRKYQEGSVERTHRWAERCLREHDRLTTERSHRPKQSLWGVVQGAQYEDLRRQATRGLIELSDAAEADGRRGFGGFGIGGALEKENLGTIVGWVCDELPVDKPRHLLGISEPDDLFTAVEAGADTFDCVAPTRLGRRGGVYTLDGRMNLTAARFKRDFRGVDEEFGGYVSENYSRAYIRHLLKANEFLAGTLCTMHNVEFMIRLVDNMRAAIEAGDFEAYRDEFLGRYYHGQK

SEQ ID NO: 54246 - protein, 416 aa, Corynebacterium mastitidis
  REGION 1..416: note = tr|A0A2N0X9A0|A0A2N0X9A0_9CORY Queuine tRNA-ribosyltransferase OS=Corynebacterium mastitidis; OX = 161890 GN=tgt PE=3 SV=1
MTDLSFDIGTRLPDSEPGRHGRTGVIHTPHGDIATPAFIPVATKATVKTLTPEQIRETGAQAILSNAYHLYLQPGPEIVDEAGGVAAFENWRGPTYTDSGGFQVMSLGVGFKKVLAMDVADLTPQDVRAAKKERLAKVDEDGVDFKSVIDGSAHRFTPEVSMRIQHHLGADIMFAFDELTTLVDSREYQEESLVRTTRWAQRCLDEHDRLTRQRSHRPPQSLWGVVQGAQYEDLRRRAARDLVALSDAAESQGRRGFGGFGIGGALEKGNLGTIVGWVCDELPEHKPRHLLGISEPDDLFTAVEAGADTFDCVAPTRLGRRGGVYTLDGRLNLTNARFKRDFRGIDEEFGGYVSQNYSRAYIHHLLKAKEFLAGTLCTMHNLAFMVGLVDNIRAAITAGEYEAFRDEFLGRYYGQH

SEQ ID NO: 54247 - protein, 412 aa, Corynebacterium matruchotii
  REGION 1..412: note = tr|C0DZM7|C0DZM7_9CORY Queuine tRNA-ribosyltransferase OS=Corynebacterium matruchotii ATCC 33806 OX=566549 GN=tgt PE=3 SV=1
MAAKADTSFTVGTEFTENGRTGIIHTPHGDIHTPAFIPVGTKATVKTLTPEQVKATGAQAVLANAYHLYLQPGPDIVDEAGGVAAFQNWGGPTYTDSGGFQVMSLGVGHKKVLMMDHVSQEPVARTEKKDRYALVDEEGVNFRSVIDGSKHRFTPEISMQIQHQLGADIMFAFDELTVLADTREYQEASVDRTHRWAKRCLDEHDKLTRERVDKPLQSLWGVVQGAQYEDLRRKATRGLIELSNQAEAEGRRGFGGFGIGGALEKENLGTIVGWVCDELPATKPRHLLGISEPDDLFRAIEAGADTFDCVAPTRLGRRGGAYTLDGRVNLTAARFKRDFEPIDAEFGGYVSENYTRAYIHHLFKAKEFLGGTLCTIHNVSFIVRLVDNIRAAINGGYYEDYKREFLGRYYHS

SEQ ID NO: 54248 - protein, 412 aa, Corynebacterium matruchotii
  REGION 1..412: note = tr|A0A3S4XWI2|A0A3S4XWI2_9CORY Queuine tRNA-ribosyltransferase OS=Corynebacterium matruchotii; OX = 43768 GN=tgt PE=3 SV=1
MAEKVDTSFTVGTEFTENGRTGTIHTPHGDIHTPAFIPVGTKATVKTLTPEQVKATGAQAVLANAYHLYLQPGPDIVDEAGGVAAFQNWGGPTYTDSGGFQVMSLGVGHKKVLMMDHVSQEPVARTEKKDRYALVDEEGVNFRSVIDGSKHRFTPEISMQIQHQLGADIMFAFDELTVLADTREYQEASVDRTHRWAKRCLDEHDKLTRERVDKPLQSLWGVVQGAQYEDLRRKATRGLIELSNQAEAEGRRGFGGFGIGGALEKENLGTIVGWVCDELPATKPRHLLGISEPDDLFRAIEAGADTFDCVAPTRLGRRGGAYTLDGRVNLTAARFKRDFEPIDAEFGGYVSENYTRAYIHHLFKAKEFLGGTLCTIHNVSFIVRLVDNIRAAINGGYYEDYKREFLGRYYHS

SEQ ID NO: 54249 - protein, 427 aa, Corynebacterium minutissimum
  REGION 1..427: note = tr|A0A376CRE5|A0A376CRE5_9CORY Queuine tRNA-ribosyltransferase OS=Corynebacterium minutissimum; OX = 38301 GN=tgt PE=3 SV=1
MTHPKPQLETDLSFDVKKELDLSGPAQPGKHGRTGVIHTPHGDIQTPAFIPVATKATVKTLTPEQIRATGAQAILSNAYHLYLQPGHDIVDEAGGVATFENWHGPTYTDSGGFQVMSLGVGFKKVLAMDVADLTESDIRAAKKERMAQVDEDGVDFKSFIDGSTHRFTPEVSMQIQHGLGADIMFAFDELTTLVDTRTYQEESVERTRRWAQRCLDEHDRLTLARGPQKPRQSLWGVVQGAQYEDLRRQAARGLVELSDRAEANGRRGFGGFGIGGALEKENLGTIVGWVCDELPVDKPRHLLGISEPDDIFTAVEAGADTFDCVAPTRLARRGGVYTLDGRLNLTNARFKRDFVGVDEEFGGYVSENYSRAYIHHLLKAKEFLAGTLCTIHNLEFMIRLVDNIRESIDGGYYEAYRDEFMGRYYAK

SEQ ID NO: 54250 - protein, 427 aa, Corynebacterium minutissimum
  REGION 1..427: note = tr|A0A0M2X7M1|A0A0M2X7M1_9CORY Queuine tRNA-ribosyltransferase OS=Corynebacterium minutissimum; OX = 38301 GN=tgt PE=3 SV=1
MTHPKPLLETDLSFDVKKELDLSGPAQPGKHGRTGVIHTPHGDIQTPAFIPVATKATVKTLTPEQIRLTGAQAILSNAYHLYLQPGHDIVDEAGGVATFENWHGPTYTDSGGFQVMSLGVGFKKVLAMDVAELTDSDIRAAKKERMAQVDEDGVDFKSFIDGSMHRFTPEVSMQIQHGLGADIMFAFDELTTLVDTRTYQEESVERTRRWAQRCLDEHDRLTLARGPQKPRQSLWGVVQGAQYEDLRRQAARGLVELSDRAEANGRRGFGGFGIGGALEKENLGTIVGWVCDELPVDKPRHLLGISEPDDIFTAVEAGADTFDCVAPTRLARRGGVYTLDGRMNLTNARFKRDFAGVDEEFGGYVSENYSRAYIHHLLKAKEFLAGTLCTIHNLEFMIRLVDNIRESIDGGYYEAYRDEFMGRYYAK

SEQ ID NO: 54251 - protein, 419 aa, Corynebacterium mustelae
  REGION 1..419: note = tr|A0A0G3H063|A0A0G3H063_9CORY Queuine tRNA-ribosyltransferase OS=Corynebacterium mustelae; OX = 571915 GN=tgt PE=3 SV=1
MESHVDTTFSLKTELEPGPGKHGRTGTIHTPHGDIHTPAFIPVGTKATVKTLTPEQVKETGAQAVLSNAYHLYLQPGPDIVDEAGGVAAFENWDGPTYTDSGGFQVMSLGVGFKKVLAMDTAGLTEGDIRARHKDRYAKVDEEGVDFRSVVDGSKHRFTPEISMQIQHKLGADIMFAFDELTTLVDTRLYQEQSVDRTHRWAKRCLDEHDRLTRERADKPLQSLWGVVQGAQYEDLRRQATRGLIQLSDQAEAEGKRGFGGFGIGGALEKENLGTIVGWVCDELPKEKPRHLLGISEPDDLFTAIEAGADTFDCVAPTRLGRRGGVYTLDGRMNLLNARFKRDFTGVDEEFGGYVSENYSRAYIHHLLKAKEFLAGTLCTMHNVTFMVRLVDNIRAAIDGGYYEDYKAEFMGRYYAKKN

SEQ ID NO: 54252 - protein, 420 aa, Corynebacterium mycetoides
  REGION 1..420: note = tr|A0A1G9Q243|A0A1G9Q243_9CORY Queuine tRNA-ribosyltransferase OS=Corynebacterium mycetoides; OX = 38302 GN=tgt PE=3 SV=1
MHDLSFEVGAQLDDAPGKHGRTGTIHTPHGDIATPAFIPVATKATVKTLTPEQIRRVGAQAILSNAYHLYLQPGPDIVDEAGGVAAFENWHGPTYTDSGGFQVMSLGVGYKKVLAMDTLHHNRNDIRAGEKERLAKVDEDGVDFKSFIDGSAHRFTPEVSMQIQHQLGADIIFAFDELTTLADTRAYQEHSVERTRRWAQRCLDEHDRLTRERAGKPKQSLWGVVQGAQYEDLRRHATRGLLDLDARARAEGRRGFGGFGIGGALEKEHLGTIVGWVTDELPADKPRHLLGISEPDDIFAAVEAGADTFDCVAPTRLGRRGGVYTLDGRLNLTGARFKRDFTGIDEEFGGYVSENYSRAYIHHLLKAKEFLAGTLCTMHNLEFMIRLVDNIRAAIQDGTYPEFKAEFLGRYYAPAASPTQ

SEQ ID NO: 54253 - protein, 421 aa, unidentified
  source 1..421: note = Corynebacterium oculi
  REGION 1..421: note = tr|A0A0Q1DWH1|A0A0Q1DWH1_9CORY Queuine tRNA-ribosyltransferase OS=Corynebacterium oculi; OX = 1544416 GN=tgt PE=3 SV=1
MTDLSFEVHTRLGNAAPGENGKHGKHGRTGVIHTPHGDIATPAFIPVATKATVKTLTPEQIKETGAQAILSNAYHLYLQPGPEIVDEAGGVAAFENWRGPTYTDSGGFQVMSLGVGFKKVLAMDVADLTTADVRAAKKERLAKVDEDGVDFKSVIDGSAHRFTPEVSMRIQHHLGADIMFAFDELTTLVDSRQYQEESLVRTTRWAQRCLDEHDRLTRERVHRPKQSLWGVVQGAQYGDLRRKAARDLVALSDAAEAQGRRGFGGFGIGGALEKENLGTIVGWVCDELPEHKPRHLLGISEPDDLFTAIEAGADTFDCVAPTRLGRRGGVYTLDGRLNLTNARFKRDFQGIDEEFGGYVSENYSRAYIHHLLKAKEFLAGTLCTMHNLTFMVRLVDNIRAAMERGDYEAFRDEFLGRYYRH

SEQ ID NO: 54254 - protein, 420 aa, unidentified
  source 1..420: note = Corynebacterium otitidis
  REGION 1..420: note = tr|I7JWS4|I7JWS4_9CORY Queuine tRNA-ribosyltransferase OS=Corynebacterium otitidis ATCC 51513 OX=883169 GN=tgt PE=3 SV=1
MAAPDNARDLTFSVSRRLPGGGRSGLIDTPHGPIATPAFVPVATKAAVKLLTPAQLRDVGAQAILSNAYHLYLQPGPDIVDEAGGVASFEAWGGPTYTDSGGFQVMSLGSGLGKVIAMEKDDVSEREARAAHRERLSKVDDDGVDFRSVVDGSRHRFTPEKSIQIQHQLGADIMFAFDELTTLFESRSYQEESVERTRRWARRCLVEHDRLTRERADEPRQSLWGVVQGAQFEDLRREAARGLVALDEEAQAEGRRGFGGFGIGGALEKHRLGEMVRWVTEELPEDKPRHLLGISEPDDIFAAVAAGADTFDCVAPTRLGRRGGVYTLDGRVNLAAAKYKRDFRGIDEEFGGVVATTYSRAYIRHLLKAKELLAGTLCSLHNLEFVIRLVANIRAAIEAGDFEAYRDEFLGRYYHAERRG

SEQ ID NO: 54255 - protein, 428 aa, unidentified
  source 1..428: note = Corynebacterium pelargi
  REGION 1..428: note = tr|A0A410WBN6|A0A410WBN6_9CORY Queuine tRNA-ribosyltransferase OS=Corynebacterium pelargi; OX = 1471400 GN=tgt PE=3 SV=1
MNNAEGEAKAQHEDIAFELGTELPEAQQQPGKHGRTGVIHTPHGDIHTPAFIPVATKATVKTLTPEQIKQTGAQAILSNAYHLYLQPGQDVVDEAGGLAEFEHWHGPTYTDSGGFQVMSLGVGFKKVLAMDTKGWEEKDIRARHKDRYAHVDEEGVNFRSVIDGSKHRFTPEVSMQIQHGLGADIMFAFDELTTLVDTRAYQESSVARTHRWARRCLIEHDRLTLERSHRPKQSLWGVVQGAQYEDLRRQATRGLLDLHREALDEGRRGFGGFGIGGALEKENLGTIVGWVCDELPREMPRHLLGISEPDDLFTAIEAGADTFDCVAPTRLARRGGVYTLDGRLNLKNARFKRDFSGIDEEFGGYVSENYSRAYLHHLLKAKEFLAGTLCTMHNVEFMVRLVDNIRASIDNGTYEEFKAEFLGRYYSK

SEQ ID NO: 54256 - protein, 426 aa, Corynebacterium phocae
  REGION 1..426: note = tr|A0A1L7D0U6|A0A1L7D0U6_9CORY Queuine tRNA-ribosyltransferase OS=Corynebacterium phocae; OX = 161895 GN=tgt PE=3 SV=1
MNQPLLDTDLSFTQGTALSEELGEGPGKHGRTGTIHTPHGDIQTPAFIPVATKATVKTLTPEQIRMTGAQAILSNAYHLYLQPGHDVVDAAGGVAAFENWHGPTYTDSGGFQVMSLGVGFKKVLAMDASELSEKDIRAAKKERMALVDEDGVDFRSIIDGSKHRFTPEVSMQIQHGLGADILFAFDELTTLVDTRQYQEESVARTHRWAKRCLDEHHRQTLARAGKPRQSLWGVIQGAQYEDLRRQATRGLVELSNQAEAEGRRGFGGFGIGGALEKENLGTIVGWVCDELPKEKPRHLLGISEPDDLFTAVAAGADTFDCVAPTRLARRGGVYTLDGRMTLTNARFKRDFAGVDEEFGGYVSNNYSRAYLHHLLKAKEFLAGTLCTIHNLEFMVRLVDNIRASIEGGYFSEYRDEFMGRYYAGKK

SEQ ID NO: 54257 - protein, 421 aa, unidentified
  source 1..421: note = Corynebacterium phoceense
  REGION 1..421: note = tr|A0A540R599|A0A540R599_9CORY Queuine tRNA-ribosyltransferase OS=Corynebacterium phoceense; OX = 1686286 GN=tgt PE=3 SV=1
MTKPLLDTDLSFDVHTRLPEGTGKHGRTGVIHTPHGDIQTPAFIPVATKATVKTLTPEQIRQTGAQAILSNAYHLYLQPGHDIVDEAGGVAEFENWHGPTYTDSGGFQVMSLGVGFKKVLAMDVANLTEGDIRAAKKERMAQVDEDGVDFKSIIDGSKHRFTPEVSMQIQHSLGADIMFAFDELTTLVDTRQYQEESVARTHRWAKRCLDEHDRLTNARAGKPRQSLWGVVQGAQYEDLRRQATRGLVQLSDAAVAAGMRGFGGFGIGGALEKENLGTIVGWVCDELPEDKPRHLLGISEPDDLFTAIEAGADTFDCVAPTRLGRRGGVYTLDGRLNLMGAKFKRDFKGIDEEFGGYVSENYSRAYIHHLLKAHEFLAGTLCTMHNLEFMIRLVDNIRASIDGGYYEAFRDEFMGRYYAKK

SEQ ID NO: 54258 - protein, 432 aa, Corynebacterium pilosum
  REGION 1..432: note = tr|A0A376CMF9|A0A376CMF9_9CORY Queuine tRNA-ribosyltransferase OS=Corynebacterium pilosum; OX = 35756 GN=tgt PE=3 SV=1
MTEHPTAPTPAQDETQHDDLSFTLGARLEQRPGRNGRAGMIHTPHGDIQTPAFIPVATKATVKTLTPEQIRNTGAQAILSNAYHLYLQPGHDIVDEAGGLAQFTNWHGPTYTDSGGFQVMSLGVGFKKVLAMDTANLTREDIRAKDKERMAHVDDDGVNFKSFIDGSSHRFTPEFSMQIQHGLGADIMFAFDELTTLVDTREYQEESVERTRRWAQRCIDEHTRLTRERPHRPKQSLWGVVQGAQYEDLRRHATRGLLELDRNARAEGKRGFGGFGIGGALEKENLGTIVGWVTDELPDEKPRHMLGISEPDDIFLAVEAGADTFDCVAPTRLGRRGGVYTLDGRLNLTGARFKRDFTGVDEEFGGYVSENYSRAYIHHLLKAKEFLAGTLCTMHNLEFMIRLVDNIRESIHQGRFEEYRDHFLGRYYHSKR

SEQ ID NO: 54259 - protein, 413 aa, unidentified
  source 1..413: note = Corynebacterium pollutisoli
  REGION 1..413: note = tr|A0A1X7IM84|A0A1X7IM84_9CORY Queuine tRNA-ribosyltransferase OS=Corynebacterium pollutisoli; OX = 1610489 GN=tgt PE=3 SV=1
MTDLSFTLGTELGSGPGRHGRTGTIHTPHGDIQTPAFIPVATKATVKTLTPEQIEQTGAQAILSNAYHLYLQPGADIVDEAGGVGRFENWSGPTYTDSGGFQVMSQGVGFQKTLTMEQKDGQDWGREKKSMARVDEEGVDFVSFIDGSRHRFTPEISMQIQHQLGADIIFAFDELTTLMDTRSYQEASVERTHRWAARCIDEHNRQTALREGRPLQSLWGVIQGAQYEDLRRQATRDLVELSDASVAAGQRGFGGYGIGGALEKENLGTIVGWVCDELPVDKPRHLLGISEPDDIFTAVEAGADTFDCVAPTRLARRGGVYTLDGRLNLVNAGFKRDFRGIDEEFGGYVSENYSRAYLRHLFKANEFLGMTLCTIHNLSFMIRLVDNVRASIEGGYFEEYRAEFMGRYYAKKK

SEQ ID NO: 54260 - protein, 416 aa, Corynebacterium propinquum
  REGION 1..416: note = tr|A0A433FIN0|A0A433FIN0_9CORY Queuine tRNA-ribosyltransferase OS=Corynebacterium propinquum; OX = 43769 GN=tgt PE=3 SV=1
MTDLSFTVNTHLDLPGMQGRTGTITTPHGPINTPAFIPVATKATVKTLSPEQIRLTGAQAILSNAYHLYLQPGHDIVDEAGGVAKFESWHGPTYTDSGGFQVMSLGVGHKKTIKMDYEQEMAEYTPRKVNKDSLAIVDEDGVNFRSVLDGSRHRFTPEKSLQIQHGLGADIMFAFDELTTLVDTRAYQEESVARTHRWAERCLLEHDRLTRERAHRPKQSLWGVIQGAQHEDLRRQATRGLVELSREAEAAGRRGFGGYGIGGALDKGMLGTIVGWVCEELPDDKPRHLLGISEPDDVFWAIENGADTFDCVSPTRLGRRGGVYTLDGRMNLKNKRFERDFSGVDEEFGGYVSQNYSRAYIRHLLKAKEFLAGTLCTIHNLEFMIRLVDNIRQSIDGGYYREYRDEFLGRYYANTK

SEQ ID NO: 54261 - protein, 416 aa, Corynebacterium propinquum
  REGION 1..416: note = tr|A0A2W5LFK7|A0A2W5LFK7_9CORY Queuine tRNA-ribosyltransferase OS=Corynebacterium propinquum; OX = 43769 GN=tgt PE=3 SV=1
MTDLSFTVNTHLDLPGMQGRTGTITTPHGPINTPAFIPVATKATVKTLSPEQIRLTGAQAILSNAYHLYLQPGHDIVDEAGGVAKFESWHGPTYTDSGGFQVMSLGVGHKKTIKMDYEQEMAEYTPRKVNKDSLAIVDEDGVNFRSVLDGSRHRFTPEKSLQIQHGLGADIMFAFDELTTLVDTRAYQEESVARTHRWAERCLVEHDRLTRERAHRPKQSLWGVIQGAQHEDLRRQATRGLVSLSQEAEAAGRRGFGGYGIGGALDKGMLGTIVGWVCDELPDDKPRHLLGISEPDDVFWAIENGADTFDCVSPTRLGRRGGVYTLDGRMNLKNKRFERDFSGVDEEFGGYVSQNYSRAYIRHLLKAKEFLAGTLCTIHNLEFMIRLVDNIRQSIGGGYYREYRDEFLGRYYAHTK

SEQ ID NO: 54262 - protein, 435 aa, unidentified
  source 1..435: note = Corynebacterium provencense
  REGION 1..435: note = tr|A0A2Z3YMF6|A0A2Z3YMF6_9CORY Queuine tRNA-ribosyltransferase OS=Corynebacterium provencense; OX = 1737425 GN=tgt PE=3 SV=1
MTDSADPVASLPSDTTFDPGIRIGTTDGKPSHGRTGVIHTPHGDIHTPAFIPVATKATVKTLTPEQVRSTGAEAILSNAYHLYLQPGEDIVEEAGGLAEFENWHGPTYTDSGGFQVMSLGVGFKKVLAMDVANLTEGDIRAAKKERMALVDEDGVDFRSIIDGSSHRFTPEKSMQIQHSLGADIMFAFDELTTLVDTRRYQEESVARTHRWAQRCLAEHDRLTTLRSDRPRQSLWGVVQGAQYEDLRRQAARGLVELSRQAEEEGRRGFGGFGIGGALEKENLGTITGWVCDELPEDRPRHMLGISEPDDLFTAVAAGADTFDCVAPTRLGRRGGVYTLDGRLNLVAARHRRDFIPIDTETGGYVNANYTRAYIHHLLKAHEFLAGTLCTLHNINFMMTLTRNIRRSVEEGRFEEYRDEFLGRYYAGRAPELRGR

SEQ ID NO: 54263 - protein, 416 aa, Corynebacterium pseudodiphtheriticum
  REGION 1..416: note = tr|A0A433ITJ9|A0A433ITJ9_9CORY Queuine tRNA-ribosyltransferase OS=Corynebacterium pseudodiphtheriticum OX=37637 GN=tgt PE=3 SV=1
MTDLSFTVNTHLDLPGMQGRTGTITTPHGPINTPAFIPVATKATVKTLSPEQIRLTGAQAILSNAYHLYLQPGHDIVDEAGGVAKFESWHGPTYTDSGGFQVMSLGVGHKKTIKMDYEQEMAEFTPRKVNKDSLAIVDEDGVNFRSVLDGSRHRFTPEKSLQIQHGLGADIMFAFDELTTLVDTRAYQEESVARTHRWAERCLAEHDRLTRERAHRPKQSLWGVIQGAQHEDLRRQATRGLVSLSQEAEAAGRRGFGGYGIGGALDKGMLGTIVGWVCEELPDDKPRHLLGISEPDDVFWAIENGADTFDCVSPTRLGRRGGVYTLDGRMNLKNKRFERDFSGVDEEFGGYVSQNYSRAYIRHLLKAKEFLAGTLCTIHNLEFMIRLVDNIRQSIDGGYYREYRDEFLGRYYAHTK

SEQ ID NO: 54264 - protein, 416 aa, Corynebacterium pseudodiphtheriticum
  REGION 1..416: note = tr|U2G3F1|U2G3F1_9CORY Queuine tRNA-ribosyltransferase OS=Corynebacterium pseudodiphtheriticum 090104 OX=1381111 GN=tgt PE=3 SV=1
MTDLSFTVNTHLDLAGMQGRTGTITTPHGPINTPAFIPVATKATVKTLSPEQIRLTGAQAILSNAYHLYLQPGHDIVDEAGGVAKFESWHGPTYTDSGGFQVMSLGVGHKKTIKMDYEQEMAEFTPRKVNKDSLAIVDEDGVNFRSVLDGSRHRFTPEKSLQIQHGLGADIMFAFDELTTLVDTRAYQEESVARTHRWAERCLVEHDRLTRERAHRPKQSLWGVIQGAQHEDLRRQATRGLVSLSQEAEAAGRRGFGGYGIGGALDKGMLGTIVGWVCEELPDDKPRHLLGISEPDDVFWAIENGADTFDCVSPTRLGRRGGVYTLDGRMNLKNKRFERDFSGVDEEFGGYVSQNYSRAYIRHLLKAKEFLAGTLCTIHNLEFMIRLVDNIRKSIDGGYYREYRDEFLGRYYAHTK

SEQ ID NO: 54265 - protein, 414 aa, unidentified
  source 1..414: note = Corynebacterium pseudogenitalium
  REGION 1..414: note = tr|E2S5X1|E2S5X1_9CORY Queuine tRNA-ribosyltransferase OS=Corynebacterium pseudogenitalium ATCC 33035 OX=525264 GN=tgt PE=3 SV=1
MDLSFDVGKRLPEGPGKHGRSGVIHTPHGDIQTPAFIPVATKATVKTLTPEQIRSTGAQAILSNAYHLYLQPGHDIVDEAGGVAEFENWHGPTYTDSGGFQVMSLGVGFKKVLAMDIADLSDKDIRAAKKERMAQVDEDGVDFKSVIDGSKHRFTPEKSMQIQHGLGADIMFAFDELTTLVDTRTYQEESVARTHRWAKRCLDEHDRLTRERAHRPKQSLWGVVQGAQYEDLRRQATRGLLDLDRAAREDGKRGFGGFGIGGALEKENLGTIVGWVCDELPEDKPRHLLGISEPDDIFTAVEAGADTFDCVAPTRLARRGGVYTLDGRMNLTNARFKRDFAGVDEEFGGYVSENYSRAYLHHLLKAKEFLAGTLCTIHNVEFMIRLVDNIRAAIDGGYYEAYRDEFLGRYYAGK

SEQ ID NO: 54266 - protein, 428 aa, unidentified
  source 1..428: note = Corynebacterium pseudopelargi
  REGION 1..428: note = tr|A0A3G6IX46|A0A3G6IX46_9CORY Queuine tRNA-ribosyltransferase OS=Corynebacterium pseudopelargi; OX = 2080757 GN=tgt PE=3 SV=1
MNNAEGEAKAQHEDIAFELGTELPDAQQQPGKHGRTGVIHTPHGDIHTPAFIPVATKATVKTLTPEQIKQTGAQAILSNAYHLYLQPGQDVVDEAGGLAEFEHWHGPTYTDSGGFQVMSLGVGFKKVLAMDTKGWEEKDIRARHKDRYAHVDEEGVNFRSVIDGSKHRFTPEVSMQIQHGLGADIMFAFDELTTLVDTRAYQESSVARTHRWARRCLIEHDRLTQERSHRPKQSLWGVVQGAQYEDLRRQATRGLLDLHQEALDAGRRGFGGFGIGGALEKENLGTIVGWVCDELPREMPRHLLGISEPDDLFTAIEAGADTFDCVAPTRLARRGGVYTLDGRLNLKNARFKRDFSGIDEEFGGYVSENYSRAYLHHLLKAKEFLAGTLCTMHNVEFMVRLVDNIRASIDNGTYEEFKAEFLGRYYGH

SEQ ID NO: 54267 - protein, 413 aa, Corynebacterium pseudotuberculosis
  REGION 1..413: note = tr|D9QDR2|D9QDR2_CORP2 Queuine tRNA-ribosyltransferase OS=Corynebacterium pseudotuberculosis (strain C231) OX=681645 GN=tgt PE=3 SV=1
MDTTFELKTELYDEPGRHGRTGVIHTPHGDIATPAFIPVATKATVKTLTPPQIRSTGAQAILSNAYHLYLQPGHDVVDEAGGVAAFENWNGPTYTDSGGFQVMSLGVGFKKVLAMDVKGYEEADIRAKKRERMAKVDEDGVDFRSVLNGSRHRFTPEVSMQIQHGLGADIMFAFDELTTLIDTRDYQVNSVARTHRWAERCLIEHDRLTNERVGKPLQSLWGVVQGAQYEDLRRKAIRGLLELNDQAEAAGRRGFGGFGIGGALEKENLGTIVGWVCDEIPKEKPRHLLGISEPDDLFTAIEAGADTFDCVAPTRLGRRGGVYTLDGRMNLTNAKFKRDFTPIDAEFGGPTVEYTRAYINHLLKAKEFLAGTLCTMHNVAFMVQLVDNIRASIDNGTYEEYKAEFMGRYYARR

SEQ ID NO: 54268 - protein, 413 aa, Corynebacterium pseudotuberculosis; identical to SEQ ID NO: 54267
  REGION 1..413: note = tr|A0A1L6CXT9|A0A1L6CXT9_CORPS Queuine tRNA-ribosyltransferase OS=Corynebacterium pseudotuberculosis OX=1719 GN=tgt PE=3 SV=1

SEQ ID NO: 54269 - protein, 407 aa, Corynebacterium pyruviciproducens
  REGION 1..407: note = tr|S2ZDH3|S2ZDH3_9CORY Queuine tRNA-ribosyltransferase OS=Corynebacterium pyruviciproducens ATCC BAA-1742 OX=1125779 GN=tgt PE=3 SV=1
MSFRINHTHSAARTGVISTPHGDIYTPAFIPVATKATVKTLTPEQIRSTGAQAILSNAYHLYLQPGPDIVDEAGGVAKFENWNGPTYTDSGGFQVMSLGVGFKKVLAMEIADLTEKDIRAAKKDRMARVDEDGVDFRSVIDGSKHRFTPEKSMEIQHQLGADIIFAFDELTTLIDTRQYQENSVARTHRWAKRCLEAHERLSNERSHRPEQQLWGVVQGAQYQDLRRRAARGLMDLDREARAAGHRGFDGFGIGGALEKHSLGTIVGWVTDELPEDKPRHLLGISEPDDIFAAVASGADTFDCVAPTRLGRRGGVYTLDGRLNLKAARFKRDFTPIDAELGGYVSENYTRAYIHHLLKAKEFLAGTLCTMHNLFFVVKLVDSIRHHLEQGTFEEYRDEFMSRYYARS

SEQ ID NO: 54270 - protein, 407 aa, Corynebacterium pyruviciproducens
  REGION 1..407: note = tr|A0A2I1VSW4|A0A2I1VSW4_9CORY Queuine tRNA-ribosyltransferase OS=Corynebacterium pyruviciproducens OX=598660 GN=tgt PE=3 SV=1
MSFRINHTHGAARTGVISTPHGDIHTPAFIPVATKATVKTLTPEQIRSTGAQAILSNAYHLYLQPGPDIVDEAGGVAKFENWNGPTYTDSGGFQVMSLGVGFKKVLAMEIADLTEKDIRAAKKDRMARVDEDGVDFRSVIDGSKHRFTPEKSMEIQHQLGADIIFAFDELTTLIDTRQYQENSVARTHRWAKRCLEAHERLSNERSHRPEQQLWGVVQGAQYEDLRRRAARGLMDLDREARAAGHRGFDGFGIGGALEKHSLGTIVGWVTDELPEDKPRHLLGISEPDDIFAAVAAGADTFDCVAPTRLGRRGGVYTLDGRLNLKAARFKRDFTPIDAELGGYVSENYTRAYIHHLLKAKEFLAGTLCTMHNLFFVVKLVDSIRHHLEQGTFEEYRDEFMSRYYARS

SEQ ID NO: 54271 - protein, 518 aa, Corynebacterium renale
  REGION 1..518: note = tr|A0A2A9DL90|A0A2A9DL90_9CORY Queuine tRNA-ribosyltransferase OS=Corynebacterium renale OX=1724; GN = tgt PE=3 SV=1
MPYSPKPLLNLPPRTQCTHPHLNPGTHSSAWVQNVRNTRNTRNMRNPRPAHAHETPPSAPRVTHTTRPLESTTMTAHENPAPNNTTNPATNSTPNPTPTPHAQDTTFELGTEVFNEPGKHGRTGVIHTPHGAIQTPAFIPVATKATVKTLTPEQIRATGAQAILSNAYHLYLQPGHDIVDEAGGVAAFENWHGPTYTDSGGFQVMSLGVGFKKVLAMDTAGLTDADIRAQKKERMAVVDEDGVDFRSILDGSKHRFTPEVSMQIQHGLGADIMFAFDELTTLVDTREYQEQSVARTHRWAQRCIDEHNRLTQERVGKPLQSLWGVVQGAQYEDLRRQATRGLVALSDAAEAEGRRGFGGFGIGGALEKENLGTIVGWVCDELPVEKPRHLLGISEPDDLFTAIEAGADTFDCVAPTRLGRRGGVYTLDGRMNLTNARFKRDFRGIDEELGGYVSENYSRAYIRHLLKANEFLAGTLCTMHNLYFMVGLVDKIRAAMEAGDYEAFRDEFMGRYYAGKAR

SEQ ID NO: 54272 - protein, 542 aa, Corynebacterium resistens
  REGION 1..542: note = tr|F8E3B2|F8E3B2_CORRG Queuine tRNA-ribosyltransferase OS=Corynebacterium resistens (strain DSM 45100 / JCM 12819 / GTC 2026) OX=662755 GN=tgt; PE = 3 SV=1
MAERAGEVREWKAGRGRGIRKRGSYGNECADRSLSSRCTNRELPSRHANPDLPHDRLNSGSMTAQSHANGNTPHTDYPQHAKSDSAGGSNTARTSCNTARTSDTTFTLGHALGEITDPSSATPEGTKGAVHGRTGVIHTPHGDIETPAFIPVATKATVKTLTPDQIRETGAQAILSNAYHLYLQPGPDIVDEAGGVSAFENWHGPTYTDSGGFQVMSLGVGFKKVLAMDTAGLAEKDIRARSKDRMAHVDEDGVDFRSVIDGSKHRFTPEVSMQIQHQLGADIIFAFDELTTLVDTRQYQEQSVERTHRWAQRCLDEHDRLTNLRTHRPLQSLWGVVQGAQYEDLRRQAARGLVEISDQAVAAGRRGFGGFGIGGALEKENLGTIVGWVCDELPKEKPRHLLGISEPDDLFTAIAAGADTFDCVAPTRLGRRGGVYTLNGRMNLTGARFKRDFTPVDAEVGGYVSENFTRAYIHHLLKAKEFLAGTLCTMHNLHFMIRLVDNIREAMKEGRFEEYRAEFMSRYYGPDWADRVVPTNFIDGVR

SEQ ID NO: 54273 - protein, 415 aa, Corynebacterium riegelii
  REGION 1..415: note = tr|A0A2I1V9I8|A0A2I1V9I8_9CORY Queuine tRNA-ribosyltransferase OS=Corynebacterium riegelii; OX = 156976 GN=tgt PE=3 SV=1
MKEFDLTTELYNEPGKHGRTGVIHTPHGDIQTPAFIPVATKATVKTLTPEQIRSTGAQAILSNAYHLYLQPGPDIVDEAGGVAAFENWHGPTYTDSGGFQVMSLGVGFKKVLAMDTAGLVEGDIRAANKDRMARVDDDGVDFKSFIDGSSHRFTPEVSMQIQHQLGADIMFAFDELTTLVDTREYQEHSVERTRRWAKRCLDEHHRLTELRTHRPKQSLWGVVQGAQYEDLRRHATRGLLELDQKAREAGRRGFGGFGIGGALEKENLGMIVGWVTDELPADKPRHLLGISEPDDIFTAVEAGADTFDCVAPTRLGRRGGVYTLDGRLNLMGARFKRDFSGVDEEFGGYVSENYSRAYIHHLLKAKEFLAGTLCTMHNVEFMVRLVDNIRAAIDNGNYEAFRDEFLGRYYAGKKS

SEQ ID NO: 54274 - protein, 415 aa, Corynebacterium riegelii
  REGION 1..415: note = tr|A0A0K1RDQ6|A0A0K1RDQ6_9CORY Queuine tRNA-ribosyltransferase OS=Corynebacterium riegelii; OX = 156976 GN=tgt PE=3 SV=1
MKEFDLTTELYNEPGKHGRTGVIHTPHGDIQTPAFIPVATKATVKTLTPEQIRSTGAQAILSNAYHLYLQPGPEIVDEAGGVAAFENWHGPTYTDSGGFQVMSLGVGFKKVLAMDTAGLVEGDIRAANKDRMARVDDDGVDFKSFIDGSSHRFTPEVSMQIQHQLGADIMFAFDELTTLVDTREYQEHSVERTRRWAKRCLDEHHRLTELRTHRPKQSLWGVVQGAQYEDLRRHATRGLLELDREAREAGRRGFGGFGIGGALEKENLGTIVGWVTDELPADKPRHLLGISEPDDIFTAVEAGADTFDCVAPTRLGRRGGVYTLDGRLNLMGARFKRDFSGVDEEFGGYVSENYSRAYIHHLLKAKEFLAGTLCTMHNVEFMVRLVDNIRAAIDNGNYEAFRDEFLGRYYAGKQK

SEQ ID NO: 54275 - protein, 418 aa, unidentified
  source 1..418: note = Corynebacterium segmentosum
  REGION 1..418: note = tr|A0A3S5ESY7|A0A3S5ESY7_9CORY Queuine tRNA-ribosyltransferase OS=Corynebacterium segmentosum; OX = 43990 GN=tgt PE=3 SV=1
MKDLSFDIAKRLPEGPGKHGRSGIIHTPHGDIATPAFIPVATKATVKTLTPEQIRATGAQAILSNAYHLYLQPGHDIVDEAGGVAKFENWHGPTYTDSGGFQVMSLGVGFKKVIAMDLADLTEKDIRAAKRERMAKVDEEGVDFRSIIDGSKHRFTPEKSMQIQHGLGADIMFAFDELTTLIDSRTYQEESVARTHRWAQRCLEEHDRLTRERYHRPKQSLWGVVQGAQYEDLRRQATRGLLDLDRAAREKGRRGFGGFGIGGALEKQNLGTIVGWVCDELPDDKPRHLLGISEPDDIFTAVEAGADTFDCVAPTRLARRGGVYTLDGRLNLTNARFKRDFKGIDEEFGGYVTENYSRAYLHHLLKAKEFLAGTLCTIHNVEFMVRLVDNIRAAINGGYYEDYRDEFLGRYYAASKAR

SEQ ID NO: 54276 - protein, 430 aa, Corynebacterium simulans
  REGION 1..430: note = tr|A0A127NUX9|A0A127NUX9_9CORY Queuine tRNA-ribosyltransferase OS=Corynebacterium simulans; OX = 146827 GN=tgt PE=3 SV=1
MIEQQPPFPAPKLETDLSFDVRTRLDQAGPGKHGRSGTIHTPHGDIQTPAFIPVATKATVKTLTPEQIRQTGAQAILSNAYHLYLQPGHDIVDEAGGVATFENWHGPTYTDSGGFQVMSLGVGFKKVLAMDTANLTEKDIRAAKKERMAQVDEDGVDFKSVIDGSKHRFTPEVSMQIQHGLGADIMFAFDELTTLIDSRAYQEESVARTHRWAQRCLDEHHRLTEERGPQKPRQSLWGVVQGAQYEDLRRQATRGLVELSQAAEADGKRGFGGFGIGGALEKENLGTIVGWVCDELPEDKPRHLLGISEPDDLFTAIEAGADTFDCVAPTRLGRRGGVYTLDGRLNLKGARFKRDFTGIDEEFGGYVSENYSRAYIHHLLKANEFLAGTLCTMHNLTFMIRLVDNIRASIDGGYYEAYRDEFMGRYYAGK

SEQ ID NO: 54277 - protein, 427 aa, Corynebacterium singulare
  REGION 1..427: note = tr|A0A0B6EXP9|A0A0B6EXP9_9CORY Queuine tRNA-ribosyltransferase OS=Corynebacterium singulare; OX = 161899 GN=tgt PE=3 SV=1
MTHPKPQLETDLSFDVKKELDLSGPAQPGKHGRTGVIHTPHGDIQTPAFIPVATKATVKTLTPEQIRLTGAQAILSNAYHLYLQPGHDIVDEAGGVATFENWHGPTYTDSGGFQVMSLGVGFKKVLAMDVADLTESDIRAAKKERMAQVDEDGVDFKSIIDGSSHRFTPEVSMQIQHGLGADIMFAFDELTTLVDTRTYQEESVERTRRWAQRCLDEHDRLTQARGPQKPRQSLWGVVQGAQYEDLRRQAASGLVELSDRAEANGKRGFGGFGIGGALEKENLGTIVGWVCDELPVDKPRHLLGISEPDDIFTAVEAGADTFDCVAPTRLARRGGVYTLDGRLNLTNARFKRDFSGVDEEFGGYVSENYSRAYIHHLLKAKEFLAGTLCTIHNLEFMIRLVDNIRESIDGGYYEAYRDEFMGRYYAK

SEQ ID NO: 54278 - protein, 433 aa, Corynebacterium sp.
  REGION 1..433: note = tr|S2XTV4|S2XTV4_9CORY Queuine tRNA-ribosyltransferase OS=Corynebacterium sp. HFH0082; OX = 1078764 GN=tgt PE=3 SV=1
MSQSRTTGFDVVKQIEGARGRAGTIHTPHGDIATPAFIPVGTKATVKTLTPEQVRSTGAQAMLSNAYHLYLQPGEEIVDQAGGLAKFSNWNGPTFTDSGGFQVLSLGAGFKKTLAMDVTGMQKDDIVAEGKERNAFVDEDGVTFRSHIDGSEHRFTPEVSMRIQHALGADIMMAFDELTTLMNTRGYQEASVERTHRWARRCLEAHNELTISRGQVDAHVHSLDDDQLPIQQLFGVVQGAQYEDLRRKAARGLVELSREFEDAGQLGFHGYGIGGAIEKQNLGLICGWVNDELPDDRARHLLGISEPDDIFAAVEAGADTFDCVAPTRLARRGGVYTLDGRMTLTNARFKNDFRPVDAEVPSYTSLNYSRAYLHHLLKAKEYLAGTLCTIHNLFFMVQLVENIRAAILEDRFFEYRDEFMGRYYANGGRAVGN

SEQ ID NO: 54279 - protein, 416 aa, Corynebacterium sp.
  REGION 1..416: note = tr|A0A1A0JU29|A0A1A0JU29_9CORY Queuine tRNA-ribosyltransferase OS=Corynebacterium sp. EPI-003-04-2554_SCH2473622 OX=1834153 GN=tgt PE=3 SV=1
MTDLSFTVNTHLDLPGMQGRTGTITTPHGPINTPAFIPVATKATVKTLSPEQIRLTGAQAILSNAYHLYLQPGHDIVDEAGGVAKFESWHGPTYTDSGGFQVMSLGVGHKKTIKMDYEQEMAEYTPRKVNKDSLAIVDEDGVNFRSVLDGSRHRFTPEKSLQIQHGLGADIMFAFDELTTLVDTRAYQEESVARTHRWAERCLVEHDRLTRERAHRPKQSLWGVIQGAQHEDLRRQATRGLVSLSQEAEAAGRRGFGGYGIGGALDKGMLGTIVGWVCEELPDDKPRHLLGISEPDDVFWAIENGADTFDCVSPTRLGRRGGVYTLDGRMNLKNKRFERDFSGVDEEFGGYVSQNYSRAYIRHLLKAKEFLAGTLCTIHNLEFMIRLVDNIRKSIDGGYYREYRDEFLGRYYAHTK

SEQ ID NO: 54280 - protein, 424 aa, Corynebacterium sphenisci
  REGION 1..424: note = tr|A0A1L7CVC2|A0A1L7CVC2_9CORY Queuine tRNA-ribosyltransferase OS=Corynebacterium sphenisci DSM 44792 OX=1437874 GN=tgt PE=3 SV=1
MEHAGFRITARVEGTAARAGVIGTPHGEIATPAFIPVATKATVKTLTADQIRATGAQAILANAYHLYLRPGPEVVDAAGGLAEFANWHGPTYTDSGGFQVMSLGVGFRKTLAMDVSGLADDDVVAPGKQRNAFVDDEGVTFRSHVDGSTHRFTPEVSMGIQHALGADIIFAFDELTTLMNTRGYQEASVERTRRWARRCLAEHDRLSRERNQRPGPAGALPPGARPAQQLWGVVQGAQYEDLRRAAARGLVALSDAAEAAGRPGFAGYGIGGAIEKARLGDIVGWVTAELPENRPRHLLGISEPDDVFAAVAAGADTFDCVAPTRLARRGGVYTRDGRLTLTNARFRRDFGPIDAETPSPTAGYSRAYLHHLLKSKEYLAGTICTLHNVFFMVDLVDRIRESIRAGRFPEFREEFLGRYYAGAK

SEQ ID NO: 54281 - protein, 424 aa, Corynebacterium spheniscorum
  REGION 1..424: note = tr|A0A1I2VF58|A0A1I2VF58_9CORY Queuine tRNA-ribosyltransferase OS=Corynebacterium spheniscorum; OX = 185761 GN=tgt PE=3 SV=1
MTDTTSDLSFTLGTQLEAKSGTHGRSGIIHTPHGDIHTPAFIPVATKATVKTLTPEQVRSTGAQAILSNAYHLYLQPGPDIVDEAGGVAAFENWHGPTYTDSGGFQVMSLGVGFKKVLAMDTTDLSEKDIRAARKDRYAHVDEEGVDFRSVIDGSRHRFTPEISMQIQHQLGADIMFAFDELTTLIDTREYQEASVERTHRWARRCLIEHDRLTRERHDKPKQSLWGVVQGAQYEDLRRQATRGLIELDREAQAEGRRGFGGFGIGGALEKENLGTIVGWVCEELPAEKPRHLLGISEPDDLFAAIEAGADTFDCVAPTRLGRRGGVYTLDGRLNLTAARFKRDFSGVDEEFGGYVSENYSRAYIHHLMKAKEFLGGTLCTLHNLSFMVALVDNIRAAIDNGDFYAYRDEFLGRYYAGKQRPLN

SEQ ID NO: 54282 - protein, 422 aa, Corynebacterium stationis
  REGION 1..422: note = tr|A0A3D3II73|A0A3D3II73_9CORY Queuine tRNA-ribosyltransferase OS=Corynebacterium stationis; OX = 1705 GN=tgt PE=3 SV=1
MSHEHADDLSFDVTTRLGDGSPGKHGRTGVIHTPHGDIQTPAFIPVATKATVKTLTPEQIKSTGAQAILSNAYHLYLQPGHDIVDEAGGVAAFENWDGPTYTDSGGFQVMSLGVGFKKVLAMDVAKLTEGDIRAAKKERLAHVDEDGVDFRSFIDGSKHRFTPEFSMQIQHGLGADIMFAFDELTTLVDTRQYQEASVDRTHRWAKRCLEEHDRLTNERTHRPKQSLWGVVQGAQYEDLRRQATRGLVQLSEQAEAEGKRGFGGFGLGGALEKENLGTIVGWCCDELPENKPRHLLGISEPDDMFTAIEAGADTFDCVAPTRLGRRGGVYTLDGRMNLMGAKFKRDFTGIDEEFGGYVSENYSRAYIHHLLKAKEFLAGTLCTIHNLQFMISLVDNIRKSIDGGYYEAYRDEFMGRYYANKK

SEQ ID NO: 54283 - protein, 422 aa, Corynebacterium stationis
  REGION 1..422: note = tr|A0A241TT50|A0A241TT50_9CORY Queuine tRNA-ribosyltransferase OS=Corynebacterium stationis; OX = 1705 GN=tgt PE=3 SV=1
MSHEHSDDLSFDVTTRLGDGSPGKHGRTGVIHTPHGDIQTPAFIPVATKATVKTLTPEQIKSTGAQAILSNAYHLYLQPGHDIVDEAGGVAAFENWDGPTYTDSGGFQVMSLGVGFKKVLAMDVAKLTEGDIRAAKKERLAHVDEDGVDFRSFIDGSKHRFTPEFSMQIQHGLGADIMFAFDELTTLVDTRQYQEESVERTHRWAKRCLDEHDRLTNERTHRPKQSLWGVVQGAQYEDLRRQATRGLVQLSEQAEAEGKRGFGGFGLGGALEKENLGTIVGWCCDELPEDKPRHLLGISEPDDMFTAIEAGADTFDCVAPTRLGRRGGVYTLDGRMNLMGAKFKRDFTGIDEEFGGYVSENYSRAYIHHLLKAKEFLAGTLCTIHNLQFMISLVDNIRKSIDGGYYEAYRDEFMGRYYANKK

SEQ ID NO: 54284 - protein, 430 aa, Corynebacterium striatum
  REGION 1..430: note = tr|A0A0K2X207|A0A0K2X207_CORST Queuine tRNA-ribosyltransferase OS=Corynebacterium striatum; OX = 43770 GN=tgt PE=3 SV=1
MIEQQPPFPAPKLETDLSFDVRTHLDQAGPGKHGRSGTIHTPHGDIQTPAFIPVATKATVKTLTPEQIRQTGAQAILSNAYHLYLQPGHDIVDEAGGVAAFENWHGPTYTDSGGFQVMSLGVGFKKVLAMDTSNLTEKDIRAAKKERMAQVDEDGVDFKSVIDGSKHRFTPEVSMQIQHGLGADIMFAFDELTTLVDTRTYQEESVARTHRWAQRCLDEHHRLTEERGPQKPRQSLWGVVQGAQYEDLRRQATRGLVELSQAAEANGKRGFGGFGIGGALEKENLGTIVGWVCDELPEDKPRHLLGISEPDDLFTAIEAGADTFDCVAPTRLGRRGGVYTLDGRLNLKGARFKRDFAGIDEEFGGYVSENYSRAYIHHLLKANEFLAGTLCTMHNLTFMIRLVDNIRASIDGGYYEAYRDEFMGRYYAGK

SEQ ID NO: 54285 - protein, 430 aa, Corynebacterium striatum
  REGION 1..430: note = tr|C2CSB7|C2CSB7_CORST Queuine tRNA-ribosyltransferase OS=Corynebacterium striatum ATCC 6940 OX=525268 GN=tgt PE=3 SV=1
MIEQQPPFPAPKLETDLSFDVRTRLDQAGPGKHGRSGTIHTPHGDIQTPAFIPVATKATVKTLTPEQIRQTGAQAILSNAYHLYLQPGHDIVDEAGGVAAFENWHGPTYTDSGGFQVMSLGVGFKKVLAMDTSNLTEKDIRAAKKERMAQVDEDGVDFKSVIDGSKHRFTPEVSMQIQHGLGADIMFAFDELTTLVDTRTYQEESVARTHRWAQRCLDEHHRLTEERGPQKPRQSLWGVVQGAQYEDLRRQATRGLVELSQAAEANGKRGFGGFGIGGALEKENLGTIVGWVCDELPEDKPRHLLGISEPDDLFTAIEAGADTFDCVAPTRLGRRGGVYTLDGRLNLKGARFKRDFAGIDEEFGGYVSENYSRAYIHHLLKANEFLAGTLCTMHNLTFMIRLVDNIRASIDGGYYEAYRDEFMGRYYAGK

SEQ ID NO: 54286 - protein, 423 aa, unidentified
  source 1..423: note = Corynebacterium tapiri
  REGION 1..423: note = tr|A0A5C4U4Q5|A0A5C4U4Q5_9CORY Queuine tRNA-ribosyltransferase OS=Corynebacterium tapiri; OX = 1448266 GN=tgt PE=3 SV=1
MDDVSFSLGTEISDAGVGRHGRTGTIHTPHGDIQTPAFIPVATKATVKTLTPEQIRSTGAQAILSNAYHLYLQPGHDIVDEAGGVAAFENWHGPTYTDSGGFQVMSLGAGFRKVLAMDTAKLNPEDIKAKDKERLAKVDEDGVDFRSVIDGSKHRFTPEVSMQIQHGLGADIMFAFDELTTLVDTRAYQEESVERTRRWAQRCLVEHNRLTQERTHRPKQSLWGVVQGANYEDLRRLAARQLVEMSEQAQEKGMRGFGGFGIGGAMEKSNLGTIVGWVCDELPAEKPRHLLGISEPDDLFTAVAAGADTFDCVAPTRLARRGGVYTLDGRMNLVASRFKRDFRGVDEEFGGYVSENYSRAYLHHLLKAKEFLAGTLCTIHNVAFMVTLVDNIRASIAEGRFEEYRAEFLGRYYANGGRAPEGK

SEQ ID NO: 54287 - protein, 440 aa, Corynebacterium terpenotabidum
  REGION 1..440: note = tr|S4XJ69|S4XJ69_9CORY Queuine tRNA-ribosyltransferase OS=Corynebacterium terpenotabidum Y-11 OX=1200352 GN=tgt PE=3 SV=1
MTEPAAGTSPASGNAHATDTTFELHTRIGEIDGAAVHGRTGVIHTPHGDIHTPAFIPVATKATVKTLTPEQVRSTGAEAMLSNAYHLYLQPGEDIVDTAGGLAEFENWHGPTYTDSGGFQVMSLGVGFKKVLAMDVANLTEGDIRAAKKERMALVDEDGVDFKSVIDGSAHRFTPEKSMQIQHGLGADIMFAFDELTTLVDTRVYQEESVARTHRWARRCLVEHDRLTRERAHRPLQSLWGVVQGAQYEDLRRQAARGLVELSREAEDAGRRGFGGFGIGGALEKENLGTITSWVCDELPDDRPRHMLGISEPDDLFTCIAAGADTFDCVAPTRLARRGGVYTLDGRLNLMAARHKRDFIPIDTETGGYVNGHYTRAYIHHLLKAHEFLAGTLCTLHNINFMMTLTRNIRRSIEEGRFAEYRDEFLGRYYANIPPEQRGR

SEQ ID NO: 54288 - protein, 418 aa, Corynebacterium testudinoris
  REGION 1..418: note = tr|A0A0G3H759|A0A0G3H759_9CORY Queuine tRNA-ribosyltransferase OS=Corynebacterium testudinoris; OX = 136857 GN=tgt PE=3 SV=1
MSTSGLTFEVGTQLADAGTGGRHGRTGVIHTPHGDIQTPAFIPVATKATVKTLTPEQIRLTGAQAILSNAYHLYLQPGADIVDEAGGVAAFENWHGPTYTDSGGFQVMSQGVGFQKTLTMEAAEGKHHTRNKPNLARVDEDGVDFTSFRDGSKHRFTPEISMQIQHQLGADIIFAFDELTTLMDTRSYQESSVERTHRWAQRCLDEHDRLTTERANKPLQSLWGVVQGAQYEDLRRQATRGLVELSERAEAEGRRGFGGYGIGGALEKNNLGTIVGWVCDELPVDRPRHLLGISEPDDLFMAVEAGADTFDCVAPTRLGRRGGVYTLDGRLNLMGAKFRRDFSGVDEEFGGYVSENYSRVYIHHLLRAKEFLAGTLCTIHNLEFMVRLVDNIRAAIDNGDFEAYRDEFLGRYYASSQS

SEQ ID NO: 54289 - protein, 415 aa, Corynebacterium timonense
  REGION 1..415: note = tr|A0A1H1TRQ6|A0A1H1TRQ6_9CORY Queuine tRNA-ribosyltransferase OS=Corynebacterium timonense; OX = 441500 GN=tgt PE=3 SV=1
MQDLSFEVGTTLPEAPGKHGRTGVIHTPHGDIATPAFIPVATKATVKTLTPEQVRSTGAQAILSNAYHLYLQPGPDIVDEAGGVAAFENWHGPTFTDSGGFQVMSLGVGFKKVLAMDTAGLSDADIRAAAKDRMARVDDDGVDFKSVIDGSSHRFTPEVSMQIQHQLGADIMFAFDELTTLVDTRAYQEHSVERTRRWAKRCLDEHDRLTAARADKPTQSLWGVVQGAQYEDLRRAAARGLLDLDARARAEGRRGFGGFGIGGALEKENLGTIVGWVTDELPVDKPRHLLGISEPDDIFTAVEAGADTFDCVAPTRLGRRGGVYTLDGRMNLTAARFRRDFRGVDEEFGGYVSENYSRAYIHHLLKAKEYLAGTLCTLHNLEFMVRLVDTIRAAIDAGRYEDYRDEFLGRYYAPS

SEQ ID NO: 54290 - protein, 414 aa, Corynebacterium tuberculostearicum; identical to SEQ ID NO: 54265
  REGION 1..414: note = tr|C6R851|C6R851_9CORY Queuine tRNA-ribosyltransferase OS=Corynebacterium tuberculostearicum SK141 OX=553206 GN=tgt PE=3 SV=1

SEQ ID NO: 54291 - protein, 417 aa, Corynebacterium tuscaniense
  REGION 1..417: note = tr|A0A095YF77|A0A095YF77_9CORY Queuine tRNA-ribosyltransferase OS=Corynebacterium tuscaniense DNF00037 OX=1401064 GN=tgt PE=3 SV=1
MTDTTFDVRTTLFSAPGRHGRTGTIHTPHGDIHTPAFIPVATKATVKMLTPGQIHSTGAQAILSNAYHLYLQPGPDIVDEAGGLATFENWHGPTYTDSGGFQVMSLGVGFKKVLAMDVAGLTDEDIRAANKERMARVDDDGVDFKSFIDGSTHRFTPEVSMQIQHQLGADIMFAFDELTTLVDTRAYQEESVERTHQWARRCLLEHDRLTHARPDKPLQSLWGVVQGAQYEDLRRQATRGLLALDEEARAAGRRGFGGFGIGGALEKENLGTIVGWVTDELPADKPRHLLGISEPDDLFTAIEAGADTFDCVAPTRLGRRGGVYTLDGRMNLMAARFRRDFTGVDEEFGGYVSENYSRAYIHHLLRAKEFLAGTLCTIHNVEFMVRLVDNIRAAIDAGDYEAYRDEFLGRYYAGQRK

SEQ ID NO: 54292 - protein, 417 aa, Corynebacterium tuscaniense; identical to SEQ ID NO: 54291
  REGION 1..417: note = tr|A0A2N6T5L0|A0A2N6T5L0_9CORY Queuine tRNA-ribosyltransferase OS=Corynebacterium tuscaniense; OX = 302449 GN=tgt PE=3 SV=1

SEQ ID NO: 54293 - protein, 413 aa, Corynebacterium ulcerans
  REGION 1..413: note = tr|V6V8A4|V6V8A4_CORUL Queuine tRNA-ribosyltransferase OS=Corynebacterium ulcerans NCTC 12077 OX=1258583 GN=tgt PE=3 SV=1
MDTTFELKTELYDEPGRHGRTGVIHTPHGDIATPAFIPVATKATVKTLTPPQIRSTGAQAILSNAYHLYLQPGHDVVDEAGGVAAFENWNGPTYTDSGGFQVMSLGVGFKKVLAMDIKGYEEADIRAKKRERMAKVDEDGVDFRSVLNGSRHRFTPEVSMQIQHGLGADIMFAFDELTTLIDTRDYQVSSVARTHRWAERCLVEHDRLTNERVGKPLQSLWGVVQGAQYEDLRRQAIRGLLELSDKAESEGRRGFGGFGIGGALEKENLGTIVGWVCDEIPKEKPRHLLGISEPDDLFTAIEAGADTFDCVAPTRLGRRGGVYTLDGRMNLTNAKFKRDFTPIDAEFGGPTVEYTRAYINHLLKAKEFLAGTLCTMHNVAFMVQLVDNIRASIDNGTYEEYKAEFMGRYYARG

SEQ ID NO: 54294 - protein, 413 aa, Corynebacterium ulcerans; identical to SEQ ID NO: 54293
  REGION 1..413: note = tr|A0A0E3KK60|A0A0E3KK60_CORUL Queuine tRNA-ribosyltransferase OS=Corynebacterium ulcerans; OX = 65058 GN=tgt PE=3 SV=1

SEQ ID NO: 54295 - protein, 478 aa, Corynebacterium urealyticum
  REGION 1..478: note = tr|B1VIU4|B1VIU4_CORU7 Queuine tRNA-ribosyltransferase OS=Corynebacterium urealyticum (strain ATCC 43042 / DSM 7109) OX=504474 GN=tgt PE=3 SV=1
MPSPAGRSARLPSARRVGSGASTRLSVMTSGSHSQPPHDAAGFATDTSFELLKPLGEVTDPIASHSGEGDRETRLTQGRVGVLKTPHGNINTPAFIPVATKATVKTLTPEQVRSAGAQAILSNAYHLYLQPGPDIVDEAGGVATFENWHGPTYTDSGGFQVMSLGVGYKKVLAMDSKVSEDKVIAQQKKRMAIVDEDGVDFRSVIDGSKHRFTPEVSMQIQHQLGADIMFAFDELTTLANTRAYQEASVARTHRWAKRCLEEHQRQTELRSHRPLQSLWGVVQGAQYEDLRRQAARGLVQLSEEAEAEGKRGFGGFGIGGALEKENLGTIVEWVSQELPDDKPRHLLGISEPDDLFTAIAAGADTFDCVAPTRLGRRGGVYTLDGRMNLSNARFRRDFTPVDAEVGGYVSENYTRAYIHHLLRAKEYLAGTLCTLHNLHFMIKLVDNIREAMLEGRFEEYRAEFMGRYYGPGWEQRLG

SEQ ID NO: 54296 - protein, 427 aa, Corynebacterium urealyticum
  REGION 1..427: note = tr|A0A2W5AYN5|A0A2W5AYN5_9CORY Queuine tRNA-ribosyltransferase OS=Corynebacterium urealyticum; OX = 43771 GN=tgt PE=3 SV=1
MTHPKPQLETDLSFDVTKELDLSGPAQPGKHGRTGVIHTPHGDIQTPAFIPVATKATVKTLTPEQIRLTGAQAILSNAYHLYLQPGHDIVDEAGGVATFENWHGPTYTDSGGFQVMSLGVGFKKVLAMDVADLTESDIRAAKKERMAQVDEDGVDFKSFIDGSTHRFTPEVSMQIQHGLGADIMFAFDELTTLVDTRTYQEESVERTRRWAQRCLDEHDRLTLARGPQKPRQSLWGVVQGAQYEDLRRQAARGLVELSDQAEENGRRGFGGFGIGGALEKENLGTIVGWVCDELPVGKPRHLLGISEPDDIFTAVEAGADTFDCVAPTRLARRGGVYTLDGRLNLTNARFKRDFAGVDEEFGGYVSENYSRAYIHHLLKAKEFLAGTLCTIHNVEFMIRLVDNIRAAIDGGYYEAYRDEFLGRYYAK

SEQ ID NO: 54297 - protein, 417 aa, Corynebacterium ureicelerivorans
  REGION 1..417: note = tr|A0A077HIN6|A0A077HIN6_9CORY Queuine tRNA-ribosyltransferase OS=Corynebacterium ureicelerivorans OX=401472 GN=tgt PE=3 SV=1
MTDVTFEAHTQLEPAPGRHGRTGVIHTPHGPIQTPAFIPVATKATVKTLTPEQIRQTGAQAILSNAYHLYLQPGPDIVDEAGGVAAFENWHGPTYTDSGGFQVMSLGVGFKKVLAMDTAGLTEADIRAANKDRMARVDDDGVDFKSVIDGSSHRFTPEVSMQIQHQLGADIMFAFDELTTLVDTRAYQEHSVERTRRWARRCLLEHDRLTTLRSDKPLQSLWGVVQGAQYEDLRRQAVRGLLDLDREARAEGRRGFGGVGIGGALEKENLGTIVGWVTDELPVEMPRHLLGISEPDDIFTAVEAGADTFDCVAPTRLGRRGGVYTLDGRLNLAGARFKRDFRGVDEEFGGYVSENYSRAYIHHLLKAKEFLAGTLCTMHNLEFMIRLVDNIRAAIDAGDYEAYRDEFLGRYYAGSDT

SEQ ID NO: 54298 - protein, 428 aa, unidentified
  source 1..428: note = Corynebacterium uterequi
  REGION 1..428: note = tr|A0A0G3H9X9|A0A0G3H9X9_9CORY Queuine tRNA-ribosyltransferase OS=Corynebacterium uterequi; OX = 1072256 GN=tgt PE=3 SV=1
MQHHAGAEDLSFEVGTALEAGPGRHGRSGVIHTPHGDIATPAFIPVATKATVKTLTPEQIAATGAQAILSNAYHLYLQPGHDIVDEAGGVAAFENWDGPTYTDSGGFQVMSLGVGFKKVLAMDTTGLNESDIRAKDRQRLATVDEDGVDFKSIIDGSMHRFTPEVSMQIQHGLGADIMFAFDELTTLVDSRAYQEQSVERTLRWAQRCLVEHDRLTRAREGKAKQSLWGVVQGAQYEDLRRHAARELVALSDAAEAEGRRGFGGFGIGGAIEKENLGTIVGWACDELPASKPRHLLGISEPDDLFTAVEAGADTFDCVAPTRLARRGGVYTLDGRMNLTAARFKRDFRGVDEEFGGYVSENFSRAYLHHLLKAKEFLAGTLCTIHNVAFMVRLVDNIRSSIEGGYFDAYREEFLGRYYAHGGRAPEGR

SEQ ID NO: 54299 - protein, 460 aa, Corynebacterium variabile
  REGION 1..460: note = tr|G0HG17|G0HG17_CORVD Queuine tRNA-ribosyltransferase OS=Corynebacterium variabile (strain DSM 44702 / JCM 12073 / NCIMB 30131) OX=858619; GN = tgt PE=3 SV=1
MAQRPGTTLPTHTWCRQVTQHHRIDCSTMTDTASGTASDTTFTLGTRVGEIDGHNAHGRTGVIHTPHGDIHTPAFIPVATKATVKTLTPEQVRSTGAEAILSNAYHLYLQPGEDIVDTAGGLAEFENWHGPTYTDSGGFQVMSLGVGFKKVLAMDVANLTDADIRAAKKERMAQVDEDGVDFKSVIDGSMHRFTPEKSMQIQHGLGADIMFAFDELTTLVDTRRYQEESVERTHRWARRCLVEHDRLTTERTHRPLQSLWGVVQGAQYEDLRRQAARGLVELSAEAEKDGRRGFGGFGIGGALEKENLGTITGWVCDELPDDKPRHMLGISEPDDLFTCIAAGADTFDCVAPTRLARRGGVYTLDGRLNLMASRHKRDFIPIDAETGGYVNEHYTRAYIHHLLKAKEFLAGTLCTLHNINFMMTLTRNIRTSIEEGRFTEYRDEFLGRYYANKAPELRGR

SEQ ID NO: 54300 - protein, 432 aa, Corynebacterium variabile
  REGION 1..432: note = tr|A0A3C0MSS5|A0A3C0MSS5_9CORY Queuine tRNA-ribosyltransferase OS=Corynebacterium variabile; OX = 1727 GN=tgt PE=3 SV=1
MTDTASGTASDTTFTLGTRVGEIDGHNAHGRTGVIHTPHGGIHTPAFIPVATKATVKTLTPEQVRSTGAEAILSNAYHLYLQPGEDIVDTAGGLAEFENWHGPTYTDSGGFQVMSLGVGFKKVLAMDVANLTDADIRAAKKERMAQVDEDGVDFKSVIDGSMHRFTPEKSMQIQHGLGADIMFAFDELTTLVDTRRYQEESVERTHRWARRCLVEHDRLTTERTHRPLQSLWGVVQGAQYEDLRRQAARGLVELSAEAEKDGRRGFGGFGIGGALEKENLGTITGWVCDELPDDKPRHMLGISEPDDLFTCIAAGADTFDCVAPTRLARRGGVYTLDGRLNLMASRHKRDFIPIDAETGGYVNEHYTRAYIHHLLKAKEFLAGTLCTLHNINFMMTLTRNIRTSIEEGRFTEYRDEFLGRYYANKAPELRGR

SEQ ID NO: 54301 - protein, 412 aa, Corynebacterium vitaeruminis
  REGION 1..412: note = tr|W5XY79|W5XY79_9CORY Queuine tRNA-ribosyltransferase OS=Corynebacterium vitaeruminis DSM 20294 OX=1224164 GN=tgt PE=3 SV=1
MDTTFTLGTQLHDGPGQHGRTGTIHTPHGDIQTPAFIPVGTKATVKTLTPEQVKDTGAQAVLSNAYHLYLQPGPDIVDEAGGVAAFEHWDGPTYTDSGGFQVMSLGVGFKKVLAMDTKGLQDSDIRAQKKDRFAQVDEDGVDFRSVIDGSKHRFTPEVSMQIQHQLGADIIFAFDELTTLVDTRLYQEQSVARTHRWAKRCLDEHERLTNERPGKPLQSLWGVVQGAQYEDLRRQAIRGLLDLSKEAEDAGRRGFGGFGIGGALEKENLGTIVGWVCDEIPADKPRHLLGISEPDDLFTAIEAGADTFDCVAPTRLGRRGGVYTLDGRMNLPAARFKRDFTPIDAEVGGYVNEHYTRAYIHHLFKAKEYLGQSLCTMHNLTFMIQLVDNIRAAINDGTYWEFKQEFLGRYYA

SEQ ID NO: 54302 - protein, 415 aa, Corynebacterium xerosis
  REGION 1..415: note = tr|A0A0M2XPK8|A0A0M2XPK8_9CORY Queuine tRNA-ribosyltransferase OS=Corynebacterium xerosis OX=1725; GN = tgt PE=3 SV=1
MDGEPGRAGIIRTPHGDVQTPAFIPVGTKATVKTLTPEQIRDTGAQAVLSNAYHLYLQPGPDIVEAAGGLTRFENWNGPTFTDSGGFQVMSLGVGFRKTLAMDVTGLQNDDILAPGKERNAFVDEEGVTFRSHIDGSSHRFTPEFSMGIQHKLGADIIFAFDELTTLMNTREYQESSVERTHRWAQRCLDEHDRLTRERNQVPGLAGDLAEGERPLQQLFGVVQGAQYEDLRRGAARGLVELSDAAEAAGKRGFAGYGIGGALEKQRLGEICRWVTDELPDDRPRHLLGISEPDDIFAAVAAGADTFDCVAPTRLARRGGVYTLDGKITLTNARFKTDFGPIDPEVESYTTLNYSRAYIHHLLKAKEFLAGTLCTIHNVYFMVKLVENIRASIIDGTFEEYRDEFLGRYYAGKKK

SEQ ID NO: 54303 - protein, 380 aa, Cosenzaea myxofaciens
  REGION 1..380: note = tr|A0A198FL84|A0A198FL84_9GAMM Queuine tRNA-ribosyltransferase OS=Cosenzaea myxofaciens ATCC 19692 OX=1354337 GN=tgt PE=3 SV=1
MKYELDKTSGNARRGRLIFERGVVETPAFMPVGTYGTVKGMTPEEVKQTGAQILLGNTFHLWLRPGQEIMKLHGDLHDFMQWQGPILTDSGGFQVFSLGAMRKIKEEGVHFRNPINGEKIFLSPEKSMEIQYDLGSDIVMIFDECTPYPSDWDYAKTSMEMSLRWAKRSRQRFDELNNKNSLFGIIQGGVYEDLRDISVKGLVDIGFDGYAVGGLAVGEPKEDMHRILEHVCPQIPADKPRYLMGVGKPEDLVEGVRRGIDMFDCVMPTRNARNGHLFVTDGVIKIRNAKHRSDTSTLDEHCDCYTCKNYSRAYLHHLDRCNEILGARLNTIHNLRYYQRLMAEIRQSIEEDRFDAFVLEFYERIGKPVPPLNGCASKCD

SEQ ID NO: 54304 - protein, 385 aa, Coxiella burnetii
  REGION 1..385: note = tr|A9KE20|A9KE20_COXBN Queuine tRNA-ribosyltransferase OS=Coxiella burnetii (strain Dugway 5J108-111) OX=434922 GN=tgt PE=3 SV=1
MQNTFKTEIIQRSKTNHARVTKITTPHGEVVTPAFMPVGTRAFANHLTPHDLVAAHSQIILGGNTYHMLVAPGLEVIQAAGGMHAFMGWDKPMLTDSGGFQVFSLSKNREICTLDEEGAHFKHPTTGKLIHLTPKSSIDTQKAIGADIIMAFDECTPENGGREAALGALQRTHYWLAKSKQAHLQSPCSLYGHRQALFGIIQGGSFRDLREKSAQSVVDMDLDGIAIGGEVIGFDMAKTCQIIDWVRPLLPEGKTRYAMGVGLSPQDLIDVVAAGVDIFDCVAPTRNARHGALYHGHCVVENGWVRFISEQENGRIQIKKSIYAKDETPLLAGCRCYTCQHFCRAYLHYLFKQKSTLYAQLACIHNIHVMQETCCFLRQLIVQVQ

SEQ ID NO: 54305 - protein, 385 aa, Coxiella burnetii
  REGION 1..385: note = tr|Q83CN8|Q83CN8_COXBU Queuine tRNA-ribosyltransferase OS=Coxiella burnetii (strain RSA 493 / Nine Mile phase I) OX=227377 GN=tgt PE=3 SV=1
MQNTFKTEIIQRSKTNHARVTKITTPHGEVVTPAFMPVGTRAFANHLTPHDLVAAHSQIILGGNTYHMLVAPGLEVIQAAGGMHAFMGWDKPMLTDSGGFQVFSLSKNREICTFDEEGAHFKHPTTGKLIHLTPKSSIDTQKAIGADIIMAFDECTPENGGREAALGALQRTHYWLAKSKQAHLQSPCSLYGHRQALFGIIQGGSFRDLREKSAQSVVDMDLDGIAIGGEVIGFDMAKTCQIIDWVRPLLPEGKTRYAMGVGLSPQDLIDVVAAGVDIFDCVAPTRNARHGALYHGHCVVENGWVRFISEQENGRIQIKKSIYAKDETPLLAGCRCYTCQHFCRAYLHYLFKQKSTLYAQLACIHNIHVMQETCCFLRQLIVQVQ

SEQ ID NO: 54306 - protein, 384 aa, Coxiella sp.
  REGION 1..384: note = tr|A0A1F8V149|A0A1F8V149_9COXI Queuine tRNA-ribosyltransferase OS=Coxiella sp. RIFCSPHIGHO2_12_FULL_44_14 OX=1797697 GN=A3F41_05635 PE=3; SV = 1
MFKTELIAKHKNNHARITKVTTPHGEILTPTFMPVATRAYVNFMRPDDLWKAGSQIILGGNTYHMLINPGMEIIRSAGGMHPFMGWTGPMLTDSGGFQVFSLAKNAEICKIKKDGAHFKVPDTGQKIILNPKTSIETQKIIGADIIMAFDECTPEQGGREAATAALDRTHRWLLEAVDMQQNNPHSVYGHRQALFGIIQGGSFRDLRDQSAAFVVNQPVDGLAIGGEVIGFNMVKTIEVIDWIRPYLPENKIRYTMGVGLSVQDLIDVVAAGIDIFDCVAPTRNARHGALYQGEIVIKGDWLQFQKNAEEKDRLLIKKSLYAKDESPIMDGCECYTCQHHTRAYLHYLFKAKSVAYSNLACIHNIHVMHKVCAVMRDLILQHAS

SEQ ID NO: 54307 - protein, 370 aa, Coxiella sp.
  REGION 1..370: note = tr|A0A0S7XXQ8|A0A0S7XXQ8_9COXI Queuine tRNA-ribosyltransferase OS=Coxiella sp. DG_40 OX=1703354; GN = tgt PE=3 SV=1
MQFELLKKDNNARRGKLVFSCEVVDTPAFMPVGTYGTVKAMTPEEVKASGAQIILGNTFHLMLRPGIEIIRKHAGLHNFMHWDGPILTDSGGFQVFSLANIRKLTEDGIRFQSPIDGREVFLSPENSIEMQLALGSDIVTVLDECTSYPISEQRAEASMQSSLRWAERSKKAHQKGGSSALFGIVQGSIYPNLRDESLRGLVDIGFDGYAIGGLSVGEPKSEMFRTLDHLNSQMPKDKPRYLMGVGTPEDIIEGVCRGVDMFDCVMPTRNARNGHLFTSEGIVRIGNSTHRNSIAPLDSNCDCYTCKNYTRAYLHHLNRCKEILGARLNTIHNLYFYQNLMQNLRQAIEQGKLDRFIKDFYSSYLGEKRQ

SEQ ID NO: 54308 - protein, 367 aa, unidentified
  source 1..367: note = Coxiellaceae bacterium
  REGION 1..367: note = tr|A0A2E9ZA29|A0A2E9ZA29_9COXI Queuine tRNA-ribosyltransferase OS=Coxiellaceae bacterium; OX = 2026727 GN=tgt PE=3 SV=1
MQFTVAKTDGLARRGCVQFPRGDIQTPAFMPVGTYGTVKAMTSHEVRETGADILLGNTFHLMLRPGTEVIKLHGTLHDFMQWSRPILTDSGGFQVFSLTDLCKLTEEGVTFRSPVDGAVVHLTPERSIEVQRDLGSDIVMCFDECTPYPATEAVAKTSMELSLRWAKRSRDAHGDSLSALFGIVQGGMYRDLRLQSLSGLTDIGFDGYAIGGLSVGEPKHLMIKVLDEITPHMPKEKPRYLMGVGKPEDLVEGVLRGIDMFDCVMPTRNARNGHLFTSQGVIKIRNSQYRHDTRPLDPNCDCYTCQNYSRAYLHHLFRTREILSSRLNSWHNLHYYQSLMQGLRNAIEKGTLRAFVEQFYQSQQTRV

SEQ ID NO: 54309 - protein, 369 aa, unidentified
  source 1..369: note = Coxiellaceae bacterium
  REGION 1..369: note = tr|A0A359LDY2|A0A359LDY2_9COXI Queuine tRNA-ribosyltransferase OS=Coxiellaceae bacterium; OX = 2026727 GN=tgt PE=3 SV=1
MQFELITKNLLARRGRITFPSGHIVNTPAFMPVGTYGTVKALTTEEVRATGAEIILGNTFHLMLRPGTEIIKAHGGLHNFMHWSGPILTDSGGFQVFSLSDLRKITEEGVWFKSPLDGNNVFLSPEISMQIQRDLDSNIVMIFDECTPFPVSYDEAAKSVDLSIGWARRSKIAHGDNKNALFGIIQGGIFTDLRDRSLAALLEIGFDGYAIGGLAVGEPKHEMFKILQHLATQIPENKLRYLMGVGTPQDLIEGVLNGVDMFDCVLPTRNARNGYLFTSQGVVRIRNSAHKNDLSPLDQNCDCYTCKYYTRAYLHHLDRCREILGARLNTIHNLYFYQKLMTNLRQALEQGKLSQFVTNFYQLYNNSGE

SEQ ID NO: 54310 - protein, 372 aa, unidentified
  source 1..372: note = Crassaminicella sp.
  REGION 1..372: note = tr|A0A5C0SBS6|A0A5C0SBS6_9CLOT Queuine tRNA-ribosyltransferase OS=Crassaminicella sp. SY095; OX = 2599308 GN=tgt PE=3 SV=1
MAIKYELIKECKQSGARLGRLHTPHGIIETPIFMPVGTQATVKAMTPEELKEINAQIILSNTYHLYLRPGHKLVEKAGGLHKFMNWDRPILTDSGGFQVFSLGDLRKISEEGVEFRSHLDGSKHFISPEKAIEIENALGADIIMAFDECAPYPADKNYVKNSLERTTRWAKRCKQAHKNPDTQALFGIIQGGMYKDLREQSIKEIVELDFPGYAVGGLSVGEPKPLMYEVLEYTTPLMPKDKPRYLMGVGTPDCLIEGVIRGIDMFDCVLPTRIARNGTAMTSVGKVVIKNAKYIEDFEPLDPNCDCYTCKNYSRAYLRHLYKAQEILSARLVTYHNLYFLLELMKNIRNAIKEDRLLDFRKEFFEKYGYEI

SEQ ID NO: 54311 - protein, 371 aa, unidentified
  source 1..371: note = Crenobacter cavernae
  REGION 1..371: note = tr|A0A345Y265|A0A345Y265_9NEIS Queuine tRNA-ribosyltransferase OS=Crenobacter cavernae OX=2290923; GN = tgt PE=3 SV=1
MLQFTVHKTSGGARRGTLVLNHGLVETPVFQPVGTYGSVKAMSPLELEEIGAQIILGNTFHLWLRPGLEIVEQFGGLHEFIGWDKPILTDSGGFQVFSLTNMRKLTEEGCTFQSPVNGDKLFLSPEISMKIQTVLNSDIVMQLDECTPGQVDHKTAGDSLRMSLRWAERSRRAFDDLKNPNALFGIVQGNLYTDLREESLKGLMEIGFDGIAIGGLSVGEPKPEMYRMLTELKDMLPAEKPHYLMGVGTPEDLVHGVANGVDMFDCVMPTRNARNGWIFTQWGDVKIKNAGYKMDKRPLDEECGCYTCRNFSRAYLHHLHRVGEILGARLNTIHNLYYYQELMRNIRKAIEDDRFEDFRAEFHENRARGVN

SEQ ID NO: 54312 - protein, 375 aa, unidentified
  source 1..375: note = Crenobacter cavernae
  REGION 1..375: note = tr|A0A4Q2JFZ5|A0A4Q2JFZ5_9NEIS Queuine tRNA-ribosyltransferase OS=Crenobacter cavernae OX=2290923; GN = tgt PE=3 SV=1
MLQFTVHKTSGGARRGTLVLNHGLVETPVFQPVGTYGSVKAMSPLELEEIGAQIILGNTFHLWLRPGLEIVEQFGGLHEFIGWDKPILTDSGGFQVFSLTDMRKLTEEGCTFQSPVNGDKLFLSPEISMKIQTVLNSDIVMQLDECTPGQVDHKTAGDSLRMSLRWAERSRRAFDDLKNPNALFGIVQGNLYTDLREESLKGLMEIGFDGIAIGGLSVGEPKPEMYRMLTELKDMLPAEKPHYLMGVGTPEDLVHGVANGVDMFDCVMPTRNARNGWIFTQWGDVKIKNASYKMDKRPLDEECGCYTCRNFSRAYLHHLHRVGEILGARLNTIHNLYYYQELMRNIRKAIEDDRFEDFRAEFHENRARGVNRGVN

SEQ ID NO: 54313 - protein, 371 aa, unidentified
  source 1..371: note = Crenobacter luteus
  REGION 1..371: note = tr|A0A163C3K0|A0A163C3K0_9NEIS Queuine tRNA-ribosyltransferase OS=Crenobacter luteus OX=1452487; GN = tgt PE=3 SV=1
MLQFTVHKTSGGARRGTLVLNHGVVETPVFQPVGTYGSVKAMSPLELEEIGAQIILGNTFHLWLRPGLEIVEQFGGLHGFIGWDKPILTDSGGFQVFSLSDMRKLTEEGCTFQSPINGDKLFLSPEISMKIQTVLNSDIVMQLDECTPGQVDHKTARSSLQMSLRWAERSRRAFDDLNNPNALFGIVQGNLYTDLRQESLDGLMQIGFDGIAIGGLSVGEPKPEMYRMLTELKDMLPAEKPHYLMGVGTPEDLVHGVANGVDMFDCVMPTRNARNGWIFTQWGDVKIKNASYKDDKRPLDEECGCYTCKNFSRAYLHHLHRVGEILGARLNTIHNLYYYQELMRQIRRAIEEDRFDDFRAQFHENRARGVR

SEQ ID NO: 54314 - protein, 370 aa, unidentified
  source 1..370: note = Crenobacter sp.
  REGION 1..370: note = tr|A0A4T0URQ3|A0A4T0URQ3_9NEIS Queuine tRNA-ribosyltransferase OS=Crenobacter sp. GY 70310; OX = 2563443 GN=tgt PE=3 SV=1
MLKFTVHKTSGGARRGTLELNHGTVETPVFQPVGTYGSVKAMSPLELNEIGAQIILGNTFHLWLRPGLEVVESFGGLHAFIGWDKPILTDSGGFQVFSLGDLRKLTEEGCTFQSPVNGDKLFLSPEISMKIQTVLNSDIVMQLDECTPGQVDHKTAEASMQMSLRWAARSRQAFDDLRNPNALFGIVQGNLYTDLRQKSLDGLMEIGFDGIAIGGLSVGEPKPEMYRMLEEMRDMLPADKPHYLMGVGTPEDLVQGVANGVDMFDCVMPTRNARNGWIFTRYGDIKIKNAFHKMDHRPLDEECACYACRNFSRAYLHHLHRTGEILGARLNTIHNLHYYQELMAEMREAIEQDRFADWRASFHEKRARGA

SEQ ID NO: 54315 - protein, 377 aa, unidentified
  source 1..377: note = Crenotalea thermophila
  REGION 1..377: note = tr|A0A1I7NEX1|A0A1I7NEX1_9BACT Queuine tRNA-ribosyltransferase OS=Crenotalea thermophila; OX = 1393122 GN=tgt PE=3 SV=1
MAIGFHIVREDVHSRARAGCITTDHGVIETPIFMPVGTAGAVKTLLQQQLDQDLQAPIILGNTYHLYLRPGTDILQQAGGLHRFMHWNRALLTDSGGYQVFSLAKIRKITEEGVWFQSHIDGSRHFFSPQRVMEIQRRIGADIVMAFDECTPYPCTHAYARNSLQLTHRWLDICLACFQEQGLYGYSQTLFPIVQGSVYADLRRASAEYIAAKETAGYAIGGLSVGEPEQMMYEMTALVNEILPPTKPRYLMGVGTPWNILESIALGVDMFDCVMPTRNGRNGMLFTWQGIINIRNKKWATDFSVIDENTTGPVSTYYSKAYLRHLFVSNEITGLQIATLHNLSFYLQLVREARKHILQGDFLSWKNEIIPRLKSRL

SEQ ID NO: 54316 - protein, 371 aa, Crenothrix polyspora
  REGION 1..371: note = tr|A0A1R4HJ93|A0A1R4HJ93_9GAMM Queuine tRNA-ribosyltransferase OS=Crenothrix polyspora OX=360316; GN = tgt PE=3 SV=1
MEFKLKNTDGHARRGQLTFARGIVETPIFMPVGTYGTVKALAPEELHDLGAQIILGNTFHLMLRPGSAVIKAHGDLHDFMRWDKPILTDSGGFQVFSLGKMRKITEEGVIFRSPINGSKIFMGPEESMQVQRDLGSDIVMIFDECTPYPATVHEAADSMRLSLRWAERSKTAHGDNPSALFGIVQGGMYEHLRKESIAGLIDIGFDGYAIGGLSVGEPKEEMMATLDVIHRKMPIDKPRYLMGVGTPEDLVEGVRRGIDMFDCVMPTRNARNGHLFTHFGVVKIRNSQYEADTRPLDESCGCYTCRNYSRAYLRHLDKCKEMLGSRLNTIHNLYYYLELMQGLRDAIETQTLALFVKHFYDQRGKAVPDVA

SEQ ID NO: 54317 - protein, 371 aa, Crenothrix polyspora
  REGION 1..371: note = tr|A0A1R4HFP9|A0A1R4HFP9_9GAMM Queuine tRNA-ribosyltransferase OS=Crenothrix polyspora OX=360316; GN = tgt PE=3 SV=1
MEFKLKNTDGHARRGQLTFARGIVETPIFMPVGTYGTVKSLTPDELHGVGAQIILGNTFHLMLRPGMEVIKAHGDLHDFMRWDKPILTDSGGFQVFSLGKLRKITEEGVTFKSPINGSKIFMGPEESMQVQRDLGSDIVMIFDECTPYPATVYEAADSMRLSLRWAERSKMAHGDNPSALFGIVQGGMYEHLRQESIAGLVDIGFDGYAIGGLSVGEPKEEMMATLDVVHRKMPVDKPRYLMGVGTPEDLVEAVRRGIDMFDCVMPTRNARNGHLFTSFGVVKIRNNQYEQDTRPLDETCGCYTCQNYSRAYLRHLDKCKEMLGSRLNTIHNLYYYLELMQGLREAIENQQLAVFVKRFYDQRGKAVPVVA

SEQ ID NO: 54318 - protein, 369 aa, Crenothrix sp.
  REGION 1..369: note = tr|A0A1Y2ZZ41|A0A1Y2ZZ41_9GAMM Queuine tRNA-ribosyltransferase OS=Crenothrix sp. D3 OX=1880899; GN = tgt PE=3 SV=1
MKFDLLNTDGHARRGRLTFARGVIETPIFMPVGTYGTVKALTPDELHGIGAQIILGNTFHLMLRPTTAVIKAHGDLHDFMHWEKPILTDSGGFQVFSLGALRKITEKGVTFKSPINGSKIFMGPEESMQVQRDLGSDIVMIFDECTPYPATVQEAADSMRLSLRWAMRSKIAHGDNPSALFGIVQGGMYEHLREESIAGLTDIGFDGYAIGGLSVGEPKEEMMATLDGIHQKMPTDKPRYLMGVGTPEDLVEAVCRGIDMFDCVMPTRNARNGHLFTTFGVVKIRNAQYEFDTRPLDDNCGCYTCQNYSRAYLRHLDKCKEMLGSRLNTIHNLYYYLHLMQGLRDAIASQTLDAFVKAFYEQRNTTRVL

SEQ ID NO: 54319 - protein, 366 aa, unidentified
  source 1..366: note = Criblamydia sequanensis
  REGION 1..366: note = tr|A0A090CXR0|A0A090CXR0_9BACT Queuine tRNA-ribosyltransferase OS=Criblamydia sequanensis CRIB-18; OX = 1437425 GN=tgt PE=3 SV=1
MEFTLLKEDSSSKARLGKLKTAHSEFETPIFMPVGTRAAVKTLTSKQLHALEAQIILGNTYHLMLKPGAEIIEKAGGLHKFMNWDKSILTDSGGFQVFSLSSLNRVTDQGVHFQSHIDGSSHFLGPRESMAIQKSLGSDIVMAFDECPPYPCSRIQLEESLVRTEKWARVCRDYTLHPNQNLFGIVQGGIEADLRRESAKSLVSMDFDGYAIGGVSVGEPEELMYQAVEASIPFLPKEKPRYLMGVGTPKNMIEAVMRGIDLFDCVMPTRNARNGMAFTWDGKVQIKAARYKEDFSPLDPHLDNEVSSYSKAYIRHLLNVDEITGLTLVTMQNLSFYLDLMKKIRQAIENNTIDELYKKIVSLYPN

SEQ ID NO: 54320 - protein, 376 aa, unidentified
  source 1..376: note = Cribrihabitans marinus
  REGION 1..376: note = tr|A0A1H6R317|A0A1H6R317_9RHOB Queuine tRNA-ribosyltransferase OS=Cribrihabitans marinus; OX = 1227549 GN=tgt PE=3 SV=1
MTERFSFRLDATDGRARTGAIDTPRGRIRTPAFMPVGTAATVKAMLPENVRATGADVLLGNTYHLMLRPTAERIDRLGGLHRFMNWDRPILTDSGGFQVMSLAGLRRLTEEGVTFKSHIDGSKHELTPERSMEIQRLLGSDIVMCFDECPALPADRDRIARSMRLSMRWAARSRAAFGDRPGHALFGIQQGGLEHDLRAESAEALREIGFEGYAVGGLAVGEGQEAMFGVLDFATDQLPENKPRYLMGVGKPDDIVGAVARGIDMMDCVLPSRSGRTGQVFTRHGQLNIKNARHMDDPRPLDEACSCPACRNYSRAYLHHVFRSQEIISSMLLTWHNLQFYQDLMAGMRAAIAEGRFAAWQSEFHAAREQGDIDPM

SEQ ID NO: 54321 - protein, 384 aa, unidentified
  source 1..384: note = Cricetibacter osteomyelitidis
  REGION 1..384: note = tr|A0A4R2T7J7|A0A4R2T7J7_9PAST Queuine tRNA-ribosyltransferase OS=Cricetibacter osteomyelitidis; OX = 1521931 GN=tgt PE=3 SV=1
MKFELKTTNGRARRGQLIFNRSQGEFTVQTPAFMPVGTYGTVKGMTPEEVKATGAEILLGNTFHLWLRPGQEVMKMHGDLHDFMQWHAPILTDSGGFQVFSLGKLRKITEEGVKFQNPINGERIFLSPEKSMEIQYDLGSDIVMIFDECTPYPATFDYAKNSMELSLRWAKRSRDRFDELKNPNALFGIIQGGTYEELRKISVEGLKEIGFDGYAVGGLAVGEPKEEMHRILEFITPHIPADKPRYLMGVGKPEDLVEGVRRGIDMFDCVMPTRNARNGHLFVTDGIVKIRNAKYRNDTSPLDPECDCYTCKNYSKAYLYHLDKCGEILGARLNTIHNLRYYQRLMAQIREAIEQGGFEDFVQEFYARIGKEVPPLDSYYKFEG

SEQ ID NO: 54322 - protein, 373 aa, unidentified
  source 1..373: note = Criibacterium bergeronii
  REGION 1..373: note = tr|A0A371IJ13|A0A371IJ13_9FIRM Queuine tRNA-ribosyltransferase OS=Criibacterium bergeronii; OX = 1871336 GN=tgt PE=3 SV=1
MNKPLEFTVLQEDKKSKARLGLLKTLHSEFETPVFMPVGTNATVKAMENRELYEIGAKIILSNTYHLHLRPGDEIVKKGGGLHKFMNWERSILTDSGGFQVFSLGEFRKIKEEGVYFKSVLDGANLFMGPEESIGVQNSLGSDIMMSFDECAPYPASREYVEDSYKRTIRWAKRGKEANKNPETQALFGIVQGGVYKDLRIESAKATVDLDFDGYSIGGLSVGEPKELMYEVLDYTPDYLPKYKPRYLMGVGTPDDIFEGVIRGVDMFDCVLPTRIARHGTAMTANGKLVVRNATYAEDFLPLDPECDCHVCKNYSRAYIRHLIKAGEILGSRLITYHNIYFLVNMMNNIRAAIRAGNLLEYKKAFLEKYYAE

SEQ ID NO: 54323 - protein, 373 aa, unidentified
  source 1..373: note = Criibacterium bergeronii
  REGION 1..373: note = tr|A0A552UVI0|A0A552UVI0_9FIRM Queuine tRNA-ribosyltransferase OS=Criibacterium bergeronii; OX = 1871336 GN=tgt PE=3 SV=1
MNKPLEFTVLQEDKKSKARLGLLKTLHSEFETPVFMPVGTNATVKAMENRELYEIGAKIILSNTYHLHLRPGDEIVKKGGGLHKFMNWERSILTDSGGFQVFSLGEFRKIKEEGVYFKSVLDGANLFMGPEESIGVQNNLGSDIMMSFDECAPYPASREYVEDSYKRTIRWAKRGKEANKNPETQALFGIVQGGVYKDLRIESAKATVDLDFDGYSIGGLSVGEPKELMYEVLDYTPDYLPKYKPRYLMGVGTPDDIFEGVIRGVDMFDCVLPTRIARHGTAMTANGKLVVRNATYAEDFLPLDPECDCHVCKNYSRAYIRHLIKAEEILGSRLITYHNIYFLVNMMNSIRAAIRTGNLLEYKKAFLEKYYAE

SEQ ID NO: 54324 - protein, 378 aa, unidentified
  source 1..378: note = Crinalium epipsammum
  REGION 1..378: note = tr|K9VZI5|K9VZI5_9CYAN Queuine tRNA-ribosyltransferase OS=Crinalium epipsammum PCC 9333; OX = 1173022 GN=tgt PE=3 SV=1
MSANFSFQRQASCSHTQARAGVFVTPHGIVETPRFMPVGTLATVKTLTSAHLEEAEAQMVLANTYHLHLQPGEDIVAGAGGLHRFMNWKGPMLTDSGGFQVFSLSKIRTITEAGVTFRSPRDGRIINMTPELSIQIQNTLGADVIMAFDECPPYPAEREEVVRATDRTYRWLERCIKAHQRPQDQALFGIVQGGVFLDLRRAAAEKLATLDLPGYAIGGVSVGEPAEFIHQIVKATAPLLPEDKPRYLMGVGTYREMAIAIASGIDLFDCVIPTRLGRHGAVLVQGERWNLKNARFRRDYTQLDETCPCYTCQNFSRAYLSHLMRSGEVLGYTLLSLHNVTELIRFTKRIREAILSDRFTTEFAQWLDSPPPQAAEPC

SEQ ID NO: 54325 - protein, 376 aa, Croceibacter atlanticus
  REGION 1..376: note = tr|A3U4U5|A3U4U5_CROAH Queuine tRNA-ribosyltransferase OS=Croceibacter atlanticus (strain ATCC BAA-628 / HTCC2559 / KCTC 12090) OX=216432 GN=tgt; PE = 3 SV=1
MTFDLLSTDKNSQARAGTITTDHGKIETPIFMPVGTVGTVKGVHQRELKQDINPDIILGNTYHLYLRPQTEILEKAGGLHKFMNWDRNILTDSGGYQVYSLSSNRKIKEEGVKFKSHIDGSMHTFTPENVMEIQRTIGADIIMAFDECTPYPCDYQYARRSMHMTHRWLERCVAHLKKLPFKYGYEQTFFPIVQGSTYKDLRQQSADYIASVGADGNAIGGLSVGEPAEEMYAMTDVVTAILPKEKPRYLMGVGTPINILENIALGIDMFDCVMPTRNARNGMLFTAHGTINIKNAKWKDDFSPIDEMDITWVDTEYSKAYLRHLFSVNEFLGKQIATIHNLGFYLWLTREARKQILAGTFRVWKDKMVKQMDKRL

SEQ ID NO: 54326 - protein, 373 aa, Croceicoccus marinus
  REGION 1..373: note = tr|A0A1Z1FAM1|A0A1Z1FAM1_9SPHN Queuine tRNA-ribosyltransferase OS=Croceicoccus marinus OX=450378; GN = tgt PE=3 SV=1
MTRFQFTIHAREGKARTGEIAMQRGTIRTPAFMPVGTAATVKAMKVEDVRKTGADIILGNTYHLMLRPGAERVARLGGLHDFMGWDRPILTDSGGYQVMSLSDLRKITEEGVTFKSHLDGSRHSLTPERSMEIQRLLGSDIVMAFDECPRADRPRDEIAASMEMSMRWAKRSRDGFDSGGEHAARSALFGIQQGALDEDLRRISAEKLTEIGFDGYAVGGLAVGEGQEAMFATLDFAPGQLPDDRPRYLMGVGKPDDLVGAVERGIDMFDCVLPSRSGRNGQAFTWNGAINIRNAKFAEDQEPLDDRCSCPTCGKYSRAYLHHLVRAGEILGAMLMTEHNLSFYQQLMQAMRDAIAGGRFAAFAADFRRDYLR

SEQ ID NO: 54327 - protein, 374 aa, unidentified
  source 1..374: note = Croceicoccus naphthovorans
  REGION 1..374: note = tr|A0A0G3XMD3|A0A0G3XMD3_9SPHN Queuine tRNA-ribosyltransferase OS=Croceicoccus naphthovorans; OX = 1348774 GN=tgt PE=3 SV=1
MTRFAFSIHARDGKARTGEIAMKRGTIRTPAFMPVGTAATVKAMKVEDVRRTGADIILGNTYHLMLRPGAERVARLGGLHKFMGWDRPILTDSGGYQVMSLSDLRKITEEGVTFASHIDGSRHMLTPERSMEIQRLLGSDIVMAFDECPRADQSRDVIAQSMEMSMRWAKRSRDGFDSGEEHAARSALFGIQQGALDEDLRGISAQKLTEIGFDGYAIGGLAVGEGQEAMFATLDFAPGQLPDDRPRYLMGVGKPDDLIGAVERGVDMFDCVLPSRSGRNGQAFTWNGPLNIRNAKFAEDNDPIDSRCTCPTCGKYSRAYLHHLNKAGEILGAMLMTEHNLSFYQQLMQAMRAAIADGRFAAFAADFRRDYLRK

SEQ ID NO: 54328 - protein, 374 aa, unidentified
  source 1..374: note = Croceicoccus ponticola
  REGION 1..374: note = tr|A0A437H0X8|A0A437H0X8_9SPHN Queuine tRNA-ribosyltransferase OS=Croceicoccus ponticola; OX = 2217664 GN=tgt PE=3 SV=1
MTRFAFSIHARDGKARTGKIAMLRGDIRTPAFMPVGTAATVKAMKVEDVRATGADIILGNTYHLMLRPGAERVARLGGLHKFMGWDRPILTDSGGYQVMSLSDLRKITEEGVSFRSHLDGSKHMLTPERSMEIQRLLGSDIVMAFDECPRADQPRDIIAQSMEMSMRWAQRSREGFDSGEDHASRAALFGIQQGALDEDLRGISAQKLAEIGFDGYAIGGLAVGEGQEAMFATLDFAPDQLPDDRPRYLMGVGKPDDLVGAVERGVDMFDCVLPSRSGRNGQAFTWNGPLNIRNAKFAEDTDPLDDRCSCSTCGKYSRAYLHHLVRAGEILGAMLMTEHNLSFYQQLMQGMRDAIGAGRFASFATDFRRDYLSK

SEQ ID NO: 54329 - protein, 373 aa, Croceicoccus sp.
  REGION 1..373: note = tr|A0A2D8D4I7|A0A2D8D4I7_9SPHN Queuine tRNA-ribosyltransferase OS=Croceicoccus sp. OX=1927144; GN = tgt PE=3 SV=1
MTRFEFTIHAREGRARTGEIAMQRGTIRTPAFMPVGTAATVKAMKVEDVRRTGAEIILGNTYHLMLRPGAERVARLGGLHAFMGWDRPILTDSGGYQVMSLSDLRKITEEGVTFKSHLDGSRHALTPERSMEIQRLLGSDIVMAFDECPRADRPRDEIAASMEMSMRWAKRSREGFDSGGEHAARSALFGIQQGALDEELRRISADKLTDIGFDGYAVGGLAVGEGQEAMFATLDFAPGQLPDDRPRYLMGVGKPDDLVGAVERGIDMFDCVLPSRSGRNGQAFTWNGPINIRNARFAEDQEPVDSRCSCPTCGKYSRAYLHHLVRSGEILGAMLMTEHNLSFYQQLMQAMRDAIAQGRFAAFAADFRREYLG

SEQ ID NO: 54330 - protein, 376 aa, Croceitalea dokdonensis
  REGION 1..376: note = tr|A0A0P7AYQ4|A0A0P7AYQ4_9FLAO Queuine tRNA-ribosyltransferase OS=Croceitalea dokdonensis DOKDO 023 OX=1300341 GN=tgt PE=3 SV=1
MKYSLLQKDPNSSARAGEITTDHGKIETPIFMPVGTVATVKGVHQRELREDINPDIILGNTYHLYLRPGMDILERAGGLHKFMGWDRNILTDSGGYQVYSLSGTRKIKEEGVNFKSHIDGSSHFFSPESVMEVQRTIGADIIMAFDECTPYPCDYGYAKNSMHMTHRWLDRCISHLEKVPVKYGYGQAFFPIVQGSTYKDLRKQSAEYIAEAGAVGNAIGGLSVGEPAEELYAMSEIVCDILPEDKPRYLMGVGTPINILENIALGVDMFDCVMPTRNARNGMLFTAEGTINIKNKKWEDDFSPLDDMGITWVDKEYSKAYLRHLFAANEYLGKQIATIHNLGFYLWLTRQAREHILAGDFRSWKDNMVKQMDKRL

SEQ ID NO: 54331 - protein, 376 aa, unidentified
  source 1..376: note = Croceivirga radicis
  REGION 1..376: note = tr|A0A1V6LNC9|A0A1V6LNC9_9FLAO Queuine tRNA-ribosyltransferase OS=Croceivirga radicis OX=1929488; GN = tgt PE=3 SV=1
MKFTLEKKDSQSKARAGTITLGHGPIQTPIFMPVGTVASVKGVHQKELREEINPDIILGNTYHLYLRPGTQILEQAGGLHKFMGWDRNILTDSGGYQVYSLSANRKIKEEGVKFKSHIDGSYHFFSPERAMEIQRSIGADIIMAFDECTPYPCEYNYAKRSMHMTHRWLDRCIKHLKEVPEMYGYEQTLFPIVQGSTYTDLRQQSAEYIANAGALGNAIGGLSVGEPAEEMYAMTDVVCAILPEDKPRYLMGVGTPINILENIALGVDMFDCVMPTRNARNGMLFTSEGTINIKNKKWENDFSPLDDLGVTFVDREYSKAYLRHLFAANEYLGKQIATIHNLGFYLWLVRTAREKIIEGTFTDWKNKMVKQMDKRL

SEQ ID NO: 54332 - protein, 376 aa, unidentified
  source 1..376: note = Crocinitomicaceae bacterium
  REGION 1..376: note = tr|A0A2D5V2M1|A0A2D5V2M1_9FLAO Queuine tRNA-ribosyltransferase OS=Crocinitomicaceae bacterium; OX = 2026728 GN=tgt PE=3 SV=1
  VARIANT 185: note = Xaa can be any naturally occurring amino acid
MNFTLRSKDPNSKARSGIINTDHGIIQTPIFMPVGTAGTVKSVSQKDLEEQVKAQIILGNTYHLYLRPGLNLLEQVGGIHKFISWNRPVLTDSGGYQVYSLSGRRKITEEGVKFKSHIDGSSHFFTPENVMNIQKSIGADIIMAFDECTPYPCDYSYAKSSTKMTHRWLKRCVDNFNNSPNKYNXSQSLFPIVQGSTYSDLRKQSAEVIASFDLPGNAIGGLSVGEPHDLMYKHTEEVCDILPESKPRYLMGVGTPSNLLECIALGVDMFDCVMPTRNARNGMLFTKEGFINIKNKKWENDFSEIDSNGTSYVDKRYSKSYLRHLFVSKEMLGPQIASIHNLSFYIWLVEESRKKIEDGTFTTWKNKMVKKLVERL

SEQ ID NO: 54333 - protein, 282 aa, unidentified
  source 1..282: note = Crocinitomicaceae bacterium
  REGION 1..282: note = tr|A0A2D8CRM4|A0A2D8CRM4_9FLAO Queuine tRNA-ribosyltransferase OS=Crocinitomicaceae bacterium; OX = 2026728 GN=tgt PE=3 SV=1
  VARIANT 109: note = Xaa can be any naturally occurring amino acid
  VARIANT 132: note = Xaa can be any naturally occurring amino acid
  VARIANT 146: note = Xaa can be any naturally occurring amino acid
  VARIANT 173: note = Xaa can be any naturally occurring amino acid
MNFKLHSKDEFSKARAGTLQTDHGEILTPIFMPVGTAGTVKAVSQEELSKNVKAEIILGNTYHLYLRPGIDLLEKSGGLHQFISWNKPILTDSGGYQVYSLSERRKITXEGVSFRSHIDGSKHLFTPENAMXIQKSIGADIIMAFXECTPYPCDFNYANTSMHMTHRWLKRCXDHFNSSPSKYGYNQSLFPIVQGSTYSDLRRKSADVIANFDMPGNAIGGLSVGEPAELMYKHTDEVCTILPEDKPRYLMGVGTPVNILECIALGVDMFDSGKLNARLILL

SEQ ID NO: 54334 - protein, 376 aa, Crocinitomix sp.
  REGION 1..376: note = tr|A0A1J5M081|A0A1J5M081_9FLAO Queuine tRNA-ribosyltransferase OS=Crocinitomix sp. MedPE-SWsnd; OX = 1860084 GN=tgt PE=3 SV=1
MDFILEKTDPNSKARTGTITTDHGEIKTPIFMPVGTAGTVKAVHQHELVEDIKAQIILGNTYHLYLRPGLEVIEKAGGLHKFNGWTKPILTDSGGYQVYSLSGTRKITEEGVNFKSHIDGSSHFFTPERAVDIQRVIGADIIMAFDECTPYPCEYNYAKNSMEMTHRWLKRCMDQMKATEGKYGYSQTLFPIVQGSTYKDLRVKSAETIASFEAEGNAIGGLSVGEPDDELYETTELVCGILPKDKPRYLMGVGTPVNILECIALGVDMMDCVLPTRNARHGTLYTKNGILNMKNAKWKEDFSPLDPDGTSYVDSFYSKSYVRHLFHSKETLAMQIGSIHNLAFFLWLVDEARNQIEEGTFTPWKNEMVVKLAQRL

SEQ ID NO: 54335 - protein, 376 aa, Crocinitomix sp.
  REGION 1..376: note = tr|A0A2W1NBL4|A0A2W1NBL4_9FLAO Queuine tRNA-ribosyltransferase OS=Crocinitomix sp. SM1701; OX = 2219161 GN=tgt PE=3 SV=1
MNFKLESTDPKSKARTGTLTTAHGEIKTPIFMPVGTAGTVKGLHQHELKNDVKAQIILGNTYHLYLRPGIETLEKAGGLHKFMNWDMPILTDSGGYQVYSLSGTRKINENGVKFQSHIDGSSHLFTPEYAMDIQRSIGADLIMAFDECTPYPCEYNYARRSMHMTHRWLKRCVDRFDSTTPLYGYDQTLLPIIQGSVYKDLRKESAETIASFDLPANAIGGLSVGEPDEDLYEMTDLVCDYLPKEKPRYLMGVGTPINLLECIALGIDMFDCVLPTRNARHGTIYTQNGIMNVKNLKWKDDFTCLDENGTSYVDSTYSKSYVRHLFTVNEALGKQITSIHNLAFYLWLVGEARTQIEAGTFTDWKNKMVVQLAQKL

SEQ ID NO: 54336 - protein, 370 aa, unidentified
  source 1..370: note = Crocosphaera chwakensis
  REGION 1..370: note = tr|A3IRI4|A3IRI4_9CHRO Queuine tRNA-ribosyltransferase OS=Crocosphaera chwakensis CCY0110; OX = 391612 GN=tgt PE=3 SV=1
MVFSFQLEKKCCHTKARAGTWSTPHGIVETPRFMPVGTLATVKGLTPAQLETTGAQMILANTYHLHLQPGEPIVEAVGGLHQFMGWNGPMLTDSGGFQVFSLSELRKVREIGVTFRSPRDGRIIELTPERSIHIQNALGADVIMAFDECPPGNADYDTVAAATDRTYRWLERCIKAHQRPHDQALFGIVQGGIYPKLRSDAVSALIPLDLPGYAIGGVSVGEEPALVRDIVKLTTPLLPESKPRYLMGVGTYKEMVMAIASGIDLFDCVIPTRFGRHGTALVAGERWNLKNAQFREDFTPLDPECPCYTCQTFSRAYLNHLVRSQEMLGYILLSLHNVTELVRFTQRIRESILRDNFTQEFATWLKEDSP

SEQ ID NO: 54337 - protein, 365 aa, unidentified
  source 1..365: note = Crocosphaera subtropica
  REGION 1..365: note = tr|B1WZE5|B1WZE5_CROS5 Queuine tRNA-ribosyltransferase OS=Crocosphaera subtropica (strain ATCC 51142 / BH68) OX=43989 GN=tgt PE=3 SV=1
MAFSFQLQKKCLHTQARVGTWSTPHGLVETPRFMPVGTLATVKGLTPAQLETTGAQMILANTYHLHLQPGETIIEAAGGLHEFMGWNGPILTDSGGFQVFSLSELRKIREIGVTFRSPRDGRIIELTPERSIHIQNALGADVIMAFDECPPGNADYDTVAAATDRTYRWLERCIKAHQRPHDQALFGIVQGGIYPKLRSDAVSALIPLDLPGYAIGGVSVGEEPALVRDIVKLTTPLLPVSKPRYLMGVGTYKEMVMAIASGIDLFDCVIPTRFGRHGTALVAGERWNLKNAQFREDFTPLDPECPCYTCQTFSRAYLNHLVRSQEMLGYILLSLHNVTELVRFTQRIREAILKDRFTQEFGHWL

SEQ ID NO: 54338 - protein, 370 aa, unidentified
  source 1..370: note = Crocosphaera watsonii
  REGION 1..370: note = tr|T2IJH3|T2IJH3_CROWT Queuine tRNA-ribosyltransferase OS=Crocosphaera watsonii WH 8502; OX = 423474 GN=tgt PE=3 SV=1
MVFSFQLQKKCLHTQARVGTWSTPHGIVETPRFMPVGTLATVKGLTPAQLETTGAQMILANTYHLHLQPGEKIVEAAGGLHSFMGWNGPILTDSGGFQVFSLSKLRKIREIGVTFRSPRDGSIIELTPERSIHIQNALGADVIMAFDECPPGDADYDAVAAATDRTYRWLERCIKAHQRPQDQGLFGIVQGGTYPKLRSDAVSALIPLDLPGYAIGGVSVGEQPALVRDIVKFTTPLLPESKPRYLMGVGTYKEMAMAIASGIDLFDCVIPTRFGRHGTALVRGERWNLKNARFREDFSPLDPECPCYVCKNFSRAYLNHLVRSREMLGYILLSLHNVTELVRFTQRIREAILNDSFTEEFADWLKEDFP

SEQ ID NO: 54339 - protein, 370 aa, unidentified
  source 1..370: note = Crocosphaera watsonii
  REGION 1..370: note = tr|T2IY60|T2IY60_CROWT Queuine tRNA-ribosyltransferase OS=Crocosphaera watsonii WH 0005; OX = 423472 GN=tgt PE=3 SV=1
MVFSFQLQKKCLHTQARVGTWSTPHGIVETPRFMPVGTLATVKGLTPAQLETTGAQMILANTYHLHLQPGEKIVEAAGGLHSFMGWNGPILTDSGGFQVFSLSKLRKIREIGVTFRSPRDGSIIELTPERSIHIQNALGADVIMAFDECPPGDADYDAVAAATDRTYRWLERCIKAHQRPQDQGLFGIVQGGTYPKLRSDAVSALIPLDLPGYAIGGVSVGEEPALVRDIVKFTTPLLPESKPRYLMGVGTYKEMAMAIASGIDLFDCVIPTRFGRHGTALVRGERWNLKNARFKEDFSPLDPECPCYVCKNFSRAYLNHLVRSREMLGYILLSLHNVTELVRFTQRIREAILNDSFTEEFADWLKEDFP

SEQ ID NO: 54340 - protein, 379 aa, Cronobacter dublinensis
  REGION 1..379: note = tr|K8ALU9|K8ALU9_9ENTR Queuine tRNA-ribosyltransferase OS=Cronobacter dublinensis 1210; OX = 1208656 GN=tgt PE=3 SV=1
MEKNVKFELDTTDGRARRGRLVFDRGVVETPAFMPVGTYGTVKGMTPEEVEATGAQIILGNTFHLWLRPGQEIMKLHGDLHDFMQWKGPILTDSGGFQVFSLGDIRKITEQGVHFRNPINGDPIFLDPEKSMEIQFDLGSDIVMIFDECTPYPADWDYAKRSMEMSLRWAKRSRDRFDSLGNKNALFGIIQGSVYEDLRDISVKGLVEIGFDGYAVGGLAVGEPKEDMHRILEHVCPQIPADKPRYLMGVGKPEDLVEGVRRGIDMFDCVMPTRNARNGHLFVTEGVVKIRNAKYKSDTGPLDPECDCYTCRNYSRAYLHHLDRCNEILGARLNTIHNLRHYQRLMAGLRKAIEEGKLEHFVADFYQRQGRPVPPLNVD

SEQ ID NO: 54341 - protein, 353 aa, Cronobacter dublinensis
  REGION 1..353: note = tr|K8B413|K8B413_9ENTR Queuine tRNA-ribosyltransferase OS=Cronobacter dublinensis 582; OX = 1208661 GN=tgt PE=3 SV=1
MVETPAFMPVGTYGTVKGMTPEEVEATGAQIILGNTFHLWLRPGQEIMKLHGDLHDFMQWKGPILTDSGGFQVFSLGDIRKITEQGVHFRNPINGDPIFLDPEKSMEIQFDLGSDIVMIFDECTPYPADWDYAKRSMEMSLRWAKRSRDRFDSLGNKNALFGIIQGSVYEDLRDISVKGLVEIGFDGYAVGGLAVGEPKEDMHRILEHVCPQIPADKPRYLMGVGKPEDLVEGVRRGIDMFDCVMPTRNARNGHLFVTEGVVKIRNAKYKSDTGPLDPECDCYTCRNYSRAYLHHLDRCNEILGARLNTIHNLRHYQRLMAGLRKAIEEGKLEHFVADFYQRQGRPVPPLNVD

SEQ ID NO: 54342 - protein, 375 aa, Cronobacter malonaticus
  REGION 1..375: note = tr|A0A423Y571|A0A423Y571_9ENTR Queuine tRNA-ribosyltransferase OS=Cronobacter malonaticus; OX = 413503 GN=tgt PE=3 SV=1
MKFELDTTDGRARRGRLVFDRGVVETPAFMPVGTYGTVKGMTPEEVEATGAQIILGNTFHLWLRPGQEIMKLHGDLHDFMQWKGPILTDSGGFQVFSLGDIRKITEQGVHFRNPINGDPIFLDPEKSMEIQFDLGSDIVMIFDECTPYPADWDYAKRSMEMSLRWAKRSRDRFDSLGNKNALFGIIQGSVYEDLRDISVKGLVEIGFDGYAVGGLAVGEPKEDMHRILEHVCPQIPADKPRYLMGVGKPEDLVEGVRRGIDMFDCVMPTRNARNGHLFVTEGVVKIRNAKYKSDTGPLDPECDCYTCRNYSRAYLHHLDRCNEILGARLNTIHNLRHYQRLMAGLRKAIEEGKLEHFVADFYQRQGRPVPPLNVD

SEQ ID NO: 54343 - protein, 379 aa, Cronobacter malonaticus; identical to SEQ ID NO: 54340
  REGION 1..379: note = tr|V5U2Q4|V5U2Q4_9ENTR Queuine tRNA-ribosyltransferase OS=Cronobacter malonaticus; OX = 413503 GN=tgt PE=3 SV=1

SEQ ID NO: 54344 - protein, 375 aa, Cronobacter muytjensii; identical to SEQ ID NO: 54342
  REGION 1..375: note = tr|A0A2T7AQH8|A0A2T7AQH8_9ENTR Queuine tRNA-ribosyltransferase OS=Cronobacter muytjensii; OX = 413501 GN=tgt PE=3 SV=1

SEQ ID NO: 54345 - protein, 379 aa, Cronobacter sakazakii; identical to SEQ ID NO: 54340
  REGION 1..379: note = tr|A7MLX8|A7MLX8_CROS8 Queuine tRNA-ribosyltransferase OS=Cronobacter sakazakii (strain ATCC BAA-894) OX=290339 GN=tgt PE=3 SV=1

SEQ ID NO: 54346 - protein, 352 aa, Cronobacter sakazakii
  REGION 1..352: note = tr|K8CZ60|K8CZ60_CROSK Queuine tRNA-ribosyltransferase OS=Cronobacter sakazakii 696; OX = 1208664 GN=tgt PE=3 SV=1
METPAFMPVGTYGTVKGMTPEEVEATGAQIILGNTFHLWLRPGQEIMKLHGDLHDFMQWKGPILTDSGGFQVFSLGDIRKITEQGVHFRNPINGDPIFLDPEKSMEIQFDLGSDIVMIFDECTPYPADWDYAKRSMEMSLRWAKRSRDRFDSLGNKNALFGIIQGSVYEDLRDISVKGLVEIGFDGYAVGGLAVGEPKEDMHRILEHVCPQIPADKPRYLMGVGKPEDLVEGVRRGIDMFDCVMPTRNARNGHLFVTEGVVKIRNAKYKSDTGPLDPECDCYTCRNYSRAYLHHLDRCNEILGARLNTIHNLRHYQRLMAGLRKAIEEGKLEHFVADFYQRQGRPVPPLNVD

SEQ ID NO: 54347 - protein, 375 aa, Cronobacter turicensis; identical to SEQ ID NO: 54342
  REGION 1..375: note = tr|A0A2T7B999|A0A2T7B999_9ENTR Queuine tRNA-ribosyltransferase OS=Cronobacter turicensis; OX = 413502 GN=tgt PE=3 SV=1

SEQ ID NO: 54348 - protein, 375 aa, Cronobacter turicensis; identical to SEQ ID NO: 54342
  REGION 1..375: note = tr|C9XX69|C9XX69_CROTZ Queuine tRNA-ribosyltransferase OS=Cronobacter turicensis (strain DSM 18703 / LMG 23827 / z3032) OX=693216 GN=tgt PE=3 SV=1

SEQ ID NO: 54349 - protein, 375 aa, Cronobacter universalis; identical to SEQ ID NO: 54342
  REGION 1..375: note = tr|A0A376E3H4|A0A376E3H4_9ENTR Queuine tRNA-ribosyltransferase OS=Cronobacter universalis NCTC 9529 OX=1074000 GN=tgt PE=3 SV=1

SEQ ID NO: 54350 - protein, 377 aa, unidentified
  source 1..377: note = Cruoricaptor ignavus
  REGION 1..377: note = tr|A0A1M6AW59|A0A1M6AW59_9FLAO Queuine tRNA-ribosyltransferase OS=Cruoricaptor ignavus OX=1118202; GN = tgt PE=3 SV=1
MNPFFQIEKTTESKARAGIISTDHGKIETPIFMPVGTVASVKTVHQSELREDIKAQIILGNTYHLYLRPAMEVMQNAGGLHKFMNWDLPILTDSGGFQVFSLSDSRKMTEEGVKFKSHIDGSYHFISPEKSMEIQRQIGADIFMAFDECTAYPSTYTQAKLSMEMTHRWLKRCIKWCEENPEIYAHRQHLFPIVQGSTFSDLRKISAEFISEQNCDGNAIGGLSVGEPEDEMYRITDEVTDILPKEKPRYLMGVGTPWNILESIGLGIDMMDCVLPTRNARNGMLFTWKGVINIKNEKWKNDFSPLDEFGKSYVDRDYSKAYVRHLFVSREYLGKQIASVHNLAFYLDLVKTARQHILAGDFYQWKNSVLPELKNRL

SEQ ID NO: 54351 - protein, 376 aa, unidentified
  source 1..376: note = Cryomorphaceae bacterium
  REGION 1..376: note = tr|A0A2D5N918|A0A2D5N918_9FLAO Queuine tRNA-ribosyltransferase OS=Cryomorphaceae bacterium; OX = 1898111 GN=tgt PE=3 SV=1
  VARIANT 142: note = Xaa can be any naturally occurring amino acid
MKFTLEHNDPKSAARAGTITTDHGTIQTPIFMPVGTAGTVKGVHTKDLREDTKAQIILGNTYHLFLRPGTEILKAAGGLHKFNGWDRPILTDSGGYQVYSLANQRKITEEGATFASHIDGTKHLFTPERVMDIQREIGADIXMAFDECPPYPSTYEYAKQSMHMTHRWLDRCFNRIHETDPLYGYEQTLFPIIQGSTYEDLRNESAEYIARKNADGNAIGGLSVGEPAEEMYKHAAGACAILPKDKPRYLMGVGTPANILENISLGIDMFDCVMPTRNGRNGQIFTSEGILNLRNKKWENVHEPLDKNGTSFVDSQYTKAYVRHLIHSKESLGAQIASLHNIRFYLWLVEQAREHIIAGDFASWKNHILPKLEQRL

SEQ ID NO: 54352 - protein, 282 aa, unidentified
  source 1..282: note = Cryomorphaceae bacterium
  REGION 1..282: note = tr|A0A0R2QVN7|A0A0R2QVN7_9FLAO Queuine tRNA-ribosyltransferase (Fragment) OS=Cryomorphaceae bacterium BACL11 MAG-121001-bin54 OX=1655587 GN=tgt PE=3; SV = 1
MKFTLLKADKESKARLGEIQTAHGIIKTPIFMPVGTAGTVKGVHQHELLEDTLAQIILGNTYHLYLRPGLDIIQGAGGLHKFIGWDKPLLTDSGGYQVYSLSGTRKIEEKGVKFQSHIDGSYHFFTPEYAIDVQRTIGADIIMAFDECTPYPCEYDYAKRSMHMTHRWLKRCCERFDSTEGKYGFEQSFFPIVQGSVYKDLRLQSAEKIASFEREGNAIGGLSVGEPHDMMYEMTQTVCSVLPWDKPRYLMGVGTPTNLLENIALGIDMFDCVMPTRNARNG

SEQ ID NO: 54353 - protein, 382 aa, Cryptobacterium curtum
  REGION 1..382: note = tr|C7MKZ5|C7MKZ5_CRYCD Queuine tRNA-ribosyltransferase OS=Cryptobacterium curtum (strain ATCC 700683 / DSM 15641 / 12-3) OX=469378 GN=tgt PE=3 SV=1
MSLFDLTIDAQSGHARATTYQTAHGSFTTPLFMPVGTHATVKGIMPDMLKQLQSQVVLANTYHLYMRPGVDVVEEAGGVQKFMHYDGPMLTDSGGFQLFSLDHMMKVDGDGVSFQARDYDGSRHRWTPEANMRIQERLGADIAMQLDQCIGYPAEKSAVAASTKLSWEWARRCCDAHVRPDQALFGIVQGGMHLDLRLESVNRLATIDKESRNQGGRGFQGWGIGGYSVGEPHDVMFATLGQVARSLPDHMPRYLMGVGNPTTLVRAVREGVDMFDCVLPTRTGRMGTAFSSTGRMNLRNARYTHDFTPLDHECTCPVCTQFTRAYIRHLVKQGEMLGGILLSMHNIYFLTDLMRRAREAILADAYEEFYAAWMASPAAKDY

SEQ ID NO: 54354 - protein, 381 aa, Cryptobacterium sp.
  REGION 1..381: note = tr|R7CJQ7|R7CJQ7_9ACTN Queuine tRNA-ribosyltransferase OS=Cryptobacterium sp. CAG:338; OX = 1262868 GN=tgt PE=3 SV=1
MALFDFTLEAQSGHARAGLFETAHGTVRTPLFMPVGTSATVKGIRPQMLKELGAQIVLSNTYHLSLRPGADLIAEAGGLHKFMAYDGPILTDSGGFQIFSLADTLKLDDDGVTFSSIYDGSKIRWTPETNMDIQQKLGADIIMQLDQCPPYPATREFVQRAVDLSSAWAKRCLAAHTREDQALFAICQGGMNLDMRLESIRRLKEISDESVRGGHKDFKGFGIGGYSVGEDHEVMFETLGEVARACPENKPRYVMGVGNPTTLVRAVHEGVDMFDCVLPTRTARMGTAFSSQGRMNMRNARFVHDFGPLDENCTCPTCQTHSRSYIRHLVKQNEMLGSILLSIHNLHFLIDLMNRAREAVLQDAYEDFYQDWMHSPAAQDY

SEQ ID NO: 54355 - protein, 376 aa, unidentified
  source 1..376: note = Culturomica sp.
  REGION 1..376: note = tr|A0A356DFW3|A0A356DFW3_9BACT Queuine tRNA-ribosyltransferase OS=Culturomica sp. OX=1926652; GN = tgt PE=3 SV=1
MQYTLLAKDKNSEARCGVLTTAHGEIHTPIFMPVGTVGTVKAVHARELKTDIRAEIILGNTYHLYLRPGTDILQAAGGLHKFNGWDRPILTDSGGFQVFSLTDRRKITEEGVIFHSHIDGSKHIFTPESVMDIQRKIGADIIMAFDECPPGTSEYGYAKKSLELTQRWLERCVKHLDATEPLYGYEQNLFPIVQGCVYKDLRERSAEHAVALDRAGYAIGGLAVGEPAEDMYAMIEVVNRILPQNKPRYLMGVGTPENILEAIALGVDMFDCVMPTRNGRNGMLFTTEGVINIKNRKWDRDFSPLDPAGLCFVDTDYTKAYLRHLIKADEILGLQICSIHNLAFYLWLVREARKHILEGDFAVWKSRMVKKVTTRL

SEQ ID NO: 54356 - protein, 378 aa, unidentified
  source 1..378: note = Cuneatibacter caecimuris
  REGION 1..378: note = tr|A0A4Q7PPR1|A0A4Q7PPR1_9FIRM Queuine tRNA-ribosyltransferase OS=Cuneatibacter caecimuris; OX = 1796618 GN=tgt PE=3 SV=1
MYQIITEDGRAKRAVFETVHGTVQTPVFMNVGTAAAIKGAVATTDLQQIGTQIELSNTYHLHVRPGDQVVRQLGGLHRFMVWDKPILTDSGGFQVFSLSGLRRIKEEGVYFQSHVDGRKIFMGPEESMQIQSNLASTIAMAFDECPSSVAERSYIENSVARTTRWLVRCKEEMARLNSLPDTINPRQMLFGINQGGVCEDIRIAHAQEISGLDLDGYAVGGLAVGESHEEMYQVLDAVVPHLPRNKPTYLMGVGTPANILEAVDRGVDFFDCVYPSRNGRHGHVYTAFGKLNLFNARYELDPRPIEEGCGCPACRNYSRAYIRHLLKAKEMLGMRLCVLHNLYFYNHLMEEIREAIEQRRYGEYKKQKLAGLLSGEQN

SEQ ID NO: 54357 - protein, 376 aa, unidentified
  source 1..376: note = Cupriavidus alkaliphilus
  REGION 1..376: note = tr|A0A329AW59|A0A329AW59_9BURK Queuine tRNA-ribosyltransferase OS=Cupriavidus alkaliphilus; OX = 942866 GN=tgt PE=3 SV=1
MLNFELITTDGNARRGRVTLNHGVVETPIFMPVGTYGSVKAMSPLELNEIGAQIILGNTFHLWLRPGLEVVNAHDGLHRFIGWDKPILTDSGGFQVFSLGDLRKITEDGVTFASPVNGDKLFLSPEISMQIQRTLNSDIVMQFDECTPYEIDGRPATHEEAAQSMRMSLRWAKRSRDEFERLANPNALFGIVQGGMYEDLRDESLAGLSELDFHGFAIGGLSVGEPKEDMMRVLEHVAPRLPANKPHYLMGVGTPEDLVAGVAAGVDMFDCVMPTRNARNGWLFTRYGDVKIKNAAHRNDPRPLDESCACYTCRNFSRAYLHHLHRVGEILGARLNTIHNLHYYLQLMREVREAIEQHRFTDFRRQFAADRARGTQ

SEQ ID NO: 54358 - protein, 376 aa, unidentified
  source 1..376: note = Cupriavidus alkaliphilus
  REGION 1..376: note = tr|A0A2W7PAD6|A0A2W7PAD6_9BURK Queuine tRNA-ribosyltransferase OS=Cupriavidus alkaliphilus; OX = 942866 GN=tgt PE=3 SV=1
MLNFELITTDGNARRGRVTLNHGVVETPIFMPVGTYGSVKAMSPLELNEIGAQIILGNTFHLWLRPGLDVVNAHDGLHRFIGWDKPILTDSGGFQVFSLGDLRKITEDGVTFASPVNGDKLFLSPEISMQIQRTLNSDIVMQFDECTPYEIDGRPATHEEAAKSMRMSLRWAKRSRDEFERLANPNALFGIVQGGMYEDLRDESLAGLSELDFHGFAIGGLSVGEPKEDMMRVLEHVAPRLPANKPHYLMGVGTPEDLVAGVAAGVDMFDCVMPTRNARNGWLFTRYGDVKIKNAAHRNDPRPLDESCACYTCRNFSRAYLHHLHRVGEILGARLNTIHNLHYYLQLMREVREAIEQHRFTDFRRQFAADRARGTQ

SEQ ID NO: 54359 - protein, 383 aa, Cupriavidus basilensis
  REGION 1..383: note = tr|A0A0C4YDD5|A0A0C4YDD5_9BURK Queuine tRNA-ribosyltransferase OS=Cupriavidus basilensis OX=68895; GN = tgt PE=3 SV=1
MLNFELLTTDGNARRGRVTLNHGVVETPIFMPVGTYGSVKAMSPLELGEINAQIILGNTFHLWLRPGLEVVEKHGGLHRFMGWDKPILTDSGGFQVFSLGALRKITEDGVTFASPVNGDKLFLSPEISMQIQRTLNSDIVMQFDECTPYEIDGRPATHAEAAASMRMSLRWAKRSIDEFNSLGNPNALFGIVQGGMFEDLRDESLAGLSELDFHGYAIGGLSVGEPKEDMMRVLEHVGPRLPAHKPHYLMGVGTPEDLVAGVASGVDMFDCVMPTRNARNGWLFTRFGDVKIKNAVHRNDTRPLDESCGCYTCRNFSRAYLHHLHRVGEILGARLNTIHNLHYYLELMSEMREAIEEHRFEAFRLRFAADRARGAQPATPAPA

SEQ ID NO: 54360 - protein, 263 aa, Cupriavidus basilensis
  REGION 1..263: note = tr|H1S2E7|H1S2E7_9BURK Queuine tRNA-ribosyltransferase OS=Cupriavidus basilensis OR16; OX = 1127483 GN=tgt PE=3 SV=1
MLNFELLTTDGNARRGRVTLNHGVVETPIFMPVGTYGSVKAMSPLELGEINAQIILGNTFHLWLRPGLEVVEKHGGLHRFMGWDKPILTDSGGFQVFSLGALRKITEDGVTFASPVNGDKLFLSPEISMQIQRTLNSDIVMQFDECTPYEIDGRPATHAEAAASMRMSLRWAKRSIDEFNGVGNPNALFGIVQGGMFEDLRDESLAGLSELDFHGYAIGGLSVGEPKEDMMRVLEHVGPRLPAHKPHYLMGVGTPACTTTSNS

SEQ ID NO: 54361 - protein, 376 aa, Cupriavidus campinensis
  REGION 1..376: note = tr|A0A556UIA1|A0A556UIA1_9BURK Queuine tRNA-ribosyltransferase OS=Cupriavidus campinensis; OX = 151783 GN=tgt PE=3 SV=1
MLDFELLTTDGNARRGRVTLNHGVVETPIFMPVGTYGSVKAMSPLELNEIGAQIILGNTFHLWLRPGLDVVEAHEGLHRFVGWDKPILTDSGGFQVFSLGELRKITEDGVTFASPVNGDKLFLSPEISMQIQRTLNSDIVMQFDECTPYEIDGRPATHDEAARSMRMSLRWAKRSRDEFERLTNPNALFGIVQGGMFEDLRDESLAGLSELDFHGYAIGGLSVGEPKEDMMRVLEHVGPRLPANKPHYLMGVGTPEDLVAGVASGVDMFDCVMPTRNARNGWLFTRFGDVKIRNAAHRNDPRPLDETCGCYTCRNFSRAYLHHLHRVGEILGARLNTIHNLYYYLELMREMRTAIEEHRFEPFRRQFAEHRARGTK

SEQ ID NO: 54362 - protein, 376 aa, Cupriavidus gilardii
  REGION 1..376: note = tr|A0A562BKD9|A0A562BKD9_9BURK Queuine tRNA-ribosyltransferase OS=Cupriavidus gilardii J11; OX = 936133 GN=tgt PE=3 SV=1
MLQFELLTTDGNARRGRLTLNHGVVETPIFMPVGTYGSVKAMSPLELNEIGAQIILGNTFHLWLRPGLEVVDTHQGLHRFIGWDKPILTDSGGFQVFSLGDLRKITEEGVTFASPVNGDKLFLSPEISMQVQRTLNSDIVMQFDECTPYEIDGRPATHDEAARSMRMSLRWARRSRDEFDRLANPNALFGIVQGGMFEDLRDESLAGLGELGFHGLAIGGLSVGEPKEDMMRVLEHVGPRLPADKPHYLMGVGTPEDLVAGVASGVDMFDCVMPTRNARNGWLFTRYGDVKIKNAVHRNDPRPLDESCGCYTCRNFSRAYLHHLHRVGEILGARLNTIHNLYYYLQLMREIREAIEQHRYDAFRRQFGADRARGTQ

SEQ ID NO: 54363 - protein, 376 aa, Cupriavidus gilardii
  REGION 1..376: note = tr|A0A5A8EX02|A0A5A8EX02_9BURK Queuine tRNA-ribosyltransferase OS=Cupriavidus gilardii OX=82541; GN = tgt PE=3 SV=1
MLEFELLTTDGNARRGRVTLNHGVVETPIFMPVGTYGSVKAMSPLELNEIGAQIILGNTFHLWLRPGLEVIDTHQGLHRFIGWDKPILTDSGGFQVFSLGELRKITEEGVTFASPVNGDKLFLSPEISMQIQRTLNSDIVMQFDECTPYEIEGRPATHEEAARSMRMSLRWAKRSRDEFERLANPNALFGIVQGGMFEDLRDESLAGLSELGFHGLAIGGLSVGEPKEDMMRVLEHVGPRLPADKPHYLMGVGTPEDLVAGVACGVDMFDCVMPTRNARNGWLFTRFGDVKIKNAAHRNDPRPLDESCACYTCRNFSRAYLHHLHRVGEILGARLNTIHNLYYYLQLMREIREAIEQHRFDAFRRQFAADRARGTQ

SEQ ID NO: 54364 - protein, 376 aa, Cupriavidus metallidurans
  REGION 1..376: note = sp|Q1LJ59|TGT_CUPMC Queuine tRNA-ribosyltransferase; OS = Cupriavidus metallidurans (strain ATCC 43123 / DSM 2839 / NBRC 102507 / CH34) OX=266264 GN=tgt PE=3 SV=1
MLNFELLTTDGNARRGRVTLNHGVVETPIFMPVGTYGSVKAMSPLELNEIGAQIILGNTFHLWLRPGLDVVDTHAGLHKFIGWDKPILTDSGGFQVFSLGELRKITEEGVTFASPVNGDKLFLSPEISMQIQRTLNSDIVMQFDECTPYEIDGRPATHDEAARSMRMSLRWAKRSRDEFDHLANPNALFGIVQGGMFEDLRDESLAGLSELDFHGYAIGGLSVGEPKEDMMRVLEHVGPRLPAHKPHYLMGVGTPEDLVAGVAHGVDMFDCVMPTRNARNGWLFTRFGDVKIRNAAHRNDPRPLDEQCGCYTCRNFSRAYLHHLHRVGEILGARLNTIHNLYYYLELMREMRTAIEEHRFEAFRRQFAENRARGTR

SEQ ID NO: 54365 - protein, 376 aa, Cupriavidus metallidurans; identical to SEQ ID NO: 54364
  REGION 1..376: note = tr|A0A132HD94|A0A132HD94_9BURK Queuine tRNA-ribosyltransferase OS=Cupriavidus metallidurans; OX = 119219 GN=tgt PE=3 SV=1

SEQ ID NO: 54366 - protein, 376 aa, unidentified
  source 1..376: note = Cupriavidus nantongensis
  REGION 1..376: note = tr|A0A142JNT8|A0A142JNT8_9BURK Queuine tRNA-ribosyltransferase OS=Cupriavidus nantongensis; OX = 1796606 GN=tgt PE=3 SV=1
MLNFELLTTDGNARRGRVTLNHGVVETPIFMPVGTYGSVKAMSPLELNEIGAQIILGNTFHLWLRPGLDVVNAHDGLHRFIGWDKPILTDSGGFQVFSLGDLRKITEDGVTFASPVNGDKLFLSPEISMQIQRTLNSDIVMQFDECTPYEIDGRPATHEEAAKSMRMSLRWAKRSRDEFERLANPNALFGIVQGGMYEDLRDESLAGLSELDFHGFAIGGLSVGEPKEDMMRVLEHVAPRLPANKPHYLMGVGTPEDLVAGVAAGVDMFDCVMPTRNARNGWLFTRYGDVKIKNAAHRNDPPPLDESCACYTCRNFSRAYLHHLHRVGEILGARLNTIHNLHYYLQLMREVREAIEQHRFTDFRRQFAADRARGTQ

SEQ ID NO: 54367 - protein, 376 aa, Cupriavidus necator
  REGION 1..376: note = sp|Q0K733|TGT_CUPNH Queuine tRNA-ribosyltransferase; OS = Cupriavidus necator (strain ATCC 17699 / H16 / DSM 428 / Stanier 337) OX=381666 GN=tgt PE=3 SV=1
MLNFELITTDGNARRGRVTLNHGVVETPIFMPVGTYGSVKAMSPLELNEIGAHIILGNTFHLWLRPGLDVVNAHEGLHKFIGWDKPILTDSGGFQVFSLGDLRKITEDGVTFASPVNGDKLFLSPEISMQIQRTLNSDIVMQFDECTPYEIDGRAATHEEAAKSMRMSLRWAKRSRDEFERLANPNALFGIVQGGMYEDLRDESLAGLSELDFHGFAIGGLSVGEPKEDMMRVLEHVAPRLPAHKPHYLMGVGTPEDLVAGVAAGVDMFDCVMPTRNARNGWLFTRFGDVKIKNAAHRNDPRPLDESCACYTCRNFSRAYLHHLHRVGEILGARLNTIHNLHYYLQLMREMREAIEHHRFADFRRQFAADRARGTQ

SEQ ID NO: 54368 - protein, 376 aa, Cupriavidus necator
  REGION 1..376: note = tr|A0A1K0J476|A0A1K0J476_CUPNE Queuine tRNA-ribosyltransferase OS=Cupriavidus necator OX=106590; GN = tgt PE=3 SV=1
MLNFELITPDGNARRGRVTLNHGVVETPIFMPVGTYGSVKAMSPLELNEIDAQIILGNTFHLWLRPGLDVVNAHEGLHRFIGWDKPILTDSGGFQVFSLGDLRKITEDGVTFASPVNGDKLFLSPEISMQIQRTLNSDIVMQFDECTPYEIDGRAATHDEAAKSMRMSLRWAKRSRDEFERLANPNALFGIVQGGMYEDLRDESLAGLSELDFHGFAIGGLSVGEPKEDMMRVLEHVAPRLPADKPHYLMGVGTPEDLVAGVAAGVDMFDCVMPTRNARNGWLFTRFGDVKIKNAAHRNDPRPLDESCACYTCRNFSRAYLHHLHRVGEILGARLNTIHNLHYYLQLMREMREAIEHHRFADFRRQFAADRARGTQ

SEQ ID NO: 54369 - protein, 376 aa, Cupriavidus oxalaticus
  REGION 1..376: note = tr|A0A375G9M4|A0A375G9M4_9BURK Queuine tRNA-ribosyltransferase OS=Cupriavidus oxalaticus OX=96344; GN = tgt PE=3 SV=1
MLNFELITTDGNARRGRVTLNHGVVETPIFMPVGTYGSVKAMSPLELNEIGAHIILGNTFHLWLRPGLEVVNAHGGLHKFIGWDKPILTDSGGFQVFSLGDLRKITEDGVTFASPVNGDKLFLSPEISMQIQRTLNSDIVMQFDECTPYEIDGRPATHDEAAKSMRMSLRWAKRSIDEFERLANPNALFGIVQGGMYEDLRDESLAGLSELDFHGFAIGGLSVGEPKEDMMRVLEHVAPRLPANKPHYLMGVGTPEDLVAGVAAGVDMFDCVMPTRNARNGWLFTRYGDVKIKNAAHRNDPRPLDESCACYTCRNFSRAYLHHLHRVGEILGARLNTIHNLHYYLQLMREVRESIERHRFADFRRQFAADRARGTQ

SEQ ID NO: 54370 - protein, 376 aa, Cupriavidus oxalaticus
  REGION 1..376: note = tr|A0A4P7LDQ4|A0A4P7LDQ4_9BURK Queuine tRNA-ribosyltransferase OS=Cupriavidus oxalaticus OX=96344; GN = tgt PE=3 SV=1
MLNFELITTDGNARRGRVTLNHGVVETPIFMPVGTYGSVKAMSPLELNEIGAHIILGNTFHLWLRPGLDVVNAHGGLHKFIGWDKPILTDSGGFQVFSLGDLRKITEDGVTFASPVNGDKLFLSPEISMQIQRTLNSDIVMQFDECTPYEIDGRPATHEEAAKSMRMSLRWAKRSLDEFERLENPNALFGIVQGGMYEDLRDESLAGLSELDFHGFAIGGLSVGEPKEDMMRVLEHVAPRLPANKPHYLMGVGTPEDLVAGVAAGVDMFDCVMPTRNARNGWLFTRYGDVKIKNAAHRNDPRPLDESCACYTCRNFSRAYLHHLHRVGEILGARLNTIHNLHYYLQLMREVRESIEHHRFADFRRQFASDRARGTQ

SEQ ID NO: 54371 - protein, 376 aa, Cupriavidus pauculus
  REGION 1..376: note = tr|A0A2N5CGR0|A0A2N5CGR0_9BURK Queuine tRNA-ribosyltransferase OS=Cupriavidus pauculus OX=82633; GN = tgt PE=3 SV=1
MLNFELLTTDGNARRGRVTLNHGVVETPIFMPVGTYGSVKAMSPLELNEIGAEIILGNTFHLWLRPGLDVVDTHDGLHKFIGWDKPILTDSGGFQVFSLGELRKITEEGVTFASPVNGDKLFLSPEISMQIQRTLNSDIVMQFDECTPYEIDGRPATHDEAARSMRMSLRWAKRSRDEFDRLANPNALFGIVQGGMFEDLRDESLAGLSELDFHGYAIGGLSVGEPKEDMMRVLEHVGPRLPAHKPHYLMGVGTPEDLVAGVAHGVDMFDCVMPTRNARNGWLFTRFGDVKIRNAAHRNDPRPLDEQCGCYTCRNFSRAYLHHLHRVGEILGARLNTIHNLYYYLELMREMRKAIEEHRFEAFRRQFAENRARGTK

SEQ ID NO: 54372 - protein, 376 aa, Cupriavidus pauculus
  REGION 1..376: note = tr|A0A3G8GYY2|A0A3G8GYY2_9BURK Queuine tRNA-ribosyltransferase OS=Cupriavidus pauculus OX=82633; GN = tgt PE=3 SV=1
MLNFELLTTDGNARRGRVTLNHGVVETPIFMPVGTYGSVKAMSPLELNEIGAQIILGNTFHLWLRPGLDVVETHQGLHKFVGWDKPILTDSGGFQVFSLGELRKITEEGVRFASPVNGDKLFLSPEISMQIQRTLNSDIVMQFDECTPYEIDGRPATHDEAARSMRMSLRWAKRSRDEFDRLANPNALFGIVQGGMFEDLRDESLAGLSELDFHGYAIGGLSVGEPKADMMRVLEHVGPRLPAHKPHYLMGVGTPEDLVAGVAHGVDMFDCVMPTRNARNGWLFTRFGDVKIRNAAHRNDPRPLDEQCGCYTCRNFSRAYLHHLHRVGEILGARLNTIHNLYYYLELMREMRTAIEEHRFEAFRRRFAEDRARGTR

SEQ ID NO: 54373 - protein, 376 aa, Cupriavidus pinatubonensis
  REGION 1..376: note = sp|Q46XG4|TGT_CUPPJ Queuine tRNA-ribosyltransferase; OS = Cupriavidus pinatubonensis (strain JMP 134 / LMG 1197); OX = 264198 GN=tgt PE=3 SV=1
MLNFELITTDGNARRGRVTLNHGVVETPIFMPVGTYGSVKAMSPLELNEIGAEIILGNTFHLWLRPGLDVVNTHEGLHRFIGWDKPILTDSGGFQVFSLGDLRKITEDGVTFASPVNGDKLFLSPEISMQIQRTLNSDIVMQFDECTPYEIEGRPATHEEAAKSMRMSLRWAKRSRDEFERLANPNALFGIVQGGMFEDLRDESLAGLSELDFHGFAIGGLSVGEPKEDMMRVLEHVAPRLPADKPHYLMGVGTPEDLVAGVAAGVDMFDCVMPTRNARNGWLFTRYGDVKIRNAAHRNDPRPLDESCACYTCRNFSRAYLHHLHRVGEILGARLNTIHNLHYYLQLMREVRESIEQHRFSDFRRQFASDRARGTR

SEQ ID NO: 54374 - protein, 379 aa, unidentified
  source 1..379: note = Cupriavidus plantarum
  REGION 1..379: note = tr|A0A316EUI6|A0A316EUI6_9BURK Queuine tRNA-ribosyltransferase OS=Cupriavidus plantarum OX=942865; GN = tgt PE=3 SV=1
MLNFELITTDGAARRGRVTLNHGVVETPIFMPVGTYGSVKAMSPLELNEIGAQIILGNTFHLWLRPGLDVVGAHDGLHRFIGWDKPILTDSGGFQVFSLGDLRKITEEGVTFASPINGDKLFLSPEISMQIQRTLNSDIVMQFDECTPYEIDGRPATHEEAARSMRMSLRWARRSRDEFDGGKLGPNPNALFGIVQGGMFEDLRDESLAGLSDLDFHGYAIGGLSVGEPKEDMMRVLAHVGPRLPANKPHYLMGVGTPEDLVAGVAAGVDMFDCVMPTRNARNGWLFTRFGDVKIRNAVHRSDQRPLDEQCGCYTCRNFSRAYLHHLYRLGEILGARLNTIHNLYYYLELMAEMREAIEEHRFEAFRRRFAEDRARGTQ

SEQ ID NO: 54375 - protein, 376 aa, Cupriavidus sp.; identical to SEQ ID NO: 54367
  REGION 1..376: note = tr|R7X995|R7X995_9BURK Queuine tRNA-ribosyltransferase OS=Cupriavidus sp. GA3-3; OX = 1229514 GN=tgt PE=3 SV=1

SEQ ID NO: 54376 - protein, 376 aa, Cupriavidus sp.
  REGION 1..376: note = tr|A0A1D9GYX8|A0A1D9GYX8_9BURK Queuine tRNA-ribosyltransferase OS=Cupriavidus sp. USMAA2-4; OX = 876364 GN=tgt PE=3 SV=1
MLEFELLTTDGNARRGRVKLNHGVVETPIFMPVGTYGSVKAMSPLELNEIGAQIILGNTFHLWLRPGLDVIGAHEGLHRFVGWDKPILTDSGGFQVFSLGELRKITEEGVTFASPVNGDKLFLSPEISMQIQRALNSDIVMQFDECTPYEIEGRPATHAEAAASMRMSLRWAKRSRDEFERLANPNALFGIVQGGMFEDLRDESLAGLSELDFHGFAIGGLSVGEPKEDMMRVLQHVAPRLPADKPHYLMGVGTPEDLVAGVAAGVDMFDCVMPTRNARNGWLFTRFGDVKIKNAAHRNDPRPLDESCECYTCRNFSRAYLHHLHRVGEILGARLNTIHNLYYYLQLMREMREAIEQHRFDAFRLQFAADRARGAR

SEQ ID NO: 54377 - protein, 376 aa, Cupriavidus taiwanensis
  REGION 1..376: note = sp|B3R6J4|TGT_CUPTR Queuine tRNA-ribosyltransferase; OS = Cupriavidus taiwanensis (strain DSM 17343 / BCRC 17206 / CIP 107171 / LMG 19424 / R1) OX=977880 GN=tgt PE=3 SV =1
MLNFELITTDGNARRGRVTLNHGVVETPIFMPVGTYGSVKAMSPLELNEIGAQIILGNTFHLWLRPGLDVVNAHEGLHRFIGWDKPILTDSGGFQVFSLGDLRKITEDGVTFASPVNGDKLFLSPEISMQIQRTLNSDIVMQFDECTPYEIDGRPATHEEAAKSMRMSLRWARRSRDEFERLANPNALFGIVQGGMYEDLRDESLAGLSELDFHGFAIGGLSVGEPKEDMMRVLEHVAPRLPANKPHYLMGVGTPEDLVAGVAAGVDMFDCVMPTRNARNGWLFTRYGDVKIKNAAHRNDPRPLDESCACYTCRNFSRAYLHHLHRVGEILGARLNTIHNLHYYLQLMREVREAIEQHRFADFRRQFAADRARGTQ

SEQ ID NO: 54378 - protein, 376 aa, Cupriavidus taiwanensis
  REGION 1..376: note = tr|A0A375GZ33|A0A375GZ33_9BURK Queuine tRNA-ribosyltransferase OS=Cupriavidus taiwanensis; OX = 164546 GN=tgt PE=3 SV=1
MLNFELITTDGNARRGRVTLNHGVVETPIFMPVGTYGSVKAMSPLELNEIGAHIILGNTFHLWLRPGLEVVNAHDGLHRFIGWDKPILTDSGGFQVFSLGDLRKITEDGVTFASPVNGDKLFLSPEISMQIQRTLNSDIVMQFDECTPYEIDGRPATHEEAARSMRMSLRWARRSRDEFERLANPNALFGIVQGGMYEDLRDESLAGLSELDFHGFAIGGLSVGEPKEDMMRVLEHVAPRLPANKPHYLMGVGTPEDLVAGVAAGVDMFDCVMPTRNARNGWLFTRYGDVKIKNAAHRNDPRPLDESCACYTCRNFSRAYLHHLHRVGEILGARLNTIHNLHYYLQLMREVREAIEQHRFAGFRRQFAADRARGTQ

SEQ ID NO: 54379 - protein, 382 aa, unidentified
  source 1..382: note = [Curtobacterium] plantarum
  REGION 1..382: note = tr|A0A3M7UJU2|A0A3M7UJU2_9GAMM Queuine tRNA-ribosyltransferase OS=[Curtobacterium] plantarum; OX = 221276 GN=tgt PE=3 SV=1
MKFELDTTDGRARRGRLIFDRGVVETPAFMPVGTYGTVKGMTPEEVQETGAQIILGNTFHLWLRPGQEIMKLHGDLHDFMQWKGPILTDSGGFQVFSLGDIRKITEAGVHFRNPINGDPIFLDPEKSMEIQYDLGSDIVMIFDECTPYPADWDYAKRSMEMSLRWAQRSRDRFDSLGNKNALFGIIQGSVYEDLRDVSVKGLVEIGFDGYAVGGLAVGEPKQDMHRILEHVCPQLPQDKPRYLMGVGKPEDLVEGVRRGVDMFDCVMPTRNARNGHLFVTEGVVKIRNARYKDDTAPLDAECDCYTCRNYSRAYLYHLDRCNEILGARLNTIHNLRYYQRLMAGLRQAIEEGKLERFVNEFYQRTGKEVPPLTSDNSSMREI

SEQ ID NO: 54380 - protein, 411 aa, unidentified
  source 1..411: note = Curvibacter putative
  REGION 1..411: note = tr|C9YEZ2|C9YEZ2_9BURK Queuine tRNA-ribosyltransferase OS=Curvibacter putative symbiont of Hydra magnipapillata OX=667019 GN=tgt PE=3 SV=1
MITDTGTPMLKFDLLNNDPASADGSYLGSHARRGRLTLNHGVVETPIFMPVGTYGTVKGVMPRSLHDMNAQIILGNTFHLWMRPGLDVVQKFGGLHQFEKWDKPILTDSGGFQVWSLGEMRKISEEGVKFASPVNGDKLFLTPEISMQIQTTLNSDIVMQFDECTPYLSVEPKTKGQITTEREARSSMELSLRWAKRCQDEFARLNNPNALFGIVQGGMFEHLRDESLAGLEALDFPGIAVGGLSVGEPKEDMMRVLKHIGPKLPKHKPHYLMGVGTPEDLIAGVQNGIDMFDCVMPTRNARNGTLFSRYGDLKIRNARHKSDEQPLDVTCTCYACAGSSGVSWANGGRDGFSRAYLHHLDRCGEMLGPMLASVHNLHYYLNLMQEVRDALDAGRFGAFVQQFHADRARGV

SEQ ID NO: 54381 - protein, 393 aa, Curvibacter sp.
  REGION 1..393: note = tr|A0A1F8VI04|A0A1F8VI04_9BURK Queuine tRNA-ribosyltransferase OS=Curvibacter sp. GWA2_64_110; OX = 1797747 GN=tgt PE=3 SV=1
MLKFDILKTDGHARRGRLTLNHGVVETPVFMPVGTYGTVKGVMPKSLEDMGAQIILGNTFHLWMRPGLDVMKAFGGLHQFENWHKPILTDSGGFQVWSLGEMRKISEEGVRFSSPVNGDKLFLTPEGSMQIQTVLNSDIVMQFDECTPYVSLDPKTKGQLTTEREARISMELSMRWAKRCQDEFARLENPNALFGIVQGGMYENLRDESLAGLEELNFPGIAVGGVSVGEPKEDMQRLIRHIGPKLPAHKPHYLMGVGTPEDLVYGVQHGIDMFDCVMPTRNARNGHLFTRFGDLKIRNARHKSDERPADETCTCYACAGSSGVPYAQGGRDGFSRAYLHHLDRCGEMLGPMLTTVHNLHYYLNLMREVRAALDAGSFGTFVQQFHADRARGV

SEQ ID NO: 54382 - protein, 393 aa, Curvibacter sp.
  REGION 1..393: note = tr|A0A2D0IBQ8|A0A2D0IBQ8_9BURK Queuine tRNA-ribosyltransferase OS=Curvibacter sp. PD_MW3; OX = 2027918 GN=tgt PE=3 SV=1
MLKFELLKTEGLARRGRLTLNHGVVETPVFMPVGTYGTVKGVMPKSLEDMGAQIILGNTFHLWMRPGLDVMKTFGGLHKFENWHKPILTDSGGFQVWSLGEMRKISEEGVRFSSPVNGDKLFLTPEGSMQIQTVLNSDIVMQFDECTPYVSLDPKTKGQLTTEREARISMELSMRWAKRCQDEFARLENPNALFGIVQGGMYENLRDESLAGLEELNFPGIAVGGVSVGEPKEDMQRLIRHIGPKLPAHKPHYLMGVGTPEDLVYGVQHGIDMFDCVMPTRNARNGHLFTRFGDLKIRNARHKSDERPLDETCTCYACAGSSGVPYAQGGRDGFSRAYLHHLDRCGEMLGPMLATVHNLHYYLNLMREVREALDAGSFGAFVQQFHADRGRGV

SEQ ID NO: 54383 - protein, 381 aa, unidentified
  source 1..381: note = Cuspidothrix issatschenkoi
  REGION 1..381: note = tr|A0A2S6CQ73|A0A2S6CQ73_9CYAN Queuine tRNA-ribosyltransferase OS=Cuspidothrix issatschenkoi CHARLIE-1 OX=2052836 GN=tgt PE=3 SV=1
MSANFSFASLATCSQTKARAGIFSTPHGIVETPRFMPVGTLANVKTITPAQLGATGAQMVLANTYHLHLQPGEAIVAGGGGLHKFMGWHGPMLTDSGGFQVFSLSEMRKITEEGVTFRSPHDGQMIKLTPERSIEIQNILGADVIMAFDECPPYPATRQEVEAATDRTYRWLKRSISAHQRQDQALFPIVQGGVYLDLRARAAQDLAELDMPGYAIGGVSVGEPTDLMAQIVQTTAPLLPVNKPRYLMGVGTYREMAIAIASGVDLFDCVIPTRWARHGTAIVSGERWNLKNAKFREDFTPLDTTCPCYTCENFSRAYISHLVRSQEILAYTLLTIHNITELIRFTQKIRESILSDRFVTDFGHWLEPSAIDLEKTDLTST

SEQ ID NO: 54384 - protein, 413 aa, unidentified
  source 1..413: note = Cutibacterium acnes
  REGION 1..413: note = tr|Q6A989|Q6A989_CUTAK Queuine tRNA-ribosyltransferase OS=Cutibacterium acnes (strain DSM 16379 / KPA171202) OX=267747 GN=tgt PE=3 SV=1
MTFGFEVTSRLDNTCGRTGLIHTPHGVIQTPAFVVVGTKATVKALLPESVVQLGAQAVLANAYHLFLQPGPELIDEAGGLGRFMNWTGPTFTDSGGFQVLSLGAGFKKTLAMDVSQLTEADVIAADADRKAMVDDDGVTFRSPLNGDLHRFTPEVSMGIQHHLGADIMFSFDELTTLMNTRAYQEEALERTRRWAERCLAEHRRLTEVRSGKPYQALFGVIQGAQYEDLRRRACRDLAGMEIDGHCFDGFGIGGAIEKANLGRIVTWCAEELPEDRPRHLLGISEPDDLFAACRAGADTFDCVSPSRVARNAAIYTVDGRYNVDTARFRRDFGPLEDDCDCYTCTHYSRAYIHHLFKAKELLANTLATIHNERWTVRLVDQIRGAMCSGDLDAFETEFMGRWNANGGRLAKVN

SEQ ID NO: 54385 - protein, 414 aa, unidentified
  source 1..414: note = Cutibacterium acnes
  REGION 1..414: note = tr|W4TMQ9|W4TMQ9_CUTAC Queuine tRNA-ribosyltransferase OS=Cutibacterium acnes JCM 18909; OX = 1302241 GN=tgt PE=3 SV=1
MTFGFEVTSRLDNACGRTGLIHTPHGAIQTPAFVVVGTKATVKALLPESVVQLGAQAVLANAYHLFLQPGPELIDEAGGLGQFMNWTGPTFTDSGGFQVLSLGAGFKKTLAMDVSQLTEADVIAADADRKAMVDDDGVTFRSPLNGDLHRFTPEVSMGIQHHLGADIMFSFDELTTLMNTRAYQEEALERTRRWAERCLAEHRRLTEVRSGKPYQALFFGVIQGAQYEDLRRRACRDLAGMEIDGQCFDGFGIGGAIEKANLGRIVTWCAEELPEDRPRHLLGISEPDDLFAACRAGADTFDCVNPSRVARNAAIYTVDGRYNVDTARFRRDFGPLEDGCDCYTCTHYSRAYIHHLFKAKELLANTLATIHNERWTVSLVDQIRGAMCSGDLDAFETEFMGRWNANGGRLARVN

SEQ ID NO: 54386 - protein, 416 aa, unidentified
  source 1..416: note = Cutibacterium avidum
  REGION 1..416: note = tr|A0A1B3PXT8|A0A1B3PXT8_9ACTN Queuine tRNA-ribosyltransferase OS=Cutibacterium avidum OX=33010; GN = tgt PE=3 SV=1
MTPMPFGFDVTSHLDDSYGRTGVIHTPHGDIETPAFVVVGTKATVKSLLPESVAQLGAQAVLANAYHLFLQPGPDLVDEAGGLGRFMNWTGPTFTDSGGFQVLSLGAGFKKTLAMDVSELTEEDVIAADADRKAMVDDDGVTFRSPLNGDLHRFTPEVSMGIQHHLGADIMFAFDELTTLMNTRSYQEEALERTRRWAERCLAEHRRLTEARAGKPYQALFGVIQGAQYEDLRRKACRDLSQMEIDGQRFDGFGLGGAIEKVNLGRIVTWCAEELPEDRPRHLLGISEPDDLFAACRAGADTFDCVNPSRVARNAAIYTVDGRYNVNTARFRRDFGPLEEGCDCYTCTYYSRAYLHHLFKAKEMLANTLATIHNERWTVRLVDQIRAAMRNGELDALETEFMGRWNTNGGRLVKAN

SEQ ID NO: 54387 - protein, 416 aa, unidentified
  source 1..416: note = Cutibacterium avidum
  REGION 1..416: note = tr|G4D014|G4D014_9ACTN Queuine tRNA-ribosyltransferase OS=Cutibacterium avidum ATCC 25577; OX = 997355 GN=tgt PE=3 SV=1
MTPMPFGFDVTSHLDDSYGRTGVIHTPHGDIETPAFVVVGTKATVKSLLPESVAQLGAQAVLANAYHLFLQPGPDLVDEAGGLGRFMNWTGPTFTDSGGFQVLSLGAGFKKTLAMDVSELTEEDVIAADADRKAMVDDDGVTFRSPLNGDLHRFTPEVSMGIQHHLGADIMFAFDELTTLMNTRSYQEEALERTRRWAERCLAEHRRLTEARVGKPYQALFGVVQGAQYEDLRRKACRDLSQMEIDGQRFDGFGLGGAIEKVNLGRIVTWCAEELPEDRPRHLLGISEPDDLFAACRAGVDTFDCVNPSRVARNAAIYTVDGRYNVNTARFRRDFGPLEEGCDCYTCTHYSRAYLHHLFKAKEMLANTLATIHNERWTVRLVDQIRAAMRHGELDALETEFMGRWNINGGRLVKAN

SEQ ID NO: 54388 - protein, 414 aa, unidentified
  source 1..414: note = Cutibacterium granulosum
  REGION 1..414: note = tr|A0A2W5D1M6|A0A2W5D1M6_9ACTN Queuine tRNA-ribosyltransferase OS=Cutibacterium granulosum; OX = 33011 GN=tgt PE=3 SV=1
MTFGFQVTSRLDNGLGRTGIIHTPHGDIATPAFIVVGTKASVKALTPDQLTDLGAQAVLANAYHLFLQPGHDLVDEAGGVGQFMAWDGPTFTDSGGFQVLSLGAGFKKTLAMDVSQLTEADVIAADRDRKAMVDDDGVTFRSPLNGDLHRFTPEVSMSIQHRLGADVMMAFDELTTLFNTRAYQEEALERTRRWAERCLTEHRRLSAERAERPYQALYGVIQGAQYEDLRRRACRDLSSMTVDGQRFDGFGIGGAIEKANLGTIVGWCADELPQDRPRHLLGISEPDDLFAACRAGADTFDCVNPSRVARNAAIYTADGRYNVNTAPFRHDFRPLEPGCDCYTCTHVTRAYLHHLFKAKELLANTLATIHNERWTVRLVDGIRAAMANGELDDFEAEFMGRWNAYGGRLVPTAR

SEQ ID NO: 54389 - protein, 414 aa, unidentified
  source 1..414: note = Cutibacterium granulosum
  REGION 1..414: note = tr|U1F3M0|U1F3M0_9ACTN Queuine tRNA-ribosyltransferase OS=Cutibacterium granulosum DSM 20700 OX=1160719 GN=tgt PE=3 SV=1
MTFGFQVTSRLDNGLGRTGIIHTPHGDIATPAFIVVGTKASVKALTPDQLTDLGAQAVLANAYHLFLQPGHDLVDEAGGVGQFMAWDGPTFTDSGGFQVLSLGAGFKKTLAMDVSQLTEADVIAADRDRKAMVDDDGVTFRSPLNGDLHRFTPEVSMSIQHRLGADVMMAFDELTTLFNTRAYQEEALERTRRWAERCLTEHRRLSAERAERPYQALYGVIQGAQYEDLRRRACRDLSSMTVDGQRFDGFGIGGAIEKANLGTIVGWCADELPQDRPRHLLGISEPDDLFAACRAGADTFDCVNPSRVARNAAIYTADGRYNVNTAPFRHDFRPLEPGCDCYTCTHVTRAYLHHLFKAKELLANTLATIHNERWTVRLVDGIRAAMANGELDDFEAEFMGRWNAHGGRLVPTAR

SEQ ID NO: 54390 - protein, 376 aa, unidentified
  source 1..376: note = Cyanobacteria bacterium
  REGION 1..376: note = tr|A0A3M1L962|A0A3M1L962_9CYAN Queuine tRNA-ribosyltransferase OS=Cyanobacteria bacterium J083; OX = 2420336 GN=tgt PE=3 SV=1
MQFSFKLQTNCQATQARAGTFYTPHGIVETPRFMPVGTLATVKGISPAQLQSTQAQMILANTYHLHLQPGENIIKLGGGLHQFMAWNQPILTDSGGFQVFSLSQLRQITETGVTFRSPRDGSLIEITPERSIQIQNALGADVIMAFDECPPAHATRSQVKQATERTCRWLKRCIQAHQNPDKQALFGIVQGGVYPDLRAEAAKALVELDLPGYAIGGVSVGESPQLIHHIVRLTTPLLPYSKPRYLMGVGTYREMVVAIAAGIDLFDCVIPTRLGRHGAVLVQGERWNIKNAKFKEDFTPLDESCDCYTCQHFTRAYLNHLVKAREILGYTLLSLHNIRELVRFTQNIRQAIINGTFMLEFGHWLNPAEHPLKTTS

SEQ ID NO: 54391 - protein, 369 aa, unidentified
  source 1..369: note = Cyanobacteria bacterium
  REGION 1..369: note = tr|A0A353QWG9|A0A353QWG9_9CYAN Queuine tRNA-ribosyltransferase OS=Cyanobacteria bacterium UBA9971; OX = 2055776 GN=tgt PE=3 SV=1
MHHFNFDLLKKSSDSNARAGLFKTPHGVIETPIFMPVGTNSAIKMMTCDHLYDTGAQIILSNSYHLFLRPGHKLIEKAGGLHKWMNWDKPILTDSGGFQVFSLSSLRNLTEDGVTFKDPKDGSSYFMSPEVSMEVQNALGADIIMAFDECAPYPCSYDEAKEAMDRTHRWLLRCVEAHKREDQALFPIVQGSTFDDLREESAKFIANVEAHGYAIGGVSVGEPTELINHIVEITAPFLPENKPRYLMGVGTPEDLLDGVMRGVDMFDCVMPTRIARHGSFFTPNGRGIIKNKEFEEDFTPLVEGCECYACKNHTKAYIRHLFRVKEATAPILMSIHNIYYLVNLMKQARQAILEDRFLDFYEEKMSLIK

SEQ ID NO: 54392 - protein, 366 aa, unidentified
  source 1..366: note = Cyanobacterium aponinum
  REGION 1..366: note = tr|K9Z8D0|K9Z8D0_CYAAP Queuine tRNA-ribosyltransferase OS=Cyanobacterium aponinum (strain PCC 10605) OX=755178 GN=tgt PE=3 SV=1
MVFQYSLIASCTKTRARAGVFSTPHGEVETPRFMPVGTVGTVKGITPAQLQSAHAQMILGNTYHLHIQPGEEIIEKAGGLHNFMGWQQPILTDSGGFQVFSLADLRQITDDGVKFRSPKDGRIINMTPENSIRIQNSLGADVIMAFDECPPATATKEEVVKAVKRTTAWLERCISAHKKPEQQALFGIVQGGIYPELRTQSAKELIEFNLPGYAIGGVSVGEKPELIHQIVQWTTPLLPSNKPRYLMGVGSYKEMVVAIASGIDLFDCVIPTRLGRHGAALVQGERINLKNAQYKEDFTPLDPECDCYTCKNFTRAYLNHLIRAKEMLGYILLSLHNIYELINFTRKIRQAIINDSFVEEFGHYLN

SEQ ID NO: 54393 - protein, 366 aa, unidentified
  source 1..366: note = Cyanobacterium aponinum
  REGION 1..366: note = tr|A0A2G3P9M9|A0A2G3P9M9_9CHRO Queuine tRNA-ribosyltransferase OS=Cyanobacterium aponinum IPPAS B-1201 OX=2047986 GN=tgt PE=3 SV=1
MVFQYSLIASCTKTRARAGVFSTPHGEVETPRFMPVGTVGTVKGITPAQLQSAHAQMILGNTYHLHIQPGEEIIEKAGGLHNFMGWQQPILTDSGGFQVFSLADLRQITDDGVKFRSPKDGRIINMTPENSIRIQNSLGADVIMAFDECPPATATKEEVVKAVKRTTAWLERCISAHKKPEQQALFGIVQGGIYPELRTQSAKELIEFNLPGYAIGGVSVGEKPELIHQIVQWTTPLLPTHKPRYLMGVGSYKEMVVAIASGIDLFDCVIPTRLGRHGAALVQGERINLKNAQYKEDFTPLDPECDCYTCKNFTRAYLNHLIRAREMLGYILLSLHNIYELINFTRKIRQAIINDSFVEEFGHYLN

SEQ ID NO: 54394 - protein, 400 aa, Epithemia turgida
  REGION 1..400: note = tr|A0A077JEB3|A0A077JEB3_9CYAN Queuine tRNA-ribosyltransferase OS=cyanobacterium endosymbiont of Epithemia turgida isolate EtSB Lake Yunoko OX=1228987; GN = tgt PE=3 SV =1
MIKLFARKLFGFLYQCQLLSYNGVILLTLYFIVTLRFSFQTQKKCCQTLARVGVWHTPHGPVETPRFMPVGTLATVKGLTPAQLQTTGAQMVLANTYHLHLQPGETLIEKAGGIHQFMGWKGPILTDSGGFQVFSLSELRHIREIGVTFRSPRDGKIIELTPERSIHIQNTLGADVIMAFDECPPGKADYSTVAAATERTYRWLERCIDAHQRPQDQALFGIVQGGIYPELRISAAKSLIDFDLPGYAIGGVSVGEEPALIREIVQITAPLLPATKPRYLMGVGTYREMAITIASGIDLFDCVIPTRFGRHGTALVRGERWNLKNFQFREDFGPLDADCPCYTCQTFSRAYLNHLVRSQEMLGYTLLSLHNITELVRFTQRIREAILGDRFIEEFGHWLN

SEQ ID NO: 54395 - protein, 366 aa, Rhopalodia gibberula
  REGION 1..366: note = tr|A0A2Z5SX08|A0A2Z5SX08_9CYAN Queuine tRNA-ribosyltransferase OS=cyanobacterium endosymbiont of Rhopalodia gibberula OX=1763363 GN=tgt PE=3 SV=1
MRFSFQTQKKCCQTHARVGVLHTPHGLVETPRFMPVGTLATVKGLTPAQLQTTGAQMILANTYHLHLQPGETLIGKAGGLHQFMGWQGPILTDSGGFQVFSLSELRQIREIGVTFRSPRDGQIIELTPERSIHIQNTLGADVIMAFDECPPGQADYSTVAAATERTYRWLERCIDAHQRPQDQALFGIVQGGIYPELRRSAAKSLIDFDLPGYAIGGVSVGEEPALVREIVQITAPLLPATKPRYLMGVGTYREMAMTIAYGIDLFDCVIPTRFGRHGTALVGGERWNLKNSRFREDFSPLDADCPCYTCKTFTKAYLNHLVRSQEMLGYILLSLHNVTELVRFTQRIREAILGNRFMEEFGHWLN

SEQ ID NO: 54396 - protein, 365 aa, unidentified
  source 1..365: note = Cyanobacterium sp.
  REGION 1..365: note = tr|A0A1E5QTW5|A0A1E5QTW5_9CHRO Queuine tRNA-ribosyltransferase OS=Cyanobacterium sp. IPPAS B-1200; OX = 1562720 GN=tgt PE=3 SV=1
MNFSYTSVASCSHTKARAGIFHTPHGIVETPKFMPVGTVGTVKGITPAQLKDAHAQMILGNTYHLHIRPGEDIVSKAGGLHGFMNWEQPILTDSGGFQVFSLAKMRKISEEGVKFRSPKDGQIINMTPEHSIHIQNALGADVIMAFDECPPATATREEVITATDRTYRWLKRCMDAHQKPDTQALFGIVQGGIFQDLRNQAAHDLAGLDLPGYAIGGVSVGEKPELIHEIVRQTTPLLPVHKPRYLMGVGTYKEMVIAIASGIDLFDCVIPTRVGRHGAALVQGERWNIKNARFKEDFGPLDPECSCYTCKNFSRAYLNHLLRAHEMLGYILISLHNIHEMINFTNKIRASIINDTFLEEFGHWL

SEQ ID NO: 54397 - protein, 365 aa, unidentified; identical to SEQ ID NO: 54396
  source 1..365: note = Cyanobacterium sp.
  REGION 1..365: note = tr|A0A2K8WNV0|A0A2K8WNV0_9CHRO Queuine tRNA-ribosyltransferase OS=Cyanobacterium sp. HL-69; OX = 2054282 GN=tgt PE=3 SV=1

SEQ ID NO: 54398 - protein, 365 aa, unidentified
  source 1..365: note = Cyanobacterium stanieri
  REGION 1..365: note = tr|K9YJ84|K9YJ84_CYASC Queuine tRNA-ribosyltransferase OS=Cyanobacterium stanieri (strain ATCC 29140 / PCC 7202) OX=292563 GN=tgt PE=3 SV=1
MNFSYTSIASCSHTKARAGIFHTPHGIVETPKFMPVGTVGTVKGITPAQLKDAHAQMILGNTYHLHIRPGEDIVKKAGGLHGFMNWEQPILTDSGGFQVFSLAQMRKISEEGVKFRSPKDGKIINMTPEHSIHIQNALGADVIMAFDECPPATATREEVITATERTYRWLKRCMDAHQKPDQQALFGIVQGGIFQDLRNQAAHDLTQLDLPGYAIGGVSVGEKPELIHEIVRQTTPLLPVHKPRYLMGVGTYKEMVIAIASGIDLFDCVIPTRVGRHGAALVQGERWNLKNARFKEDFTPLDPECSCYTCQNFSRAYLNHLLRAHEMLGYILISLHNIHEMINFTNKIRASIINDTFLDEFGHWL

SEQ ID NO: 54399 - protein, 340 aa, Ornithocercus magnificus
  REGION 1..340: note = tr|A0A4Y3G5K7|A0A4Y3G5K7_9CYAN Queuine tRNA-ribosyltransferase OS=cyanobiont of Ornithocercus magnificus OX=2496102 GN=tgt PE=3 SV=1
MPVGTLATVKGISTDQLAATGAQMILSNTFHLHLQPGEDIVAAAGGLHSFMNWSKPILTDSGGFQVCSLADLNRIDDEGVMFRNPRNGSLVWLNPERATEIQMALGADVVMAFDQCSPYPASELDLETACRRTHDWLKRCINAHKRTDQALFGIVQGGCMLHLREWSARTVAELNLPGIAIGGVSVGEPAEELHRIVRHVTPLLPEDRPRYLMGIGTLREMAIAVANGVDLLDCVLPTRLGRHGTALVNEQRWNLRNTRFRHDYAPLDPSCSCPACLYHSRAYLHHLVRSQELLGLTLLSLHNLTHLIRFTTAMGKAIEDNCFSEDFAPWKINSPAHHTW

SEQ ID NO: 54400 - protein, 373 aa, unidentified
  source 1..373: note = Cyanobium gracile
  REGION 1..373: note = tr|K9P909|K9P909_CYAGP Queuine tRNA-ribosyltransferase OS=Cyanobium gracile (strain ATCC 27147 / PCC 6307) OX=292564 GN=tgt PE=3 SV=1
MAFDFTITARCPRTRARCGCFTTPHGPVHTPRFMPVGTAATVKGVSTPQLRETGAQMVLANTFHLHLQPGEAVVAEAGGLHRFMGWEGPLLTDSGGFQVFSLDAINRIDDDGVVFRSPRDGSRIDLTPERSMAIQRALGADVAMAFDQCPPYPATEAAVAEACRRTHRWLERCVACHGGGDQALFGIVQGGCFPHLREASARVVAAMDLPGIAVGGVSVGEPVEEMHRVVRQVGPLLPQERPHYLMGVGSLREMAIAVANGFDLFDCVLPTRLGRHGTALVGGERWNLRNARFRHDHGPLDPSCGCLACRHHSRSYLHHLFRSEELLGRTLLSLHNLTTLLRFTSAMAQAIGEGCFAEDFAPWEPDSPAARTW

SEQ ID NO: 54401 - protein, 340 aa, unidentified
  source 1..340: note = Cyanobium sp.
  REGION 1..340: note = tr|A0A182AQI0|A0A182AQI0_9CYAN Queuine tRNA-ribosyltransferase OS=Cyanobium sp. NIES-981; OX = 1851505 GN=tgt PE=3 SV=1
MPVGTLATVKGVTAGQLAATGAQMVLANTYHLHLQPGEDIVAEAGGLHRFMDWPGPLLTDSGGYQVFSLGAINRIDDNGVSFRSPRDGRTILLTPERAMAIQAALGADVAMAFDQCPPYPASEADVEAACRRTHAWLERCMASHQRSGQALFGIVQGGCFPRLRAESAREVAAMDLPGIAVGGVSVGEPVEEMHRIVRQVGPLLPDARPHYLMGVGSLPEMALAVAQGFDLFDCVLPTRLGRHGAALVGGERWNLRNARFRHDHTPLDPGCPCPACTGHTRAYLHHLIRAGEMLGKILLSLHNITQLQRFSGAMARAIREGCFAEDFAPWNPDSPAAHTW

SEQ ID NO: 54402 - protein, 372 aa, unidentified
  source 1..372: note = Cyanobium sp.
  REGION 1..372: note = tr|A0A4P5VCC3|A0A4P5VCC3_9CYAN Queuine tRNA-ribosyltransferase OS=Cyanobium sp. OX=2164130 GN=tgt; PE = 3 SV=1
MFAFEITARCPRTRARCGSFHTPHGVVTTPRFMPVGTLATVKGVTADQLRHTGAQMVLANTFHLHLQPGEAIVQEAGGLHRFMAWEGPLLTDSGGFQVFSLGAINRINDRGVVFRSPRDGAQIDLTPERSMAIQMALGADVAMAFDQCPPYPASEADVATACRRTHAWLERCISSHTRSDQALFGIVQGGCYPHLREESARVVSSMGLPGIAVGGVSVGEPTEEMHRIVRQLGPLLPDDKPHYLMGVGTLREMAVAVANGFDVFDCVLPTRLGRHGAALVGGERWNLKNARFRHDHTPLDPSCPCPACSQHSRAYLHHLIKSEEMLGKILLSLHNITQLLRFTSAMAQAIRDGCFAEDFAPWEPDSPAAHTW

SEQ ID NO: 54403 - protein, 377 aa, unidentified
  source 1..377: note = Cyanobium usitatum
  REGION 1..377: note = tr|A0A2P7MUR9|A0A2P7MUR9_9CYAN Queuine tRNA-ribosyltransferase OS=Cyanobium usitatum str. Tous; OX = 2116684 GN=tgt PE=3 SV=1
MSFPPAFSFDITAQCSRTRARCGCFHTPHGDVTTPRFMPVGTLATVKGVTASQLRDTGAQMVLSNTYHLHLQPGEQIVADAGGLHRFMGWDGPMLTDSGGFQVFSLGDINTIDDHGVVFRSPRDGARIELTPERSMAIQMALGADVAMAFDQCPPYPASEADVAAACRRTHSWLERCITSHTKVDQALFGIVQGGCFPHLRQESAQVVASMGLPGIAVGGVSVGEPTEEMHRIVRQLGPLLPDAVPHYLMGIGTLREMAIAVANGFDLFDCVIPTRLGRHGAALVGGERWNLKNSRFRHDHTPMDASCPCPACRQHSRAYLHHLIKSEELLGKILLSLHNITQLVRFSTAMGQAIRDGCFAEDFAPWEADSPAAHTW

SEQ ID NO: 54404 - protein, 367 aa, unidentified
  source 1..367: note = Cyanosarcina cf.
  REGION 1..367: note = tr|A0A2T1F9U4|A0A2T1F9U4_9CHRO Queuine tRNA-ribosyltransferase OS=Cyanosarcina cf. burmensis CCALA 770 OX=2107697 GN=tgt PE=3 SV=1
MTTQFSFQVSTRCSQTKARAGVFHTPHGAVETPRFMPVGTLANVKTVTPTQLQETGAQMVLANTYHLHLQPGERIVEKAGGLHQFMRWNQPILTDSGGFQVFSLSEMRQITDDGVIFRSPHDGQMINLTPERSIQIQNALGADVIMAFDECPPYPASREEVEAATQRTYRWLERCISAHQRPDQALFGIVQGGVYPDLRAAAAEALAGLDLPGYAIGGVSVGEPPELIAKIVQATTPILPVDKPRYLMGVGTYKEMAQAIASGMDLFDCVIPTRLARHGAALVKGERWNLKNSQYREDFQPLDETCPCYTCQNFTRAYISHLVRSQEILAYTLLTIHNITELVRFTQKIREAIISDRFTTEFAQWLS

SEQ ID NO: 54405 - protein, 381 aa, unidentified
  source 1..381: note = Cyanothece sp.
  REGION 1..381: note = sp|B8HX02|TGT_CYAP4 Queuine tRNA-ribosyltransferase; OS = Cyanothece sp. (strain PCC 7425 / ATCC 29141) OX=395961; GN = tgt PE=3 SV=1
MNDSLQAIPNQPFSFFTQASCSHTQARAGQFFTPHGVVETPRFMPVGTLANIKTVTPEQLRGTGAQMILANTYHLHLQPGEGIVAAAGGLHRFMGWTGPILTDSGGFQVFSLSELRSIAEAGVTFRSPRDGEEIYLSPEKAIAIQNQLGADVIMAFDECAPYPADRSTVTEAVERTTRWLERCCKAHDRVEDQALFGIIQGGTYGDLRQQSARSLVEFDLPGYAIGGVSVGEPPELIEKIVKFTTPLLPEHKPRYLMGVGTYREMVQAIAAGIDLFDCVIPTRLARHGNALVRGERWNLKNSRFREDFQPLDQSCACYTCQNFSRAYLSHLLRARELLAYTLLSIHNITELISFTQKIRQAILHDRFSSEFASWLTSPSPS

SEQ ID NO: 54406 - protein, 376 aa, unidentified
  source 1..376: note = Cyclobacteriaceae bacterium
  REGION 1..376: note = tr|A0A3N4HA96|A0A3N4HA96_9BACT Queuine tRNA-ribosyltransferase OS=Cyclobacteriaceae bacterium YHN15 OX=2487897 GN=tgt PE=3 SV=1
MKFKLESTDVKSKARIGTIKTDHGDIETPIFMPVGTAGSVKAVHQRELTYDIKAQIILGNTYHLYLRPGLDILEKSGGLHKFNGWSKPILTDSGGYQVFSLAENRKLTEEGAIFKSHIDGSKHVFTPERVIDIQRVIGADIIMAFDECPPYPSDFNYAKKSMELTHRWLKRCIDRFDSTESKYGYSQALFPIIQGSVYPELRIQSAEFIASCEREGNAIGGLSVGEPIEEMYAMTNMVTDILPKDRPRYLMGVGTPANILECIALGVDMFDCVMPTRNARNGMLFTSEGIINIRNEKWKDDFSPIDPPIGSYVSSFYSKAYLRHLTISKEILAAQIASIHNLSFYLWLVGQAREHIKNGDFATWKNQMVEKVSRRL

SEQ ID NO: 54407 - protein, 376 aa, unidentified
  source 1..376: note = Cyclobacteriaceae bacterium
  REGION 1..376: note = tr|A0A5C7Z209|A0A5C7Z209_9BACT Queuine tRNA-ribosyltransferase OS=Cyclobacteriaceae bacterium; OX = 2099675 GN=tgt PE=3 SV=1
MKFTLSATNRDSKARAGILSTDHGEIPTPIFMPVGTAGSVKAVHQRELETDIDAKIILGNTYHLYLRPGLPLIEQAGGLHKFIGWQRPILTDSGGYQVYSLGDNRKITEEGVIFKSHIDGSRHVFTPEGVMDIERTIGADIIMAFDECTPYPCEYEYAKKSMGLTHRWLQRCVKRVNETEGKYGYSQALFPIVQGSVYKDLRMQSAEFIANQNQPGNAIGGLSVGEPHEMMYEMTDVVCSILPADKPRYLMGVGTPENILECIALGIDMFDCVMPTRNARNGMLFTTQGIINIRNEKWKDDLSPIDAELGDYSSTFYSKAYLRHLIISKEILGAQIASIHNLAFYLWLVKQARQQILAGTFDTWKNRMVKIVSQRL

SEQ ID NO: 54408 - protein, 376 aa, Cyclobacterium amurskyense
  REGION 1..376: note = tr|A0A0H4PF64|A0A0H4PF64_9BACT Queuine tRNA-ribosyltransferase OS=Cyclobacterium amurskyense; OX = 320787 GN=tgt PE=3 SV=1
MKFKLESKDQNSKARAGEIQTDHGLIQTPIFMPVGTAGSVKAVHQRELTYDVKAQIILGNTYHLYLRPGLDVLEKAGGLHKFIGWSSPILTDSGGYQVFSLEGNRKIKEEGVVFKSHIDGSKHHFTPESVMDIQRTIGADIIMAFDECTPYPCDWSYAKNSMHLTHRWLKRCIDHFDSTTGKYGYAQSLFPIVQGSTYKDLRKDAAHFVSDQDREGNAIGGLSVGEPAEMMYEMTDLVTDILPEDKPRYLMGVGTPANILEGIALGIDMFDCVMPTRNARNGMLFTSEGIINIRNERWKMDFSPLDSGFHSHVSNFYTKAYLRHLTISKEMLAAQIASIHNLSFYLWLVTQAREHILAGDFSSWKNTMVEKVSRRL

SEQ ID NO: 54409 - protein, 397 aa, unidentified
  source 1..397: note = Cyclobacterium halophilum
  REGION 1..397: note = tr|A0A1H6WS34|A0A1H6WS34_9BACT Queuine tRNA-ribosyltransferase OS=Cyclobacterium halophilum; OX = 1416801 GN=tgt PE=3 SV=1
MHLFLCLNIRSKWGIFQRMPGMKFKLLEKDQDSKARAGVLYTDHGEIETPIFMPVGTAGTVKAVHQRELTYDVKAQIILGNTYHLYLRPGLEVLEAAGGLHKFMGWSAPILTDSGGYQVFSLAESRKISEEGVVFQSHIDGSRHHFTPESVMDIQRSIGADIVMAFDECTPYPCERSYAKTSMDLTHRWLGRCMQRFDATEGKYGYQQALFPIVQGSTYKDLRQDAARFVADQDREGNAIGGLSVGEPAELMYEMTDLVTDLLPADKPRYLMGVGTPANILEAIALGIDMFDCVMPTRNARNGMLFTSEGILNIRNEKWKMDFSPLDSGFQSYVSNFYTKSYLRHLTLSKEMLAAQIASIHNLSFYLWLTGQARERILAGDFSSWKTEMVEKVSRRL

SEQ ID NO: 54410 - protein, 376 aa, Cyclobacterium lianum
  REGION 1..376: note = tr|A0A1M7JQL2|A0A1M7JQL2_9BACT Queuine tRNA-ribosyltransferase OS=Cyclobacterium lianum OX=388280; GN = tgt PE=3 SV=1
MKFNLQHKDQTTKARAGSILTDHGEIQTPIFMPVGTAGSVKAVHQRELTYDVKAQIILGNTYHLYLRPALEVLEVAGGLHKFMGWSGPILTDSGGYQVFSLADSRKITEEGVMFQSHIDGSRHHFSPESVMDIQRSIGADIIMAFDECTPYPCDWSYAKTSLELTQRWLRRCKTRFESTGGRYGYQQSLFPIVQGSTYKDLRQDAARFVADQDMDGNAIGGLSVGEPAGLMYEMTDLVTDLLPEEKPRYLMGVGTPANILEGIALGIDMFDCVMPTRNARNGMLFTSEGIINIRNEKWKMDFSPIDTGFPSHVSSFYTRAYLRHLTISKEMLAAQIASIHNLSFYLWLVGQARAHILQGDFASWKNTMVEKVSRRL

SEQ ID NO: 54411 - protein, 376 aa, Cyclobacterium marinum
  REGION 1..376: note = tr|G0J6R5|G0J6R5_CYCMS Queuine tRNA-ribosyltransferase OS=Cyclobacterium marinum (strain ATCC 25205 / DSM 745) OX=880070 GN=tgt PE=3 SV=1
MKFKLVSKDKKSKARAGEIQTDHGTIQTPIFMPVGTAGSVKAVHQRELTYDVKAQIILGNTYHLYLRPGLEVLEKAGGLHKFIGWSSPILTDSGGYQVFSLEGNRKIKEEGVVFKSHIDGSKHHFTPESVMDIQRTIGADIIMAFDECTPYPCEWSYAKNSMHLTHRWLKRCIERFDSTEGKYGYSQSLFPIVQGSTFKDLRQDAARFVSDQDREGNAIGGLSVGEPAEMMYEMTDLVTDILPEEKPRYLMGVGTPANILESIALGIDMFDCVMPTRNARNGMLFTTEGIINIRNERWKMDFSPIDSGFHSHVSNFYSKAYIRHLTISKEMLAAQIASIHNLSFYLWLVTQARERIQAGDFTSWKNAMVEKVSRRL

SEQ ID NO: 54412 - protein, 376 aa, Cyclobacterium marinum
  REGION 1..376: note = tr|A0A5D9B2X2|A0A5D9B2X2_9BACT Queuine tRNA-ribosyltransferase OS=Cyclobacterium marinum OX=104; GN = tgt PE=3 SV=1
MKFKLVSKDKKSKARAGEIQTDHGTIQTPIFMPVGTAGSVKAVHQRELTYDVKAQIILGNTYHLYLRPGLEVLEKAGGLHKFIGWSSPILTDSGGYQVFSLEGNRKIKEEGVVFKSHIDGSKHHFTPESVMDIQRTIGADIIMAFDECTPYPCEWSYAKNSMHLTHRWLKRCIERFDSTEGKYGYSQSLFPIVQGSTFKDLRQDAARFVSDQDREGNAIGGLSVGEPAEMMYEMTDLVTDILPEEKPRYLMGVGTPANILESIALGIDMFDCVMPTRNARNGMLFTTEGIINIRNERWKMDFSPIDSGFHSHVSNFYSKAYLRHLTISKEMLAAQIASIHNLSFYLWLVTQARERIQAGDFTSWKNAMVEKVSRRL

SEQ ID NO: 54413 - protein, 376 aa, unidentified
  source 1..376: note = Cyclobacterium qasimii
  REGION 1..376: note = tr|A0A512CCU8|A0A512CCU8_9BACT Queuine tRNA-ribosyltransferase OS=Cyclobacterium qasimii; OX = 1350429 GN=tgt PE=3 SV=1
MKFKLENKDQHSKARAGEIQTDHGLIQTPIFMPVGTAGSVKAVHQRELTYDVKAQIILGNTYHLYLRPGLEVLEKAGGLHKFMGWSSPILTDSGGYQVFSLEGNRKIKEEGVVFKSHIDGSKHHFTPESVMDIQRTIGADIIMAFDECTPFPCDWSYAKNSMHLTHRWLKRCIDQFDNTSGKYGYSQSLFPIVQGSTFKDLRMDAARFVSDQDREGNAIGGLSVGEPAEMMYEMTDLVTDILPEDKPRYLMGVGTPANILEGIALGIDMFDCVMPTRNARNGMLFTSEGIINIRNERWKMDFSPLDSGFDSHVSNFYSKAYLRHLTISKEMLAAQIASIHNLSFYLWLVTQAREHIQAGDFTTWKNAMVEKVSRRL

SEQ ID NO: 54414 - protein, 376 aa, unidentified; identical to SEQ ID NO: 54413
  source 1..376: note = Cyclobacterium qasimii
  REGION 1..376: note = tr|S7WED4|S7WED4_9BACT Queuine tRNA-ribosyltransferase OS=Cyclobacterium qasimii M12-11B; OX = 641524 GN=tgt PE=3 SV=1

SEQ ID NO: 54415 - protein, 371 aa, Cycloclasticus sp.
  REGION 1..371: note = tr|K0C1Y3|K0C1Y3_CYCSP Queuine tRNA-ribosyltransferase OS=Cycloclasticus sp. (strain P1); OX = 385025 GN=tgt PE=3 SV=1
MKFNLLNTDAKARRARLTFDRGTIETPAFMPVGTYGTVKAMAPEELLDTGAEIVLGNTFHLMLRPGVEVIEAHGDLHDFMNWQKPILTDSGGFQVFSLDEMRKITEKGVHFRSPVDGRKVFMGPEESMQVQRQLGSDIVMIFDECTPYPATEEEARISMELSLRWAKRSKDAHGDNPSALFGIVQGGMYENLRDRSLEALKQIDFDGFAIGGLSVGEPKDDRERVLEHIVPAMPSDKPRYLMGVGKPEDIVEAVLKGIDMFDCVMPTRNARNGYLFTRKGLVKIRNEKYQFDTKPVDEACECYTCKNYSRSYLRHLDKCKEILGSRLNTIHNLHYYQDLMRGLRQAIEQERLLEFVDDFYEQQGKTRDAVA

SEQ ID NO: 54416 - protein, 371 aa, Cycloclasticus sp.
  REGION 1..371: note = tr|A0A2E5FES0|A0A2E5FES0_9GAMM Queuine tRNA-ribosyltransferase OS=Cycloclasticus sp. OX=2024830; GN = tgt PE=3 SV=1
MKFDLLKTDAKARRARLTFDRGAIETPAFMPVGTYGTVKAMAPEELLETGAQIVLGNTFHLMLRPGVEVIEAHGDLHDFMNWQKPILTDSGGFQVFSLDEMRKITEKGVHFRSPVDGRKVFMGPEESMQVQRQLGSDIVMIFDECTPFPATEKEARTSMELSLRWAKRSKAAHGDNPSALFGIIQGGMYEQLRDESLKGLKDIDFDGFAVGGLSVGEPKEDRERVLEHIVPNMPNDKPRYLMGVGKPEDIVEAVLKGIDMFDCVMPTRNARNGYLFTRKGLVKIRNEKYQYDTRPIDEACECYTCKNYTRSYLRHLDKCKEILGSRLNTIHNLHYYQDLMRGLRLAIEEGCLAEFVEDFYAQQGKKPDAVA

SEQ ID NO: 54417 - protein, 371 aa, unidentified; identical to SEQ ID NO: 54415
  source 1..371: note = Cycloclasticus zancles
  REGION 1..371: note = tr|S5TWD5|S5TWD5_9GAMM Queuine tRNA-ribosyltransferase OS=Cycloclasticus zancles 78-ME; OX = 1198232 GN=tgt PE=3 SV=1

SEQ ID NO: 54418 - protein, 373 aa, Cylindrospermopsis raciborskii
  REGION 1..373: note = tr|A0A1S1ZWX6|A0A1S1ZWX6_9CYAN Queuine tRNA-ribosyltransferase OS=Cylindrospermopsis raciborskii MVCC14 OX=940191 GN=tgt PE=3 SV=1
MSNFSFRLVANCSQTQARAGVFSTPHGIVETPRFMPVGTLANVKTVTPAQLEDTGAQMILSNTYHLHLQPGEKIVAGGGGLHKFMAWNGPMLTDSGGFQVFSLSEMRKITEEGVVFRSPHDGQMIRLTPEKSIEIQNILGADVIMAFDECPPYPATYQEVTAATDRTYRWLERCIMSHQRLDQALFPIVQGGVYLDLRTRAATDLAKLDMPGYAIGGVSVGEPQELMAQIVRTTAPLLPRNKPRYLMGVGTYREMVIAIAAGVDLFDCVIPTRWARHGTAMVQGERWNLKNAKFREDFAPIDEACHCYTCSNFSRAYVSHLVRSQEILAYTLLSIHNITELIRFTQAIRESILQNRFLTDFGHWMNDPEKDLE

SEQ ID NO: 54419 - protein, 373 aa, Cylindrospermopsis raciborskii
  REGION 1..373: note = tr|A0A1X4GAJ2|A0A1X4GAJ2_9CYAN Queuine tRNA-ribosyltransferase OS=Cylindrospermopsis raciborskii CENA303 OX=1170769 GN=tgt PE=3 SV=1
MSNFSFRLVANCSQTQARAGVFSTPHGIVETPRFMPVGTLANVKTVTPAQLEDTGAQMILSNTYHLHLQPGEKIVAGGGGLHKFMAWNGPMLTDSGGFQVFSLSEMRKITEEGVVFRSPHDGQMIKLTPEKSIEIQNILGADVIMAFDECPPYPATYQEVTAATDRTYRWLERCIMSHQRLDQALFPIVQGGVYLDMRIRAATDLAKLDMPGYAIGGVSVGEPPELMAQIVRTTAPLLPRNKPRYLMGVGTYREMVIAIAAGVDLFDCVIPTRWARHGTAMVQGERWNLKNSKFREDFIPIDETCHCYTCSNFSRAYVSHLVRSQEILAYTLLSIHNITELIRFTQAIRESILQNRFLTDFGHWMNDPEKDLE

SEQ ID NO: 54420 - protein, 373 aa, Cylindrospermopsis sp.
  REGION 1..373: note = tr|A0A0R0MAD5|A0A0R0MAD5_9CYAN Queuine tRNA-ribosyltransferase OS=Cylindrospermopsis sp. CR12; OX = 1747196 GN=tgt PE=3 SV=1
MSNFSFQLVVNCSQTQARAGVFSTPHGIVETPRFMPVGTLANVKTVTPAQLADTGAQMILSNTYHLHLQPGEKIVAGGGGLHKFMAWDGPMLTDSGGFQVFSLSEMRKITEEGVVFRSPHDGQMIKLTPEKSIEIQNILGADVIMAFDECPPYPATYQEVTAATDRTYRWLERCIKSHQRLDQALFPIVQGGVYLDLRTRAATDLAKLDMPGYAIGGVSVGEPPELMAQIVRTTAPLLPRNKPRYLMGVGTYREMVIAIAAGVDLFDCVIPTRWARHGTAMVQGERWNLKNAKFREDFAPIDETCHCYACSNFSRAYVSHLVRSQEILAYTLLSIHNITELIRFTQAIRESILQNRFLTDFGHWMNDPEKDLE

SEQ ID NO: 54421 - protein, 345 aa, Cylindrospermum sp.
  REGION 1..345: note = tr|A0A1Z4QEJ9|A0A1Z4QEJ9_9NOST Queuine tRNA-ribosyltransferase OS=Cylindrospermum sp. NIES-4074; OX = 2005457 GN=tgt PE=3 SV=1
MPVGTLANVKTITPAQLLDTGAQMILSNTYHLHLQPGEAIVAGGGGLHKFMGWKGPMLTDSGGFQVFSLSEMRKITEEGVTFRSPHDGQIIKLTPERSIEIQNILGADVIMAFDECPPYPATRQEVEAATDRTYRWLERCMTAHQRSDQALFGIVQGGVFLDLRARAAETLAKLDLPGFAIGGVSVGEPPELMAQIVQTTAPLLPPEKPRYLMGVGTYREMAIAIASGVDLFDCVIPTRWARHGTAIVSGSRWNLKNAKFREDFRPLDETCPCYACQNFSRAYISHLVRSQEILAYTLLSIHNITELIRFTQKIRDAILGDRFATEFAHWLNSPDELPPDEEAGE

SEQ ID NO: 54422 - protein, 382 aa, Cylindrospermum stagnale
  REGION 1..382: note = tr|K9X0P7|K9X0P7_9NOST Queuine tRNA-ribosyltransferase OS=Cylindrospermum stagnale PCC 7417 OX=56107 GN=tgt PE=3 SV=1
MSANFSFECLACCSQTKARAGVFFTPHGPVETPRFMPVGTLANVKTITPAQLRDTGAQMVLSNTYHLHLQPGEAIVAGGGGLHKFMGWDGPMLTDSGGFQVFSLSEMRKITEEGVTFRSTHDGKIINLTPERSIEIQSILGADVIMAFDECPPYPATRQEVEAATERTYRWLERCIAAHVRSDQALFAIVQGGVYLDLRSKAATALAKLDLPGFAIGGVSVGEPPELMAKIVQTTAPLLPPDKPRYLMGVGTYREMAIAIASGVDLFDCVIPTRWARHGTAIVSGTRWNLKNAKFREDFTPLDETCPCYACQNFSRAYISHLVRSQEILAYTLLSIHNITELIRFTQKIREAILSDRFIAEFGHWLNSPEPAGDDHELITND

SEQ ID NO: 54423 - protein, 392 aa, Cystobacter ferrugineus
  REGION 1..392: note = tr|A0A1L9BDS8|A0A1L9BDS8_9DELT Queuine tRNA-ribosyltransferase OS=Cystobacter ferrugineus; OX = 83449 GN=tgt PE=3 SV=1
MAVRFELVTTDPTGARAGVLHTRRGSIPTPVFMPVATHASFRHLGMEEIKATGSKILLSNTYHLMLKPGIDVFRRFKGIHPFMQWDGAVLTDSGGFQIFSLPEDRLITEKGAHFRSFHDNSRQLLSPESSIAMQQAINSEVMMVLDVCIDSRTDEAGTREAMERTHRWALRSLAAKNQVDTGQALFAIVQGGVHPHLRDESAGFLTQHPFDGFAIGGLAVGETNEERKTMTARAASQLPQDKPRYLMGVGTPTDLLEAVLRGVDMFDCIIPTKMAQQGYAYTFQGLVRITRQAFRLSDEPLDPTCDCYVCKRYSRGYLQHLMSGKHHTGSRMLSVHNVHHYQVLTWKMRDAILRGSYAQAYRELKQAVATPKDLKDAQLEAGANAVTLKEVG

SEQ ID NO: 54424 - protein, 394 aa, Cystobacter ferrugineus
  REGION 1..394: note = tr|A0A1L9AUV7|A0A1L9AUV7_9DELT Queuine tRNA-ribosyltransferase OS=Cystobacter ferrugineus; OX = 83449 GN=tgt PE=3 SV=1
MAEPRKEKGDTRVAPSLVRYELLHEDASGTRARRGRLHTPHGPVETPIFMPVGTVGSVKGVGPDDLLTLDAQIILGNTYHLMLRPGDDLVGHMGGLHRFISWDRPMLTDSGGFQVFSLSEKRKITEEGAAFQSHLDGRHLLLSPERSMEIQETLGADIIMAFDECPPSTESRAYLEKSLARTTRWLHRCVKAWSRERSSLFGIVQGGLDPQLRKLHTEDVCAVDLPGYALGGYAVGETPEAMYEGVAYSAPLLPRDKPRYLMGVGTPVDLVTCVEHGVDMFDCVLPTRCARNGLLFTSEGKLVIRNATWARDERPADPACTCYTCRNFSRAYLRHLFVAGEILAMRLNSLHNLHYFLTLMKQVREAIAEDRYAQFARDFRERARAQEAERTRTK

SEQ ID NO: 54425 - protein, 392 aa, Cystobacter fuscus
  REGION 1..392: note = tr|A0A250JAQ8|A0A250JAQ8_9DELT Queuine tRNA-ribosyltransferase OS=Cystobacter fuscus OX=43 GN=tgt; PE = 3 SV=1
MAVRFELVTTDPTGARAGVLHTRRGSIPTPVFMPVATHASFRHLGMEEIKATGSKILLSNTYHLMLKPGIDVFRRFNGIHPFMQWDGAVLTDSGGFQIFSLPEDRLITEKGAHFRSFHDNSRQLLSPESSIAMQQAINSEVMMVLDVCIDSRTEEAGTREAMERTHRWALRSLAAKNQVDTGQALFAIVQGGVHPHLRDESAGFLTQHPFDGFAIGGLAVGETNEERKTMTARAAAQLPQDKPRYLMGVGTPTDLLEAVLRGVDMFDCIIPTKMAQQGYAYTFQGLVRITRQAFRLSDEPLDATCDCYVCKRYSRGYLQHLMSGKHHTGSRMLSVHNVHHYQMLTWKMRDAILRGSYAQAYRELKQAVATPKDLKDAQLEAGANAVTLKEVG

SEQ ID NO: 54426 - protein, 394 aa, Cystobacter fuscus
  REGION 1..394: note = tr|S9PPS2|S9PPS2_9DELT Queuine tRNA-ribosyltransferase OS=Cystobacter fuscus DSM 2262; OX = 1242864 GN=tgt PE=3 SV=1
MAEPRKEKGDTRVAPSLVRYELLHEDASGTRARRGRLHTPHGPVETPIFMPVGTVGSVKGVGPDDLLTLDAQIILGNTYHLMLRPGDDLVGHMGGLHRFISWDRPMLTDSGGFQVFSLSEKRKITEEGAAFQSHLDGRHLMLSPERSIEIQETLGADIIMAFDECPPSTESRAYLEKSLARTTRWLHRCVKAWSRERSSLFGIVQGGLDQELRKRHTEEVCAVDLPGYALGGYAVGETPEAMYEGVAWSAPLLPRDKPRYLMGVGTPVDLVTCVEHGVDMFDCVLPTRCARNGLLFTSEGKLVIRNATWARDERPADPACSCYTCRNFSRAYLRHLFVAGEILAMRLNSLHNLHYFLTLMKQVREAIAEDRYAQFARDFRERARAQETERTRAK

SEQ ID NO: 54427 - protein, 376 aa, Cytophaga hutchinsonii
  REGION 1..376: note = tr|Q11VU4|Q11VU4_CYTH3 Queuine tRNA-ribosyltransferase OS=Cytophaga hutchinsonii (strain ATCC 33406 / NCIMB 9469) OX=269798 GN=tgt PE=3 SV=1
MFYKIEHNDIGTSARAGVITTDHGTFETPIFMPVGTAGTVKAMHQRELEQEADAPIILGNTYHLYLRPGLNIIEQAGGLHKFIGWKRSILTDSGGFQVYSLSGIRKINEEGVKFKSHIDGSAHFFTPESVMDIQRTIGADIVMAFDECTPYPCEYEYARKSMEMTHRWLGRCVTRMAETEPKYGYQQHLFPIVQGSVYKDLRLKSAEVIAEAGCVGNAIGGLSVGEPAEEMYAMSELVCSVLPKDKPRYLMGVGTPENLLENIALGIDMFDCVMPTRNARNGMLFTTQGIINIRNKKWENDFTPLDQGLDIYLNDYYTKAYVRHLVHNNEMLGAQIATIQNISFYLWLMREARKQIVAGTFREWKERMVKQCMQRL

SEQ ID NO: 54428 - protein, 377 aa, Cytophaga sp.
  REGION 1..377: note = tr|A0A4R4K7A2|A0A4R4K7A2_9BACT Queuine tRNA-ribosyltransferase OS=Cytophaga sp. DMA-K-7a; OX = 2070510 GN=tgt PE=3 SV=1
MKFFLENQDKNTKARAGRIQTDHGTIETPIFMPVGTAGTVKAVHQRELKDDVQAQIILGNTYHLYLRPGLPIIEAAGGLHKFNGWDFPILTDSGGYQVYSLAGTGRKINEAGVEFKSHIDGSLHTFTPEGVMDIQRKIGADIIMAFDECTPYPCEYDYARTSMELTHRWLQRCCDRFDTTESLYGYQQTLFPIVQGSVYKDLRQRSAEKIASFGREGNAIGGLSVGEPAEIMYELTEVVCDILPADKPRYLMGVGTPANILEGIALGVDMFDCVMPTRNARNGMLFTTEGIINIRNEKWKDDFSPIDKNLGGYVSTFYSKAYLRHLVKSDEMLGAQIASVHNLSFYLWLVKEARRRIMAGDFRMWKEEMIKKVMQRL

SEQ ID NO: 54429 - protein, 376 aa, Cytophaga xylanolytica
  REGION 1..376: note = tr|A0A2W7NVY5|A0A2W7NVY5_9BACT Queuine tRNA-ribosyltransferase OS=Cytophaga xylanolytica OX=990; GN = tgt PE=3 SV=1
MTFQLLHTDSGSKARHGLITTAHGQIPTPIFMPVGTLGSVKGVHFKELREDINAKIILGNTYHLYLRPGTEILHKAGGLHQFNGWDRPILTDSGGYQVFSLSENRKLSEEGAMFRSHIDGSKHFFTPENVVDIQRVIGSDIMMAFDECAPGDADYQYTKKSMERTHRWLKRGLERFDSTEAHYGYEQTFFPIVQGGGYRDLRIQSAETIAAQGRQGNAIGGLAVGEPTEVMYEMVEVVNNILPTDKPRYLMGVGTPANLLENIALGVDMFDCVMPTRNGRNGMMFTSEGIINIRNEKWKDDFSPIDPNGKSYVDTAYSKAYLRHLFIAGEMLASQIASIHNLAFYLWLVEEARNHIAAGTFAAWKAIMVKKVATRL

SEQ ID NO: 54430 - protein, 376 aa, unidentified
  source 1..376: note = Cytophagaceae bacterium
  REGION 1..376: note = tr|A0A2E2SNX3|A0A2E2SNX3_9BACT Queuine tRNA-ribosyltransferase OS=Cytophagaceae bacterium; OX = 2026729 GN=tgt PE=3 SV=1
MQFDLLKTDEATSARAGTITTAHGTIETPIFMPVGTVATVKGVHQRELREDINPDIILGNTYHLFLKPGIEILEKAGGLHKFMNWDRNILTDSGGYQVYSLSGTRKIKEEGVKFKSHIDGSAHVFSPERVMEIQRTIGADIIMAFDECTPYPCDYNYAKRSMHMTHRWLDRCINHLEKVPVKYGFDQAFFPIVQGSTYKDLRRQSADYIANAGAVGNAIGGLSVGEPAEEMYAMTEVVTEILPADKPRYLMGVGTPINLLENVALGIDMFDCVMPTRNGRNGMLFTAHGTINIKNKKWEDDFSPLDEMAITWVDTEYSKAYVKHLFSVNEYLGRQIATIHNLGFYLWLMREARKQILAGDFRAWKEKMVKQMDKRL

SEQ ID NO: 54431 - protein, 377 aa, unidentified
  source 1..377: note = Cytophagaceae bacterium
  REGION 1..377: note = tr|A0A1E3ZNE9|A0A1E3ZNE9_9BACT Queuine tRNA-ribosyltransferase OS=Cytophagaceae bacterium SCN 52-12 OX=1660162 GN=tgt PE=3 SV=1
MKFSISATDPGSKARAGVIETAHGLIETPIFMPVGTAGSVKAVHQRELRDDISAQIILGNTYHLYLRPGLGVLEKAGGLHRFMNWERPILTDSGGYQVYSLASTGRKINDEGVAFKSHIDGSTHFFSPETAIDIQRIIGADIVMAFDECTPYPCEYGYARKSMDLTHQWLARCCTHFDRTAGKYGFDQALFPIVQGSTYKDLRVESANRIAEAGREGNAIGGLSVGEPAEVMYELTGVVCDILPREKPRYLMGVGTPANILECIALGVDMFDCVMPTRNARNGMLFTTEGIINIRNEKWSSDYSPLDPALGGYASTHYSKAYLRHLVKAGEMLGAQIASIQNLTFYLWLVRTAREKITEGTFPQWKSSVLQTIMRRL

SEQ ID NO: 54432 - protein, 376 aa, unidentified
  source 1..376: note = Cytophagales bacterium
  REGION 1..376: note = tr|A0A286IJ11|A0A286IJ11_9BACT Queuine tRNA-ribosyltransferase OS=Cytophagales bacterium TFI 002; OX = 1945892 GN=tgt PE=3 SV=1
MNFELQQQDPNSKARAGQLTTAHGVIETPIFMPVGTAGTVKGVHQQELIDAVKAQIILGNTYHLYLRPGLDIIERAGGLHQFMKWDRPILTDSGGYQVFSLKEIRKITEEGVHFNSHIDGSKHLFTPEYVMDIQRVIGADIIMAFDECPPYPCDHQYAENSMHLTHRWLKRCIKRFNETEGKYGHEQQLFPIVQGSVYKDLRVQSAEFIAAQDQPGNAIGGLSVGEPAEEMYAMLEVVNSILPTDKPRYLMGVGTPENILEGIALGTDMFDCVMPTRNARNGMLFTTEGIINIRNKKWEDDFTAIDPGLSNGISNVHSKAYLKHLIKCKEMLGAQIASIHNLSFYLWLVGEARKHIVAGDFTPWKNVMVKKLMHRL

SEQ ID NO: 54433 - protein, 376 aa, unidentified
  source 1..376: note = Cytophagales bacterium
  REGION 1..376: note = tr|A0A2M6GK66|A0A2M6GK66_9BACT Queuine tRNA-ribosyltransferase OS=Cytophagales bacterium CG18_big_fil_WC_8_21_14_2_50_42_9 OX=1973956 GN=tgt PE=3; SV = 1
MTFELQATDSQSKARAGEITTAHGKIQTPIFMPVGTAATVKAVHQRELYDDIQAQIILGNTYHLYLRPGLEVLELAGGLHKFNGWNRPILTDSGGYQVYSLSGTRKIVEEGVKFKSHIDGSSHFFSPEYVMDIQRIIGADIMMAFDECTPYPCDYQYAKKSLDMTHRWLQRCCDRFDSTTSKYGYDQALFPIVQGSTYKDLRIQSAETIASFNREGNAIGGLSVGEPAEMMYEMTELVCDILPKDKPRYLMGVGTPANILENIALGVDMFDCVLPTRNARNGMLFTTQGIINIRNERWKKDFSPLDETLGGYASTFYTKAYLRHLVHSNEMLGSQISSVHNLTFYLWLVKQARAQILQGTFREWKDKMVKQVMTRL

SEQ ID NO: 54434 - protein, 375 aa, unidentified
  source 1..375: note = Cytophagia bacterium
  REGION 1..375: note = tr|A0A2E9WJI2|A0A2E9WJI2_9BACT Queuine tRNA-ribosyltransferase OS=Cytophagia bacterium OX=2026730; GN = tgt PE=3 SV=1
MFFKLTHSSSKSNARVGKIFTSRGEIDTPIFMPVGTLGSVKGVFHDDLIKKINSQIILSNNYHLYLRPGLDILTASKGLHNFISWEMPILTDSGGYQVFSLSNNVKIKNEGVYFSSHIDGSKHLFTPESVIQSQRIIGSDICMVLDECLPYPCDYKYAKNSLGITHDWLDRSILQFNKTDAKYDSEQFLFPIVQGGTFKDLRIQSSEFVSEKNLPGNAIGGLSVGEPKEIIYENVDLVCSILPKDKPRYLMGVGTPENILECISLGIDMFDCVMPTRNGRNGMLFTSEGSINIKNKKWKKDFSPIDANLQYHSSKFSKAYLRHLIINKEILGSQIASFHNLNFYLWLVKEARKNIKNDTFHTWKENMIPKLNNRL

SEQ ID NO: 54435 - protein, 377 aa, unidentified
  source 1..377: note = Cytophagia bacterium
  REGION 1..377: note = tr|A0A2E5GTN1|A0A2E5GTN1_9BACT Queuine tRNA-ribosyltransferase OS=Cytophagia bacterium OX=2026730; GN = tgt PE=3 SV=1
MKFFKLLHQSSKCNARVGEIKTTRGLIQTPVFMPVGTLGTVKAVNQKDLEYDIDSEIILSNTYHLYLRPGTDIIKSSKGIHNYINWQRPILTDSGGYQIYSLSSKRDISNKGVKFKSHIDGSIHEFTPENIIDIQNIIGSDINMVLDECVPYTSSYSYAKKSLKLTHSWLDRSIVQHNKIKDAYGHKQFLFPIVQGAFFDDLRKVSAEYVSNCNLPGNAIGGLSVGEPNEKMYHFTDLVCQILPKDKPRYLMGVGTPENILECISLGCDMFDCVIPTRNGRNGMLFTTEGIINIKNSKWKKDFTPIDSNLNGHFSNDYSKAYLRHLIINKEILGSQIASMHNLKFYSWLLKISRTKIIKGNFTSWKNKIIKKITQRL

SEQ ID NO: 54436 - protein, 369 aa, unidentified
  source 1..369: note = Dactylococcopsis salina
  REGION 1..369: note = tr|K9YYM4|K9YYM4_DACSA Queuine tRNA-ribosyltransferase OS=Dactylococcopsis salina PCC 8305 OX=13035 GN=tgt PE=3 SV=1
MTSISFKFYCERNCRQTQARAGIFETPHGKVETPRFMPVGTIATVKGLTPAQLEAAQAQMILANTYHLHLQPGEEIIKQAGGLHKFMGWKQPILTDSGGFQVFSLSELRKISEEGVTFRSPRDGRIIDFTPEKAIQVQNALGADVIMAFDECPPYPADYDAVLLATERTERWLERCIQAHDRSESQALFGIVQGGVYEDLRRQAAKRLVEFDLPGYAIGGVSVGEPGTLINQIVAVTAPLLPQEKPRYLMGVGTYSEMVNAIAQGVDLFDCVIPTRLGRHGSALVQGERWNLKNARFREDFTPLDDCCPCYCCKTFSRAYLSHLIRSREMLGYLLISLHNVTELIRFTERIRTAILHDRFLAEFGHWLR

SEQ ID NO: 54437 - protein, 389 aa, unidentified
  source 1..389: note = Dankookia rubra
  REGION 1..389: note = tr|A0A4R5QA23|A0A4R5QA23_9PROT Queuine tRNA-ribosyltransferase OS=Dankookia rubra OX=1442381; GN = tgt PE=3 SV=1
MTLHWTKLAQDGAARRGVLHTAHGEVETPVFMPVGTAGTVKAMTADSVRATGARMVLGNTYHLMLRPGAERVGRLGGLHKLMDWHGPILTDSGGYQVMSLNELRQMDEGGVTFRSHLDGSKHRLTPERSVEIQRLLDADVTMCLDECTPFPATEDQAATSMRLSMRWARRCREAFVPREGYGLFGIVQGSTYPDLRAESVAALTEIGFEGYAVGGLAVGEGQEMMFGVLDCTLPLMPQDAPRYLMGVGTPADILGAVRRGIDMFDCVIPTRSGRTGRAYTSRGMLNLRNARHAEDPRPIDPACGCPACARHSRAYLHHLIKAEEMLGPMLLTWHNVQYYQDLTRGLRDAISAGRLDAHAAALEAGWAAGDAPPDDPAAAELAEDRETLR

SEQ ID NO: 54438 - protein, 369 aa, unidentified
  source 1..369: note = Dechloromonas aromatica
  REGION 1..369: note = sp|Q47AX3|TGT_DECAR Queuine tRNA-ribosyltransferase; OS = Dechloromonas aromatica (strain RCB) OX=159087 GN=tgt; PE = 3 SV=1
MQFDLLKTDGVARRGTLTLAHGVIQTPVFMPVGTYGTVKAMTPQSLNDIGAQICLGNTFHLWLRPGLEVIAAHKGLHDFMNWQKPILTDSGGFQVFSLGAMRKITEEGVKFSSPHDGAKLFLTPEISMQIQKVLNSDIVMIFDECTPYPATHEEAAKSMRMSMRWAQRSRDEHNKLENSNALFGIVQGGMHEDLRDESVAGLCDIGFDGMAIGGLSVGEPKEDMARILAHTAPQLPTHKPRYLMGVGTPEDLVYSVSAGIDMFDCVMPTRNARNGHLFTRFGDVKIKNARYKLDTGPLDSSCSCYTCTNFTRAYLHHLFRNGEILGGMLNTIHNLHFYQTIMAEMRTAIEVEHFTEWAAGFARDRSSGQ

SEQ ID NO: 54439 - protein, 369 aa, Dechloromonas denitrificans
  REGION 1..369: note = tr|A0A133XHI4|A0A133XHI4_9RHOO Queuine tRNA-ribosyltransferase OS=Dechloromonas denitrificans; OX = 281362 GN=tgt PE=3 SV=1
MQFELLKTDGDARRGTLTLTHGVVQTPVFMPVGTYGTVKAMTPASLNEIGAQICLGNTFHLWLRPGLDVVQAHHGLHDFMQWQKPILTDSGGFQVFSLGAMRKITEEGVKFSSPHDGAKLFLTPEISMQIQKVLNSDIVMIFDECTPYPATRDEAAKSMRMSMRWAQRSRDEHNRLENGNALFGIVQGGMYEELRDESVAGLCDIGFDGMAIGGLSVGEPKEDMARILAHTAPKLPTHKPRYLMGVGTPEDLVYSVKAGIDMFDCVMPTRNARNGHLFTRFGDVKIKNARHKTDTGTLDPSCSCYTCSNFSRAYLHHLFRAGEILGGMLNTIHNLHFYQTIMAEMRAAIEAGTLNEWASAFARDRSSGQ

SEQ ID NO: 54440 - protein, 369 aa, Dechloromonas sp.
  REGION 1..369: note = tr|A0A3B7ABD6|A0A3B7ABD6_9RHOO Queuine tRNA-ribosyltransferase OS=Dechloromonas sp. HYN0024; OX = 2231055 GN=tgt PE=3 SV=1
MQFDLLKTDGAARRGTLTLAHGQIQTPVFMPVGTYGTVKAMTPQSLHDIGAQICLGNTFHLWLRPGLDVIAAHNGLHDFMNWQKPILTDSGGFQVFSLGAMRKITEEGVKFSSPHDGAKLFLTPEISMQIQKVLNSDIVMIFDECTPYPASHEEAAKSMRMSMRWARRSRDEHNKLENSNALFGIIQGGMYEDLRDESLAGLDDIGFDGMAIGGLSVGEPKEDMVRVLAHVAPRMPTHKPRYLMGVGTPEDLVRSVAAGIDMFDCVMPTRNARNGHLFTRFGDVKIKNARYKLDTGPLDPSCTCYTCTQFTRSYLHHLFRHGEILGGMLNTIHNLHFYQVIMAEMRAAIESGTFSQWSDEFVRKRSSGE

SEQ ID NO: 54441 - protein, 373 aa, Deferribacter autotrophicus
  REGION 1..373: note = tr|A0A5A8F4Y1|A0A5A8F4Y1_9BACT Queuine tRNA-ribosyltransferase OS=Deferribacter autotrophicus; OX = 500465 GN=tgt PE=3 SV=1
MFRFTLVKKDKKTKARLGFFETLHGKVETPIFMPVGTAGSVKTVTPDELKDVGAQIILGNTYHLHLRPGEDVVNHFGGLHKFIRWDRPILTDSGGFQVFSLAELKNITEEGVTFRSHLDGHKIFLTPEKSIEIQSKLGSDIMMVLDECVPYPCEKEYVKKSIKLTTRWAKRCKEAKKNQWQALFGIVQGGVYEDLRKQSAEEIVEIGFDGYAIGGLSVGEENRLMYDITDFTTDYLPEDRPRYLMGVGTPEDILECVSRGVDMFDCVMPTRNARNGLLFTSYGKLHIKREQWKLSDKPIDENCNCYTCKNFSRGYLRHLFKAGEILALRLNTIHNLHFYISLVKDIRNAIRKECFEEFKKEKLEMFKIGGDNV

SEQ ID NO: 54442 - protein, 375 aa, Deferribacter desulfuricans
  REGION 1..375: note = tr|D3PAI1|D3PAI1_DEFDS Queuine tRNA-ribosyltransferase OS=Deferribacter desulfuricans (strain DSM 14783 / JCM 11476 / NBRC 101012 / SSM1); OX = 639282 GN=tgt PE=3 SV=1
MVVFKFVLEKKDSESKARIGYFETIHGRVETPIFMPVGTVGSVKTVTPHELKEIGAQIILGNTYHLHLRPGDDIVNHFGGLHKFINWDKPILTDSGGFQVFSLSELKDLTEDGVTFRSHLDGRKIFLSPEKSIEIQSNLGSDIMMVLDECVPYPCEKSYVERSIELTAMWAKRCKEAKRNFWQALFGIVQGGVYKDLRKISAEQIVEIGFDGYALGGLSVGEENNIMYEITEFTTDYLPEDRPRYLMGVGTPEDILECVERGVDMFDCVMPTRNARNGLLFTSYGKLHIKRQDWKMSDDPIDPHCDCYTCKNFSRGYLRHLYKAGEILALRLNTIHNLHFYISLVKEIRNAIKNGCFKKFKREKLEMFKIGGDNV

SEQ ID NO: 54443 - protein, 373 aa, unidentified
  source 1..373: note = Deferribacteraceae bacterium
  REGION 1..373: note = tr|A0A3C1BUB5|A0A3C1BUB5_9BACT Queuine tRNA-ribosyltransferase OS=Deferribacteraceae bacterium; OX = 2053543 GN=tgt PE=3 SV=1
MFKFTLEKTSEKSKARTGRIVTPHGEIETPIFMPVGTVGSVKGIAPRELDEIGAQIILGNTYHLHLRPGEDTVAHFGGLAKFNSWNKPTLTDSGGFQVFSLAKLNKIGEEGVEFRSHLDGSKLFLSPEKSMEIQQKIGADIMMAFDECVPYPSEKIYVEKSLELTTRWAERSLKAKTREDQALFGIIQGGVFPDLRKRSAEQICALPFNGFAIGGLSVGEDIPTMYEITDYITDYMPADKPRYLMGVGTPEDLLNGIERGVDMFDCVMPTRNARNALLFTNNGKLHIKAARHRLSDEPVDAECDCYTCRNFSRGYLRHLYKSGELLALKLNSIHNLHFYLSLVKRSRNAINNGFFEDFKKEILDKISFGGDNV

SEQ ID NO: 54444 - protein, 376 aa, unidentified
  source 1..376: note = Defluviimonas alba
  REGION 1..376: note = tr|A0A161GLZ6|A0A161GLZ6_9RHOB Queuine tRNA-ribosyltransferase OS=Defluviimonas alba OX=1335048; GN = tgt PE=3 SV=1
MTQKFDFHVTATDGAARTGRIHTPRGEIRTPAFMPVGTAATVKAMLPESVRATGADILLGNTYHLMLRPTAERIDRLGGLHRFMNWDRPILTDSGGFQVMSLAALRKLTEEGVRFKSHIDGSSHFLTPERSMEIQRLLGSDIVMCFDECPALPATDAEVARSMALSMRWAQRSRDAFGDRPGHALFGIMQGGVTRELREESALALRAIGFDGYAIGGLAVGEGQEAMFGVLDYAPGMLPEDKPRYLMGVGKPDDIVGAVERGVDMMDCVLPSRSGRTGQAFTRRGVVNLRNARHMDDPRPLDEQCTCPACRSYSRAYLHHVLRSQEIIASMLLTWHNLHYYQELMAGLRGAISEGRLAAFVAAFHAQRAMGDIEPV

SEQ ID NO: 54445 - protein, 376 aa, unidentified
  source 1..376: note = Defluviimonas aquaemixtae
  REGION 1..376: note = tr|A0A2R8B4A9|A0A2R8B4A9_9RHOB Queuine tRNA-ribosyltransferase OS=Defluviimonas aquaemixtae; OX = 1542388 GN=tgt PE=3 SV=1
MTDCFSFTLRATDGKARTGVIATPRGEIRTPAFMPVGTAGTVKAMLPESVAETGAEILLGNTYHLMLRPTAERIDRLGGLHRFMNWHRPILTDSGGFQVMSLASLRKLTEEGVRFSSHIDGSKHMLTPERSMEIQRLLGSDIVMAFDECPALPAPVAKVAESMRLSMRWADRSRDAFGDRPGHALFGIMQGGVTEELRAESAAALKAIGFDGYAVGGLAVGEGQETMFSVLDYAPGLLPEDRPRYLMGVGKPDDIVGAVERGVDMMDCVLPSRSGRTGQAFTRRGVVNIKNARHMDDPRPLDEDCACPACRSYSRAYLHHVFRSGEIISSMLLTWHNLHYYQELMAGLRGAIAEGRLAAFRRDFDAARAEGDIEPL

SEQ ID NO: 54446 - protein, 376 aa, unidentified
  source 1..376: note = Defluviimonas denitrificans
  REGION 1..376: note = tr|A0A2S8SDE6|A0A2S8SDE6_9RHOB Queuine tRNA-ribosyltransferase OS=Defluviimonas denitrificans; OX = 404881 GN=tgt PE=3 SV=1
MTDRFSFTLHATDGKARTGTIHTPRGEIRTPAFMPVGTAATVKAMLPESVRATGADILLGNTYHLMLRPTAERIARLGGLHRFMNWDRPILTDSGGFQVMSLAALRKLTEEGVRFSSHIDGSKHMLSPERSMEIQKLLGSDIVMCFDECPALPATEEVVAQSMRLSMRWAQRSRDAFGDRPGHALFGIQQGGVTEDLRGESAEALKAIGFDGYAVGGLAVGEGQETMFSVLDYAPGMLPADKPRYLMGVGKPDDIVGAVQRGIDMMDCVLPSRSGRTGQAWTRRGQVNIKNARHMDDPRPLDEACTCPACRSYSRAYLHHVFRAGEIIASMLLTWHNLHYYHELMEGLRGAIRAGTLDAFVADFHAQRAAGDIAPL

SEQ ID NO: 54447 - protein, 375 aa, unidentified
  source 1..375: note = Defluviimonas sp.
  REGION 1..375: note = tr|A0A059IJG4|A0A059IJG4_9RHOB Queuine tRNA-ribosyltransferase OS=Defluviimonas sp. 20V17; OX = 1417296 GN=tgt PE=3 SV=1
MTAFSFSIAATDGRARTGTIHTPRGQIRTPAFMPVGTAATVKAMLPESVRATGADILLGNTYHLMLRPGAERVAKLGGLHRFMNWNRPILTDSGGFQVMSLSDLRKLTEDGVRFKSHVDGSEHFLSPERSMEIQRLLGSDIVMCFDECPALPATEEQVAQSMRMSMRWAERSREAFGDRPGHALFGIQQGGVTKELRAESAEALRAIGFDGYAIGGLAVGEGQEAMFGVLDYAPGMLPADRPRYLMGVGKPDDIVGAVQRGVDMMDCVLPSRSGRTGQAWTRRGQVNLKNARHADDPRPLDEDCACPACRGYSRAYLHHVYRAGEIIASMLLTWHNLHYFQELMDGLRTAIAAGRLEAFVADFHRLRAEGDIERL

SEQ ID NO: 54448 - protein, 375 aa, Defluviitoga tunisiensis
  REGION 1..375: note = tr|A0A0C7NKJ1|A0A0C7NKJ1_DEFTU Queuine tRNA-ribosyltransferase OS=Defluviitoga tunisiensis; OX = 1006576 GN=tgt PE=3 SV=1
MSESPIKFELLHIDKYTGARRGRITTRHGVIETPVFMPVGTNATVKGITNDQLNEIGTEIILSNAFHLYLRPGLEVLDYYKGLHNFMNWKKPILTDSGGFQVFSLPNKKFSEDGIIFKSPLDGLEIELTPEKSLNIQNVIGSDIAMVLDVCVNSLSSYETVKESVQKTFNWALRSREYHNNKNQALFGIVQGGLYEDLREISLKQITSLDFDGYAMGGLAVGEKYQDSEKVLKAFGNKFPENKPRYIMGIGSPTMMFLSVENGMDMFDCVLPTRMGRHGTALTMQGKLNLKSSKVRYDDQPIDDECDCYTCKNHSRGYIHHLFKRDEMLGKILLSIHNLRFNISLVEKMRNAIEIDEFKYFKEEFFRNSGYSLTN

SEQ ID NO: 54449 - protein, 373 aa, Dehalobacter sp.
  REGION 1..373: note = tr|A0A1C2XYN7|A0A1C2XYN7_9FIRM Queuine tRNA-ribosyltransferase OS=Dehalobacter sp. TeCB1; OX = 1843715 GN=tgt PE=3 SV=1
MAAVKLEILKKDTRTKARLGRLHTPHGMIETPVFMPVGTQATVKSVSPEELKALGANMILSNTYHLFLRPGHELIKRAGGLHKFMNWDGAILTDSGGFQVFSLGDLRKITEEGVEFRSHLDGSKQFLSPEKATEIQIALGSDIVMAFDECTPYPANREYTKKSAERTFRWLKRCKNTLPTTEKQALFGIVQGGMYEDLRKQSAQEITELDLPGYALGGLSVGEPKEMMYEVLDYTVPLLPEAKPRYLMGVGSPDDLIEGVMRGIDMFDCVLPTRIARNGTAMTRFGKVVVRNATYADDFTPIDPTCSCYTCQNYSRAYIRHLIKADEIFGHRLMTIHNLHFLTHLMKEVRQAIAEDQLPEYRKQFFADYGYKK

SEQ ID NO: 54450 - protein, 373 aa, Dehalobacter sp.
  REGION 1..373: note = tr|A0A4R4CUW5|A0A4R4CUW5_9FIRM Queuine tRNA-ribosyltransferase OS=Dehalobacter sp. 12DCB1; OX = 2070364 GN=tgt PE=3 SV=1
MAAVKLEILKKDTRTKARLGRLHTPHGMIETPVFMPVGTQATVKSVSPEELKMLGADIILSNTYHLFLRPGHELIKHAGGLHRFMNWDGAILTDSGGFQVFSLGDLRKITEEGVEFRSHLDGSKQFLSPEKATEIQIALGSDIVMAFDECTPYPATREYTEKSAERTFRWLQRCKNTLTSTDRQALFGIVQGGMYEDLRKQSAQEITGLDLPGYALGGLSVGEPKELMYEVLDYTVPLLPEAKPRYLMGVGSPDDLIEGVMHGIDMFDCVLPTRIARNGTAMTRFGKVVVRNATYADDFTPIDSTCSCYTCRNYSRAYIRHLIKADEIFGHRLMTIHNLHFLTHLMEGIRQAIAEDRLPEYRKQFFADYGYEK

SEQ ID NO: 54451 - protein, 400 aa, unidentified
  source 1..400: note = Dehalococcoidales bacterium
  REGION 1..400: note = tr|A0A2E9M4V9|A0A2E9M4V9_9CHLR Queuine tRNA-ribosyltransferase OS=Dehalococcoidales bacterium; OX = 2026733 GN=tgt PE=3 SV=1
  VARIANT 60: note = Xaa can be any naturally occurring amino acid
  VARIANT 65: note = Xaa can be any naturally occurring amino acid
  VARIANT 179: note = Xaa can be any naturally occurring amino acid
  VARIANT 215: note = Xaa can be any naturally occurring amino acid
  VARIANT 306: note = Xaa can be any naturally occurring amino acid
MNLNTFRLLKTDTDSKARLGELTTPHGRVPTPTFIPVASQGTIKTLTPEEVKDIGFGIAXANTYXLYLRPGISVIEKFGGLHRFMAWERAILTDSGGYQIFSLARLRQVSDEGVTFRSHIDGSEHLITPELAIRLQESLGSDIIMVLDECPAPDDSLRNTRAAVKRTHLWAERSLKTHXRHDQVLYAIVQGGVFPKLRRQSAEYLASLDFSGFAXGGLSLGEPKQLTKEMIEATVTWLPENKPRYLMGAGSPEDIVEGVARGVDLFDSALPTRVARNGALFTERGRVDVCNAMYRQMERPVDPDCXCYTCRTFSAAYLHHLFKSEELLAYRLATMHNLTFIARLTQKIRDAISDATFNSFKEEFLARYQPTNESVRLEQKRKWNRTRDLKGSSNYPNHRQ

SEQ ID NO: 54452 - protein, 390 aa, unidentified
  source 1..390: note = Dehalococcoidales bacterium
  REGION 1..390: note = tr|A0A2D5UU48|A0A2D5UU48_9CHLR Queuine tRNA-ribosyltransferase OS=Dehalococcoidales bacterium; OX = 2026733 GN=tgt PE=3 SV=1
MTNNLPGFHLKKTYPAAKARAGELVTSHGTVSTPLFCPVATQGTIKTLTPREVRDLALPMILVNTYHLYLRPGIDVVEKLGGLHKFMAWDGVILTDSGGYQVFSLARLRRVRDEGVVFRSHIDGSEHLITPELAVQFQESLGADIIMVLDVCSAYDSSFEKVEQDTHRTHHWAERSRKAQQSGDQALYGIVQGGVFPGLRRQSAEYLASLNFPGYAIGGLCLGETKEVTLAMVEESVTFLPENKPRYLMGVGSPEDIVESVARGIDLFDSALPTRLARNGSLFTPSGRINIRNAGFGRMERPVDPDCGCYTCRTFSAAYLHHLFSAKELLAYRLASIHNLAFISQLMQRIRSAILDDTFDSFKDEFLSTYRPTDEQVRLEQKQKWLKQRA

SEQ ID NO: 54453 - protein, 392 aa, unidentified
  source 1..392: note = Dehalococcoides mccartyi
  REGION 1..392: note = sp|Q3ZAE2|TGT_DEHM1 Queuine tRNA-ribosyltransferase; OS = Dehalococcoides mccartyi (strain ATCC BAA-2266 / KCTC 15142 / 195) OX=243164 GN=tgt PE=3 SV=1
MDKSFILNKTSPRSSARRGQLLTAHGQVETPVFCPVGSQATVKTLTPEDLKSVNVNMILSNTYHLYLRPGIPVVKEMGGLHKFMNWDGVILTDSGGYQIFSLANLRKLDEGGVSFRSHIDGSTRYITPEDAVSFQQDLGSDIAMVLDECPHSEASENEVLAAMERTHQWAKRCLAAHTLKSQHLFAIVQGGLSPVLRQQSAEYLASLDFPGYALGGLSLGEPKDITFETVRHTLRFLPENKPRYLMGVGAPEDLLEGVSCGVDIFDCVLPTRVARNGAFFSRLGRLNIRNASFATQKGPVDPECNCYTCRNYSAAYLHHLFRCEEILAYRLATIHNIAFLSNLMQEVRTSIEKDCFEEFKGDFLTRYQPTNESVRIEQKQKWLSARSGETSS

SEQ ID NO: 54454 - protein, 392 aa, unidentified
  source 1..392: note = Dehalococcoides mccartyi
  REGION 1..392: note = sp|A5FSU3|TGT_DEHMB Queuine tRNA-ribosyltransferase; OS = Dehalococcoides mccartyi (strain ATCC BAA-2100 / JCM 16839 / KCTC 5957 / BAV1) OX=216389 GN=tgt PE=3 SV=1
MDKSFILNKTSSRSLARRGQLFTAHGKVETPVFCPVGSQATVKTLTPEDLKSVNINMILSNTYHLYLRPGIPIIKEMGGLHKFMNWDGVILTDSGGYQIFSLANLRKLDEGGVSFRSHIDGSTRYITPEDAVSFQQDLGSDIAMVLDECPHSEASENEVLAAMERTHQWAKRCLAAHTLKSQHLFAIVQGGLSPELRRQSAEYLASLDFPGYALGGLSLGEPKDITFETVRHTLRFLPENKPRYLMGVGAPEDLLEGVSCGVDIFDCVLPTRVARNGAFFSRLGRLNIRNAAFATQKGPIDPDCNCYTCRNYSAAYLHHLFRCEEILAYRLATIHNIAFLSNLMQEIRTSIEKDCFEEFKADFLSRYQPTNEAIRIEQKQKWLFGRNGEPPS

SEQ ID NO: 54455 - protein, 392 aa, unidentified
  source 1..392: note = Dehalococcoides sp.
  REGION 1..392: note = tr|A0A0C6ETE7|A0A0C6ETE7_9CHLR Queuine tRNA-ribosyltransferase OS=Dehalococcoides sp. UCH007; OX = 1522671 GN=tgt PE=3 SV=1
MDKSFILNKTSPRSSARRGQLLTAHGKVETPVFCPVGSQATVKTLTPEDLKSVNVNMILSNTYHLYLRPGIPVVKEMGGLHKFMNWDGVILTDSGGYQIFSLANLRKLDEGGVSFRSHIDGSTRYITPEDAVSFQQDLGSDIAMVLDECPHSEASENEVLAAMERTHQWAKRCLAAHTLKSQHLFAIVQGGLSPVLRQQSAEYLASLDFPGYALGGLSLGEPKDITFETVRHTLRFLPGNKPRYLMGVGAPEDLLEGVSCGIDIFDCVLPTRVARNGAFFSRLGRLNIRNASFATQKGPVDPECNCYTCRNYSAAYLHHLFRCEEILAYRLATIHNIAFLSNLMQEVRTSIEKDCFEEFKGDFLARYQPTNESVRIEQKQKWLSARSGETPS

SEQ ID NO: 54456 - protein, 395 aa, unidentified
  source 1..395: note = Dehalococcoidia bacterium
  REGION 1..395: note = tr|A0A0S8CFW8|A0A0S8CFW8_9CHLR Queuine tRNA-ribosyltransferase OS=Dehalococcoidia bacterium SG8_51_3 OX=1703394 GN=tgt PE=3 SV=1
MKSDFRLIKVCTGARAGELITPRGVVPTPVFMPVGSQGTVKALTPEEVKGIGYGMILANTYHLYLRPGIDMVERLDGLHKMMAWDGAILTDSGGYQVFSLAPLCKVSEEGVTFRSHIDGSEHFFTPELTVEYQSRLGADIIMVLDVCSAYDDSFEKVQQSMELTHRWAERCQKARRNQSQALFAIVQGGVFPELRRRSVEFLTNLGFDGYALGGLSVGEPKKLTFETVAQTAAQLPEKKPRYLMGVGSPEDIIEGVARGIDIFDSALPTRVARNGALFTWEGRCNIRNADFSRMGQPIVAGCGCYTCRTFSAAYIHHLFKSGELLAYRLATIHNLYFIHNLMEKIRMAVTGGTFSRLREEFWSRYAPTDEQVRVSQKQKWLKSKRRGLDIGVEGN

SEQ ID NO: 54457 - protein, 385 aa, unidentified
  source 1..385: note = Dehalococcoidia bacterium
  REGION 1..385: note = tr|A0A349K8C3|A0A349K8C3_9CHLR Queuine tRNA-ribosyltransferase OS=Dehalococcoidia bacterium; OX = 2026734 GN=tgt PE=3 SV=1
MFNFTLEHSDGLARAGCISTPHGEINTPVFMPVATQGSVKALDRVDLECLGTQIILGNAYHLYLRPGVKTIKELGGLHSFMNWTRPILTDSGGFQGFSLQHLRKITDDGITFKSHIDGSTHELTPESVVDIQTDIGSDVIMPLDVCLPSEASKTDLSEAMDLTSNWLGRSIRSLGSKSDQSLFGIVQGGLHSDLRQKSADFLSSLDLPGYAIGGLSVGETKEKMYPTVEITSELLPSDKPRYLMGVGSPEDLVECVVRGIDMFDCVLPTRVARKGAMYTKFGRRNVTRSEYKRSDSSFDTNCDCYACTNFSAGYIHHLFKAKEYLAYRLASIHNLRFLMQTMADLRKAIQQGLIKEYRETFWENYRPSDQSARANQALRHIKRFK

SEQ ID NO: 54458 - protein, 394 aa, unidentified
  source 1..394: note = Dehalogenimonas alkenigignens
  REGION 1..394: note = tr|A0A0W0GGQ5|A0A0W0GGQ5_9CHLR Queuine tRNA-ribosyltransferase OS=Dehalogenimonas alkenigignens; OX = 1217799 GN=tgt PE=3 SV=1
METAGFSFELALSGAARAGVLNTPHAAVETPCFMPVGSQATVKTLTPDELKDLGYNLILANNYHLYLRPGTQVVGSYGGIHKFMGWNGALLTDSGGYQVFSLSPLRKMSDDGVTFRSHIDGSEHFFSPELAIKYQEVFGADIIMALDECPPVEASREVIEAAVERTQAWALRCKSARTRTDQSLFPIVQGGLHADLRRRSAEGLIEADFPGYAIGGLAIGESKEQTAEITAATTEILPIDKPRYLMGVGSPEDIVRGVAAGIDMFDSALPTRVARNGALFTRYGRIDIANARYEGDKGPIDNECGCYACQNFSAGYVHHLFRAKELLAYRLATLHNLYFMRRLMTDIRQSILDERYDDFARSFLSDYKPTDESVRLSQKRQWLKDRNSSSPSMD

SEQ ID NO: 54459 - protein, 387 aa, unidentified
  source 1..387: note = Dehalogenimonas formicexedens
  REGION 1..387: note = tr|A0A1P8F4S3|A0A1P8F4S3_9CHLR Queuine tRNA-ribosyltransferase OS=Dehalogenimonas formicexedens; OX = 1839801 GN=tgt PE=3 SV=1
MSELSFKLEKPGNARAGILVTPHATVETPCFMPVGSQATVKTLTPDELKDLGYKLILANNYHLYLRPGTDVIASYGGIHKFMGWSGALLTDSGGYQVFSLSPLRKMSDEGVTFRSHIDGSEHFFSPELAIKYQEIFGADIIMALDECPPVEASRGAIESAVARTQAWALRCKSAKTRADQALFPIVQGGLHPDLRRRSAEGLIETGFPGYAIGGLAIGEAKDQTVEITAATTGVLPSDKPRYLMGVGSPEDIVRGVSAGIDMFDSALPTRVARNGALFTRRGRIDIANARYEGDKTPIETGCACYTCLNFSAGYVHHLFRAKELLAYRLATLHNLYFMRKLMRDIRQSILDERFDGFARNFLSDYTPTDEAVRLAQKRQWLQDRNQP

SEQ ID NO: 54460 - protein, 392 aa, Dehalogenimonas lykanthroporepellens
  REGION 1..392: note = tr|D8K230|D8K230_DEHLB Queuine tRNA-ribosyltransferase OS=Dehalogenimonas lykanthroporepellens (strain ATCC BAA-1523 / JCM 15061 / BL-DC-9) OX=552811 GN=tgt PE=3 SV= 1
MSAISFELETAGAARAGMLTTPHAKVETPCFMPVGSQATIKTLTPDEVRDLGYRLILANNYHLYLRPGTAVVSGYGGLHRFMGWDGALLTDSGGYQVFSLSPLRKVTDEGVTFRSHIDGSEHFFSPELAVGYQEAFGADIIMALDECPPVDGSREVISAAVARTHDWAERCLSAKTRDDQALFPIVQGGLFADLRRRSAEGLVELDFPGYAIGGLAIGESKDQTVEITAATTEILPADKPRYLMGVGSPEDIVRAVGVGIDMFDSALPTRVARNGAIFTRQGRIDIANARYQGDTVPIEDDCACPACRRFSAGYIHHLFRAKELLGHRLATLHNLFFMNRLMVDLRRAVKEGRYDDFVRDFLAGYRPTDEQVRLSQKRQWLADRNRPGTEKG

SEQ ID NO: 54461 - protein, 357 aa, Dehalogenimonas sp.
  REGION 1..357: note = tr|A0A0F7CTG8|A0A0F7CTG8_9CHLR Queuine tRNA-ribosyltransferase OS=Dehalogenimonas sp. WBC-2; OX = 943347 GN=tgt PE=3 SV=1
MPVGSQATIKTLTPDEVRDIGYKIILANNYHLYLRPGTKVVESYGGLHKFMNWDGAMLTDSGGYQVFSLSPLRKMSDEGVTFRSHIDGSEHFFSPELAIKYQESFGADIIMALDECPPVEGSHDVIAAAVARTHSWAVRCLKAKTRDDQALFPIVQGGLHADLRRRSAQGLVAEEFPGYAIGGLAIGESKDQTIEITAETTAILPIDKPRYLMGVGSPEDVVRGVGAGIDMFDSALPTRVARNGALFTRHGRIDIVNARYEGDKNPIEDGCGCYTCSRFSAGYVHHLFRAKELLAYRLATLHNLSFMFTLMADIRRAIINERYDDFSRNFLSEYRTTDETVRLNQKRQWLQGRHAEN

SEQ ID NO: 54462 - protein, 392 aa, Dehalogenimonas sp.
  REGION 1..392: note = tr|A0A2P5P753|A0A2P5P753_9CHLR Queuine tRNA-ribosyltransferase OS=Dehalogenimonas sp. GP; OX = 1536648 GN=tgt PE=3 SV=1
MTEFSFLLEKSGAARAGILTTPHAAVETPCFMPVGSQATVKTLTPDEIKDLGYQLILANNYHLYLRPGTDVIARYGGVHKFMGWDGALLTDSGGYQVFSLSPLRKMSDEGVTFRSHLDGSEHFFSPELAIKYQEIFGADIIMALDECPPVEASREVIESAVKRTQAWAGRCKTAKTRPDQALFPIVQGGLHADLRRRSAEGLIDADFPGYAIGGLAIGESKDQTVEITAATSDVLPVDKPRYLMGVGSPEDIVRGVEVGIDMFDSALPTRVARNGALFTRAGRIDIANARYEGERNPIEIDCSCYTCCNFSAGYIHHLFRTKELLAYRLATIHNLFFMNKLMANIRQAILEERYADFSRTFLSDYKPTDEAVRLSQKRQWLKDRNQPQGHGI

SEQ ID NO: 54463 - protein, 390 aa, unidentified
  source 1..390: note = Deinococcus actinosclerus
  REGION 1..390: note = tr|A0A0U3SV68|A0A0U3SV68_9DEIO Queuine tRNA-ribosyltransferase OS=Deinococcus actinosclerus; OX = 1768108 GN=tgt PE=3 SV=1
MFEFEIQHRDGRARVAQFHTPRGTVTTPMFMPVGTQGTVKGISPQELLDIGSQMILGNTYHLMLRPGEAMVATHGGLPGFTAYPGPFLTDSGGFQVMSLGHMRKITEEGVTFKSHLDGSLVNLTPERSIQVQEALGADIIMAFDECPPYPAEREYILRSLERTERWLARCLNVKSREEQALFAIVQGGVHEDLRQRSLDLTLPYNTPGFALGGLAVGEPKEEMYPAVAFTAERLPDHKPRYLMGVGHPEDLVAGVALGVDMFDCVYPTRTGRFGYALTDQGRLNMNSSAPRTSMEPLDPDCDCYACTHYTRAYLAHLIRAEEMLGPRMLSLHNLRYLHRLMERARSAIQAGEFHAWASAWAAGYFKNGIPAWFQSALDQGRTGAHQNPQS

SEQ ID NO: 54464 - protein, 390 aa, unidentified
  source 1..390: note = Deinococcus actinosclerus
  REGION 1..390: note = tr|A0A2Z3YY64|A0A2Z3YY64_9DEIO Queuine tRNA-ribosyltransferase OS=Deinococcus actinosclerus; OX = 1768108 GN=tgt PE=3 SV=1
MFEFKIQHRDGRARVAQFHTPRGTVTTPMFMPVGTQGTVKGISPQELLDIGSQMILGNTYHLMLRPGEAMVAAHGGLPGFTAYPGPFLTDSGGFQVMSLGHMRKITEEGVTFKSHLDGSLVNLTPERSIQVQEALGADIIMAFDECPPYPAEREYILRSLERTERWLARCLNVKSREEQALFAIVQGGVHEDLRQRSLDLTLPYNTPGFALGGLAVGEPKEEMYPAVAFTAERLPDHKPRYLMGVGHPEDLVAGVALGVDMFDCVYPTRTGRFGYALTDQGRLNMNSSAPRTSMEPLDRDCDCYACTHYTRAYLAHLIRAEEMLGPRMLSLHNLRYLHRLMERARSAIQAGEFHTWASTWAAGYFKHGVPAWFQSALDQGRAGVSQNPQS

SEQ ID NO: 54465 - protein, 358 aa, Deinococcus aerius
  REGION 1..358: note = tr|A0A2I9DKQ4|A0A2I9DKQ4_9DEIO Queuine tRNA-ribosyltransferase OS=Deinococcus aerius OX=200253; GN = tgt PE=3 SV=1
MPVGTQGSVKGISPQELLDIGSQMILANTYHLMLRPGEQLVAAHGGLPGFTAYPGPFLTDSGGFQVMSLGHMRKITEEGVTFKSHIDGANVSLTPERSIQVQEALGADVIMAFDECPPYPAERGYIENSLERTARWLERCHAAKTREDQALFAIVQGGVHQDLRRKSLDLTLLFGTPGFAIGGLAVGEPKEEMYPAVAFTASQLPEEKPRYLMGVGHPEDLIAGIALGVDMFDCVYPTRTGRFGYALTDDGRLNMNSSAPRTQLEPIDRECDCYACRHYTRAYLAHLIRAEEMLAPRMLSLHNLRYLHRLVERARTAIEQGAFQTWAQTWAQRYFRGAVPGWFVEALEVGSRVQSSVL

SEQ ID NO: 54466 - protein, 383 aa, Deinococcus cellulosilyticus
  REGION 1..383: note = tr|A0A511NAV9|A0A511NAV9_9DEIO Queuine tRNA-ribosyltransferase OS=Deinococcus cellulosilyticus NBRC 106333 = KACC 11606 OX=1223518 GN=tgt PE=3 SV=1
MFEFDIQATSGRARKATFHTPRGSVTTPMFMPVGTQGTVKGISPQELLDVGSQMILGNTYHLMLRPGEELVRQHGGLPGFTAYPGPFLTDSGGFQVMSLGHMRTIKEEGVTFRNHLDGSLVYLTPERSIQVQEALGADVIMAFDECPPHPASQEYVKNSLERTIRWLDRCLQVKTREDQALFAIVQGGVYEHLRLQSLEATLPFNTPGFAIGGLAVGESKEEMYPMVDFTARHLPDNKPRYLMGVGHPEDLVAAIGLGVDMFDCVYPTRTGRFGYALTDQGRINLNKASMRTDMRPVDETCDCYCCKNYTRAYLAHLMRAEEMLGPRMLSLHNLRYLHRLVDKARVAIETDTYVEWASEWGKVYFGGTLPAWFEQALRASSDE

SEQ ID NO: 54467 - protein, 385 aa, Deinococcus deserti
  REGION 1..385: note = tr|C1CYQ0|C1CYQ0_DEIDV Queuine tRNA-ribosyltransferase OS=Deinococcus deserti (strain VCD115 / DSM 17065 / LMG 22923) OX=546414 GN=tgt PE=3 SV=2
MFEFTVQHQQGRARVAQFHTPRGAVTTPMFMPVGTQGTVKGISPQELLDIGSQMILGNTYHLMLRPGEALVQAHGGLPGFTAYPGPFLTDSGGFQVMSLGHMRKITEEGVTFKSHLDGSLVHLTPERSIQVQEALGADVIMAFDECPPFPAERDYIQRSLERTVRWLDRCVSVKTNDHQALFAIVQGGIHEDLRQQSIDLTLPFETPGFAIGGLAVGESKAEMFPAVAFSAGLLPDDKPRYLMGVGHPEDLVAGIALGIDMFDCVYPTRTGRFGYALTDDGRLNMNSSAPRKELIPIDDTCECYACRHYTRAYLAHLLRAEEMLAPRMLSLHNLRYLHHLVERARTAIASGKFHDWANEWGERYFKGKIPEWYQQALATGAGQRV

SEQ ID NO: 54468 - protein, 384 aa, Deinococcus ficus
  REGION 1..384: note = tr|A0A221SYD6|A0A221SYD6_9DEIO Queuine tRNA-ribosyltransferase OS=Deinococcus ficus OX=317577; GN = tgt PE=3 SV=1
MFEFDIQATAGRARVASFTTPRGQVTTPMFMPVGTQGTVKGISPDELHAVGSQMILGNTYHLMLRPGEAMVAAHGGLPGFTAYPGPFLTDSGGFQVMSLGHMRRITEDGVVFKSHLDGSLINLTPERSIQVQEGLGADIIMAFDECPPYPATTEYVKASLERTVRWLERCLNVKSREDQALFPIIQGGTDETLRALSLELTLPVNPHGFAIGGLAVGEPKTEMFPAVAFSTAGLPENKPRYLMGVGHPEDLVAGIALGVDMFDCVYPTRTGRFGYALTDQGRINMNSSAPRTQLQPIDESCDCYACRHYTRAYLAHLVRAEEMLGPRMLSLHNLRYLHRLTERARDAISNGTFHSWARVWADGYFKNGVPEWFSQALQTGETAV

SEQ ID NO: 54469 - protein, 388 aa, Deinococcus geothermalis
  REGION 1..388: note = tr|Q1J1K1|Q1J1K1_DEIGD Queuine tRNA-ribosyltransferase OS=Deinococcus geothermalis (strain DSM 11300) OX=319795 GN=tgt PE=3 SV=1
MFEFDIQYRDGQARVATFQTPHGQVRTPMFMPVGTQGTVKGLSPQELIEIGSQMILGNTYHLMLRPGEQLVAAHGGLPGFTAYPGPFLTDSGGFQVMSLGHMRKITEEGVTFKSHLDGSLVSLTPERSIAVQEALGADVIMAFDECPPYPAERDYIRRSLERTARWLERCYAVKTREDQALFAIVQGGIDPDLRQLSLDLTLPFQTPGFAIGGLAVGESKEEMYPAVAFTAKRLPEGKPRYLMGVGHPEDLVAGIALGIDMFDCVYPTRTGRFGYALTDDGRLNMNGSAPRTQLQPLDPECDCYACRHYSRAYLAHLIRAEEMLAPRMLSLHNLRYLHRLVERARTAIMQGAFQAWAQAWAQRYFRGAVPGWFRQVLATGAQVEIQTH

SEQ ID NO: 54470 - protein, 385 aa, Deinococcus gobiensis
  REGION 1..385: note = tr|H8GST1|H8GST1_DEIGI Queuine tRNA-ribosyltransferase OS=Deinococcus gobiensis (strain DSM 21396 / JCM 16679 / CGMCC 1.7299 / I-0) OX=745776; GN = tgt PE=3 SV=1
MFEFTVQARSGRARTAQFATPRGTVQTPMFMPVGTQGTVKGISPQELTEIGSQMILGNTYHLMLRPGEALVEAHGGLPGFTAYPGPFLTDSGGFQVMSLGHMRKITEEGVVFKSHLDGSLVNLTPERSVQVQEALGADVIMAFDECPPFPAEREYIRASLERTIRWLERCLTIKRKSEQALFAIVQGGIHEDLRQRSLDLTLPFGTPGFAIGGLAVGESKEEMFPAVAFTAERLPENKPRYLMGVGHPEDLVAGIALGVDMFDCVYPTRTGRFGYALTDVGRLNMNSSAPRRQLEPIDPECDCYACRHYTRAYLAHLLRAEEMLAPRMLSLHNLRYLHRLVERAREAISRGQFTEWATEWGDTYFKGQTPEWFRKALHPETARPD

SEQ ID NO: 54471 - protein, 390 aa, Deinococcus grandis
  REGION 1..390: note = tr|A0A100HIX7|A0A100HIX7_9DEIO Queuine tRNA-ribosyltransferase OS=Deinococcus grandis OX=57498; GN = tgt PE=3 SV=1
MFEFDIQHRDGRARVAQFHTPRGTVTTPMFMPVGTQGTVKGISPQELTDIGSQMILGNTYHLMLRPGETLVAAHGGLPGFTAYPGPFLTDSGGFQVMSLGHMRKITEEGVVFKSHLDGSLVNLTPERSIQVQEALGADIIMAFDECPPYPAEREYILRSLERTERWLARCLTVKSRPEQALFAIVQGGVHEDLRERSLALTLPYDTPGFALGGLAVGEPKEEMYPAVAFTAGRLPEHKPRYLMGVGHPEDLVAGVALGVDMFDCVYPTRTGRFGYALTDEGRLNMNSSAPRTSMEPLDSGCDCYACRNYTRAYLAHLIRAEEMLGPRMLSLHNLRYLHRLMERARAAIEAGEFHAWASAWAARYFRQGVPQWFQIALETGRNPESQKSQS

SEQ ID NO: 54472 - protein, 383 aa, Deinococcus hopiensis
  REGION 1..383: note = tr|A0A1W1V9V4|A0A1W1V9V4_9DEIO Queuine tRNA-ribosyltransferase OS=Deinococcus hopiensis KR-140; OX = 695939 GN=tgt PE=3 SV=1
MFEFDILQQEGRARRATFRTPHGTVTTPMFMPVGTQGTVKGISPQELLDIGSQIVLANTYHLMLRPGEQLVAAHGGLPGFTAYPGPFLTDSGGFQVMSLGHMRKITEQGVTFKSHLDGSRVELTPERSVEVQEALGADVIMAFDECPPYPAEPLYLQRSLERTVRWLERCLEAKTREDQALFAIVQGGTSGELREQSLALTLPFATPGFAIGGLAVGEPKEEMFPAVALTTGRLPAHKPRYLMGVGHPEDLIAGVALGVDMFDCVYPTRTGRFGYALTDDGRLNLNSSAPRRQLEPIDSGCDCYACRSYTRAYLAHLIRAEEMLAPRMLSLHNLRYLHRLMARAGDALQQGTFFNWATAWGERYFRQEVPAWFQKALETGAGI

SEQ ID NO: 54473 - protein, 401 aa, Deinococcus indicus
  REGION 1..401: note = tr|A0A246BFW6|A0A246BFW6_9DEIO Queuine tRNA-ribosyltransferase OS=Deinococcus indicus OX=223556; GN = tgt PE=3 SV=1
MGAMFEFDIQHRDGRARVARFHTPRGAVTTPMFMPVGTQGTVKGISPQELLDIGSQMILGNTYHLMLRPGEALVEAHGGLPGFTAYPRPFLTDSGGFQVMSLGHMRKITEQGVTFKSHLDGSLVDLTPERSIQVQQALGADVIMAFDECPPYPAERDYIQRSLERTERWLARSLNAKTNDHQALFAIVQGGIHPDLRQQSLDLTLPYQTPGFAIGGLAVGEPKDAMYPAVAFTAERLPEHKPRYLMGVGHPEDLVAGIALGVDMFDCVYPTRTGRFGYALTDDGRLNMNSSAPRRQLEPMDPDCDCYACRHYTRAYLAHLVKAEEMLAPRMLSLHNLRYLHRLVERARAAISRGEFHMWADGWAQRYFKGQIPDWFRQALETGRGTTSLRPDPAPAPTDSL

SEQ ID NO: 54474 - protein, 386 aa, unidentified
  source 1..386: note = Deinococcus irradiatisoli
  REGION 1..386: note = tr|A0A2Z3JMK9|A0A2Z3JMK9_9DEIO Queuine tRNA-ribosyltransferase OS=Deinococcus irradiatisoli; OX = 2202254 GN=tgt PE=3 SV=1
MFEFEIKSRDGRARTAQFTTPHGTVQTPMFMPVGTQGSVKGISAQELKDIGSQMVLGNTYHLMLRPGHEMVAVHGGLPGFTAYPGPFLTDSGGFQVMSLGHMRKISEEGVVFKSHLDGSPVHLTPERSVEVQQGLGADVMMAFDECPPFPAEVPYIKSSLERTVRWLERCLKAKTREDQALFAIVQGGIHRELRQQSLDATVPFATPGFAIGGLAVGESKDEMFPAVGFTARGLPENKPRYLMGVGHPEDLVAGIALGVDMFDCVYPTRTGRFGYALTDDGRLNMNSAAPRSELKPIDPDCDCYACTHHTRAYLAHLIKAEEMLAPRLLSLHNLRYLHRLVERARAAIEAGEFQTWATEWGERYFRNRPAGAPLPEWFARAVRGED

SEQ ID NO: 54475 - protein, 390 aa, unidentified
  source 1..390: note = Deinococcus koreensis
  REGION 1..390: note = tr|A0A2K3UZ47|A0A2K3UZ47_9DEIO Queuine tRNA-ribosyltransferase OS=Deinococcus koreensis; OX = 2054903 GN=tgt PE=3 SV=1
MRQNAPVFDFKIQSRDGRARVGHFETPRGVVTTPMFMPVGTQGTVKGVSAQELLDIRSQMILANTYHLMLRPGESLVAAHGGLPGFTAYPGPFLTDSGGFQVMSLGHMRKITEEGVTFKSHLDGGLVELSPERSVAVQEALGADVIMAFDECPPFPAERDYILRSLERTVRWLDRCLTVKSRPEQALFAIVQGGIHLDLRERSLELTLPFDTPGFAIGGLAVGESKAEMYPAVAFTAARLPEARPRYLMGVGHPEDLIAGIAVGVDMFDCVYPTRTGRFGYALTDDGRLNLNSSAPRSELRPIDENCDCYACRHYTRAYLAHLVKAEEMLGPRMLSLHNLRYLHRLVERAREAIASQSLAGWAQTWGERYFKGAIPEWFQKALEAGSASS

SEQ ID NO: 54476 - protein, 379 aa, Deinococcus maricopensis
  REGION 1..379: note = tr|E8U574|E8U574_DEIML Queuine tRNA-ribosyltransferase OS=Deinococcus maricopensis (strain DSM 21211 / LMG 22137 / NRRL B-23946 / LB-34); OX = 709986 GN=tgt PE=3 SV=1
MFDFEIQARSGRARTATFSTPHGTVQTPMFMPVGTQGTVKGITPAELLDVGSQMILGNTYHLMLRPGPDMVAAHGGLPGFTAYPGPFLTDSGGFQVMSLGHMRKITEQGVTFKSHVDGSAVQLTPERSIAVQEALGADIIMAFDECPPFPATREYVKASQERTIRWLERCLNAKTRDDQALFAIVQGSVYEDLREQSVQETLPFNTPGFAIGGLAVGESKEEMYPMVAFTAARLPEGKPRYLMGVGHPEDLVAAIALGVDMFDCVYPTRTGRFGYALTDDGRLNLNSSGPRQQLIPIDPECDCYACRNYTRAYLAHLTRAEEMLSPRMLSLHNIRYLHRLVERARAAIASDTYQSWATTWAERYFKGRIPTWFQQAIAG

SEQ ID NO: 54477 - protein, 397 aa, Deinococcus marmoris
  REGION 1..397: note = tr|A0A1U7P1G0|A0A1U7P1G0_9DEIO Queuine tRNA-ribosyltransferase OS=Deinococcus marmoris OX=249408; GN = tgt PE=3 SV=1
MAMFEFEVQHQDGRARVARFATPHGTVTTPMFMPVGTQGTVKGISPQELLDIGSQMILGNTYHLMLRPGEELVAAHGGLPGFTAYPGPFLTDSGGFQVMSLGHLRKIAEEGVVFKSHLDGSLVELTPERSIEVQQALGADVIMAFDECPPFPAERDYITRSLERTVRWLERCLTFKSRDDQALFAIVQGGIHSDLRQLSLDLTLPFNTPGFAIGGLAVGESKAEMYPAVDFTTARLPAEKPRYLMGVGHPEDLVAGIALGVDMFDCVYPTRTGRFGYALTDEGRLNMNSSAPRRDLRPIDEDCDCYACRHYTRAYLAHLVRAEELLAPRMLSLHNLRYLHRLVERIRAAIVAGEFDVWARAWGARYFGGELPQWFSAALEASAVQPGPAAAGTSPHL

SEQ ID NO: 54478 - protein, 397 aa, unidentified
  source 1..397: note = Deinococcus metallilatus
  REGION 1..397: note = tr|A0A4Q0W8Z3|A0A4Q0W8Z3_9DEIO Queuine tRNA-ribosyltransferase OS=Deinococcus metallilatus; OX = 1211322 GN=tgt PE=3 SV=1
MFEFEIQHRDGRARTATFQTPRGKVQTPVFMPVGTQGTVKGISPQELLDIGSQMVLGNTYHLMLRPGEKLVQAHGGLPGFTAYPGPFLTDSGGFQVMSLGHMRKITEEGVTFKSHIDGSTVILTPERSTEVQEALGADVIMAFDECPPYPAEREYIRGSLERTIRWLERCHAVKTREDQALFAIVQGGVHPDLRQLSLDLTLSYETPGFAIGGLAVGESKEEMYPAVAFTAARLPEGKPRYLMGVGHPEDLVAGIALGVDLFDCVYPTRTGRFGYALTDDGRLNMNSSAPRTQLQPIDGDCDCYACRHYTRAYLAHLIRAEEMLAPRMLSLHNLRYLHRLVERARAAIAAGTFQPWAQAWAERYFRHAVPAWFQAALSAGAKAEAVEQSMVEAPAVS

SEQ ID NO: 54479 - protein, 381 aa, Deinococcus peraridilitoris
  REGION 1..381: note = tr|K9ZZR3|K9ZZR3_DEIPD Queuine tRNA-ribosyltransferase OS=Deinococcus peraridilitoris (strain DSM 19664 / LMG 22246 / CIP 109416 / KR-200); OX = 937777 GN=tgt PE=3 SV=1
MFEFTVSARSGRARTGTFRTPHGDVRTPMFMPVGTQGSVKGISPHELLDIGSQIILANTYHLMLRPGPDLVAVHGGLPGFTAYPGPFLTDSGGFQVMSLGHMRKITEEGATFKSHLDGSLILLTPERSIGVQESLGADIIMAFDECPPYPASHEYVRNSLERTLRWLERSLTAKTRSDQALFPIVQGGIYHDLRAVSLQATVAFDTPGFAIGGLAVGESKEEMYPAISQTAQGLPESKPRYLMGVGHPEDLVAAMALGVDLFDCVYPTRTGRFGYALTDDGRLNMNSSAPRQQLMPIDPECDCYACRHYTRAYLAHLLRAEEMLAPRMLSLHNLCYLHRLVERASLAIASGTYREWAEEWAARYFKGNVPAWFTGAIQNVD

SEQ ID NO: 54480 - protein, 393 aa, unidentified
  source 1..393: note = Deinococcus phoenicis
  REGION 1..393: note = tr|A0A016QLS8|A0A016QLS8_9DEIO Queuine tRNA-ribosyltransferase OS=Deinococcus phoenicis; OX = 1476583 GN=tgt PE=3 SV=1
MFEFDIQYRDGRARVATFQTPRGQVQTPMFMPVGTQGTVKGISPQELLEIGSQMILGNTYHLMLRPGEKLVEAHGGLPGFTAYPGPFLTDSGGFQVMSLGHMRKITEEGVTFKSHLDGSAVNLTPERSIGVQEALGADVIMAFDECPPYPADREYIRRSLERTIRWLERCQAVKTRDDQALFAIVQGGVHQDLRQQSLDLTLPFGTPGFAIGGLAVGESKEEMYPAVAFTAARLPENKPRYLMGVGHPEDLVAGIALGVDMFDCVYPTRTGRFGYALTDDGRLNMNSSAPRTQLQPLDDECDCYACRHYTRAYLAHLIRAEEMLAPRMLSLHNLRYLHRLVERARGAIAQGTFQTWAEDWARRYFRQAIPEWFRMALTAGARAETVLTNSVSG

SEQ ID NO: 54481 - protein, 391 aa, Deinococcus proteolyticus
  REGION 1..391: note = tr|F0RNN0|F0RNN0_DEIPM Queuine tRNA-ribosyltransferase OS=Deinococcus proteolyticus (strain ATCC 35074 / DSM 20540 / JCM 6276 / NBRC 101906 / NCIMB 13154 / VKM Ac-19 39 / CCM 2703 / MRP) OX=693977; GN = tgt PE=3 SV=1
MTAATPFEFEVTHRNGRARLGTLQTPHGKVQTPLFMPVGTQGTVKGLSPQEVKDAGSQIILANTYHLMLRPGEQLVADHGGLQGFSGYQGPFLTDSGGFQVMSLGHLRKIREEGVTFKSHLDGRQIELTPERSVQVQEALGADIIMAFDECPPYPAEREYIQRSLQRTARWLERCLSAKTRPDQALFAIVQGGIHADLRDESLALTLPFDTPGFAIGGLAVGEPKEEMYPAVAYTAARLPEGKPRYLMGVGHPEDLVAGIALGVDMFDCVYPTRTGRFGYALTDNGRINLNASAARTQMAPIDAECDCYACCNFTQAYIAHLLRAEEMLGPRLLSLHNIRYLHRLVERMREAIAAGQLDTWATTWGATYFRGTLPAWFARALDEAKQPLPG

SEQ ID NO: 54482 - protein, 390 aa, unidentified
  source 1..390: note = Deinococcus puniceus
  REGION 1..390: note = tr|A0A172TCC4|A0A172TCC4_9DEIO Queuine tRNA-ribosyltransferase OS=Deinococcus puniceus OX=1182568; GN = tgt PE=3 SV=1
MFEFDIQHRDGRARVAQFHTPRGTLTTPMFMPVGTQGTVKGISPQELIEIKSQMILGNTYHLMLRPGEELVRAHGGLPGFTAYPGPFLTDSGGFQVMSLGHMRKITEEGVTFKSHLDGSMVKLTPERSIEVQQALGADVIMAFDECPPFPAEREYITRSLERTIRWLDRCLSVQNNDHQALFAIVQGGIHEDLRQHSLDLTLPFNTLGFAIGGLAVGESKAEMYPAVAFTAARLPENKPRYLMGVGHPEDLVAGIALGVDMFDCVYPTRTGRFGYALTDDGRLNMNSSAPRRQLEPIDADCDCYACRHYTRAYLAHLVRAEELLAPRMLSLHNLRYLHRLVERARDAIAVGEFGQWATTWAERYFKGQIPDWFADTLQQEPSAGQPPAMR

SEQ ID NO: 54483 - protein, 394 aa, Deinococcus radiodurans
  REGION 1..394: note = sp|Q9RRB5|TGT_DEIRA Queuine tRNA-ribosyltransferase; OS = Deinococcus radiodurans (strain ATCC 13939 / DSM 20539 / JCM 16871 / LMG 4051 / NBRC 15346 / NCIMB 9279 / R1 /VKM B-1422) OX=243230 GN=tgt PE=3 SV=1
MNQCGTITAVFEFEIKQRDGRARTATFQTPRGAVTTPMFMPVGTQGTVKGISPQELLEIGSQMILANTYHLMLRPGEQLVKAHGGLPGFTAYPGPFLTDSGGFQVMSLGHMRKISEEGVVFKNHLDGSRVELTPERSIQVQEALGADVIMAFDECPPYPAERPYIEASLDRTVRWLERCHAVKTKDDQALFAIVQGGVHEDLRLKSLEATLPFATPGFAVGGLAVGESKEEMYPAVAFTAGRLPENKPRYLMGVGHPEDLVAGVALGIDMFDCVYPTRTGRFGYALTDDGRLNLNSSAPRTQLQPIDAECDCYACRHYTRAYLAHLLRAEEMLAPRMLSLHNLRYLHRLVERMRVAINGQQFHPWAADWSERYFHGNVPGWFTSAFERSTQSEI

SEQ ID NO: 54484 - protein, 394 aa, Deinococcus radiodurans; identical to SEQ ID NO: 54483
  REGION 1..394: note = tr|A0A5C1MMW5|A0A5C1MMW5_DEIRD Queuine tRNA-ribosyltransferase OS=Deinococcus radiodurans OX=1299; GN = tgt PE=3 SV=1

SEQ ID NO: 54485 - protein, 399 aa, Deinococcus radiophilus
  REGION 1..399: note = tr|A0A3S0RD35|A0A3S0RD35_9DEIO Queuine tRNA-ribosyltransferase OS=Deinococcus radiophilus; OX = 32062 GN=tgt PE=3 SV=1
MSSELSFDFEVQQRDGRARLGTLQTPHGEVQTPLFMPVGTQGTVKGLSPAEIEEVGSQIILANTYHLMLRPGEQLVAQHGGLQGFSGYPGPFLTDSGGFQVMSLGHLRKISEEGVIFKSHLDGSMIELTPERSIQVQQALGADIIMAFDECPPYPAERDYIRSSLQRTARWLERCLAVKDKDDQALFAIVQGGVHPDLRDESLALTLPFDTPGYAIGGLAVGEPKEEMFPAVAYTAERLPEHKPRYLMGVGHPEDLVAGIALGVDMFDCVYPTRTGRFGYALTDRGRLNLNSSGARTRLEPIDPDCDCVACRTFTQAYIAHLLRAEEMLGPRLLSIHNLRYLHRLVERMREAIAVGTLYDWAMAWGQTYFGSKADGVVPEWFTEALETGRQTPTGTPHH

SEQ ID NO: 54486 - protein, 417 aa, Deinococcus radiopugnans
  REGION 1..417: note = tr|A0A5C4Y3S4|A0A5C4Y3S4_9DEIO Queuine tRNA-ribosyltransferase OS=Deinococcus radiopugnans ATCC 19172 OX=585398 GN=tgt PE=3 SV=1
MRSKTSWFQSQAGIAGRRMRHNTCMFEFQVQYQDGRARVASFTTPHGSVTTPMFMPVGTQGTVKGISPQELLDIGSQMILGNTYHLMLRPGEALVAAHGGLPGFTAYPGPFLTDSGGFQVMSLGHLRKISEQGVIFKSHLDGSLVELTPERSIEVQQELGADVIMAFDECPPFPAEREYITQSLERTVRWLERCLAFKSREDQALFAIVQGGIHPDLRQQSLDLTLPFQTPGFAIGGLAVGESKAEMYPAVEFTTARLPADKPRYLMGVGHPEDLVAGIALGVDMFDCVYPTRTGRFGYALTDDGRLNLNSSAPRRDLRPIDDDCDCYACRHYTRAYLAHLVRAEELLAPRMLSLHNLRYLHRLVERARAAIATQTFDTWARAWGRQYFGGELPAWFAASLDASGREATGVPQPSPK

SEQ ID NO: 54487 - protein, 354 aa, Deinococcus reticulitermitis
  REGION 1..354: note = tr|A0A1H7BYV6|A0A1H7BYV6_9DEIO Queuine tRNA-ribosyltransferase OS=Deinococcus reticulitermitis; OX = 856736 GN=tgt PE=3 SV=1
MFMPVGTQGTVKGLSPEELMGIGSQIVLANTYHLMLRPGEALVAAHGGLPGFTAYPGPFLTDSGGFQVMSLGHMRKISEEGVIFKSHIDGSRVELTPERSIQVQEALGADVIMAFDECPPYPAEPQYIRASLERTVRWLERCLSVKTRPDQALFAIVQGGVHEDLRRQSLQATLPFATPGFALGGLAVGESKDEMFPAVGFTAQHLPEDKPRYLMGVGHPEDLVAGIALGIDMFDCVYPTRTGRFGYALTDDGRLNMNSSAPRQQLLPIDPDCDCYACRHYTRAYLAHLLRAEEMLAPRMLSLHNLRYLHRLVERARTAIAEGHFFPWAREWGGRYFKGQRPTWFEQALTQGEG

SEQ ID NO: 54488 - protein, 390 aa, unidentified
  source 1..390: note = Deinococcus soli
  REGION 1..390: note = tr|A0A0F7JMQ8|A0A0F7JMQ8_9DEIO Queuine tRNA-ribosyltransferase OS=Deinococcus soli Cha et al. 2016 OX=1309411 GN=tgt PE=3 SV=1
MFEFDIQHRDGRARVAQFRTPRGTVTTPMFMPVGTQGTVKGISPQELTDIGSQMILGNTYHLMLRPGETLVAAHGGLPGFTAYPGPFLTDSGGFQVMSLGHMRKITEEGVVFKSHLDGSLVNLTPERSIQVQEALGADIIMAFDECPPYPAEREYILRSLERTERWLARCLNVKSRSEQALFAIVQGGVHEDLRERSLELTLPYDTPGFALGGLAVGEPKEEMYPAVAFTAGRLPEHKPRYLMGVGHPEDLVAGVALGVDMFDCVYPTRTGRFGYALTDEGRLNMNSSAPRTSMEPLDSGCDCYACRNYTRAYLAHLIRAEEMLGPRMLSLHNLRYLHRLMERARAAIQAGEFHAWASAWAARYFRQGVPQWFQIALETGQNQESQKSQS

SEQ ID NO: 54489 - protein, 393 aa, Deinococcus sp.
  REGION 1..393: note = tr|A0A2T3W5J7|A0A2T3W5J7_9DEIO Queuine tRNA-ribosyltransferase OS=Deinococcus sp. OD32 OX=2136176; GN = tgt PE=3 SV=1
MFEFTIQARDGRARVAQFHTPRGTVTTPMFMPVGTQGTVKGISPQELLEIGSQMILGNTYHLMLRPGEALVAAHGGLPGFTAYPGPFLTDSGGFQVMSLGHLRKITEEGVTFKSHLDGSAVALTPERSIAVQEALGADIIMAFDECPPYPAEREYIQRSLERTERWLARCVQAKTRPEQALFAIVQGGVHHDLRQQSLELTLPHDTPGFALGGLAVGEPKEEMYPAVAYTAERLPDHKPRYLMGVGHPEDLVAGIALGVDMFDCVYPTRTGRFGYALTDDGRLNLNASAPRRQLTPLDDECDCYACRHYTRAYLAHLVKAEEMLGPRMLSLHNLRYLHRLVERARGAIQTGTFIAWAQTWSERYFKGAVPVWFQEALRQSGTGFHQTTRDEKK

SEQ ID NO: 54490 - protein, 395 aa, Deinococcus sp.
  REGION 1..395: note = tr|A0A553UUK8|A0A553UUK8_9DEIO Queuine tRNA-ribosyltransferase OS=Deinococcus sp. H1 OX=2592048; GN = tgt PE=3 SV=1
MSDLSPFEFRIHSRDGRARTAHFATPHGTVQTPMFMPVGTQGSVKGISADELLEIKSQMILGNTYHLMLRPGAEMVAAHGGLPGFTAYPGPFLTDSGGFQVMSLGHMRKITEEGVVFKSHLDGSPIHLTPERSIEVQQLLGADVMMAFDECPPFPAEERYIKASLERTVRWLERCLTFKTRDDQALFAIVQGGIHPHLRQQSLDATLPFSTPGFAIGGLAVGESKEEMFLAVAFTAQRLPENKPRYLMGVGHPEDLVAGIALGVDMFDCVYPTRTGRFGYALTDDGRINMNSAAPRQQLIPIDADCDCYACTHHTRAYLAHLVKAEEMLAPRLLSLHNLRYLHRLVERARAAIEAGEFQAWATEWGERYFKRPSNADGSAQALPEWFARAVRGEG

SEQ ID NO: 54491 - protein, 393 aa, unidentified
  source 1..393: note = Deinococcus swuensis
  REGION 1..393: note = tr|A0A0A7KCM1|A0A0A7KCM1_9DEIO Queuine tRNA-ribosyltransferase OS=Deinococcus swuensis OX=1182571; GN = tgt PE=3 SV=1
MFEFQVQYQDGRARVARFTTPHGTVTTPMFMPVGTQGTVKGISPQELLDIGSQMILGNTYHLMLRPGEALVAAHGGLPGFTAYPGPFLTDSGGFQVMSLGHLRKISEQGVIFKSHLDGSLVELTPERSIEVQQALGADVIMAFDECPPFPAEREYITQSLERTVRWLERCLAFKSREDQALFAIVQGGIHPDLRQQSLDLTLPFQTPGFAIGGLAVGESKAEMYPAVEFTTARLPADKPRYLMGVGHPEDLVAGIALGVDMFDCVYPTRTGRFGYALTDDGRLNLNSSAPRRELRPIDDDCDCYACRHYTRAYLAHLVRAEELLAPRMLSLHNLRYLHRLVERARAAIATQTFDTWARAWGRQYFGGELPAWFAASLDASGREATGVPQPSPK

SEQ ID NO: 54492 - protein, 389 aa, Deinococcus wulumuqiensis
  REGION 1..389: note = tr|A0A345IIJ1|A0A345IIJ1_9DEIO Queuine tRNA-ribosyltransferase OS=Deinococcus wulumuqiensis; OX = 980427 GN=tgt PE=3 SV=1
MKVVFEFEVKQRDGRARTATFATPRGQVTTPMFMPVGTQGTVKGISPQELSDIGSQMVLANTYHLMLRPGEQLVEAHGGLPGFTAYPGPFLTDSGGFQVMSLGHLRKITEEGVVFKNHLDGSRVELTPERSIQVQEALGADVIMAFDECPPYPAERSYIQASLERTVRWLERCHTVKTREDQALFAIVQGGVHEDLRLQSLEATLPFATPGFAVGGLAVGESKEEMYPAVAFTASRLPENKPRYLMGVGHPEDLVAGIALGIDMFDCVYPTRTGRFGYALTDDGRLNLNSSAARTQLVPLDPECDCYACRHYTRAYLAHLLRAEEMLAPRMLSLHNLRYLHRLVERMREAITQQHFQAWAAEWSQRYFRGSVPEWFRQALQQSAHPETP

SEQ ID NO: 54493 - protein, 351 aa, Deinococcus yavapaiensis
  REGION 1..351: note = tr|A0A318RYX6|A0A318RYX6_9DEIO Queuine tRNA-ribosyltransferase OS=Deinococcus yavapaiensis KR-236; OX = 694435 GN=tgt PE=3 SV=1
MPVGTQGTVKGISPEELRDIGSQFILANTYHLLLRPGPEMVARHGGLPGFTGYPGPFLTDSGGFQVMSLGHMRQITEQGAVFKSHIDGNVVELPPERSIEVQEALGADVIMAFDECPPYPATEEYVSASLERTARWLERSLRAKTKSEQALFAIVQGGVFPHLRERSLALTLPFDTPGFAIGGLAVGEAKEDMYPVVSQVTNALPSGKPRYLMGVGHPEDLVASIALGVDMFDCVYPTRTGRFGYALTDDGRLNLNSSKPRGELIPLDADCDCYACRHFTRAYIGHLLKAEEMLGPRMLSLHNLRYLHRLVERARSAIERGGYTEWAFAWGERYFKGRIPSWFAAALDSSC

SEQ ID NO: 54494 - protein, 384 aa, unidentified
  source 1..384: note = Unknown
  REGION 1..384: note = tr|A0A3M2F426|A0A3M2F426_9DEIN Queuine tRNA-ribosyltransferase OS=Deinococcus-Thermus bacterium; OX = 1913990 GN=tgt PE=3 SV=1
MFEFSITARSGRARAGLLTTPHGVVKTPLFMPVGTQGSVKGISPRELKEIGSQIVLANTYHLLLRPGPERVRALGGLHWFAAYDGPWLTDSGGFQVMSLGDLRKIDEQGVTFRSHLNGDLVVLTPERSIEAQEALGADIIMAFDECPPYPSSPDYLKASVGRTLRWLERSLKAKTRPDQALFAIAQGGVDLELRRTSVLATVAFDTPGFAIGGLAVGEPKEDMYPAVELSTRLLPDHKPRYLMGVGHPEDLVAAVALGVDMFDCVYPTRTGRFGYALVPEGRLNLKLSRYLDDPRPIDPACDCYACTHYSRAYLSHLVRAEEILALRMLSLHNLRYLHRLMEAAWEAIQSRDYGAFAREFAGRRFREGIPPWFTLALREGGHWG

SEQ ID NO: 54495 - protein, 390 aa, Delftia acidovorans
  REGION 1..390: note = sp|A9BRD7|TGT_DELAS Queuine tRNA-ribosyltransferase; OS = Delftia acidovorans (strain DSM 14801 / SPH-1); OX = 398578 GN=tgt PE=3 SV=1
MLQFDLLKTDPSSHARRGQLTLNHGVVQTPIFMPVGTYGTVKGVMPRSLQEMGAQIILGNTFHLWMRPGLDIMQSFGGLHGFEKWDKPILTDSGGFQVWSLGAMRKITEEGVHFASPVNGDKLFMSPEVSMQIQTVLNSDIVMQLDECTPYETNGHKTTEAEARKSMEMSRRWAKRSSDEFQRLGNPNALFGIVQGGMYENLREESLQALVEMDFPGYAVGGVSVGEPKDEMLAIMAHTPHRLPAHKPRYLMGVGTPEDLVQGVADGVDMFDCVMPTRNARNGTIFTRYGDLKIRNARHKTDHQPLDPSCTCHACAGTSGVSWEQGGRDGFSRAYLHHLDRCGEMLGPMLTTIHNLHYYLNLMQEVRNALEAGNFTEMRARFKAERARGV

SEQ ID NO: 54496 - protein, 390 aa, Delftia acidovorans
  REGION 1..390: note = tr|A0A2W5IE07|A0A2W5IE07_DELAC Queuine tRNA-ribosyltransferase OS=Delftia acidovorans OX=80866; GN = tgt PE=3 SV=1
MLQFDLLKTDPSSHARRGQLTLNHGVVQTPIFMPVGTYGTVKGVMPRSLQEMGAQIILGNTFHLWMRPGLDIMQSFGGLHGFEKWDKPILTDSGGFQVWSLGAMRKITEEGVHFASPVNGDKLFMSPEVSMQIQTILNSDIVMQLDECTPYETNGHKTTEAEARKSMEMSRRWAKRSSDEFQRLGNPNALFGIVQGGMYENLREESLQALVEMDFPGYAVGGVSVGEPKDEMLAIMAHTPHRLPAHKPRYLMGVGTPEDLVQGVADGVDMFDCVMPTRNARNGTIFTRYGDLKIRNARHKTDHQPLDPSCTCHACAGASGVSWEQGGRDGFSRAYLHHLDRCGEMLGPMLTTIHNLHYYLNLMQEVRNALEAGNFTEMRARFKAERARGV

SEQ ID NO: 54497 - protein, 390 aa, Delftia lacustris; identical to SEQ ID NO: 54496
  REGION 1..390: note = tr|A0A1H3Q1S9|A0A1H3Q1S9_9BURK Queuine tRNA-ribosyltransferase OS=Delftia lacustris OX=558537; GN = tgt PE=3 SV=1

SEQ ID NO: 54498 - protein, 390 aa, Delftia sp.; identical to SEQ ID NO: 54495
  REGION 1..390: note = tr|A0A1C7L770|A0A1C7L770_9BURK Queuine tRNA-ribosyltransferase OS=Delftia sp. JD2 OX=469553; GN = tgt PE=3 SV=1

SEQ ID NO: 54499 - protein, 390 aa, Delftia sp.; identical to SEQ ID NO: 54495
  REGION 1..390: note = tr|A0A081J2Y0|A0A081J2Y0_9BURK Queuine tRNA-ribosyltransferase OS=Delftia sp. 670 OX=1537702; GN = tgt PE=3 SV=1

SEQ ID NO: 54500 - protein, 390 aa, Delftia tsuruhatensis; identical to SEQ ID NO: 54496
  REGION 1..390: note = tr|A0A072T2G5|A0A072T2G5_9BURK Queuine tRNA-ribosyltransferase OS=Delftia tsuruhatensis OX=180282; GN = tgt PE=3 SV=1

SEQ ID NO: 54501 - protein, 384 aa, unidentified
  source 1..384: note = Unknown
  REGION 1..384: note = tr|A0A1V4MP45|A0A1V4MP45_9DELT Queuine tRNA-ribosyltransferase OS=delta proteobacterium MLS_D; OX = 1775673 GN=tgt PE=3 SV=1
MQSTVDGAAPFHFHVVAADHGTKARVGLIQTPHGAVETPVFMPVGTRGTVKGVTPEMVRDAGARIILGNTYHLYLRPGHELIGRLGGLHRFMNWPGPILTDSGGFQIYSLGKLRKLTEEGYAFQSHIDGSSHVMTPEHCINVQETLGSDIMMCLDECTSYPADRSTVKSSLDLTLRWAKLCASVHRSPGRALFGISQGGVYSDLRKQGIEALGEIGFDGYALGGLSVGEPKKLLYDTVSYAAPLLPPDKPRYLMGVGTPEDILECVAQGIDMFDCVIPTRNARNGMLFTKRGKLVIKNARYRDDGNPLDDQCGCYTCRNYSRAYLRHLFIAREILAIVLNTVHNITFYMNLMHGIREAVRGGYFDSFRKTFLETYRANDEEDAE

SEQ ID NO: 54502 - protein, 373 aa, unidentified
  source 1..373: note = Unknown
  REGION 1..373: note = tr|Q1NY98|Q1NY98_9DELT Queuine tRNA-ribosyltransferase OS=delta proteobacterium MLMS-1; OX = 262489 GN=tgt PE=3 SV=1
MPDPSSSSPFTLLATSSQCAARRGELRTLHGTIQTPVFMPVGTQATVKGVTPEDLRGLGAQIILGNTYHLFLRPGHELIRKLGGLHNFMHWDGPILTDSGGFQIFSLKELAKISEEGAAFKSHIDGSSLFLSPESAVAVQEALGADIIMNLDTCIPYPADYAEAEAATALTSRWAARCRAAKEDDGRLLFGIIQGGMYHDLRHRSLAELQEIGFDGYAIGGLSVGEPQELMYEICQATAAGMPVDQARYLMGVGTPRNLVEAVYRGIDMFDCVMPTRNARNGMLFTSTGRLVIKNARYREDSRPPDEACDCYTCRHYSRAYLRHLYQARELLASHLLTVHNLRYYTALMERMRRALEADRFLEFYREFINLHP

SEQ ID NO: 54503 - protein, 389 aa, unidentified
  source 1..389: note = Deltaproteobacteria bacterium
  REGION 1..389: note = tr|A0A3B8YWI7|A0A3B8YWI7_9DELT Queuine tRNA-ribosyltransferase OS=Deltaproteobacteria bacterium; OX = 2026735 GN=tgt PE=3 SV=1
MNETIATAGEGSHSPSFQLRARDPYSRARRGTLMTAHGPVQTPAFMPVGTYGAVKGVAPWELRDLGAELILSNAYHLAMRPGADAIGAMGGLHQFMGWKRAILTDSGGFQVFSLKGMRKVTDEGVLFQSHIDGSRRFFSPEDVVSNQEKLGVDIAMILDECPPAGAPPEDVARALRRTTDWARRSREAHSRADQMQFGIVQGGLDPAMRAQSADELQGIGFDGYAVGGLSVGEGRAETLAVGSYTVNLLPEEKPRYLMGVGTPEELVRFVAAGFDMFDCVMPSRNARNGMAFTSEGRVVIKNAIHRDSLVPLDPMCGCTTCANFSRAYLRHLFLNGEMLSARLLTNHNLYFYVNSMKRLRSAIENGTFRAEAASMGVDLDQIEDEEKRQ

SEQ ID NO: 54504 - protein, 321 aa, unidentified
  source 1..321: note = Deltaproteobacteria bacterium
  REGION 1..321: note = tr|A0A2N2HUB8|A0A2N2HUB8_9DELT Queuine tRNA-ribosyltransferase (Fragment) OS=Deltaproteobacteria bacterium HGW-Deltaproteobacteria-20 OX=2013748; GN = CVU63_17010 PE=3SV=1
MTALPTKGYSFHLEACDGAARAGVLETPHGRVLTPTFMPVGTQGSVKSLAPGEVAATGARIVLGNTYHLWIRPGPEVVAELGGLHRFSRWPHAMLTDSGGFQAFSLTNLVKLSEDGFSFRSHLDGARMHLSPEEAMRVQGLLGADIAMQLDVCPPGNADPALVRAAMDRTSRWAERCLRARREDQAVFGIVQGGTDVALRREHMKAIASLPFDGLALGGFSVGEPIEKMHAALAEVGPELDPSRPHYLMGVGTPLDLVHGVAAGVDMFDCVMPTRNARNGQALLRHGRIVIKNAKYRRDPRPLDEACGCPCCAGGYSRAYL

SEQ ID NO: 54505 - protein, 370 aa, Dendrosporobacter quercicolus
  REGION 1..370: note = tr|A0A1G9KP52|A0A1G9KP52_9FIRM Queuine tRNA-ribosyltransferase OS=Dendrosporobacter quercicolus; OX = 146817 GN=tgt PE=3 SV=1
MAVTYELIKRCPQTGARAGRLHTPHGVFDTPMFMPVGTQATVKAMSPDELKAMGAGIILSNTYHLYLRPGADLVAEAGGLHRFMNWDRGILTDSGGFQVFSLGPLRKITEDGVNFRSHIDGSKHFLSPEKATEIQMALGADIIMAFDECVPYPAEHDYARLSTERTTRWAERCKQAHTRKDQALFGIVQGGMYKDLRSQSVRDLIALDFPGYAVGGLSVGEPKPLMYELLEHTAPQLPENKPRYLMGVGTPDCLVEGVMHGIDMFDCVFPTRVARNGTAMTSRGRLVVKNAEFARDFTPVDTECGCYTCRNFSRAYVRHLLKTEEIFGLRLTTIHNLHFLLDFMKKMRQAIIENRFVAFREEFLANYRLS

SEQ ID NO: 54506 - protein, 370 aa, Denitratisoma sp.
  REGION 1..370: note = tr|A0A518UD77|A0A518UD77_9PROT Queuine tRNA-ribosyltransferase OS=Denitratisoma sp. DHT3; OX = 1981880 GN=tgt PE=3 SV=1
MRFDLLAHAGAARRGRLTLAHGVVETPVFMPVGTYGTVKAMAPNELEEIGARIVLGNTFHLWLRPGLDIIRAHGGLHRFMGWERPILTDSGGFQVFSLGDLRKITEEGVKFQSPINGDRLFMRPEDSMQIQHVLNSDVVMIFDECTPYPATERQAGDSMRLSLRWARRSRDEHDRLGNANALFGIVQGGMYEPLRDESLAGLTEIGFDGYAIGGLSVGEPKEDFARILAHTAPRLPRHKPRYLMGVGTPEDIVYAVSQGIDMFDCVMPTRNARNGWLFTRWGDVKIKNASHKSDARPLDETCGCYTCRHFTRAYLHHLHRIGEILGARLNTIHNLFYYQTLMAELRLAIESGDLAGTIAEFHRNRARGPL

SEQ ID NO: 54507 - protein, 382 aa, Denitrobacterium detoxificans
  REGION 1..382: note = tr|A0A172RW89|A0A172RW89_9ACTN Queuine tRNA-ribosyltransferase OS=Denitrobacterium detoxificans; OX = 79604 GN=tgt PE=3 SV=1
MALFDVTIEARSGNARALTFETAHGTVRTPMFMPVGTHATVKGITVDVLHELKSQVVLANTYHLYMRPGVEIIEEAGGVQKFMNYDGPMLTDSGGFQLFSLNHMMKTDNDGVNFKALDYDGSKHRWTPDINMDIQQRIGADIAMQLDQCIGYPAEKHDVAASTKLSWEWAERCLMAHTRPDQGLFGIEQGGMHMDLRLESAKRLMEAEERAKAAGMRGFAGFGIGGYSVGEDHEVMFETLGEATRALPEDRPRYLMGVGNPTTLVRAVREGVDMFDCVLPTRTGRMGTAFSSQGRMNLRNAKYAHDFTALDHECDCPVCRNYSRAYLRHLVKQNEMLGGMLLSEHNLYFLIHLMEKAREAVLADAYEEFYEAWMASAGANDY

SEQ ID NO: 54508 - protein, 371 aa, unidentified
  source 1..371: note = Denitromonas halophilus
  REGION 1..371: note = tr|A0A557S4P1|A0A557S4P1_9RHOO Queuine tRNA-ribosyltransferase OS=Denitromonas halophilus; OX = 1629404 GN=tgt PE=3 SV=1
MNFELLATDGAARRGRLTLNHGVVETPVFMPVGTYGTVKAMTPQALNDIGAQICLGNTFHLWLRPGTEVLDTFGGLHGFMGWNKPILTDSGGFQVFSLGALRKITEEGVKFASPIDGSKLFLTPEESMRIQRSLNSDIVMIFDECTPYPATLDEAAKSMQLSMRWAKRSRDAFDAQENPNALFGIVQGGMHETLRDDSLAGLMDIGFHGFAIGGLSVGEPKEDMQRILAHTAPRLPQDKPRYLMGVGTPEDLVESVAAGIDMFDCVMPTRNARNGWLFTRFGDLKIKNAKHRNDTRPLDPSCSCYTCQNFSRAYLHHLHRTGEILGAMLNTTHNLHYYQALMAQMRKALEAGSFAEFVRRFQDERGRGAEV

SEQ ID NO: 54509 - protein, 371 aa, unidentified
  source 1..371: note = Denitromonas halophilus
  REGION 1..371: note = tr|A0A557QYA1|A0A557QYA1_9RHOO Queuine tRNA-ribosyltransferase OS=Denitromonas halophilus; OX = 1629404 GN=tgt PE=3 SV=1
MNFELLATDGAARRGRMTLNHGVVETPVFMPVGTYGTVKAMTPQALNDIGAQICLGNTFHLWLRPGTEVLDTFGGLHGFMGWDKPILTDSGGFQVFSLGALRKITEEGVKFASPIDGSKLFLTPEESMRIQRSLNSDIVMIFDECTPYPATLDEAAKSMQLSLRWAKRSRDAFDTQENPNALFGIVQGGMHETLRDDSLAGLMDIGFHGFAIGGLSVGEPKEDMQRILAHTAPRLPQDKPRYLMGVGTPEDLVESVAAGIDMFDCVMPTRNARNGWLFTRFGDLKIKNAKHRNDTRPLDPTCSCYTCQNFSRAYLHHLHRTGEILGAMLNTTHNLHYYQALMAQMRKALEAGSFAEFVRRFQDERGRGAEV

SEQ ID NO: 54510 - protein, 372 aa, Denitrovibrio acetiphilus
  REGION 1..372: note = tr|D4H485|D4H485_DENA2 Queuine tRNA-ribosyltransferase OS=Denitrovibrio acetiphilus (strain DSM 12809 / N2460) OX=522772 GN=tgt PE=3 SV=1
MDKFNFTLEETDGRARTGLIETPHGNIETPIFMPVGTVGSVKTISPAELTDDIGAQIILGNTYHLHLRPGDEVVAKHGGLAKFNSWNKPTLTDSGGFQVFSLAEMNKITDEGVHFRSHLDGSRLFISPEESIRIQQNIGADIMMAFDECVSLPSERQYVVEAMERTYRWAQRSFDARTRDDQALFGIIQGGVEKDLRKISAEQITSIPFDGFAIGGLSVGEEIPVMYDICSHTTEFMPKDKPRYLMGVGTPQDLLHGISYGVDMFDCVMPTRNARNGLLFTSRGKLHIKRKEWELSDAPVDANCNCYTCRNFSRGYLRHLWKAGEYLGMRLNSLHNLHFYLSLVKRARNAIKLGVYNNFMKETLEEMSVGGE

SEQ ID NO: 54511 - protein, 370 aa, Denitrovibrio sp.
  REGION 1..370: note = tr|A0A2N6DI56|A0A2N6DI56_9BACT Queuine tRNA-ribosyltransferase OS=Denitrovibrio sp. OX=2053308; GN = tgt PE=3 SV=1
MDFKFTLEKTDGQARAGLMETPHGKIETPIFMPVGTVGSVKTISPAELNDLGAQIILGNTYHLHLRPGDDVVAKHGGLAKFNSWNRPTLTDSGGFQVFSLAKMNKITDEGVHFRSHLDGSKLFLNPESSIQIQQNIGADIMMAFDECVSLPAEHKYVADSVERTFRWAKRSYDARTNEKQALFGIIQGGADHELRKLSAQQITSIPFDGYAIGGLSVGEEIPVMYDICSHTTQFMPNDKPRYLMGVGTPQDLLHCISYGVDMFDCVMPTRNARNGLLFTSKGKLHIKRKEWQLSDEPIDAKCDCYTCKNFSRGYLRHLFKAGELLGMRLQSLHNLYFYLSLVKSARNAINLGVYNKYMNETLEEMSTGGE

SEQ ID NO: 54512 - protein, 373 aa, Denitrovibrio sp.
  REGION 1..373: note = tr|A0A2N6D780|A0A2N6D780_9BACT Queuine tRNA-ribosyltransferase OS=Denitrovibrio sp. OX=2053308; GN = tgt PE=3 SV=1
MSSKFKYTLEKTDGRARAGVIETPHGKIETPIFMPVGTAGSVKTISPKELDEDIGAQIILGNTYHLHIRPGDDVVAKHGGLAKFNAWNRPTLTDSGGYQVFSLAEMNKITEDGVHFRSHLDGRKLFLSPETSMEIQQNIGADIMMAFDECVSLPAERKYVEESVERTFRWAQRSYDAKTNDEQALFGIIQGGADKELRERSAGQITSIPFDGYAIGGLSVGEEIPVMYDITSHTTQFMPEDKPRYLMGVGTPQDLLNCISYGVDMFDCVMPTRNARNGLLFTSKGKLHIKRKEWQLSDDPVDSKCDCYTCKNFSRGYLRHLFKAGEYLGMRLNSLHNLHFYLSLVKNARNAINLGVYNTYMKETLEEMSSGGE

SEQ ID NO: 54513 - protein, 419 aa, Dermabacter hominis
  REGION 1..419: note = tr|A0A2I1LK70|A0A2I1LK70_9MICO Queuine tRNA-ribosyltransferase OS=Dermabacter hominis OX=36740; GN = tgt PE=3 SV=1
MSTSEKEGAGFDIAARHGEKARAGVIHTPHGDIHTPAFIPVGTKATVKSVLPESMAQLGAQAILANAYHLYLQPGHDLIDEAGGFGVFMNWDGPTYTDSGGFQVMSLGAGFQKVLSESFAGSDRASTPDGTDLATKKGKERLAHVDDDGVNFRSFIDGSEHRFTPEFSMQIQHSLGADIMFAFDELTTLMNSRGYQEKALERTRLWAERCIAEHKRLTEEREGKPYQMLWGVIQGAQYEDLRRKAARDLGAMTVDEWQFDGFGIGGALEKENLSTIVGWVTDELPEDKPRHLLGLSEMDDLFAGIAAGADTFDCVSPSRVARNSAVYTARGRVNLTGAKYRTQFAPIDDDCDCYTCTHYTAAYIHHLFKAKEMLSSTLCTIHNERFVVRLVQEIRAAILSGDFEALREERTGAYYGEYR

SEQ ID NO: 54514 - protein, 419 aa, Dermabacter hominis; identical to SEQ ID NO: 54513
  REGION 1..419: note = tr|A0A069T352|A0A069T352_9MICO Queuine tRNA-ribosyltransferase OS=Dermabacter hominis 1368; OX = 1450519 GN=tgt PE=3 SV=1

SEQ ID NO: 54515 - protein, 450 aa, Dermabacter sp.
  REGION 1..450: note = tr|S3Y7H6|S3Y7H6_9MICO Queuine tRNA-ribosyltransferase OS=Dermabacter sp. HFH0086; OX = 1203568 GN=tgt PE=3 SV=1
MWNGTALYRVRAAVPPLAVSTAGAGSWENSGMSTSEKEGAGFDIAARHGEKARAGVIHTPHGDIHTPAFIPVGTKATVKSVLPESMAQLGAQAILANAYHLYLQPGHDLIDEAGGFGAFMNWDGPTYTDSGGFQVMSLGAGFQKVLSESFAGSDRASTPDGTDHATKIGKERLAHVDDDGVNFRSFIDGSEHRFTPEFSMQIQHSLGADIMFAFDELTTLMNSRGYQEKALERTRLWAERCIAEHKRLTEEREGKPYQMLWGVIQGAQYEDLRRKAARDLGAMTVDEWQFDGFGIGGALEKENLSTIVGWVTDELPEEKPRHLLGLSEMDDLFAGIAAGADTFDCVSPSRVARNSAVYTARGRVNLTGAKYRTQFAPIDDNCDCYTCTHYTAAYIHHLFKAKEMLSSTLCTIHNERFVVRLVEEIRAAILSGDFEALREERTGAYYGEYR

SEQ ID NO: 54516 - protein, 419 aa, Dermabacter sp.
  REGION 1..419: note = tr|A0A3S0U7Y1|A0A3S0U7Y1_9MICO Queuine tRNA-ribosyltransferase OS=Dermabacter sp. HSID17554; OX = 2419511 GN=tgt PE=3 SV=1
MSTSEKEGAGFDIAAHHGDKARAGVIHTPHGDIQTPAFIPVGTKATVKSVLPESMKELGAQAILANAYHLYLQPGHELVDEAGGFGAFMNWSGPTYTDSGGFQVMSLGAGFQKVLSESFAGSDRASTPDGTDLATKKGKERLAHVDDDGVNFRSFIDGSEHRFTPEFSMQIQHSLGADVMFAFDELTTLMNSRGYQEKALERTRLWAERCIAEHQRLTKAREGKPYQMLWGVIQGAQYEDLRRKASRDLGAMTVEGWQFDGFGIGGALEKENLSTIVGWVTDELPDEKPRHLLGLSEMDDLFAGIAAGADTFDCVSPSRVARNSAVYTARGRVNLTGAKYRTQFAPIDESCDCYTCTHYTAAYIHHLFKAKEMLSSTLCTIHNERFVVRLVEEIRAAILSGDFEALREERTGAYYGEYR

SEQ ID NO: 54517 - protein, 419 aa, unidentified
  source 1..419: note = Dermabacter vaginalis
  REGION 1..419: note = tr|A0A1B0ZKB6|A0A1B0ZKB6_9MICO Queuine tRNA-ribosyltransferase OS=Dermabacter vaginalis; OX = 1630135 GN=tgt PE=3 SV=1
MSTSEKEGAGFDIAARHGEKARAGVIHTPHGDIQTPAFIPVGTKATVKSVLPESMKELGAQAILANAYHLYLQPGHELVDEAGGFGAFMNWSGPTYTDSGGFQVMSLGAGFQKVLSESFAGSDRASTPDGTDLATKKGKERLAHVDDDGVNFRSFIDGSEHRFTPEFSMQIQHSLGADVMFAFDELTTLMNSRGYQEKALERTRLWAERCIAEHQRLTKAREGKPYQMLWGVIQGAQYEDLRRKASRDLGAMTVEGWQFDGFGIGGALEKENLSTIVGWVTDELPDEKPRHLLGLSEMDDLFAGIAAGADTFDCVSPSRVARNSAVYTARGRVNLTGAKYRTQFAPIDESCDCYTCTHYTAAYIHHLFKAKEMLSSTLCTIHNERFVVRLVEEIRAAILSGDFEALREERTGAYYGEYR

SEQ ID NO: 54518 - protein, 381 aa, Desemzia incerta
  REGION 1..381: note = tr|A0A1I5W0Z4|A0A1I5W0Z4_9LACT Queuine tRNA-ribosyltransferase OS=Desemzia incerta OX=82801; GN = tgt PE=3 SV=1
MSEPAIKYRLIKKDKRTGARLGEIITPHGTFPTPMFMPVGTLATVKSIAPEELEEMGASIILSNTYHLWLRPGEDIVEEAGGLHKFMNWDKGILTDSGGFQVFSLSDMRRIEEEGVHFRNHLNGSKMFLSPEKAINIQNKLGPDIMMSFDECPPFDESYDYVKKSVARTSRWAERGLKAHANPDRQGLFGIIQGAGFKDLREQSARDLVAMDFPGYSIGGLSVGEPKAEMNRVLEFTTPLIPENKPRYLMGVGTPDSFFDGVINGVDMFDCVLPTRIARNGTCMTHKGRLVVKNAKYERDFGPIDDQCNCYTCRNYSRAYIRHLFKSDETFGLRLTSYHNLYFLLEVMRNIRQAILDDNLLEYREAFMEEYGYNKPDAKNF

SEQ ID NO: 54519 - protein, 366 aa, unidentified
  source 1..366: note = Desertifilum sp.
  REGION 1..366: note = tr|A0A1E5QQQ7|A0A1E5QQQ7_9CYAN Queuine tRNA-ribosyltransferase OS=Desertifilum sp. IPPAS B-1220; OX = 1781255 GN=tgt PE=3 SV=1
MATFTFQTQACCSQTRARAGVFSTPHGLVETPRFMPVGTLATVKGVTPDQLKATGAQMVLANTYHLHLQPGESLVAKAGGLHQFMRWDGPMLTDSGGFQVFSLSQLRTITDKGVTFRSPRDGRMIEITPERSIQIQNQLGADVIMAFDECPPYPATREEVEAATQRTYRWLERCIQAHQRSDQALFGIVQGGVFIDLRQKAAKDLVELDLPGYAIGGVSVGEPGELIDEIVRETAPFLPADKPRYLMGVGTYQEMVRAIASGIDLFDCVIPTRLARHGAVFVRGDRWNIKNNCFREDLAPLDAECPCYTCQNFSRAYLGHLWRCRELLVYTLLSIHNITELIRFTQKIRESILADRFTEEFGHWLN

SEQ ID NO: 54520 - protein, 380 aa, Desmospora activa
  REGION 1..380: note = tr|A0A2T4Z8Y0|A0A2T4Z8Y0_9BACL Queuine tRNA-ribosyltransferase OS=Desmospora activa DSM 45169; OX = 1121389 GN=tgt PE=3 SV=1
MALRYELIKTCSQSQARLGRIHTPHGIIDTPVFMPVGTLATVKTVSPEELKELGSDIILANTYHLFLRPGHEIVQEAGGLHSFMNWDRAILTDSGGFQVFSLSKLRKITEEGVSFRSHLSGESLFISPEKAMEIQNALGADIIMAFDECPPYPAEREYVKESLERTTRWLHRCKQAHRRKEEQALFGIVQGGMYPDLRQESAKQITDVDLPGYAIGGLSVGEPKPLMYEALEETVPLLPPGKPRYLMGVGSPDALVEGVIRGVDMFDCVLPTRIARNGTTMTSQGRVVIRNAAYARDFGPLDPECDCYTCRHYSRAYLRHLIKSDETFGFRLTTIHNLHFLLTLMKRVRQAIQQDRLLDFRREFFESYYGTSEPDGTRNF

SEQ ID NO: 54521 - protein, 76 aa, Desmospora sp.
  REGION 1..76: note = tr|F5SAU8|F5SAU8_9BACL Queuine tRNA-ribosyltransferase OS=Desmospora sp. 8437 OX=997346; GN = tgt2 PE=4 SV=1
MNLFPERLKAGGETIIRGAEGANRGCTPVNLSGKRRPAGRSLESALRGHPRGKTRHVGLNSQVTGQGKTDRGIHSA

SEQ ID NO: 54522 - protein, 378 aa, Desmospora sp.
  REGION 1..378: note = tr|F5SAR8|F5SAR8_9BACL Queuine tRNA-ribosyltransferase OS=Desmospora sp. 8437 OX=997346; GN = tgt PE=3 SV=1
MALRYELIKTCKQSGARLGRLHTPHGTVDTPVFMPVGTLATVKTMSPEELTEMGSGIILSNTYHLFLRPGHDVVREAGGLHRFMNWDRAILTDSGGFQVFSLSDLREITEEGVSFRSHLNGEPLFLSPEKSMEIQNALGADIIMAFDECPPYLADREYVKNSMDRTHRWLQRCATAHRRKEEQALFGIIQGGMYRDLREESARQITSVDLPGYAIGGLSVGEPKEMMYDALEWTTPLMPKEKPRYLMGVGSPDALVEGVVRGVDMFDCVLPTRIARNGTTMTSRGRVVVRNAKYARDFSPLDPECDCYTCRNYSRAYLRHLIKAEETFGLRLTTYHNLHFLLKLMEKVRQAIREDRLLDFRAHFFEEYYGSTRPTRNF

SEQ ID NO: 54523 - protein, 374 aa, Desulfacinum hydrothermale
  REGION 1..374: note = tr|A0A1W1XA70|A0A1W1XA70_9DELT Queuine tRNA-ribosyltransferase OS=Desulfacinum hydrothermale DSM 13146 OX=1121390 GN=tgt PE=3 SV=1
MLVHFELICRDRESHARRGRFRTTHGVVETPVFMPVGTQATVKSLTPQEVEDLGARILLGNTYHLYLRPGAERIARLGGLHQFMGWKGAILTDSGGFQVFSLAKIRTIEEEGVSFQSHIDGSRHVITPEKSVEIQEALGSDIAMCFDECTPYPVTYAYAKASMERTVRWARRCLEAHGREDQALFGIVQGSTFLDLRRACLEQLAALDLPGYAIGSLSVGEPKEEMLAVLENVAPLLPADKPRYLMGVGTPEDLVEGVRCGVDMFDCVMPTRNARNGMLFTSWGSIQIKNARYADDPRPIEDGCGCYTCRHFSRAYLRHLFMARELLAYRLNTLHNLHYYLGLMEQIRHSLEAGAFAEWRRRFYANRDGGGTSD

SEQ ID NO: 54524 - protein, 372 aa, Desulfacinum infernum
  REGION 1..372: note = tr|A0A1M4VEX0|A0A1M4VEX0_9DELT Queuine tRNA-ribosyltransferase OS=Desulfacinum infernum DSM 9756; OX = 1121391 GN=tgt PE=3 SV=1
MHFEIICRDKEVAARRGRFRTSHGVVETPVFMPVGTQGTVKSLTPQELEELGARIILGNTYHLYLRPGAERIARLGGLHRFMGWRGSILTDSGGFQVFSLAKIRTIDEEGVAFQSHIDGSRHVITPEKSVQIQEALGSDIAMCFDECTPYPVTYEYAKASMERTVRWARRCLEAHRREDQALFGIVQGGTFLDLRRACLEELAALDLPGYAIGSLSVGEPKEEMLAVLEEVTPALPAGKPRYLMGVGTPEDLVEGVRCGVDMFDCVMPTRNARNGMLFTSWGSIQIKNARYADDPRPVEEGCGCTTCRNFSRAYLRHLFMARELLAYRLNTIHNLHYYLGLMAEMRESLEKGAFSQWRRRFYARRQETRQED

SEQ ID NO: 54525 - protein, 370 aa, unidentified
  source 1..370: note = Desulfallas geothermicus
  REGION 1..370: note = tr|A0A1I6EBV2|A0A1I6EBV2_9FIRM Queuine tRNA-ribosyltransferase OS=Desulfallas geothermicus DSM 3669 OX=1121426 GN=tgt PE=3 SV=1
MAISFKVIKEDTESRARLGQLETPHGTVQTPVFMPVGTQASVKTMTPHEVSQVGGEMVLSNTYHLYLRPGHELVAEAGGLHRFMRWDGPILTDSGGFQVFSLGPLRRITDEGVTFRSHIDGSELFFSPEISMDIQMALGADVAMAFDECPPYPCSYEETRKATERTTSWARRCLKHHNRKDQALFGIIQGGVHRDLRLKSAAELSAMGFPGYGIGGLSVGEPKPLMYEVLDYLIPAMPGEKPRYLMGVGSPDCLLEGVARGVDMFDCVLPTRIARNGTVFTRDGKLVVRNAEYARDFSPLDPECDCYACRNFTRAYIRHLIKANEVLGIRLTTIHNLRFVLRLMEDIRTAIAGNHFSEMKTKFLRRFKTD

SEQ ID NO: 54526 - protein, 370 aa, unidentified
  source 1..370: note = Desulfallas gibsoniae
  REGION 1..370: note = tr|R4KF74|R4KF74_9FIRM Queuine tRNA-ribosyltransferase OS=Desulfallas gibsoniae DSM 7213; OX = 767817 GN=tgt PE=3 SV=1
MAIGFTITKEDGRSRARRGTLITPHGTVQTPIFMPVGTQATVKTMTPEEVQDCGGALVLSNTYHLYLRPGHALVAEAGGLHKFMRWDGPILTDSGGFQVFSLGPLRKISDQGVTFRSHIDGSEHFFSPEKSMEIQMALGADVAMAFDECAPYSSSYEQTRAAMERTTRWAERCRMRHDRKDQALFGIIQGGMYRDLRLQSAAELAALDFPGHGIGGLSVGEPKPLMYEVLDYLVPAMPREKPRYLMGVGSPDCLLEGVFRGVDMFDCVLPTRIARNGTVFTRDGKLVVRNAEYARDFRPLDPECDCYTCRNFSRAYIRHLIKANEVLGIRLTTLHNLRFVLRLMENIRAAIDGDYFVAYKEDFLRRFKLD

SEQ ID NO: 54527 - protein, 371 aa, unidentified
  source 1..371: note = Desulfamplus magnetovallimortis
  REGION 1..371: note = tr|A0A1W1HAB1|A0A1W1HAB1_9DELT Queuine tRNA-ribosyltransferase OS=Desulfamplus magnetovallimortis; OX = 1246637 GN=tgt PE=3 SV=1
MFEILTRCPETRARTGIINTAHGKIQTPIFMPVGTLASVKSVSVEELKNCGAQIILGNTYHLYLRPGCDVIDHMKGLHHFMNWDSPILTDSGGFQFFSLAKLAKFSDEGVDFQSHIDGSRHIFTPEKAVEIQSLLGSDIMMSLDWCIGHPADKGATMEALKKTTMWAERGLEFWRDNGKPNALFGIVQGGMYKELRSLSAKQLEDLDFPGYAIGGLSVGEPTEMMYEMADHTAPLLPYEKPKYVMGVGTPENLVELVGMGVDMFDCVMPSRNARNGQLFTSGGTLNISNAAFKMDEAPVDESCNCYTCRNYSRAYLRHLYKSRELLAYRLNTIHNLHYYLTLMANIRQAVAQGSFNLFKKSFYSRLECGLK

SEQ ID NO: 54528 - protein, 371 aa, Desulfarculus baarsii
  REGION 1..371: note = tr|E1QIL6|E1QIL6_DESB2 Queuine tRNA-ribosyltransferase OS=Desulfarculus baarsii (strain ATCC 33931 / DSM 2075 / VKM B-1802 / 2st14) OX=644282; GN = tgt PE=3 SV=1
MARLRYQQTARSGRARAGLLHTRRGAVRTPAFMPVGTQATVKTLMPEEVAQAGADMILANTYHLSLRPGAEEVAALGGLHRFMAWDGPILTDSGGFQVFSLAANRKLDESGVSFRSHLDGSAMSLGPERAVQAQELLGSDVMMVLDECPPPGADRAYIATALARDARWAARALAARSEGGGALMGIVQGGVYHDLRRRSAELLLELELDGYALGGLSVGEPKEIMMEVIERTVPLVSGAGPVYLMGVGDPADLVRAVGLGVDMFDCVLPTRTARTGALLTARGRMNIKNARYKDDPRPVEPDCQCPTCRRFSRAYLRHLYMAGELLAYRLNTLHNLHFVLGLMERLRQAIAQDRYEEFARGFLAELELGQQ

SEQ ID NO: 54529 - protein, 377 aa, Desulfarculus sp.
  REGION 1..377: note = tr|A0A3A6P470|A0A3A6P470_9DELT Queuine tRNA-ribosyltransferase OS=Desulfarculus sp. OX=2093367; GN = tgt PE=3 SV=1
MGRLSFVTTARSAGARCGLMQTRRGPVQTPVFMPVGTQASVKGLTPEEVAGLGAELVLANTYHLMLRPGCQVVAGLGGLHCFMGWQGPILTDSGGYQVFSLSGLRRLDEEGVSFRSHLDGELMRLTPEAVVAAQEELDSDLMMVLDECPPAGAARGYLEQALARDARWAARALAARSEKGGALLGIVQGGVYYDLRARSVESVCALDMDGFALGGLSVGEAKEEMMEVIARTAPLLPADKPVYLMGVGEPADLVRCVGLGVDMFDCVLPTRMARNGTLLTARGRLNLRNARYKDDPQPVEEACGCYTCRGYSRAYLRHLFMARELLSYRLNTIHNLYYVLQLMAGLRRAIVQDAYESFARGFFSCLEEGRGEEALPN

SEQ ID NO: 54530 - protein, 391 aa, Desulfatibacillum aliphaticivorans
  REGION 1..391: note = tr|B8FHI8|B8FHI8_DESAL Queuine tRNA-ribosyltransferase OS=Desulfatibacillum aliphaticivorans OX=218208 GN=tgt PE=3 SV=1
MLCPLQIKFEEVEERYVEPFHFTLDAVCEKTGARAGTLTTPHGVIKTPVFMPVGTLGTVKSLAPEDLTGLNAQIILGNTYHLYLRPGCDVIDEFGGLHQFMNWDRPLLTDSGGFQIFSLAKLQKMTEEGAHFQSHIDGSRHLLTPEKAMEIQVCLGSDIAMALDECIPYPASHEQALESLGLTTRWGKRSKEAWEMTKRPGHALFGIVQGGMYGDLRKQSAEELRKIGFDGYALGGLSVGEPRDLMLEMAGTSLPYLPQDRPRYIMGVGKPQDLVDMVNLGADMFDCVLPTRNARNGQLFTSKGPLNICNAQHRTSTLPVDEECQCYTCRNYSRAYLRHLYMSRELLSYRLNTIHNIAFFISLMEKAREAVLANDYAAFYKDFFQKIETGA

SEQ ID NO: 54531 - protein, 391 aa, Desulfatibacillum alkenivorans
  REGION 1..391: note = tr|A0A1M6PEI2|A0A1M6PEI2_9DELT Queuine tRNA-ribosyltransferase OS=Desulfatibacillum alkenivorans DSM 16219 OX=1121393 GN=tgt PE=3 SV=1
MLCPFQIKFEEVEERYVEPFHFTLDAVCEKTGARAGTLTTPHGIIKTPVFMPVGTLGTVKSLAPEDLAGLNAQIILGNTYHLYLRPGCDVIDEFGGLHQFMNWDRPLLTDSGGFQIFSLAKLQKMTEEGAHFQSHIDGSRHLLTPEKAMEIQVCLGSDIAMALDECIPYPASHEQALESLGLTTRWGKRSKEAWEQTKRPGHALFGIVQGGMYGDLRKQSAEELREIGFDGYALGGLSVGEPRDLMLEMAGISLPYLPQDRPRYIMGVGKPQDLVDMVNLGADMFDCVLPTRNARNGQLFTSRGPLNICNAQHRTSSLPVDEECQCYTCRNYSRAYLRHLYMSRELLSYRLNTIHNIAFFISLMEKAREAVLANSYEAFYKDFFQKIETGA

SEQ ID NO: 54532 - protein, 377 aa, unidentified
  source 1..377: note = Desulfatitalea sp.
  REGION 1..377: note = tr|A0A0F2R3W6|A0A0F2R3W6_9DELT Queuine tRNA-ribosyltransferase OS=Desulfatitalea sp. BRH_c12; OX = 1629708 GN=tgt PE=3 SV=1
MTFLLENQSTSAPRAGLLQTPHGTIHTPIFMPVGTQATVKALSPEELVGLGAQIILGNTYHLYLRPGTEVIGRFGGLHGFMHWHGPVLTDSGGFQIFSLAGLSKLSEEGYAFQSHLDGGARHMLTPERAIEVQLALNSDIMMCLDQCIAYPAGHDEALRALALTTRWARRCKARWQAEPECPNSLFGIVQGGMFKDLRSRSAEEIVAIGFPGYAVGGLSVGEPKALMLEMAAHTLKLLPTDAPRYVMGVGTPSDLVEMIGLGADMFDCVMPTRNARNGQLFTSQGILNIANARHRDDTAPIDAACGCYACRHYSRAYVRHLYQAKEILAHRLTTIHNLHFYLNLVKEARMAILEGDFERFRRDFRSQQQNGAENDCQ

SEQ ID NO: 54533 - protein, 375 aa, Desulfitibacter sp.
  REGION 1..375: note = tr|A0A101V9T0|A0A101V9T0_9FIRM Queuine tRNA-ribosyltransferase OS=Desulfitibacter sp. BRH_c19; OX = 1734395 GN=tgt PE=3 SV=1
MTVSFELLYDSQKTKARLGRVTTAHGVVETPVFMPVGTQATVKTLTPHELNELDAEIILSNTYHLYLRPGHKLIEEAGGLHSFMSWDKPILTDSGGFQVFSLADLKDIKEEGVTFRSHIDGSKHFFTPEKAMEVQMSLGSDIAMAFDICAPYPCSYEHALEASDRTTRWAQRCIDYHNHPYQSIFGIVQGSMFPDLRKKSVSEITSFDFPGFGIGGLSVGEPKEIMYDMLDHTIDEMPKDKPRYLMGVGSPDCLLEGVKRGVDMFDCVLPTRIARNGTVMTSVGKVVVRNALYAKDWEKLDPNCNCYTCSNYSRAYIRHLLKANETLGIRLTSIHNLHFLINLMKDIRKAIKEERLENMIKNFYESYENGNKTGI

SEQ ID NO: 54534 - protein, 372 aa, Desulfitobacterium chlororespirans
  REGION 1..372: note = tr|A0A1M7U7K9|A0A1M7U7K9_9FIRM Queuine tRNA-ribosyltransferase OS=Desulfitobacterium chlororespirans DSM 11544 OX=1121395 GN=tgt PE=3 SV=1
MAVRIEILKEDNRTRARLGKLHTPHGVIETPVFMPVGTQATVKTMTPEELKDLGAGIILSNTYHLFLRPGHELIREAGGLHAFMHWDGAILTDSGGFQVFSLGDLRKITEEGVEFRSHLDGSKKFLSPEIATQVQMALGSDIVMAFDECTPYPATREYAKASLERTTRWLKRCQETLTTTDRQALFGIVQGSMYEDLRKQSAAEITELDLPGYAVGGLSVGEPKELMYEVLDYTVPMLPKDKPRYLMGVGSPDALIEGVMRGIDMFDCVLPTRIARNGTALTRYGKLVVRNAESAHDFSPIDPTCDCYTCKNYSRAYLRHLIKADEILGLRLMTIHNLRFLTNLMSEIRAAIKENRLPEYREKFFYEYGYLK

SEQ ID NO: 54535 - protein, 372 aa, Desulfitobacterium dehalogenans
  REGION 1..372: note = tr|I4ABK1|I4ABK1_DESDJ Queuine tRNA-ribosyltransferase OS=Desulfitobacterium dehalogenans (strain ATCC 51507 / DSM 9161 / JW/IU-DC1) OX=756499; GN = tgt PE=3 SV=1
MAVRIEILKEDSRTRARLGKLHTPHGVIETPVFMPVGTQATVKTMTPEELKDLGAGIILSNTYHLFLRPGHELIREAGGLHSFMHWDGAILTDSGGFQVFSLGDLRKITEEGVEFRSHLDGSKKFLSPEIATQVQMALGSDIVMAFDECTPYPATREYAKASLERTTRWLKRCQETLTTTDRQALFGIVQGSMYEDLRKQSAAEITELDLPGYAVGGLSVGEPKELMYEVLDYTVPLLPKDKPRYLMGVGSPDALIEGVMRGIDMFDCVLPTRIARNGTALTRYGKLVVRNAESAHDFSPIDPTCDCYTCKNYSRAYLRHLIKADEILGLRLMTIHNLRFLTNLMAEIRTAIREDRLPEYREKFFYEYGYLK

SEQ ID NO: 54536 - protein, 372 aa, unidentified
  source 1..372: note = Desulfitobacterium dichloroeliminans
  REGION 1..372: note = tr|L0FA87|L0FA87_DESDL Queuine tRNA-ribosyltransferase OS=Desulfitobacterium dichloroeliminans (strain LMG P-21439 / DCA1) OX=871963; GN = tgt PE=3 SV=1
MAVRIEILKEDSKTRARLGKLHTPHGVIETPVFMPVGTQATVKTMTPEELKELGAGIILSNTYHLFLRPGHELIRDAGGLHAFMHWDGAILTDSGGFQVFSLGDLRKITEEGVEFRSHIDGSKRFLSPEIATQVQMALGSDIVMAFDECTPYPATREYAKASLERTTRWLKRCKETLITTDRQALFGIVQGSMYEDLRKQSAAEITELDLPGYAIGGLSVGEPKELMYEVLDYTVPLLPKDRPRYLMGVGSPDALIEGVMRGIDMFDCVLPTRIARNGTALTRYGKVVVRNAESAHDFSPLDPTCDCYTCKNYSRAYLRHLIKADEILGLRLMTIHNLRFLTNLMAEIREAIKEDRLPEYRHKFFSDYGYFN

SEQ ID NO: 54537 - protein, 372 aa, Desulfitobacterium hafniense
  REGION 1..372: note = tr|A0A0W1JDH4|A0A0W1JDH4_DESHA Queuine tRNA-ribosyltransferase OS=Desulfitobacterium hafniense; OX = 49338 GN=tgt PE=3 SV=1
MAVRIEVLKEDNRTRARLGKLHTPHGVIETPVFMPVGTQATVKTMTPEELKDLGAGIILSNTYHLFLRPGHELIREAGGLHAFMHWDGAILTDSGGFQVFSLGDLRKITEEGVEFRSHLDGSKKFLSPEIATQVQMALGSDIVMAFDECTPYPATRDYAKASLERTTRWLKRCQETLTTTDRQALFGIVQGSMYEDLRKQSAAEITELDLPGYAVGGLSVGEPKELMYEVLDYTVPLLPKDKPRYLMGVGSPDALIEGVMRGIDMFDCVLPTRIARNGTALTRYGKLVVRNAESAHDFSPIDPTCDCYTCKNYSRAYLRHLIKADEILGLRLMTIHNLRFLTNLMSEIRAAIKENRLPEYREKFFYEYGYLK

SEQ ID NO: 54538 - protein, 372 aa, Desulfitobacterium hafniense; identical to SEQ ID NO: 54537
  REGION 1..372: note = sp|B8FQV2|TGT_DESHD Queuine tRNA-ribosyltransferase; OS = Desulfitobacterium hafniense (strain DCB-2 / DSM 10664); OX = 272564 GN=tgt PE=3 SV=1

SEQ ID NO: 54539 - protein, 373 aa, Desulfitobacterium metallireducens
  REGION 1..373: note = tr|W0ED68|W0ED68_9FIRM Queuine tRNA-ribosyltransferase OS=Desulfitobacterium metallireducens DSM 15288 OX=871968 GN=tgt PE=3 SV=1
MPAVRLEVLKEDTRTKARLGKLHTPHGVINTPVFMPVGTQATVKTMNPEELKEIGAGIILSNTYHLFLRPGQELIREAGGLHSFMHWDGAILTDSGGFQVFSLGDLRKITEEGVEFRSHLDGSRQFLSPEIATQVQMALGSDIVMAFDECTPYPATREYAKASMERTTRWLKRCKETLTTTDRQSLFGIVQGSMFEDLRKQSAAEITELDLPGYAIGGLSVGEPKELMYEVMDYTVPLLPKDRPRYLMGVGSPDALIEGVMRGIDMFDCVLPTRIARNGTAMTRYGKLVVRNAAVAHDFMPIDPTCDCYACRNYSRAYIRHLLKADEILGLRLMSIHNLRFLQTLMKEIREAIAEDRLPEYRQKFFTDYGYLD

SEQ ID NO: 54540 - protein, 372 aa, Desulfitobacterium sp.; identical to SEQ ID NO: 54537
  REGION 1..372: note = tr|A0A562HP71|A0A562HP71_9FIRM Queuine tRNA-ribosyltransferase OS=Desulfitobacterium sp. LBE; OX = 884086 GN=tgt PE=3 SV=1

SEQ ID NO: 54541 - protein, 375 aa, Desulfobacca acetoxidans
  REGION 1..375: note = tr|F2NDW6|F2NDW6_DESAR Queuine tRNA-ribosyltransferase OS=Desulfobacca acetoxidans (strain ATCC 700848 / DSM 11109 / ASRB2) OX=880072 GN=tgt; PE = 3 SV=1
MNINFEILATDPHCGARRGRLSLPRGEVETPVFMPVGTQATVKTMTPEELQSLGVSIILANAYHLYLRPGAEIVQAMGGLHQFMNWDRPILTDSGGFQIFSLAALRHLSDEGVTFRSHLNGATHFLTPEKVIALQETLDADILICLDECPAYGVSEEYVVRSGELTWRWARRCQQARSRWDKPLFAVVQGGMWSKRRREQAQALVAEGFDGYAIGGLSVGEDKATREAMLEVTVPELPHHQPRYLMGVGTPEDLVEGVARGIDMFDCVLPTRNARNGMALTRFGRVVIKNAEHARSSRPLDEACGCYTCRNYTRAYLRHLYVAREILAYRLLTMHNLYYYLELMAGMRQSLAQGNFQEFRQAFYSQREYGGAYSG

SEQ ID NO: 54542 - protein, 377 aa, Desulfobacca sp.
  REGION 1..377: note = tr|A0A1V4QL66|A0A1V4QL66_9DELT Queuine tRNA-ribosyltransferase OS=Desulfobacca sp. 4484_104; OX = 1940691 GN=tgt PE=3 SV=1
MGRGFSFRLLATDAASQARMGEITTPRGSIPTPVFMPVGTLATVKTMTSEELCDLGAQIILANTYHLFLRPGVEVIQSLGGLHRFMHWDRPILTDSGGFQIFSLAPLRQITEEGVTFRSHLNGTSHFLSPEKVVALQEALDSDIIICLDECPAFPATEEYVARSAALTLRWAQRSKIAHTRPEQALFAVTQGGMYPHLRQEHAQALVAQDFQGYAIGGLSVGEDKDTRLAMLEVSIPELPENKPRYLMGVGTPADLVDAVSRGVDMFDCVLPTRNARNGMALTRNGRLVIKNARYVQDSRPLDEACGCYTCQHYSRAYLRHLFVAREILAYRLLTVHNLYYYLELMAGMRQALTQGRFQEFRRNFYGQQQNGGDLGD

SEQ ID NO: 54543 - protein, 376 aa, Desulfobacter hydrogenophilus
  REGION 1..376: note = tr|A0A328FBV3|A0A328FBV3_9DELT Queuine tRNA-ribosyltransferase OS=Desulfobacter hydrogenophilus; OX = 2291 GN=tgt PE=3 SV=1
MLTFDLIKDNSKSGNGRDRSRLGRITTDHGIIETPIFMPVGTVGSVKAVSKEDLEHCGAQIILGNTYHLYLRPGCEVIEAMKGLHAFTAWDKPMLTDSGGFQFFSLAKLAKFTDEGVHFQSHIDGSRHFFSPERAVEIQMILGSDIMMSLDWCQGHPATDQQVAEALNKTTAWAKRGFDFWQENGAVNNLFGIVQGGMIKELRSLSAEQLTAINFPGFAIGGLSVGEPTEVMYEMADHTLPLLPSQKPRYIMGVGTPENLVTLVGMGCDMFDCVMPSRNARNGQLFTHTGTVNIPNAKYKTDERPIDETCGCYTCRNYSRAYLRHLYKSRELLSYRLNTIHNLYYYLDLMAKMRHAIKEDRFPEFQQQFFKMRQDQ

SEQ ID NO: 54544 - protein, 376 aa, Desulfobacter postgatei
  REGION 1..376: note = tr|I5B5B4|I5B5B4_9DELT Queuine tRNA-ribosyltransferase OS=Desulfobacter postgatei 2ac9; OX = 879212 GN=tgt PE=3 SV=1
MLTFDLIKDNSKKGDGRDRSRLGRILTDHGVVQTPVFMPVGTLGSVKGVSKEDLAHCGAQIILGNTYHLYLRPGVEVIETMKGLHAFTAWNKPMLTDSGGFQFFSLAKLARFTDEGVHFQSHIDGSRHFFSPERAVEIQMILGSDIMMSLDWCQGHPATDQQVADALNKTTAWAKRGFDFWQENGAIHNLFGIVQGGMVKELRSLSAEQITAIDFPGFAIGGLSVGEPTDVMYEMADHTLPLLPSQKPRYIMGVGTPENLVTLVGMGCDMFDCVMPSRNARNGQLFTHTGTINIPNAVYKTDERPIDEICDCYTCRNYSRAYLRHLYKSRELLSYRLNTIHNLYYYLDLMAKMRHAIKEDKFPEFQQQFFKARQDQ

SEQ ID NO: 54545 - protein, 376 aa, Desulfobacter sp.
  REGION 1..376: note = tr|A0A357YUI0|A0A357YUI0_9DELT Queuine tRNA-ribosyltransferase OS=Desulfobacter sp. OX=2294; GN = tgt PE=3 SV=1
MLTFDLIKDNSKKGDGRDRSRLGRIITDHGVVETPIFMPVGTVGSVKGVSKEDLAHCGAQIILGNTYHLYLRPGVEVIETMKGLHAFTAWNKPMLTDSGGFQFFSLAKLAKFTDEGVHFQSHIDGSRHFFSPERAVEIQMILGSDIMMSLDWCQGHPATDQQVADALNKTTAWAKRGFDFWQENGAINNLFGIVQGGMVKDLRSLSAEQITAIDFPGFAIGGLSVGEPTDVMYEMADHTLPLLPSQKPRYIMGVGTPENLVTLVGMGCDMFDCVMPSRNARNGQLFTHTGTINIPNAVYKTDERPIDETCDCYTCRNYSRAYLRHLYKSRELLSYRLNTIHNLYYYLDLMAKMRHAIKEDKFPEFQQQFFKARQDQ

SEQ ID NO: 54546 - protein, 376 aa, Desulfobacter sp.
  REGION 1..376: note = tr|A0A348UVH7|A0A348UVH7_9DELT Queuine tRNA-ribosyltransferase OS=Desulfobacter sp. OX=2294; GN = tgt PE=3 SV=1
MLTFDLIKDNSKKGDGRDRSRLGRIITDHGVVETPIFMPVGTVGSVKGVSKEDLAHCGAQIILGNTYHLYLRPGVEVIETMKGLHAFTAWNKPMLTDSGGFQFFSLAKLAKFTDEGVHFQSHIDGSRHFFSPERAVEIQMILGSDIMMSLDWCQGHPATDQQVADALNKTTAWAKRGFDFWQENGAINNLFGIVQGGMVKDLRSLSAEQITAIDFPGFAIGGLSVGEPTDVMYEMADHTLPLLPSQKPRYIMGVGTPENLVTLVGMGCDMFDCVMPSRNARNGQLFTHTGTINIPNAVYKTDERPIDETCDCYTCRNYSRAYLRHLYKSRELLSYRLNTIHNLYYYLDLMAKMRHAIKEDNFPEFQQQFFKARQDQ

SEQ ID NO: 54547 - protein, 372 aa, unidentified
  source 1..372: note = Desulfobacteraceae bacterium
  REGION 1..372: note = tr|A0A1W9LLH5|A0A1W9LLH5_9DELT Queuine tRNA-ribosyltransferase OS=Desulfobacteraceae bacterium A6; OX = 1934249 GN=tgt PE=3 SV=1
MFDFTVVSESKKSRARAGIMRTSHGVVETPVFMPVGTLASVKSLSPEEIAGAGASIILGNTYHLYLRPGCDVISLFSGLHGFMNWNRPILTDSGGFQVFSLAKLSKITDEGYTFQSHIDGSSHILTPEKAVEVQISLGSDIMMCLDQCIHYPAEKNEVESAVELTTAWAKRCKKTWEDSGKKKRALFGIIQGGMYKDLRKKSATDLVETEFSGYALGGLSVGEPVEIMLEIAEFTLPKLPNEKPKYVMGVGTPENLVELVSLGADMFDCVLPTRNARNGQMFTAEGTINICNSQYKYDTSSVEKGCLCYTCRNYSRAYLRHLFMAKELLAYRLNTIHNVHYYTKLMRDMRTAILNDTFEVFRKDFYHKRREA

SEQ ID NO: 54548 - protein, 372 aa, unidentified
  source 1..372: note = Desulfobacteraceae bacterium
  REGION 1..372: note = tr|A0A1W9LI15|A0A1W9LI15_9DELT Queuine tRNA-ribosyltransferase OS=Desulfobacteraceae bacterium A6; OX = 1934249 GN=tgt PE=3 SV=1
MGFNLLAVDSCGARRGEFTTTHGKVETPAFMPVGTAGFVRSITPRDVAETDSEVILANTYHLSLGERLATVKRMGGLHRFMGWDKTILTDSGGFQVFSLPGREINDDGVSFSYEEDGERVFFTPEKSMEIQRDLGADIVMAFDECVEHTASREYIEKSVERTTDWAKRCRDVELKEYQFMFGIIQGGVFPDLRQKSAIEITSIPFDGYAIGGVSVGEGFELMKKVVEVTAHFLPEQKPRYLMGVGLPEDILAAVQGGMDMFDCVIPTRYARQGTLFTRIGKIRILDKTYRKDKFPLDTKCRCYTCRTYPRMVLRYLLFSRDPLAETLLTIHNLTFYQDLMKDIRAAVVENRFEEFREEWLGVYKKNRNRNEA

SEQ ID NO: 54549 - protein, 384 aa, unidentified
  source 1..384: note = Desulfobacterales bacterium
  REGION 1..384: note = tr|A0A1F9P229|A0A1F9P229_9DELT Queuine tRNA-ribosyltransferase OS=Desulfobacterales bacterium RIFOXYA12_FULL_46_15 OX=1797914 GN=tgt PE=3 SV=1
MLKFELKKESAEFKGGEQCRARLGAITTDHGKIETPIFMPVGTVGSVKALSVEDLAHCKAQIILGNTYHLYLRPGMDVIEYMKGLHDFIRWNKPILTDSGGYQFFSLAKLAKFSDEGVAFQSHIDGSRHVFSPEKAIDIQMILGSDIMMSLDWCIGYPANEREVMAALNKTTQWAKRGFEFWRQKGSVNNLFGIVQGGMFKSLRSLSAGQLKEIDFPGFAIGGLSVGEPKDLMYEMADHTLPLLPRHKPRYIMGVGTPEDLVELTFMGCDMFDCVMPTRNARNGQLFTSRGTMNISNARYRLDKAPPDAECNCYTCANYSRSYLRHLYKSREILSYRLNTIHNIYYYMNLMEKMREAIKNDRFFEFRQAFYLKRQSDPREFDSE

SEQ ID NO: 54550 - protein, 369 aa, unidentified
  source 1..369: note = Desulfobacterales bacterium
  REGION 1..369: note = tr|A0A1E7GI56|A0A1E7GI56_9DELT Queuine tRNA-ribosyltransferase OS=Desulfobacterales bacterium S3730MH5 OX=1869298 GN=tgt PE=3 SV=1
MTFSFEILHKSADTAARLGKIHTPHGCIETPVFIPVGTKATIKSLTPEDLCGMGVQIILANTYHLYLRPGHDVIGTLGGLHRFMHWDRPVLTDSGGYQVFSLSKLRKISDRGVTFQSHIDGSKHLLTPEKAIEIQEILGSDIMMCLDECTPYPATHTESRRSSELSIDWARRCKQSCNADDRALFGIVQGGMFQDLRAQGVEALTGIGFDGYALGGLSVGEPKKALLDVAAFTLPLLPGSLPRYVMGVGAPEDLVELVYLGTDMFDCVMPTRNARNGQFFVRTGTLNIYNARYRSDQAPVETGCPCYTCRHYSRAYLRHLFMAKELLAYRLSTIHNIHYFMTLMREMREAIRQGRLAMFKRDFYSQRAR

SEQ ID NO: 54551 - protein, 370 aa, Desulfobacterium autotrophicum
  REGION 1..370: note = sp|C0QKY2|TGT_DESAH Queuine tRNA-ribosyltransferase; OS = Desulfobacterium autotrophicum (strain ATCC 43914 / DSM 3382 / HRM2) OX=177437 GN=tgt PE=3 SV=1
MLTFDIINQSLESRARTGRITTAHGVIETPIFMPVGTLGTVKAVSVEELKACQAQIILGNTYHLYLRPGCEVMAHMGGLHPFMNWDRPILTDSGGFQFFSLAKLAKFKDEGVSFQSHIDGSRHLFTPERAVEIQSILGSDIMMSLDWCMGYPATRKEAMGALEKTTQWAERGRNFWIEQGRVNNLFGIVQGGMFADLRSISARQLADLDFPGYAIGGLSVGEPTELMYEMADHTVPQLPLEKPKYVMGVGTPENLVELAGMGVDMFDCVMPSRNARNGQLFTSTGTMNISNAAFRLDESPLDAECSCYTCQNYSRAYLRHLYKSRELLAYRLNTIHNLHYYLDLMHQMRNAINQGRFMAFKQEFYRKRER

SEQ ID NO: 54552 - protein, 342 aa, Desulfobacterium sp.
  REGION 1..342: note = tr|A0A1W9U2W7|A0A1W9U2W7_9DELT Queuine tRNA-ribosyltransferase OS=Desulfobacterium sp. 4572_20; OX = 1971621 GN=tgt PE=3 SV=1
MEFRVLKRCTSSKARLGEITTDHGRFETPVFMPVGTSGAIKGISPGEAKDLGVKIVLSNTYHLYLRPGHKLIENMGGLHRFMNWSGPILTDSGGFQVYSLSKLRTISPDGVTFRSHLDGSTHFLGPEKVMEIQRSLGADITMTFDECTPSGAEHEYVRKSVKLTEQWARQCLEQKEKNGQALFGIVQGGVYPELREMSAKGLVSMGFDGYALGGLSVGEDKHTRERVIKATMEFLPEEKPVYLMGIGTPEDILESVKMGVDMFDCVLPTRNARNGMLFTNKGKLVIKNARYAQDSSPIEEGCGCYTCSHYSRAYLRHLFLSREILSFRLNTIHNLYYYLVAK

SEQ ID NO: 54553 - protein, 375 aa, Desulfobacterium vacuolatum
  REGION 1..375: note = tr|A0A1W2C469|A0A1W2C469_9DELT Queuine tRNA-ribosyltransferase OS=Desulfobacterium vacuolatum DSM 3385 OX=1121400 GN=tgt PE=3 SV=1
MLTFEIEKKSTDSRARTGSIITAHGEIPTPIFMPVGTLGSVKAVSVEELKQCEARIILGNTYHLYLRPGCEVMTHMGGLHKFMNWDRPILTDSGGFQFFSLAKLAKFSREGVNFQSHIDGSRHLFTPEKAVDIQMVLGSDIMMSLDWCIPYPANEKETMAALEKTTLWARRGRDHWLEKGGVNNLFGIVQGGMYAHLRALSAQQLIELDFPGYAVGGLSVGEPTDLMYEMADHTVPLLPHDKPRYVMGVGTPENLVEMVGMGVDMFDCVMPSRNARNGQLFTGRGTINISNARFRMDENPIDDACNCYVCQNYSRAYLRHLYKTRELLSYRLNTIHNLHYYLNLMERIRQSIKADQFSAFKKEFFSQLNHKELNR

SEQ ID NO: 54554 - protein, 389 aa, Desulfobacula phenolica
  REGION 1..389: note = tr|A0A1H2HHG7|A0A1H2HHG7_9DELT Queuine tRNA-ribosyltransferase OS=Desulfobacula phenolica; OX = 90732 GN=tgt PE=3 SV=1
MVIKKRNMLKFKILKQSSKSKGLGKGNGSEHCRARLGTITTDHGVIDTPIFMPVGTLGSVKAVSVEELDHCKAQIILGNTYHLYLRPGCDVIEHMDGLHEFIRWNKPMLTDSGGFQFFSLAKLAKFSDEGVAFQSHIDGSRHMFSPEKAVDIQMILGSDIMMSLDWCIGYPADEKQTMEALNKTTLWAKRGFDFWQEKGAVNNLFGIVQGGMYKHLRTLSAEQLTQIDFPGFAIGGLSVGEPKEFMYEMADHTLPLLPVHKPRYIMGVGTPEDLVELTGMGCDMFDCVMPSRNARNGQLFTSKGTINIPNAKFRFDKGPIDTDCNCYTCQNYSRSYLRHLYKSRELLAYRLNTIHNIYYYLDLMEKMRDAIRQDSFLEFKREFYSKRQN

SEQ ID NO: 54555 - protein, 384 aa, Desulfobacula sp.; identical to SEQ ID NO: 54549
  REGION 1..384: note = tr|A0A1F9N1H1|A0A1F9N1H1_9DELT Queuine tRNA-ribosyltransferase OS=Desulfobacula sp. GWF2_41_7; OX = 1797910 GN=tgt PE=3 SV=1

SEQ ID NO: 54556 - protein, 376 aa, Desulfobacula toluolica
  REGION 1..376: note = tr|K0NNH5|K0NNH5_DESTT Queuine tRNA-ribosyltransferase OS=Desulfobacula toluolica (strain DSM 7467 / Tol2) OX=651182 GN=tgt PE=3 SV=1
MLKFKILKQSNKSNGSDHCRARLGTIATDHGVIDTPIFMPVGTLGSVKAVSVEELDNCKAQIILGNTYHLYLRPGCDVIEHMDGLHEFIRWNKPMLTDSGGFQFFSLAKLAKFSDEGVAFQSHIDGSRHMFSPEKAVEIQMILGSDIMMSLDWCIGYPADEKQTMEALNKTTLWAKRGFDFWQEKGAVNNLFGIVQGGMYKHLRTLSAEQLTQIDFPGFAIGGLSVGEPKEFMYEMACHTLPLLPANKPRYIMGVGTPEDLVELVGMGCDMFDCVMPSRNARNGQLFTSKGTINIPNAKFRFDKGPIDTDCNCYTCQNYSRSYLRHLYKSRELLAYRLNTIHNIYYYLDLMEKMRDAIKQDRFLEFKREFYSKRQK

SEQ ID NO: 54557 - protein, 373 aa, Desulfobotulus alkaliphilus
  REGION 1..373: note = tr|A0A562S370|A0A562S370_9DELT Queuine tRNA-ribosyltransferase OS=Desulfobotulus alkaliphilus; OX = 622671 GN=tgt PE=3 SV=1
MLTFKLENRSSDSSARAGSIHTAHGEIQTPIFMPVGTLGTVKGLTPEDLLDCGSQIILGNTYHLYLRPGAELLSRFGGLHSFMHWDKPLLTDSGGFQVFSLAALSKITDEGYRFQSHIDGSSHLFTPESVVAMQDVIGSDIMMCLDQCIPYPADRILAEKALERTTLWARRCRKTWQEETGCRNSLFGIVQGGMFTDLRKRSAEELVALDFPGYAIGGLSVGEPAELMYEMGAFTLPLLPENRPRYIMGVGTPENLVELVSHGADMFDCVMPSRNARNGKLFTRYGDINIANSRFRMDEKPLDETCTCYTCRHYSRAYLRHLYKSRELLAYRLNTLHNIHYYLDLMRCMRAAILGDRFAAFRRIFTEERARGL

SEQ ID NO: 54558 - protein, 372 aa, Desulfobotulus alkaliphilus
  REGION 1..372: note = tr|A0A562S3L0|A0A562S3L0_9DELT Queuine tRNA-ribosyltransferase OS=Desulfobotulus alkaliphilus; OX = 622671 GN=tgt PE=3 SV=1
MAQRDIQFRLLAKDRSGARRGAFTTHHGTVQTPAFMPVGTAGYVHSTPARDVAETGAEVLLANTYHLSLGDRLASVRYMGGLHRFMGWERTILTDSGGFQVFSLPDRVIDDEGVTFSYEEDGERVMLSPEKSMEIQRDLGADIVMAFDECVSHTADRKYVGKSVGLTTAWASRCRDVKLQDHQFLFGIVQGGVFDDLRRKSAKEITSIPFDGFAIGGVSVGEGFDLMRRVVGVTAPCLPEDLPRYLMGVGLPEDILEAVHLGMDMFDCVIPTRYARQGTLFTRTGKLRIKNKNFRKDRYPLDTKCSCYTCRTFSRMVLRYLFFSGDPLAETLATIHNITFYQDMMSDIRRAIEENRFESFKREWLEIYKKNR

SEQ ID NO: 54559 - protein, 372 aa, unidentified
  source 1..372: note = Desulfobulbaceae bacterium
  REGION 1..372: note = tr|A0A1E7GT51|A0A1E7GT51_9DELT Queuine tRNA-ribosyltransferase OS=Desulfobulbaceae bacterium S5133MH15 OX=1869306 GN=tgt PE=3 SV=1
MQTKTAFTLHKQSDDCRARRGEVKTGHAVFQTPVFMPVGTQGTVKAVTPENLEEMSAQIILGNTYHLFIRPGHELIERFGGLHKFMNWKGAILTDSGGFQIFSLRKLAKITEEGAAFRSHLDGSKLFLSPEDAVQVQQSLGSDIMMCLDTCIPYPATREETIKSTNLTTRWAKRCREAHTRREQLLFGIVQGGMYSDLRKAHIEELINIGFDGYAIGGLSVGEDKNLMYDMTEATAPCLPEDFPRYLMGVGTPSDLVEGVWRGVDMFDCVMPTRNARNGTLFTSKGKVVIKNARYREDQNPLDEECGCYTCRNYSRGYLRHLFQSREILSYHLNTIHNLHYYLNLMTTIRSAIEQGTFVQFRKDFYSKLELE

SEQ ID NO: 54560 - protein, 372 aa, unidentified
  source 1..372: note = Desulfobulbaceae bacterium
  REGION 1..372: note = tr|A0A0F2NQ23|A0A0F2NQ23_9DELT Queuine tRNA-ribosyltransferase OS=Desulfobulbaceae bacterium BRH_c16a OX=1629713 GN=tgt PE=3 SV=1
MDQQTPFTLLKRSSECAARRGEVRTRQGVIQTPVFMPVGTQGTVKAVTPENLQEMNAQIILGNTYHLFIRPGHELIEKFGGLHSFMNWKGSILTDSGGFQIFSLKELATITEEGAAFRSHLDGSKLFLSPEDAIYVQQALGSDIMMCLDTCIPFPATRDETIAATDLTTRWAARCRQAHSKRDRLLFGIVQGGMYPELRREHAAALIDIGFDGYAIGGLSVGEEKHLMYDMTEATVPALPADYPVYLMGVGTPSDLVEGVWRGIDMFDCVMPTRNARNGSLFTSRGKLTIKNSRYRDDPRPLDEECTCYTCRNYSRAYLSHLFHAREILSYHLNTIHNLHYYLNLMADIRKALESDSFALFRKDFYSKLERE

SEQ ID NO: 54561 - protein, 373 aa, unidentified
  source 1..373: note = Desulfobulbus oralis
  REGION 1..373: note = tr|A0A2L1GMA6|A0A2L1GMA6_9DELT Queuine tRNA-ribosyltransferase OS=Desulfobulbus oralis OX=1986146; GN = tgt PE=3 SV=1
MPSSFAQLARSSECHARTGRLATLHGHIETPVFMPVGTQATVKAMTPEDLKQIGAQIILGNTYHLYIRPGHELIRELGGLHRFMHWDRPILTDSGGFQIFSLNELASITEDGASFRSHLDGTKLFLSPEDAVAVQEALGSDIMMALDTCIPYPATRAEAARATALTNRWARRCRAAQTDTGQLLFGIVQGGLYPDLRLAALAELAETGFDGYALGGLSVGEPKEEMLAMLAACGHRMPADHARYLMGVGTPEDLVEGVMHGMDMFDCVMPTRNARNGMLFTSQGKLVIKNACFQKDAGPLDPLCTCYTCKNFSRAYLRHLFQSHEILASQLNSIHNLHYYNNLMAQMREAIRQDRFLAFRDEFYRLRGGQKPM

SEQ ID NO: 54562 - protein, 374 aa, Desulfobulbus propionicus
  REGION 1..374: note = tr|A0A2G6FD28|A0A2G6FD28_9DELT Queuine tRNA-ribosyltransferase OS=Desulfobulbus propionicus; OX = 894 GN=tgt PE=3 SV=1
MTVSPYTLEATSSECNARRGEVTTLHGTIQTPVFMPVGTQASVKAVTPENLKEVGAQIILGNTYHLFIRPGHELIKTFGGLHGFMNWDGPILTDSGGFQIFSLMELSKITEEGAAFRSHLDGSKLFLSPEDAVHVQEALGSDIMMALDTCIPYPATRNEAAKATALTTRWAKRCKEALSGTGQHLFGIVQGGMYPDMRIEAIQQLTDIGFPGYALGGLSVGEPKELMYEMLAATVSHMPAAHPKYLMGVGTPEDLVEGVYHGIDMFDCVMPTRNARNGMLFTSQGRLVIKNARYQDDPRPVDESCTCYTCRNYSRAYLRHLFQCREILAYQLNSIHNLHHYCTLMEEMRTAIEKDQFMAFRKTFYKQRDMPVPC

SEQ ID NO: 54563 - protein, 374 aa, Desulfobulbus propionicus
  REGION 1..374: note = tr|A0A2G6MD88|A0A2G6MD88_9DELT Queuine tRNA-ribosyltransferase OS=Desulfobulbus propionicus; OX = 894 GN=tgt PE=3 SV=1
MITSPFTQTSGSTQCHARTGNLQTLHGEIQTPVFMPVGTQAAVKALTPNDLDAAGVQILLGNTYHLFIRPGHERIRSFGGLHGFMCWDKPILTDSGGFQIFSLQKLAQITEQGAAFRSHLDGSRLFLSPEDAVHVQEALGSDIMMALDTCIPYPADREAVAQGTALTRRWAARCRAAQTDTGQHLFGIIQGGMFKDMRRQALEQIVEIGFDGYALGGLSVGEPKELMYELLAEVTPAMPQHHARYLMGVGTPEDLVEGVYNGMDMFDCVMPTRNARNGMLFTSKGRLVIKNARYKDDPGPPDASCGCYTCRNFSRAYLRHLFQSREILACQLNSMHNIHYYCSLMAEMRQAIKADRFIAFRQQFYAQRDMPVPY

SEQ ID NO: 54564 - protein, 369 aa, Desulfobulbus sp.
  REGION 1..369: note = tr|A0A0A2HSA1|A0A0A2HSA1_9DELT Queuine tRNA-ribosyltransferase OS=Desulfobulbus sp. Tol-SR; OX = 1536652 GN=tgt PE=3 SV=1
MNPFTLHSRSSECAARRGEVRTRHGIFQTPVFMPVGTQATVKAVTPENLLEMGAQIILGNTYHLFIRPGHQLIERFGGLHGFMNWPGSILTDSGGFQIFSLKDLATITEEGAAFRSHLDGSKLFLSPEGAVQVQESLGSDIMMCLDTCIPYPADRQQARVSTDLTTRWARRCRQAHSRRDQLLFGIVQGGMYADMRQSAAAALVDIGFDGYAIGGLSVGESKTLMYEMTEATVPALPADHPVYLMGVGTPADLVEGVWRGIDMFDCVMPTRNARNGTLFTSHGKVVIKNSRYRDDPAPLDPSCTCYTCRNYSRAYLRHLFVSREILSYHLNTIHNLHYYIDLMDRIRKAIEADCYGRFRKDFYSRLTDQ

SEQ ID NO: 54565 - protein, 371 aa, Desulfobulbus sp.
  REGION 1..371: note = tr|A0A432Q935|A0A432Q935_9DELT Queuine tRNA-ribosyltransferase OS=Desulfobulbus sp. OX=895 GN=tgt; PE = 3 SV=1
MTTASPYRLLHQSTECPARCGSLSTLHGDILTPVFMPVGTLATVKSVTPENLLDLGAQIILGNTYHLFIRPGHELIQTFGGLHGFMNWDKPILTDSGGFQIFSLQDLARITEKGAEFRSHLDGSNLFLSPEIAVQVQEALGSDIMMVLDTCIPYPATLDEAARATALTARWAKRCRQAQSNTGQLLFGILQGGMYPKLRREAAAELQEIGFDGYALGGLSVGEPKEMMHEMLDESVHLLPDSHAKYLMGVGTPEDLVEGVYRGVDMFDCVMPTRNARNGMLFTSQGRVVIKNACNRDDHRPLDEQCSCYTCRKYSRAYLRHLFQCREILAYQLNSIHNLHYYCSLMADMRKAITENRFMAFRKDFYAKRDA

SEQ ID NO: 54566 - protein, 371 aa, Desulfocapsa sulfexigens
  REGION 1..371: note = tr|M1NBM4|M1NBM4_DESSD Queuine tRNA-ribosyltransferase OS=Desulfocapsa sulfexigens (strain DSM 10523 / SB164P1) OX=1167006 GN=tgt PE=3 SV=1
MTASPFTLHSKSTDCAARRGELKTLHGTIQTPIFMPVGTQATVKSVTPENLKEMNAQIILGNTYHLFIRPGQELIRSFGGLHNFMNWDRPILTDSGGFQIFSLKELAKITEEGAAFRSHLDGAKLFLSPEDAIEVQESLGSDIMMCLDTCIPYPATREETIKSTDLTSRWAQRCRKAQNDTGQLLFGIVQGGMHHDLRKAHAEALIDIGFDGYAIGGLSVGEDKAMMQDMTEATIPHLPEDYSRYLMGVGTPEDLVEGVYRGVDMFDCVMPTRNARNGTLFTSTGKVVIKNAKYRDDKRPLDPNCNCYTCRNYSRAYLRHLFQCREILCYHLNTIHNLHYYLHLMAEMREAIEKDSFSTFRNDFYGRLETE

SEQ ID NO: 54567 - protein, 382 aa, unidentified
  source 1..382: note = Desulfocarbo indianensis
  REGION 1..382: note = tr|A0A0K9I655|A0A0K9I655_9DELT Queuine tRNA-ribosyltransferase OS=Desulfocarbo indianensis; OX = 1348163 GN=tgt PE=3 SV=1
MARLEYVQKAVSGRARLGQLKTRKGVVDTPAFMPVGTQATVKSLLPEEVAGLGAQIILGNTYHLLLRPGLKVVEAHGGLHRFMGWPGPILTDSGGFQVFSLGALRTVAEEGVSFRNHLDGGLMHLTPEVAVEAQERLGSDIMMMLDECPPAGAGREYVAAALERDARWAGRAKAARTEKGGALMGIVQGGVYPELRHRSVELLLEHELDGYALGGLSVGEPKEVMMRVIEQTVPQLPRDKPVYLMGVGSPEDLVACAGLGVDMFDCVLPTRMARNGTLFTSTGRLNIRNARYAEDQAPVDETCGCLACRRYSRAYLRHLFMARELLAYRLNTIHNLHQVLGLMAALREAIAQDQYDAFARDFWARRVPEPGEENSSDGGNHA

SEQ ID NO: 54568 - protein, 376 aa, Desulfococcus multivorans
  REGION 1..376: note = tr|S7U6C4|S7U6C4_DESML Queuine tRNA-ribosyltransferase OS=Desulfococcus multivorans DSM 2059 OX=1121405 GN=tgt PE=3 SV=1
MPHPFQVTARCTTTRARTGRLSLVHGTVETPVFMPVGTLGTVKSLTPEDLTAAGAQIILGNTYHLYLRPGCDVIDRFSGLHRFMNWDGPILTDSGGFQVFSLARLTRITEAGASFQSHIDGSRHLLTPEKSIEIQISLDSDVIMCLDQCIAYPAERAAALAALEITTQWAGRCRKTWREQSGEKNALFGIVQGGMYDDLRRMSAEALTAMDFSGYALGGLSVGEPNQMMYDVAEAALPLLPGDRPKYIMGVGTPEDLVELTARGADMFDCVMPTRNARNGQLFTRRGTLNIANSRHRTDTAPVDSECACYTCRNYSRAYLRHLYQSRELLAYRLNTLHNLHYYLDLTARMRSAIAEGRFEAFRKRFYADREPGGAA

SEQ ID NO: 54569 - protein, 384 aa, unidentified
  source 1..384: note = Desulfococcus oleovorans
  REGION 1..384: note = sp|A8ZRX7|TGT_DESOH Queuine tRNA-ribosyltransferase; OS = Desulfococcus oleovorans (strain DSM 6200 / Hxd3); OX = 96561 GN=tgt PE=3 SV=1
MFQFETTTACPDTKARTGKMTTAHGDVATPVFMPVGTLATVKSLSPEDLVACGAQIILGNTYHLYLRPGCDIIDAFSGVHAFMGWNRPLLTDSGGFQVFSLAKLSRITEEGAAFQSHLDGSSHLLTPESVIDIQNRLGSDIQMCLDQCIAFPAEKGAARDAANLTTRWAGRCRNRWQETGGPSRCGLFGIVQGGMFDDLRADSAGRLVDLDFSGYAVGGLSVGEPIETRLAVAEHTLSLLPPDRPRYIMGVGTPAELVELVALGADMFDCVMPTRNARNGKLFTSFGAINIRNACHAKETGPVDPACTCYTCTRFSRAYLRHLFMSRELLAYRLATLHNLFYYINLINDARAAVAAGRFAAFRKAFYAAQQATGPTGKEPCAGS

SEQ ID NO: 54570 - protein, 401 aa, Desulfococcus sp.
  REGION 1..401: note = tr|A0A1W9Q3T9|A0A1W9Q3T9_9DELT Queuine tRNA-ribosyltransferase OS=Desulfococcus sp. 4484_242; OX = 1968523 GN=tgt PE=3 SV=1
MQGGGWFWVLLGETCLVAAVRPPWKHVEFRITHRAGDCRARTGKIRTAHGLFETPVFMPVGTQGSVKAVSPEDMIEAGVAIILANTYHLYLRPGHEVIGRLGGLHGFMNWPRPILTDSGGFQVYSLTPLRNLTDEGVVFQSHIDGSRHFIGPEKAMEIQEALGADIIMAFDECAPYPAEYGYVQRSVELTTSWARRCLERKKRNDQALFGIVQGGMYPDLREISARDLVNMGFDGYALGGLSVGEDRAARERIIRQTVDFLPLEKPVYLMGVGTPEDIVEAVRMGVDMFDCVMPTRNARNGTLFTSSGRINIKNARYAEDDRPVDEQCDCYTCTHYSRAYLRHLFMAREILSYRLNTIHNIAYYSRLMANIRTVVRENAFPEFRATFYGNQENRVVRKEVL

SEQ ID NO: 54571 - protein, 370 aa, unidentified
  source 1..370: note = Desulfocucumis palustris
  REGION 1..370: note = tr|A0A2L2XH69|A0A2L2XH69_9FIRM Queuine tRNA-ribosyltransferase OS=Desulfocucumis palustris; OX = 1898651 GN=tgt PE=3 SV=1
MAIIFKELLKDSKSRARLGELETPHGKVETPIFMPVGTQATVKTMTPEEVKEMGGRLILSNTYHLYLRPGHQLVRKAGGLHRFMNWDGPILTDSGGFQVFSLGPLRKIEEDGVRFRSHIDGSEHYFSPERAVEIQEALGADIIMAFDECAPYPCTREYAVKALERTTRWAGRCKKAHGREEQALFGIIQGGTFRDLREISASQLLELDFPGYGIGGLSVGEPKELMYEMLDYTVPLILEEKPRYLMGVGSPDCLLEGVARGVDMFDCVLPTRIARNGTVFTHTGKLVVRNAAYAEDFTPLDPECDCYTCRNFSRAYVRHLIKANEVLGIRLTTIHNLRFIIRLMENVRRTIKEGTFLEYKEKFLSRFNSD

SEQ ID NO: 54572 - protein, 382 aa, unidentified
  source 1..382: note = Desulfocurvibacter africanus
  REGION 1..382: note = tr|M5PWP2|M5PWP2_DESAF Queuine tRNA-ribosyltransferase OS=Desulfocurvibacter africanus PCS OX=1262666 GN=tgt PE=3 SV=1
MNQPGTFTLRATDGQARRASLVTAHGVIETPVFMPVGTVGSVKAVSPEDLKAVGAQIILGNTYHLYLRPGDELVARMGGLHRFACWDRPILTDSGGFQVFSLSGLRKITEQGVEFQSHLDGSRHFFSPEKVVSIQKNLGSDIMMVLDECVAWGQDRDYTAKSLELTTRWARRSREAYPRGSGGQIMFGIVQGGFHEDLREESLAQLSEIDFEGFAIGGLSVGESPEEMRRQLYHIGPKLPAHKPRYLMGVGTPMDILDGIMAGIDMFDCVLPTRNARNGTLYTSQGKVNIKRAEYREDERPLDSNCNCYTCRTFSRAYLRHLYVTRELLSYRLNTIHNLAFFLDLAAGARKAIEDGRFMAFRQQYADVYGEPGKQDLEAQQS

SEQ ID NO: 54573 - protein, 382 aa, unidentified
  source 1..382: note = Desulfocurvibacter africanus
  REGION 1..382: note = tr|F3Z026|F3Z026_DESAF Queuine tRNA-ribosyltransferase OS=Desulfocurvibacter africanus subsp. africanus str. Walvis Bay OX=690850 GN=tgt PE=3 SV=1
MNQPGTFTLRATDGQARRASLVTAHGVIETPVFMPVGTVGSVKAVSPEDLKAVGAQIILGNTYHLYLRPGDELVARMGGLHRFARWDRPILTDSGGFQVFSLSGLRKITEQGVEFQSHLDGSRHFFSPEKVVSIQKNLGSDIMMVLDECVAWGQDRDYTAKSLELTTRWARRSREAYPRGSGGQIMFGIVQGGFHEDLREESLAQLSEIDFEGFAVGGLSVGESPEEMRRQLYHIGPKLPAHKPRYLMGVGAPMDILDGIMAGIDMFDCVLPTRNARNGTLYTSQGKVNIKRAEYREDERPLDSNCNCYTCRTFSRAYLRHLYVTRELLSYRLNTIHNLAFFLDLAAGARKAIEDGRFMAFRQQYADVYGEPGKQEMEAQQS

SEQ ID NO: 54574 - protein, 374 aa, Desulfofaba hansenii
  REGION 1..374: note = tr|A0A2M9DPR6|A0A2M9DPR6_9DELT Queuine tRNA-ribosyltransferase OS=Desulfofaba hansenii OX=157842; GN = tgt PE=3 SV=1
MFEFKVVAENEGTRARAGVIQTAHGKIETPIFMPVGTLATVKGLAVEELKACGAQIILGNTYHLYLRPGCEVIDLFSGVHRFMNWDRPMLTDSGGFQFFSLAKLSKTTEEGVSFQSHIDGSKHLFTPEKAVEIQDCLGSDIMMCLDRCQAYPADEKTTKEAMEMTTRWAARCKKAWEEKTFRRNALFGIVQGGMYPELRRRSAAQLAELDLPGYAIGGLSVGEPKALMMEMGDLTLPLLPPEKPKYIMGVGTPEDIVELTAMGADMFDCVMPTRNARNGKLFTAGGAINISNARFKKDMGPIEAGCTCYTCRSYTRAYLRHLFMTRELLAYRLNTIHNVHHYMDLVTRMRTAIVAGEFETFRKAFYEDKRRGSQ

SEQ ID NO: 54575 - protein, 369 aa, unidentified
  source 1..369: note = Desulfofarcimen acetoxidans
  REGION 1..369: note = tr|C8W4D8|C8W4D8_DESAS Queuine tRNA-ribosyltransferase OS=Desulfofarcimen acetoxidans (strain ATCC 49208 / DSM 771 / VKM B-1644 / 5575); OX = 485916 GN=tgt PE=3 SV=1
MVVKYKLIKKDNKSHARLGILSTPHGEIETPVFMPVGTQATVKAMTPEEVREAGGRIVLSNTYHLYLRPGHELIRDAGGLHRFMNWDGPILTDSGGFQVFSLGPLRKITEDGVAFRSHIDGSSHFFSPEHAMQVQMALGSDIAMVFDECAPYPCSYEDSLAAKERTTRWALRCKEYHSHPEQSVFGIVQGGMYRDLREQSVDELVKLDFPGYAIGGLSVGEPKPLMYEVLDYTVPLLPEDKPRYLMGVGSPDCLLEGVVRGIDMFDCVLPTRIARNGTVFTRQGKLVVRNAAYARDFVPLEEGCACYTCRHYTRAYIRHLLKSDEILGVRLTTIHNLHFLLNLMEDIREAIREDRLLEYKDHFLKDWQA

SEQ ID NO: 54576 - protein, 370 aa, unidentified
  source 1..370: note = Desulfofundulus australicus
  REGION 1..370: note = tr|A0A1M5AWH2|A0A1M5AWH2_9FIRM Queuine tRNA-ribosyltransferase OS=Desulfofundulus australicus DSM 11792 OX=1121425 GN=tgt PE=3 SV=1
MTVSFSIIQEDNRTMARAGVLHTLRGDVETPVFMPVGTQATVKTMTPREVEELGARLILSNTYHLYLRPGADLIREAGGLHRFMGWNGPILTDSGGFQVFSLASLCRIEDNGVWFRSHIDGSEHFFSPEKAVAVQEALGSDIAMAFDQCAPYPCSYEEAREATERTSRWALRCREASRREDQALFGIIQGGVHRDLREKSVKDLLALDFPGYGIGGLSVGEPKEVMYEVLDYTVPLLPPHKPRYLMGVGSPDCLLEGVARGVDMFDCVLPTRIARNGTVFTRDGKLVVRNAAYARDFRPLDPECGCYACRHFTRAYIRHLLKANEVLGIRLTTLHNLHFILELMRNIRRAILEGSFLEFKEAFLARWNKN

SEQ ID NO: 54577 - protein, 372 aa, unidentified
  source 1..372: note = Desulfofundulus kuznetsovii
  REGION 1..372: note = tr|A0A101HZQ3|A0A101HZQ3_9FIRM Queuine tRNA-ribosyltransferase OS=Desulfofundulus kuznetsovii; OX = 58135 GN=tgt PE=3 SV=1
MSVNFKVIGQDSKSRARLGILETAHGLLETPAFMPVGTQATVKTLAPDEIIAAGGKLVLCNTYHLYLRPGQEIIKKAGGLHRFMNWDGPILTDSGGFQVFSLAALCRVGDEGVSFRSHIDGSEHFFSPETAMNVQQALGSDIAMAFDECVAYPCSFEQAKAATERTSKWAKRCLESHRKEDQAVFCIVQGSIYPELRERSAEELVRIGFPGYGIGGLSVGEPKEIMYDILDQCVPLIPWDKPHYLMGVGSPDCLLEGVERGIDMFDCVLPTRMARNGTVFTSKGKLVVRNADCADDHNPLEPGCRCYTCQRFSRAYIRHLIKAGEVLGIRLTTIHNLHFILNLMSEIRASITNGCFKEYKINFLHQYYSSLN

SEQ ID NO: 54578 - protein, 370 aa, unidentified
  source 1..370: note = Desulfofundulus salinum
  REGION 1..370: note = tr|A0A494X341|A0A494X341_9FIRM Queuine tRNA-ribosyltransferase OS=Desulfofundulus salinum; OX = 2419843 GN=tgt PE=3 SV=1
MTVSFSIIKEDARTGARAGVLHTLRGDVETPVFMPVGTQATVKTMTPQEVWDLGGRLILSNTYHLYLRPGPDLIQEAGGLHRFMGWDGPILTDSGGFQVFSLAPLRRIEEDGVWFRSHIDGSEHFFSPEKAVAVQEALGSDIAMAFDQCAPYPCTYEEAREAMERTSRWALRCKEARRREDQALFGIVQGGVHRDLREKSVNDLVALDFPGYGIGGLSVGEPKDIMYQVLDYTVPLLPREKPRYLMGVGSPDCLLEGVARGVDMFDCVLPTRIARNGTVFTREGKLVVRNAEYARDFRPLDPDCNCYACRHFTRAYIRHLIKANEVLGIRLTTIHNLHFVLELMRSIRRAILEGNFYEYKEAFLARWNKN

SEQ ID NO: 54579 - protein, 370 aa, unidentified
  source 1..370: note = Desulfofundulus thermosubterraneus
  REGION 1..370: note = tr|A0A1M6H7G1|A0A1M6H7G1_9FIRM Queuine tRNA-ribosyltransferase OS=Desulfofundulus thermosubterraneus DSM 16057 OX=1121432 GN=tgt PE=3 SV=1
MTVSFSIIKEDARTGARAGVLHTLRGDVETPVFMPVGTQATVKTMTPREVWDLGGRLILSNTYHLYLRPGANLIREAGGLHRFMGWTGPILTDSGGFQVFSLASLRRIEEEGVWFRSHIDGSEHFFSPEKAMAVQEALGSDIAMAFDQCAPYPCTYEEAREAMERTSRWALRCKEARRREDQALFGIVQGGVHRDLREKSAKDLVELDFPGYGIGGLSVGEPKDIMYQVLDYTVPLLPREKPRYLMGVGSPDCLLEGVARGVDMFDCVLPTRIARNGTVFTREGKLVVRNAEYARDFRPLDPECNCYTCRHFTRAYIRHLIKANEVLGIRLTTVHNLHFVFELMRNIRRAILEGNFLEYKVAFLAHWNKN

SEQ ID NO: 54580 - protein, 377 aa, Desulfofustis glycolicus
  REGION 1..377: note = tr|A0A1M5WEU4|A0A1M5WEU4_9DELT Queuine tRNA-ribosyltransferase OS=Desulfofustis glycolicus DSM 9705 OX=1121409 GN=tgt PE=3 SV=1
MQKTMERPPSPLTIGHRSSQCRARTAELATRHGVIQTPVFMPVGTQATVKAITPENLQEIGAQIILGNTYHLFVRPGHRLIERCGGLHRFMNWDRAILTDSGGFQIFSLKKLSRITEEGAAFRSHLDGSRLFLSPEDAIEVQEALGSDIMMCLDTCIPYPADRTETSGATALTGRWAWRCREARTKHDHLLFGIVQGGMYPDLRRESARTMIDIGFDGYAVGGLSVGEEKEQMYDMTEVTADCLPDDYPRYLMGVGTPEDLVEGVWRGIDMFDCVMPTRNARNGTLFTSTGRVVLKNSRYRDDQLPIDESCDCYTCRNYSRAYLRHLFVSREILSYQLNTIHNIHYYINLMRQIREAIAGDCLASFRNDFYSGLAAE

SEQ ID NO: 54581 - protein, 247 aa, Desulfofustis sp.
  REGION 1..247: note = tr|A0A353XBV2|A0A353XBV2_9DELT Queuine tRNA-ribosyltransferase (Fragment) OS=Desulfofustis sp.; OX = 2053546 GN=tgt PE=3 SV=1
LFLGPEEAVTVQEALGSDVIMCLDTCIGFPATRDEVEAATALTTRWAARCKTARTRAENLLFGIVQGGMFGDLRAQSAESLVEIGFDGYAIGGLSVGEPTELMYEMTEASVAHLPTTHPVYLMGVGTPADLIEGIWRGVDMFDCVMPTRNARNGTLFTSFGKVVIKNARYRDDPRPIDEACDCPVCRHYSRAYLRHLFSCRELLGYQLCTIHNLHYYLNLMAGARRAIEEDRYGAFRRDFYSGMAPQ

SEQ ID NO: 54582 - protein, 370 aa, Desulfoglaeba alkanexedens
  REGION 1..370: note = tr|A0A4P8KZP8|A0A4P8KZP8_9DELT Queuine tRNA-ribosyltransferase OS=Desulfoglaeba alkanexedens ALDC; OX = 980445 GN=tgt PE=3 SV=1
MLEFRVVARDGRARRGRLVTARGVTVETPVFMPVGTQATVKSLSPDELESLGASIILGNTYHLYLRPGAERVARLGGLHRFMAWHRAILTDSGGFQVFSLARTRAVEEEGVRFQSHIDGSSHFIRPETAMEIQRLLGSDIAMCFDECTPYPVTRDYAEESMRRTVRWAERCRRSRTGDHQAVFGIVQGSVFADLRKACLEALQEIGFEGYAVGSLSVGEPKETMLSVLEELAPCLPEERPRYLMGVGTPEDLVEGVRLGIDMFDCVMPTRNARNGALFTSSGNLQIKNSRFADDSEPIERGCTCYTCRRFSRAYLRHLFLARELLAYRLNTLHNLHYYLKLMADIRNAVEAGSFESWRKDFYERRSGGSS

SEQ ID NO: 54583 - protein, 371 aa, Desulfohalobium retbaense
  REGION 1..371: note = tr|C8X0J3|C8X0J3_DESRD Queuine tRNA-ribosyltransferase OS=Desulfohalobium retbaense (strain ATCC 49708 / DSM 5692 / JCM 16813 / HR100); OX = 485915 GN=tgt PE=3 SV=1
MTHIGSFQIHHTDGPARSGELVTAHGVVPTPIFMPVGTQGTVKSLSPDDLENLGARIILGNTYHLYLRPGDELVARRGGLHRFANWPHPILTDSGGFQVFSLAGLRELSEEGVTFRSHIDGSKHFFSPEKVIDIQRNLGSDIMMVLDECVPYGADHAYTEKSLQLTTRWAKRCREAYPRGAGDQLVFGIVQGGFFEDLRRQSAEQICALDCEGFAIGGLSVGESKQEMHDILQCTAPLLPSAKPRYLMGVGTPLDILNGIAAGVDMFDCVLPTRNARNGTLFTSQGKVNIKRAEYQEDDSRLDPACGCYTCRTFSKAYLRHLYTSRELLSYRLNTIHNLTFFLDLVCGAREAIAAGTFASYKKGFEAVYET

SEQ ID NO: 54584 - protein, 375 aa, Desulfoluna butyratoxydans
  REGION 1..375: note = tr|A0A4U8YQE3|A0A4U8YQE3_9DELT Queuine tRNA-ribosyltransferase OS=Desulfoluna butyratoxydans; OX = 231438 GN=tgt PE=3 SV=1
MRLTYTKEAQSTECRARAATIKTRRGEIKTPIFMPVGTVGSVKAVSVEDLEEAGAQIILGNTYHLYLRPGTEVLDVFGGLHDFMKWKHPILTDSGGFQFFSLAKLTKRTEEGVSFQSHIDGSRHLFTPEKSIEVQNHIDSDIMMCLDECTPYPSDHRATKESMELTTRWAQRCYDFWQQETNLRNNAFGIVQGGMYKDLRTASVEQICDIDFPGYSIGGLSVGEPKDLMMEMGEHTLAQMPDLKPRYIMGVGTPSDIVELVSMGADMFDCVMPSRNARNGKLFTSEGALNIANQRYQKDEKPLDPVCTCYTCRNYSRAYLRHLYKSKELLAYRLNTIHNLHYYMNLVGEIRQAILEDRFMAWRKDFYAAMEGGIQ

SEQ ID NO: 54585 - protein, 375 aa, Desulfoluna spongiiphila
  REGION 1..375: note = tr|A0A1G5GSI4|A0A1G5GSI4_9DELT Queuine tRNA-ribosyltransferase OS=Desulfoluna spongiiphila; OX = 419481 GN=tgt PE=3 SV=1
MRLTYTKEAQSTECRARAATIKTRRGEIKTPIFMPVGTVGSVKAVSVEDLEEAGAQIILGNTYHLYLRPGTEVLDVFGGLHDFMKWKHPILTDSGGFQFFSLAKLTKRTEEGVSFQSHIDGSRHVFTPERSIEVQNHIDSDIMMCLDECTPYPSDHRATKESMELTTRWAQRCFDFWQQETDLRNNAFGIVQGGMYKDLRSASVEQICGIDFPGYSIGGLSVGEPKELMMEMGEHTLALMPEEKPRYIMGVGTPSDIVELVMMGADMFDCVMPSRNARNGKLFTSEGALNIANQRYRKDEKPLDPVCTCYTCRNYSRAYLRHLYKSKELLAYRLNTIHNLHYYMNLVGEIRQAIMEDRFMAWRKGFYAAMEGGIQ

SEQ ID NO: 54586 - protein, 406 aa, unidentified
  source 1..406: note = Desulfomicrobiaceae bacterium
  REGION 1..406: note = tr|A0A3D1NG11|A0A3D1NG11_9DELT Queuine tRNA-ribosyltransferase OS=Desulfomicrobiaceae bacterium; OX = 2053547 GN=tgt PE=3 SV=1
MGRSQPLSRAFRPRGLLGALAPLHLLPACRHLPAQRSFPVSCFSLITTDGQARRGELTTAHGQIQTPIFMPVGTRGTVKAVCSQDLRDVGAQIILGNTYHLYLRPGDALIARRGGLHRFMSWERPILTDSGGFQVFSLAGLRRISEEGVLFASHIDGSRHLFTPEKVIEIQTNLGSDIMMVLDECVPYGADREYTQRSLALTTRWAKRCREAHPAESPQLLFGIVQGGFFLDLRRESLMQITDIPFDGYALGGLSVGESKEEMLEILEAIGPELPADKPRYLMGVGTPLDLVRGVASGIDMFDCVLPTRNARNGTLFTSLGRITIKRAEYAEDDSPLDPACSCFTCRTFSRAYLRHLYVTQELLAYRLNTIHNLAYFLGLMERVRTAIETGTFAQLQAEIEALYDR

SEQ ID NO: 54587 - protein, 370 aa, Desulfomicrobium apsheronum
  REGION 1..370: note = tr|A0A1I3QEC6|A0A1I3QEC6_9DELT Queuine tRNA-ribosyltransferase OS=Desulfomicrobium apsheronum; OX = 52560 GN=tgt PE=3 SV=1
MHIGKFSIHNTDGKARAGELHTAHGVIPTPIFMPVGTQGTVKAVCPQDLKDLGARIILGNTYHLYLRPNDEMIARRGGLHKFMNWDRPILTDSGGFQVFSLSGLRKLSEDGVTFSSHIDGSKHVFTPEKVVSIQKNLGSDIMMVLDECVPYGADHEYTKKSLALTTRWAARCRAAYPQGSGDQLLFGIGQGGFFKDLREESIRQLLDIPFDGYALGGLSVGESKAEMMDILYHSAPLLPADKPRYLMGVGTPLDIVRGIDAGIDMFDCVMPTRNARNGTLFTSQGKVNIKRAQYTEDDSPLDPECSCYTCRNFSKAYLRHLYQAQEILSYRLNTIHNLAFFLTVVTGARKAIEEGTFQAYKARFENIYDT

SEQ ID NO: 54588 - protein, 370 aa, Desulfomicrobium baculatum
  REGION 1..370: note = tr|C7LX30|C7LX30_DESBD Queuine tRNA-ribosyltransferase OS=Desulfomicrobium baculatum (strain DSM 4028 / VKM B-1378) OX=525897 GN=tgt PE=3 SV=1
MHIGKFTLHSTDGKARTGELHTAHGVIPTPIFMPVGTQGTVKAVCPQDLKDLGARIILGNTYHLCMRPGDEMIARRGGLHKFMNWDRPILTDSGGFQVFSLSGLRKLSEDGVAFSSHIDGSKHFFSPEKAISIQKNLGSDIMMVLDECVPYGADYEYTKKSLGLTTRWARRCREAYPQGSGDQLLFGIGQGGFFKDLREESIRQLIDIPFDGYALGGLSVGESKPEMLDILYHSAPFLPADKPRYLMGVGTPLDIVRGIDAGIDMFDCVMPTRNARNGTLFTSQGKVNIKRAQYTEDDSALDPECSCYTCRNFSKAYLRHLYQAQEILSYRLNTIHNLAFFLTVVTDARKAIEEGTFQAYKARFEGIYDT

SEQ ID NO: 54589 - protein, 370 aa, Desulfomicrobium norvegicum
  REGION 1..370: note = tr|A0A1I4G6U3|A0A1I4G6U3_DESNO Queuine tRNA-ribosyltransferase OS=Desulfomicrobium norvegicum (strain DSM 1741 / NCIMB 8310) OX=52561 GN=tgt PE=3 SV=1
MHIGKFSIHNTDGKARAGELHTAHGVIPTPIFMPVGTQGTVKAVCPQDLKDLGARIILGNTYHLYLRPNDEMIARRGGLHKFMNWDRPILTDSGGFQVFSLSGLRKLSEDGVTFSSHIDGSKHVFTPEKVVSIQKNLGSDIMMVLDECVPYGADHEYTKKSLGLTTRWAARCRAAYPQGSGDQLLFGIGQGGFFKDLREESIRQLLDIPFDGYALGGLSVGESKAEMMDILYHSAPLLPADKPRYLMGVGTPLDIVRGIDAGIDMFDCVMPTRNARNGTLFTSQGKVNIKRAQYTEDDSPLDPECSCYTCRNFSKAYLRHLYQAQEILSYRLNTIHNLAFFLTVVTDARKAIEEGTFQAYKARFENIYDT

SEQ ID NO: 54590 - protein, 370 aa, Desulfomicrobium orale
  REGION 1..370: note = tr|A0A0X8JQI1|A0A0X8JQI1_9DELT Queuine tRNA-ribosyltransferase OS=Desulfomicrobium orale DSM 12838 OX=888061 GN=tgt PE=3 SV=1
MNIGTFTIQHTDGAARAGELLTAHGVIPTPIFMPVGTQGSVKAVCPQDLKDLGARIILGNTYHLYLRPGDEMIARRGGLHRFMHWDRPILTDSGGFQVFSLSALRKLSEDGVAFSSHIDGSKHFFTPEKAISIQRNLGSDIMMVLDECVPYGADYQYTRKSLERTTRWAARCRAAYPQGGGEQLLFGIGQGGFFKDLREESIRQLRDIPFDGYALGGLSVGESKAEMMDILYHSAPLLPVEKARYLMGVGTPLDIVRGIDAGIDMFDCVLPTRNARNGTLFTSEGKLNIKRAEFAEDDSPLDPQCSCYTCRNFSRAYLRHLYQAREILSYRLNTIHNLSYFLSVVTAARQAIQDGAFQSFKSQMESIYDT

SEQ ID NO: 54591 - protein, 370 aa, Desulfomicrobium sp.
  REGION 1..370: note = tr|A0A3D5BQN8|A0A3D5BQN8_9DELT Queuine tRNA-ribosyltransferase OS=Desulfomicrobium sp. OX=52017; GN = tgt PE=3 SV=1
MKPGTFTIHHTDGASRAGELHTAHGVIPTPIFMPVGTQGTVKAVCPEDLKNLGARIILGNTYHLCMRPGDEMIARRGGLHKFMNWDRPILTDSGGFQVFSLSGLRKLTEDGVAFSSHLDGSKHFFSPEKAISIQRNLGSDIMMVLDECVPYGADYDYTKKSLGLTTRWAERCRKAYPQGSGDQLLFGIGQGGFFRDLREESIRQLIDIPFDGYALGGLSVGESKPEMMDILYHSTPLLPADKPRYLMGVGTPLDIIRGIDAGIDMFDCVLPTRNARNGTLFTSLGKVNIKRAEYTEDDGPLDPECSCYTCRNFSRAYLRHLYQAQEILSYRLNTIHNLANFLQVVTGARKAIAEGTFQAYKARFENIYDT

SEQ ID NO: 54592 - protein, 372 aa, Desulfomonile tiedjei
  REGION 1..372: note = tr|I4CD45|I4CD45_DESTA Queuine tRNA-ribosyltransferase OS=Desulfomonile tiedjei (strain ATCC 49306 / DSM 6799 / DCB-1) OX=706587 GN=tgt PE=3 SV=1
MSFAFEVLHRDAGSAARLGRMTIRGIEVPTPAFMPVGTRGVVKTLSSQEIKDFGYKIILSNAYHLYLRPGHKLVEQLGGLHRFMNWDGLILTDSGGFQVFSLARLRKLTDEGVLFQSHIDGSSHLFTPELCIEVQEALGSDIIMCLDDVRGYPATREEALEALLRTTRWAALCLGAKKRVDPALFGIVQGAMYPDLRRLSAESLADLNLDGYAVGGLSVGEPRELMVEMFEVTLPLIFEAVPRYVMGVGKPQDIIDGVLRGADLFDCVLPTRNARNGTLYTSHGSVNIRNSRYRDDPRPIDPQCQCLLCSSYSRAYLRHLFQEREIFGLRLATLHNLSFYYHMMENIRIAITQNRLHSLARDFSVQMEETDD

SEQ ID NO: 54593 - protein, 374 aa, Desulfonatronospira thiodismutans
  REGION 1..374: note = tr|D6SM24|D6SM24_9DELT Queuine tRNA-ribosyltransferase OS=Desulfonatronospira thiodismutans ASO3-1 OX=555779 GN=tgt PE=3 SV=1
MNSIGRFRLEHTDGQARCGCLQTLHGEVPTPVFMPVGTQGSVKSLCPMDLDNMGAGMILGNTYHLYLRPGDELLAQMGGLHRFMNWKGPILTDSGGFQVFSLSDLRKITPEGVEFKSHLDGSRHFFTPEKVIRIQKNIGSDIMMVLDECVPYGADLEYTRNSMHRTVQWAWKSRDFYSGETGKQLMFAIVQGGFFMDLRRESAARTCEIPMDGYAIGGVSVGETKQEMLDTVYFTAPLLPRDRPRYLMGVGKPLDILEGINAGLDMFDCVLPTRNARNGTLFTSSGKVNIKQARYRNDETALDPGCDCYTCMNFSRAYLRHLYMAGELLSFRLNTIHNLRFFINLARKARSAIQEKRFAQLISRYRNVEKEQEG

SEQ ID NO: 54594 - protein, 369 aa, Desulfonatronovibrio sp.
  REGION 1..369: note = tr|A0A424XWW1|A0A424XWW1_9DELT Queuine tRNA-ribosyltransferase OS=Desulfonatronovibrio sp. MSAO_Bac4 OX=2293858 GN=tgt PE=3 SV=1
MNNSSGQFNLEYEDGQARAGQLTTLHGVVKTPVFMPVGTQGTVKSLCPQDLNAIGAQIILSNTYHLYLRPGDELLAQFGGLHKFMNWDKPILTDSGGFQVFSLSDLRKITSDGVEFASHIDGSRHFFTPEKAIAIQNNIGSSIMMVLDECVPYGADFGYTSRSLRLTTDWARRCRDFYPPGKGPQLLFGIVQGGFHHELRSESARQITDIPFDGYALGGLSVGESKQEMLDIMYYSAPLLPVRKPRYLMGVGKPLDILEGINAGIDMFDCVLPTRNARNGTLYTSAGQVNIKRAEYKTDSTALDPECDCYTCTNFSRSYLRHLYMAKELLAYRLNSIHNLRFFVRLTSMARQAIKEGNFSSLLAKFRDL

SEQ ID NO: 54595 - protein, 372 aa, Desulfonatronum sp.
  REGION 1..372: note = tr|A0A2T5CAN2|A0A2T5CAN2_9DELT Queuine tRNA-ribosyltransferase OS=Desulfonatronum sp. SC1; OX = 2109626 GN=tgt PE=3 SV=1
MTKTGDFHILATDGQARTATLATAHGTIRTPVFMPVGTVGCVKALSPDDLLDLKAQIILGNTYHLYLLPGDDLVARRGGLHAFSGWKGPILTDSGGFQVFSLQSLRKISENGVEFRSHRDGSKHFFSPEKVVSIQRNLGSDIMMVLDECVPYGADKAYTAKSLGLTTRWAARCRQAYPQDSGSQLQFGIVQGGFFPDLRTESARQICDLPFDGFAIGGLSVGESKPLMLEIMRHTAPLLPSDKPRYLMGVGTPMDILDGIEAGIDMFDCVLPSRNARNGTLYTSLGKVNIKRAEYKEDDGPLDPNCGCYACTRFSRAYLRHLYMARELLAYRLNTIHNLHYFLTLTHGAAQAILEGNFATFKAAVEAVHAHV

SEQ ID NO: 54596 - protein, 373 aa, Desulfonatronum thiosulfatophilum
  REGION 1..373: note = tr|A0A1G6BP64|A0A1G6BP64_9DELT Queuine tRNA-ribosyltransferase OS=Desulfonatronum thiosulfatophilum OX=617002 GN=tgt PE=3 SV=1
MTNTGDFHILGTDGQARCAELTTAHGTIRTPVFMPVGTVGCVKALSPDDLTALKAQIILGNTYHLYILPGDELVARRGGLHTFSGWDGPILTDSGGFQVFSLQGLRKISEDGVEFRSHRDGSKHFFSPEKVVSIQRNLGSDIMMVLDECVPYGADKEYTAQSLGLTTRWAARCRAAYPQGSGNQLLFGIVQGGFFQDLRSESARQICDLPFDGYAIGGLSVGESKPLMLDIMRHTAPLLPADKPRYLMGVGTPMDILDGIEAGIDMFDCVLPTRNARNGTLYTSLGKVNIKRAEYKEDDRPLDPNCDCYACTRFSRAYLRHLYTARELLAYRLNTIHNLHYFLTLTHGAAQAILQGRFATYKAEVQAVHAHAE

SEQ ID NO: 54597 - protein, 374 aa, Desulfonauticus sp.
  REGION 1..374: note = tr|A0A101DJ30|A0A101DJ30_9DELT Queuine tRNA-ribosyltransferase OS=Desulfonauticus sp. 38_4375; OX = 1635258 GN=tgt PE=3 SV=1
MHKEKLAIGEFKLEKQEGQARAGLLQTAHGLIKTPVFMPVGTQASVKSLSPEDLKEAGAQIILGNTYHLYLRPGDELIRDLGGLHEFMNWPYPILTDSGGFQVFSLAKLRKITQEGVEFSSHLDGSKHFFSPEKAIEIQKNLGSDIMMVLDECVPYGADYDYTRASVGLTTYWARRCREYYPEGKQLLFGIVQGGFFKDLRVESARQITAIPFSGYAIGGLSVGESKEEMLKFMYFTAPLLPEHKPRYLMGVGKPLDIVEGIRAGIDMFDCVLPTRNARNGTLYTSQGKINIKREEYKRDLRPLDSNCSCYTCKNFSRAYLRHLYVSRELLSYRLNTIHNVHYFVNLAKKARESILRGEFASFYGQIKELYLDD

SEQ ID NO: 54598 - protein, 365 aa, Desulfonauticus submarinus
  REGION 1..365: note = tr|A0A1H0AFP2|A0A1H0AFP2_9DELT Queuine tRNA-ribosyltransferase OS=Desulfonauticus submarinus; OX = 206665 GN=tgt PE=3 SV=1
MSFKLVAKDKQARAGVLRTAHGEINTPIFMPVGTQASVKSLSPNDLIEAKAQIILGNTYHLYLRPGDELIRDLGGLHNFMSWPKPILTDSGGFQVFSLAKLRKLTRDGVEFSSHIDGSKHFFTPEKVMQIQKNLGSDIMMVLDECVPYGADYDYTRSSVGITTYWAKRCREFYPSGKQLLFGIVQGGFFKDLREESARQITNIPFDGYAIGGLSVGEPKAQMIEFLYFTAPLLPEDKPRYLMGVGKPLDILEGIRAGVDMFDCVLPTRNARNGTLYTSKGKINIKREEYKRDLSPLDPECNCYTCRNFSKAYLRHLYTSRELLAYRLNTLHNITYFLNLVNQARASIFNGTFENFYNHIKSIYTC

SEQ ID NO: 54599 - protein, 373 aa, Desulfonema ishimotonii
  REGION 1..373: note = tr|A0A401G3Q1|A0A401G3Q1_9DELT Queuine tRNA-ribosyltransferase OS=Desulfonema ishimotonii; OX = 45657 GN=tgt PE=3 SV=1
MSHPFNVTAQSQTTRARAGELKLVHGTIKTPVFMPVGTLASVKSLSPEELKEAGAQIILGNTYHLYLRPGCEVIDLFSGLHRFMNWDRPILTDSGGFQVFSLAKLTKITEEGAAFQSHIDGSKHLLTPEKSVEVQISLNSDIMMCLDQCIEYPAEKEAVRAALEITTRWAKRCKSTWTEKTGGKNALFGIVQGGMFEDLRRQSAEELGEMDFPGYALGGLSVGEPNQMMYDVAEYALPLLPDNKPKYIMGVGTPEDLVELVARGADMFDCVMPSRNARNGQLFTRNGAINISNARFRTDTGPADPECDCYTCRNYSRAYLRHLYMNRELLAYRLNTLHNIHFYIRLMERMRAAITDGEFDAFRRNFHAHWQAR

SEQ ID NO: 54600 - protein, 368 aa, Desulfonispora thiosulfatigenes
  REGION 1..368: note = tr|A0A1W1VRJ6|A0A1W1VRJ6_DESTI Queuine tRNA-ribosyltransferase OS=Desulfonispora thiosulfatigenes DSM 11270 OX=656914 GN=tgt PE=3 SV=1
MFEFELIKECKDTKARVGLLKTPHGDIETPIFMPVGTQATVKTLSPCELKSINSQIILSNTYHLYLRPGHKLVKEAGGLHKFMNWDRPILTDSGGFQVFSLGDLRTITEEGVEFRSHLDGSKHFLSPEKVMEIENDLGADIIMAFDECAPYPCTHEYAKNSLERTTRWAKRCKDSHQRNDQALFGIIQGGTFKDLRIQSANELIPMDFPGYAIGGLSVGEPNELMYEVLDYLTPIMPKHKPRYLMGVGAPDNIVEGIMRGVDMFDCVLPTRIARNGTAMTRTGKLVVRNAKYKADFTPIDEECTCYACKNFTRAYIRHLIKTDEILGLRLISIHNLHFLLELARESRNAILEDRFIEFRKEFYKKYKI

SEQ ID NO: 54601 - protein, 373 aa, Desulfopila aestuarii
  REGION 1..373: note = tr|A0A1M7Y7C8|A0A1M7Y7C8_9DELT Queuine tRNA-ribosyltransferase OS=Desulfopila aestuarii DSM 18488; OX = 1121416 GN=tgt PE=3 SV=1
MRETTTPYTLHNRSSECRARRGHVTTRQGTIQTPVFMPVGTQATVKAVTPENLYEMNAEIILGNTYHLFIRPGHELIERFGGLHKFMNWKGSILTDSGGFQIFSLKDLAKITEEGASFRSHVDGAKLFLSPEIAVQVQQSLGSDIMMCLDTCIPYPATKDEVIKSTALTTRWAQRCREAHTSREQLLFGIVQGGMHEELRKMHIEQLMEIGFDGYAIGGLSVGEEPQMMYDIAEATTPHMPENYARYLMGVGTPQDLVEGVWRGIDMFDCVMPTRNARNGMLFTSNGRLVIKNSRYRDDMRPLDENCSCYTCRNYSRAYLRHLYASREILSYHLNTIHNLHYYLTLMADIRKAIEEDNFAAFRNDFYGRLQGE

SEQ ID NO: 54602 - protein, 372 aa, Desulfopila sp.
  REGION 1..372: note = tr|A0A4U1A4I8|A0A4U1A4I8_9DELT Queuine tRNA-ribosyltransferase OS=Desulfopila sp. IMCC35005; OX = 2569541 GN=tgt PE=3 SV=1
MQNNTPYTLHCSSSECAARRGQVTTRQGTIQTPVFMPVGTQATVKAVTPENLYEMNAEIILGNTYHLFIRPGHKLIERFGGLHNFMNWKGSILTDSGGFQIFSLKDLATITEEGAAFRSHLDGSKLFLSPEDAVQVQQSLGSDIMMCLDTCIPYPATKDEVINSTNLTTRWAKRCRDAHTKREQLLFGIIQGGMHEELRKMHAEQLIDIGFDGYAIGGLSVGEEPQVMYDMTEATTPHMPKEYARYLMGVGTPQDLIEGVWRGIDMFDCVMPTRNARNGYLFTSTGRVVIKNSRYRDDMLPLDENCTCYTCRNYSRAYLRHLFVSREILSYHLNTIHNLHYYLNLMAGVRKSIEEDNFAQFRKDFYGRLECK

SEQ ID NO: 54603 - protein, 372 aa, Desulfopila sp.
  REGION 1..372: note = tr|A0A4U1AFG0|A0A4U1AFG0_9DELT Queuine tRNA-ribosyltransferase OS=Desulfopila sp. IMCC35006; OX = 2569542 GN=tgt PE=3 SV=1
MHTTSPFTLHCNSSECAARRGEVRTRQGVFQTPVFMPVGTQGTVKAVTPENLLEMKAQIILGNTYHLFIRPGHELIASFGGLHNFMNWKGSILTDSGGFQIFSLKELATITEEGAAFRSHLDGSKLFLSPEDAIHVQQSLGSDIMMCLDTCIPFPASRDEAIKATDLTSRWARRCREAHSKREQLLFGIVQGGMYPDLRKDHAAALIDIGFDGYAIGGLSVGEEKNLMHEMTEATVPCLPKDYPVYLMGVGTPADLVEGVWRGIDMFDCVMPTRNARNGSLFTSTGKLSIKNSRFRDDHKPLDEECSCYTCRNYSRAYLRHLFQAREILSYHLNTIHNLHYYLHLMADIRQAIETDSFGRFRKDFYSKLEPE

SEQ ID NO: 54604 - protein, 373 aa, unidentified
  source 1..373: note = Desulfoplanes formicivorans
  REGION 1..373: note = tr|A0A194AEQ4|A0A194AEQ4_9DELT Queuine tRNA-ribosyltransferase OS=Desulfoplanes formicivorans; OX = 1592317 GN=tgt PE=3 SV=1
MNAHASLFTCQATDGSARAGTLITPHGVIQTPIFMPVGTLGTVKSLDPHDLYAMGAQIILGNTYHLYLRPGDEMIARRGGLHKFMRWDKPILTDSGGFQVFSLAGLRTITDDGVEFSSHIDGSKHFFSPEKVIAIQTNLGSDIMMVLDECVPYGADHDYTAKSLKKTTAWAKRCRAAYTRGETGNQLMFGIVQGGFFKDLRTQSAREITAIPFEGYAIGGLSVGESKREMLDMLEHTTPLLPSEKPRYLMGVGAPMDLVNGIRNGVDMFDCVLPTRNARNGTLFTSLGKVNIKRAQYREDDSPLDPHCSCYTCRNFSKAYLRHLYVSRELLSYRLNSIHNLHFLLDLVKKARKAIFEGRYEMFYKHWQTIYPE

SEQ ID NO: 54605 - protein, 372 aa, Desulforhopalus singaporensis
  REGION 1..372: note = tr|A0A1H0QC28|A0A1H0QC28_9DELT Queuine tRNA-ribosyltransferase OS=Desulforhopalus singaporensis; OX = 91360 GN=tgt PE=3 SV=1
MSQKSPFTLHCLSTECDARRGEVRTRQGVFQTPVFMPVGTQGTVKAVTPENLMEMNAQIILGNTYHLFIRPGHRLIESFGGLHRFMNWKGSILTDSGGFQIFSLKELATITEEGAAFRSHLDGSKLFLSPEDAVEVQQSLGSDIMMCLDTCIPFPSTRDETIRATELTTRWARRCRSAHSRREQLLFGIVQGGMYPELRKEHAEALIDIGFDGYAIGGLSVGEKPQIMYDMTRETVASLPADYPRYLMGVGTPEDLVEGVWRGVDMFDCVMPTRNARNGSLFTSKGKISIKNARFRDDHSPVDEECGCYTCRNYSRAYLRHLFQAREILSYHLNTIHNLHFYLTLMANIRKAIEKDNFARFRQDFYSKLEYE

SEQ ID NO: 54606 - protein, 372 aa, Desulforhopalus sp.
  REGION 1..372: note = tr|A0A4U0ZRS6|A0A4U0ZRS6_9DELT Queuine tRNA-ribosyltransferase OS=Desulforhopalus sp. IMCC35007; OX = 2569543 GN=tgt PE=3 SV=1
MTNTSPFTLHKQSSECAARRGEVKTRQGIIQTPVFMPVGTQGTVKAVTPENLQEMNAQIILGNTYHLFIRPGHELIESFGGLHKFMNWKGSILTDSGGFQIFSLKELATITEEGAAFKSHLDGSKLFLSPEDAVHVQQSLGSDIMMCLDTCIPFPATKDETIKATDLTTRWANRCRMAHTKRDQLLFGIVQGGMYPELRREHAAALIDIGFDGYAIGGLSVGEDKHLMYDMTEETVPALPKDYPVYLMGVGTPADLVEGVYRGVDMFDCVMPTRNARNGSLFTEKGKISIKNAQYRDDHGPIDENCTCYTCRNYSRAYLRHLFHAREILSSHLNTIHNLHFYLNLMAGIRKAIEEDNFARFRKDFYSKLENE

SEQ ID NO: 54607 - protein, 372 aa, unidentified; identical to SEQ ID NO: 53240
  source 1..372: note = Desulforudis audaxviator
  REGION 1..372: note = sp|B1I4K8|TGT_DESAP Queuine tRNA-ribosyltransferase; OS = Desulforudis audaxviator (strain MP104C) OX=477974; GN = tgt PE=3 SV=1

SEQ ID NO: 54608 - protein, 374 aa, Desulfosoma caldarium
  REGION 1..374: note = tr|A0A3N1UY70|A0A3N1UY70_9DELT Queuine tRNA-ribosyltransferase OS=Desulfosoma caldarium OX=610254; GN = tgt PE=3 SV=1
MNPFEILAVDSKSRARRGRLLTSHGPVETPVFMPVGTQATIKALSPDEVHALGARIILGNTYHLSLRPGAQRIARLGGLHAFMAWPGAILTDSGGFQVFSLATIRTIDEDGVTFQSHIDGSRHRITPESCIEIQELLGSDIAMCFDECTPYPVTRDYAKASMERTVRWARRCRNAHTREDQLLFAIVQGGVFPDLRRACVEALTAMDFPGYAVGSLAVGEPKEVMLDVLETVVPDLPHDKPRYLMGVGMPEDLVEGVWRGIDMFDCVVPTRNARNGMVFTSRGALQIKHSRYADDPEPIEAACTCYTCRTFSRAYLRHLFMAKELLVYRLLSLHNLHYFLTLMESIRDAVMRGSFEEFRRQFYARRCVEEPIAD

SEQ ID NO: 54609 - protein, 374 aa, unidentified
  source 1..374: note = Desulfosporosinus acididurans
  REGION 1..374: note = tr|A0A0J1FSM0|A0A0J1FSM0_9FIRM Queuine tRNA-ribosyltransferase OS=Desulfosporosinus acididurans; OX = 476652 GN=tgt PE=3 SV=1
MAAVHLEILKEDSRTKARLGTLHTPHGVIDTPVFMPVGTQGTVKAMTPEELREIGAGIILSNTYHLFLRPGQELIREAGGLHRFMNWDGAILTDSGGFQVFSLGDLRTIQESGVEFRSHIDGSRQFLSPEIATQVQMAIGSDIVMAFDECAPYPSSHDYVKNSLERTTRWLKRCKETLTTTDRQSLFGIVQGGMYEDLRRQSAAEVTELDLPGYAIGGLSVGEPKEIMYEVLDYTVPLLPREKPRYLMGVGSPDAIIEGVMRGVDMFDCVLPTRIARNGTAMTRYGKVIVRNAGSAHDFGPIDPTCDCYTCRNYSRAYVRHLLKAEEILGLRLMTIHNLRYLQNLMREIREAIREDRLPEYRQKCFADYGYEFD

SEQ ID NO: 54610 - protein, 374 aa, Desulfosporosinus acidiphilus
  REGION 1..374: note = tr|I4D998|I4D998_DESAJ Queuine tRNA-ribosyltransferase OS=Desulfosporosinus acidiphilus (strain DSM 22704 / JCM 16185 / SJ4) OX=646529 GN=tgt PE=3; SV = 1
MAAVHLEILKEDSRTKARLGKLHTPHGVIDTPVFMPVGTQGTVKAMTPEEIREVGAGIILSNTYHLFLRPGQELIREAGGLHRFMNWDGAILTDSGGFQVFSLGDLRTIQESGVEFRSHIDGSRQFLSPEIATQMQMTIGSDIVMAFDECAPYPSTREYVKNSLERTTRWLKRCKETLTTTETQALFGIVQGGMYEDLRRQSAAEITELDLPGYAIGGLSVGEPKELMYEVLDYTVPLLPREKPRYLMGVGSPDAIIEGVMRGVDMFDCVLPTRIARNGTAMTRFGKVIVRNAGSAHDFGPIDPTCDCYACRNYSRAYIRHLLKAEEILGLRLMTIHNLRYLQNLMREIRDAIREDRLPEYRQKCFADYGYEYE

SEQ ID NO: 54611 - protein, 372 aa, unidentified
  source 1..372: note = Desulfosporosinus fructosivorans
  REGION 1..372: note = tr|A0A4Z0R4X7|A0A4Z0R4X7_9FIRM Queuine tRNA-ribosyltransferase OS=Desulfosporosinus fructosivorans OX=2018669 GN=tgt PE=3 SV=1
MTAVHLEILKEDTRTRARLGKLHTPHGVIDTPVFMPVGTQGTVKTITPEEIKEIEAGIILSNTYHLFLRPGHELIKEAGGLHRFMNWDGAILTDSGGFQVFSLGDLRTIKESGVEFRSHLDGSSQFLSPEIATQVQMALGSDIVMAFDECAPYPCTHKYAKDSLERTTRWLKRCKETLTTTDTQALFGIVQGGMYEDLRRQSAAEIIELDLPGYAIGGLSVGEPKDLMYEVLDYTVPLLPREKPRYLMGVGSPDALIEGVMRGVDMFDCVLPTRIARNGTAMTRYGKVIIRNAGSAHDFGPIDPTCDCYTCRNYSRAYIRHLIKAEEVLGLRLMTIHNLRYLQNLMKEIREAIKEDRLPEYRQKCFSDYGYI

SEQ ID NO: 54612 - protein, 372 aa, Desulfosporosinus hippei
  REGION 1..372: note = tr|A0A1G8GI27|A0A1G8GI27_9FIRM Queuine tRNA-ribosyltransferase OS=Desulfosporosinus hippei DSM 8344 OX=1121419 GN=tgt PE=3 SV=1
MAAVYLEILKEDSRTKARLGKLHTPHGTIDTPVFMPVGTQGTVKTMTPEEIKEIGAGMILSNTYHLFLRPGHELVREAGGLHRFMNWDGAILTDSGGFQVFSLGDMRTIREEGVEFRSHIDGSRQFLSPEISMQVQMSLGSDVVMAFDECAPYPCTHTYAKDSLERTTRWLKRCKETLTTTDTQSLFGIVQGGMFEDLRRQSAAEITELDLPGYAIGGLSVGEPKDIMYEVLDYTVPLLPREKPRYLMGVGSPDALIEGVMRGIDMFDCVLPTRIARNGTALTRFGKVIVRNAGSARDFGPIDPSCDCYTCRNYSRAYIRHLLKAEEILGLRLMSIHNLRYLQILMHEVREAIKEDRLPEYREKCFSDYGYE

SEQ ID NO: 54613 - protein, 372 aa, Desulfosporosinus lacus
  REGION 1..372: note = tr|A0A1M5Z2E2|A0A1M5Z2E2_9FIRM Queuine tRNA-ribosyltransferase OS=Desulfosporosinus lacus DSM 15449 OX=1121420 GN=tgt PE=3 SV=1
MTAVYLEILKEDSRTRARLGKLHTPHGIMDTPVFMPVGTQGTVKTITPEEIKEIGAGMILSNTYHLFLRPGHELIREAGGLHRFMNWDGAILTDSGGFQVFSLGDLRTIREEGVEFRSHIDGSRQFLSPEISMQVQMALGSDVVMAFDECAPYPCTHEYAKDSLERTTRWLKRCKETLTTTETQSLFGIVQGGMFEDLRRQSAAEITELDLPGYAVGGLSVGEPKEMMYEVLDYTVPLLPREKPRYLMGVGSPDALIEGVMRGIDMFDCVLPTRIARNGTALTRYGKVIVRNAGSARDLGPIDPSCDCYTCRNYSRAYIRHLLKAEEILGLRLMTIHNLRYLQILMREIREAIKEDRLPEYREKCFSDYGYE

SEQ ID NO: 54614 - protein, 372 aa, Desulfosporosinus meridiei
  REGION 1..372: note = tr|J7IV17|J7IV17_DESMD Queuine tRNA-ribosyltransferase OS=Desulfosporosinus meridiei (strain ATCC BAA-275 / DSM 13257 / NCIMB 13706 / S10); OX = 768704 GN=tgt PE=3 SV=1
MAAVYLEILKEDSRTKARLGKLHTPHGTIETPVFMPVGTQGTVKTMTPEEIKEIGAGMILSNTYHLFLRPGHELVREAGGLHRFMNWDGAILTDSGGFQVFSLGDMRTIREEGVEFRSHIDGSRQFLSPEISMQVQMSLGSDVVMAFDECAPYPCTHTYAKDSLERTTRWLKRCKETLTTTDKQSLFGIVQGGMFEDLRRQSAAEITELDLPGYAIGGLSVGEPKDIMYEVLDYTVPLLPREKPRYLMGVGSPDALIEGVMRGIDMFDCVLPTRIARNGTALTRFGKVIVRNAGSARDFGPIDPSCDCYTCRNYSRAYIRHLLKAEEILGLRLMSIHNLRYLQILMHEVREAIKEDRLPEYREKCFSDYGYE

SEQ ID NO: 54615 - protein, 374 aa, Desulfosporosinus orientis
  REGION 1..374: note = tr|G7W5F5|G7W5F5_DESOD Queuine tRNA-ribosyltransferase OS=Desulfosporosinus orientis (strain ATCC 19365 / DSM 765 / NCIMB 8382 / VKM B-1628); OX = 768706 GN=tgt PE=3 SV =1
MAAVYLEILKEDSRTKARLGKLHTPHGIIDTPVFMPVGTQGTVKTMTPEEIKEIGAGMILSNTYHLFLRPGHDLVREAGGLHRFMNWDGAILTDSGGFQVFSLGDLRKIMEEGVEFRSHIDGSRQFLSPEISMQVQMALGSDVVMAFDECAPYPCSHQYAKDSLERTTRWLKRCKETLTTTETQSLFGIVQGGMFEDLRRQSAAEITELDLPGYAVGGLSVGEPKEMMYEVLDYTVPLLPREKPRYLMGVGSPDALIEGVIRGIDMFDCVLPTRIARNGTALTRYGKVIVRNAGSARDFGPIDPSCDCYACRNYSRAYIRHLLKADEILGLRLMTIHNLRYLQILMGEIREAIKEDRLPEYREKCFADYGYELD

SEQ ID NO: 54616 - protein, 374 aa, Desulfosporosinus sp.
  REGION 1..374: note = tr|A0A0F2JJ77|A0A0F2JJ77_9FIRM Queuine tRNA-ribosyltransferase OS=Desulfosporosinus sp. I2; OX = 1617025 GN=tgt PE=3 SV=1
MTAVHLEILKEDSRTKARLGKLHTPHGVMETPVFMPVGTQGTVKTITPEEIREIGAGMILSNTYHLFLRPGHELIREAGGLHRFMNWDGAILTDSGGFQVFSLGDMRTIKEEGVEFRSHIDGSRQFLSPEISMQVQMALGSDVVMAFDECAPYPCTHEYAKDSLERTTRWLKRCKETLTTTETQSLFGIVQGGMYEDLRRQSAAEIIELDLPGYAIGGLSVGEPKEMMYEVLDYTVPLLPREKPRYLMGVGSPDALIEGVMRGIDMFDCVLPTRIARNGTAMTRYGKVIVRNAGSARDFGPIDPSCDCYTCRNYSRAYIRHLLKAEEILGLRLMTIHNLRYLQILMREIREAIKEDRLPEYRQTCFADYGYEQD

SEQ ID NO: 54617 - protein, 372 aa, Desulfosporosinus sp.
  REGION 1..372: note = tr|A0A101WJ58|A0A101WJ58_9FIRM Queuine tRNA-ribosyltransferase OS=Desulfosporosinus sp. BRH_c37; OX = 1734396 GN=tgt PE=3 SV=1
MTAVHLEILKEDSRTKARLGKLHTPHGVIDTPVFMPVGTQGTVKTITPEEIKEIGAGIILSNTYHLFLRPGHELIREAGGLHRFMNWDGAILTDSGGFQVFSLGDLRTIKESGVEFRSHIDGSRQFLSPEIATQVQMALGSDIVMAFDECAPYPCTHEYAKDSLERTTRWLKRCKDTLTTTDNQGLFGIVQGGMYEDLRRQSAAEITELDLPGYAIGGLSVGEPKEMMYEVLDYTVPLLPREKPRYLMGVGSPDALIEGVMRGVDMFDCVLPTRIARNGTAMTRYGKVIVRNAGSAHDFGPIDPTCDCYTCRNYSRAYIRHLIKAEEILGLRLMSIHNLRYLQNLMREIREAIKEDRLPEYRQKCFSDYGYE

SEQ ID NO: 54618 - protein, 373 aa, Desulfosporosinus youngiae
  REGION 1..373: note = tr|H5Y1W3|H5Y1W3_9FIRM Queuine tRNA-ribosyltransferase OS=Desulfosporosinus youngiae DSM 17734 OX=768710 GN=tgt PE=3 SV=1
MASVYLEILKEDSRTKARLGKLHTPHGIMDTPVFMPVGTQATVKTITPEEIKEIGAGMILSNTYHLFLRPGHELIREAGGLHRFMNWDGAILTDSGGFQVFSLGDLRTIREEGVEFRSHIDGSHQFLSPEISMQVQMALGSDVVMAFDECAPYPCTHEYAKDSLERTTRWLKRCKETLTTTETQSLFGIVQGGMFEDLRRQSAAEVTALDLPGYAVGGLSVGEPKEMMYEVLDYTVPLLPREKPRYLMGVGSPDALIEGVMRGIDMFDCVLPTRIARNGTALTRYGKVIVRNAGSARDFGPIDPSCDCYTCRNYSRAYIRHLLKAEEILGLRLMTIHNLRYLQILMEEIREAIKEDRLPEYREKCFSDYGYDD

SEQ ID NO: 54619 - protein, 267 aa, Desulfotalea psychrophila
  REGION 1..267: note = tr|Q6APT8|Q6APT8_DESPS Queuine tRNA-ribosyltransferase OS=Desulfotalea psychrophila (strain LSv54 / DSM 12343) OX=177439 GN=DP0907 PE=3 SV=1
MEKKKSPFTLHNKSTQCQARRGEVATKHGVFQTPVFMPVGTQGTVKAVTPENLKDLGAQIILGNTYHLFIRPGHKLIEKFGGLHKFMNWDGSILTDSGGFQIFSLKELTKITEEGAAFRSHIDGAKLFLSPEGAIDVQQSLGSDIMMALDTCIPYPSTREETIKSTNLTTRWAKRCREAHTKRDQHLFGIVQGGMHYDLRAEHAASLIDIGFDGYAIGGLSVGEDNQVMYDTTEATIPHLPEDYARYLMGVGTPEDLIEGVWVVLIV

SEQ ID NO: 54620 - protein, 372 aa, Desulfotalea sp.
  REGION 1..372: note = tr|A0A2G2DK61|A0A2G2DK61_9DELT Queuine tRNA-ribosyltransferase OS=Desulfotalea sp. OX=2030813; GN = tgt PE=3 SV=1
MINNSPFTLHKQSTECAARRGEVKTRQGVIQTPVFMPVGTQGTVKAVTPENLQEMNAQIILGNTYHLFIRPGHKLIESFGGLHKFMNWKGSILTDSGGFQIFSLKELATITEEGAAFKSHLDGSKLFLSPEDAINVQQSLGSDIMMCLDTCIPYPATKDETIKATDLTTRWANRCRIAHTKRDRLLFGIVQGGMFPELRRDHAAALIDIGFDGYAIGGLSVGEDKHLMFDMTEETVPALPKEYPVYLMGVGTPADLVEGVFRGVDMFDCVMPTRNARNGSLFTSKGKISIKNARFRDDHGPVDDQCNCYTCRNYSRAYLRHLFHAREILSSHLNTIHNLHFYLNLMADIRKAIEDDNFVQFRKDFYSKLDDE

SEQ ID NO: 54621 - protein, 371 aa, Desulfotignum phosphitoxidans
  REGION 1..371: note = tr|S0FZQ8|S0FZQ8_9DELT Queuine tRNA-ribosyltransferase OS=Desulfotignum phosphitoxidans DSM 13687 OX=1286635 GN=tgt PE=3 SV=1
MKFTLIKKSTRNRARLGMIDTPRGRIQTPIFMPVGTVGSVKALTSDDLKHCGAQIILGNTYHLYLRPGCDVMSHMGGLHEFIRWDRPMLTDSGGFQFFSLAKLAKFTEDGVTFQSHIDGSRHFFSPEKSVEIQTILGSDIMMSLDWCMGYPATFDQAQTALEKTTAWAQKGYDFWQAQGAPNNLFGIVQGGMFKDLRTRSAEELMQIDFSGFAIGGLSVGEPTDLMYEMANHTLPLLPENKPRYIMGVGTPENLVELTQMGCDMFDCVMPSRNARNGKLFTSKGDMNIHNARFKFDTRPIDETCSCYTCQNYTRAYLRHLYKSRELLAYRLNTIHNLYYYLDLMAKMREAIQADEFDAFKRQFYENRAQGV

SEQ ID NO: 54622 - protein, 370 aa, Desulfotomaculum aeronauticum
  REGION 1..370: note = tr|A0A1M6NM87|A0A1M6NM87_9FIRM Queuine tRNA-ribosyltransferase OS=Desulfotomaculum aeronauticum DSM 10349 OX=1121421 GN=tgt PE=3 SV=1
MPVKITIEKEEKYTRARLGKLATPHGEVETPIFMPVGTQATVKTMTPEEVYQTGGRLILSNTYHLYLRPGHDLVKEAGGLHKFMNWHGPILTDSGGFQVFSLGPLRTITEDGVEFRSHIDGSKHFFTPEKVMEIEQALGADIAMAFDECAPYPCEKEYAVAALERTTRWAERCKKAHQRKDQALFGIIQGGVFTDLRERSAKELIAMDFPGYGIGGLSVGEPKELMYEVLDHLIPIMPKDKPRYLMGVGSPDCLIEGVIRGVDMFDCVLPTRIARNGTVFTHKGKLTVRNAEYARDFRPMDEQCDCYACQNYSRAYIRHLIKTDEILGIRLTTIHNLHFLQHLMGTIKEAIRQDRLLEYREEFFSHFNAG

SEQ ID NO: 54623 - protein, 247 aa, unidentified
  source 1..247: note = Desulfotomaculum aquiferis
  REGION 1..247: note = tr|A0A4Q2WNW5|A0A4Q2WNW5_9FIRM Queuine tRNA-ribosyltransferase OS=Desulfotomaculum aquiferis; OX = 1397668 GN=N752_04430 PE=3 SV=1
MVREAGGLHKFMNWHGPILTDSGGFQVFSLGPLRTITEEGVTFRSHIDGSKHLFTPEKVMEIEQALGADIAMAFDECAPYPCDKEYAIAALERTTRWAERCKKVHSRKDQALFGIIQGGVFNDLRERSAKELLAMDFPGYGIGGLSVGEPKDLMYDVLDHLIPLMPKDKPRYLMGVGSPDCLIEGVIRGVDMFDCVLPTRIARNGTVFTHKGKLTVRNAEFARDFRPMDEQCDCYACQIIPGLISGI

SEQ ID NO: 54624 - protein, 370 aa, Desulfotomaculum arcticum
  REGION 1..370: note = tr|A0A1I2SED9|A0A1I2SED9_9FIRM Queuine tRNA-ribosyltransferase OS=Desulfotomaculum arcticum DSM 17038 OX=1121424 GN=tgt PE=3 SV=1
MTISFEVTGNDTRSGARLGLLTTPHGTIKTPVFMPVGTQASVKTMTPEEVQEVGGTMILGNTYHLYLRPGHEIVAEAGGLHNFMNWPGPILTDSGGFQVFSLGPLRKITDQGVTFRSHIDGSEHFFSPEKAMEIQMALGADVVMAFDECAPYPCSYDEARAATERTTRWAERCLNRHDRKDQALFGIIQGGTYRDLRLKSASEITSLGFPGFGIGGLSVGEPKPVMYEVLDYLVPEMPWNKPRYLMGVGSPDCLLEGVSRGVDMFDCVLPTRIARNGTVFTRDGKLVVRNAEYARDFRPLDPDCDCYTCKNYSRAYIRHLIKANEVLGIRLTTLHNLRFVLRLMEDIRAAIANGDFVEYKDRFLQRFNAE

SEQ ID NO: 54625 - protein, 369 aa, unidentified
  source 1..369: note = Desulfotomaculum copahuensis
  REGION 1..369: note = tr|A0A1B7LHH0|A0A1B7LHH0_9FIRM Queuine tRNA-ribosyltransferase OS=Desulfotomaculum copahuensis; OX = 1838280 GN=tgt PE=3 SV=1
MGFKFSVLQTDNQTRARLGLLETTHGPVQTPVFMPVGTQATVKTMTPEEVRSVGGRLILSNTYHLYLRPGHELIRGAGGLHRFMGWDGPILTDSGGFQVFSLGPLRRVEEDGVRFRSHIDGSEHYFSPEKAVAVQEALGSDIAMAFDECAPYPCTYEQARAAVERTTRWAGRCLDAHRSPEQALFGIVQGGVHRDLREKSACELLELNFPGYGIGGLSVGEPKEMMYAVLDFTVPLLPVDKPRYLMGVGSPDCLLEGVARGVDMFDCVLPTRIARNGTVFTRRGKLVVRNAEYARDFRPLDGDCGCYTCRHFTRAYVRHLIKAGEILGIRLTTIHNLYFVLRLMENIRQAIREGNFEQFRKKFLAGWQA

SEQ ID NO: 54626 - protein, 370 aa, unidentified
  source 1..370: note = Desulfotomaculum ferrireducens
  REGION 1..370: note = tr|A0A1S6IW66|A0A1S6IW66_9FIRM Queuine tRNA-ribosyltransferase OS=Desulfotomaculum ferrireducens; OX = 1833852 GN=tgt PE=3 SV=1
MPVKITIEKEEKYTRARLGKLSTPHGEVETPIFMPVGTQATVKTMTPEEVYQTGGRLILSNTYHLYLRPGHELVREAGGLHKFMNWHGPILTDSGGFQVFSLGPLRTVTEDGVEFRSHIDGSKHFFTPEKVMEIEQALGADIAMAFDECAPYPCEKEYALAALERTTRWAERCKKAHTRKDQALFGIIQGGVFKDLRERSAKELIAMDFPGYGIGGLSVGEPKELMYEVLDHLIPIMPKDKPRYLMGVGSPDCLIEGVIRGVDMFDCVLPTRIARNGTVFTHKGKLTVRNAEYARDFRPMDEQCDCYACQNYSRAYIRHLIKTDEILGIRLTTIHNLHFLQHLMGKIREAIRQDRLLEYREEFFSHFNAG

SEQ ID NO: 54627 - protein, 379 aa, unidentified
  source 1..379: note = [Desulfotomaculum] guttoideum
  REGION 1..379: note = tr|A0A1I0I6T8|A0A1I0I6T8_9FIRM Queuine tRNA-ribosyltransferase OS=[Desulfotomaculum] guttoideum; OX = 58134 GN=tgt PE=3 SV=1
MNYKIVAKDGRAKRAEVTTVHGTIQTPVFMNVGTVAAIKGAVSTDDLREIRTQVELSNTYHLHVRTGDKLIKEFGGLHKFMSWDRPILTDSGGFQVFSLTGLRKIKEEGVYFQSHIDGRKIFMGPEESMQIQSNLASTIAMAFDECPPHPATREYMQNSVDRTTRWLERCQAEMAKLNSQPDTLNKEQLLFGINQGGTFEDIRISHAKTISAMDLDGYALGGLAVGESHEEMYRILDETVPYLPENKPTYLMGVGTPANILEAVDRGVDFFDCVYPSRNGRHGHVYTNHGKMNLFNTKYELDHRPIEEGCGCPACRSYSRAYIRHLFKAKEMLGMRLCVLHNLYFYNTMMEEIRDAIENHRYGEYKEQKLSGMMAGQTT

SEQ ID NO: 54628 - protein, 370 aa, Desulfotomaculum hydrothermale
  REGION 1..370: note = tr|K8DXH1|K8DXH1_9FIRM Queuine tRNA-ribosyltransferase OS=Desulfotomaculum hydrothermale Lam5 = DSM 18033 OX=1121428 GN=tgt PE=3 SV=1
MPVKIIIEKEEKHTRARLGKLYTPHGVVETPIFMPVGTQATVKTMTPEEVWETGGRLILSNTYHLYLRPGHDLIREAGGLHRFMNWHGPILTDSGGFQVFSLGPLRTITEEGVEFRSHIDGSKHFFTPEKVMEIEQALGADIAMVFDECAPYPCDREYALAALERTTRWAARCQKAHHRKDQALFGIIQGGVFNDLRARSARELMELDFPGYGIGGLSVGEPKELMYDVLDHLIPLLPKDKPRYLMGVGSPDCLIEGVIRGVDMFDCVLPTRIARNGAVFTHKGRLTVRNAEYAKDFRPLDEQCDCYTCRNYSRAYIRHLIKADEVLGIRLTTIHNLHFIQRLMDKIKEAIRQDRLLEYRAEFLSHFQAG

SEQ ID NO: 54629 - protein, 370 aa, Desulfotomaculum nigrificans
  REGION 1..370: note = tr|F6B450|F6B450_DESCC Queuine tRNA-ribosyltransferase OS=Desulfotomaculum nigrificans (strain DSM 14880 / VKM B-2319 / CO-1-SRB) OX=868595; GN = tgt PE=3 SV=1
MPVKITIDKEEKHTRARLGRLSTPHGVVETPIFMPVGTQATVKTMTPDEVKQTGGRLILSNTYHLYLRPGHELVKEAGGLHKFMNWDGPILTDSGGFQVFSLGPLRTITEEGVTFRSHIDGSKHYFTPERVMEIEEALGADIAMAFDECAPYPCDREYALAALERTTRWAERCKKAHKREDQALFGIVQGSVYHDLRERSARELIDLDFPGYGIGGLSVGEPKEVMYDVLDHLMPIMPKDKPRYLMGVGSPDCLIEGVIRGVDMFDCVLPTRIARNGTVFTHKGRLTVRNAEYARDFRPLDEQCDCYACRNFTRAYIRHLIKANEILGIRLTTIHNLHFLQRLMEKIREAIREDRLLQYRAEFLEQFNNG

SEQ ID NO: 54630 - protein, 370 aa, Desulfotomaculum putei
  REGION 1..370: note = tr|A0A1M4SQ88|A0A1M4SQ88_9FIRM Queuine tRNA-ribosyltransferase OS=Desulfotomaculum putei DSM 12395 OX=1121429 GN=tgt PE=3 SV=1
MPVKIVIEKEEKHTRARLGKLYTPHGVVETPIFMPVGTQATVKTMTPEEVWETGGRLILSNTYHLYLRPGHDLIREAGGLHKFMNWQGPILTDSGGFQVFSLGPLRTITEEGVEFRSHIDGSKHFFTPEKVMEIEEALGADIAMAFDECAPYPCDRDYALAALERTTRWAERCKKAHKRDDQALFGIIQGGVFNDLRERSARELIEMDFPGYGIGGLSVGEPKELMYDVLDHLIPIMPKDKPRYLMGVGSPDCLIEGVIRGVDMFDCVLPTRIARNGAVFTHKGRLTIRNAEYARDFRPLDEQCDCYACRNYTRAYIRHLIKTDEVLGIRLTTIHNLHFIQHLMGKIKEAIREDRLLEYRAEFLSHFNAG

SEQ ID NO: 54631 - protein, 370 aa, unidentified
  source 1..370: note = Desulfotomaculum reducens
  REGION 1..370: note = sp|A4J541|TGT_DESRM Queuine tRNA-ribosyltransferase; OS = Desulfotomaculum reducens (strain MI-1) OX=349161; GN = tgt PE=3 SV=1
MPVKIKIEKKEKHTRARLGKLTTPHGEVETPIFMPVGTQATVKTMTPEEVKETGGRLVLSNTYHLYLRPGHDLVKEAGGLHKFMNWDGPILTDSGGFQVFSLGPLRTITEEGVEFRSHIDGSKHFFTPEKVMEIEQALGADIAMAFDECAPYPCEKEYAVAALERTTRWAERCKRVHKREDQALFGIIQGGVFPDLRERSAKELLAMDFPGYGIGGLSVGEPKELMYEVLDQLMPIMPEDKPRYLMGVGSPDCLIEGVVRGVDMFDCVLPTRIARNGTVFTHNGKLTVRNAEYARDFRPMDQQCDCYACRNYSRAYIRHLIKTDEILGIRLTTIHNLHFIQHLMQNIRQAIREDRLLEYREDFLKVFNAG

SEQ ID NO: 54632 - protein, 370 aa, Desulfotomaculum ruminis
  REGION 1..370: note = tr|F6DN33|F6DN33_DESRL Queuine tRNA-ribosyltransferase OS=Desulfotomaculum ruminis (strain ATCC 23193 / DSM 2154 / NCIMB 8452 / DL) OX=696281; GN = tgt PE=3 SV=1
MAVKIIIDKEEKHTRARLGRLSTPHGEVETPIFMPVGTQATVKTMTPEEVKDTGGRLILSNTYHLYLRPGHELVKEAGGLHRFMNWNGPILTDSGGFQVFSLGPLRTITEEGVTFRSHIDGSKHLFTPEKVMEIEQALGADIAMAFDECAPYPCDKEYAVAALERTTRWAERCKASHQRKDQALFGIIQGGVFKDLRERSARELMEMDFPGYGIGGLSVGEPKEIMYEVLDHLVPLMPRDKPRYLMGVGSPDCLIEGVIRGVDMFDCVLPTRIARNGAVFTHRGRLTVRNAEFARDFRPMDEQCDCYACRNYSRAYIRHLIKSEEILGIRLTTIHNLHFIQNLMKKIKEAIREDKLLEYRDEFYKQYNEG

SEQ ID NO: 54633 - protein, 372 aa, Desulfotomaculum sp.; identical to SEQ ID NO: 54577
  REGION 1..372: note = tr|A0A359H900|A0A359H900_9FIRM Queuine tRNA-ribosyltransferase OS=Desulfotomaculum sp. OX=41211; GN = tgt PE=3 SV=1

SEQ ID NO: 54634 - protein, 330 aa, Desulfotomaculum sp.
  REGION 1..330: note = tr|A0A356UKR4|A0A356UKR4_9FIRM Queuine tRNA-ribosyltransferase OS=Desulfotomaculum sp. OX=41211; GN = tgt PE=3 SV=1
  VARIANT 113: note = Xaa can be any naturally occurring amino acid
MPFAFKITYKDTQTRARTGILQTERGIIQTPVFMPVGTQATVKTLTPDEVKSLGAQIVLSNTYHLYLRPGHELIQKAGGLHKFMNWEGPILTDSGGYQVFSLAPLRRVEEEGXTQTRLALRRTTSWAYRYQSALKAALAEKEQAIFGIIQGGTYQDLRRQSTRELIELDFPGYGIGGLSVGEPKEIMYEVLDYTVPLLPVHKPRYLMGVGSPDCLLEGVARGIDMFDCVLPTRLARNGTVYTSQGKLVVRNAAWAQDFSPLDPTCNCYTCRNFTRAYVRHLLNAKEVLGIRLTTIHNLFFIFNLMKNIREAIENNCFRAFKHEFLQYFKD

SEQ ID NO: 54635 - protein, 377 aa, Desulfovibrio alaskensis
  REGION 1..377: note = sp|Q30XF7|TGT_DESAG Queuine tRNA-ribosyltransferase; OS = Desulfovibrio alaskensis (strain G20) OX=207559 GN=tgt; PE = 3 SV=1
MATIGEFTLHATDGKARTGVLQTAHGPVRTPIFMPVGTVGSVKGVAPDDLDAIGAEIILGNTYHLYLRPGDELVARRGGLHEFNAWRKPILTDSGGFQVFSLSGLRRISEEGVEFRSHLDGSKHLFTPEKVVSIQRNLNSDIMMVLDECVPYGADKDYTARSLKMTTRWAQRCRDAYPAGSGGNLMFGITQGGFFKDLREESIGELTRIDFDGFALGGLSVGESKTEMMDILYHTAPMLPAHKPRYLMGVGTPLDIINGINAGIDMFDCVLPTRNARNGTLYTSAGKINIKRREFAEDDGPLDPNCSCYTCRTFSRAYLRHLFHAQEILSYRLNSIHNLTYFLDLVRGAREAIAQGTFAEYKSRYDAIYPQEAALCP

SEQ ID NO: 54636 - protein, 374 aa, Desulfovibrio alkalitolerans
  REGION 1..374: note = tr|S7UTX5|S7UTX5_9DELT Queuine tRNA-ribosyltransferase OS=Desulfovibrio alkalitolerans DSM 16529 OX=1121439 GN=tgt PE=3 SV=1
MERQNIFTILARDGHARRGRLSTAHGTVETPVFMPVGTVGSVKAVCPADLKDVGAQIILGNTYHLYLRPGDELVARRGGLHRFMRWDGPILTDSGGFQVFSLNELRRLGEEGVEFRSHLDGSRHLFTPEKVVSIQRNLGSDVMMVLDECPPGGSDRDYVARSLGLTTRWARRCREAYPAGAGEQHLFGIVQGGIYEDLREESLAQLAGIGFEGYALGGLSVGEKKADMYRILAHMGPRLPENAPRYLMGVGTPLDIVTGIENGIDMFDCVLPTRNARNGTLYTSQGKVNIKRAEFREDDSPLDPACSCYTCRTFSRAYLRHLYVAKEILSFRLNTIHNLRYFLDLTARARTAIEAGTMAALKAEIAAAYPEDGA

SEQ ID NO: 54637 - protein, 381 aa, Desulfovibrio bizertensis
  REGION 1..381: note = tr|A0A1T4VKC1|A0A1T4VKC1_9DELT Queuine tRNA-ribosyltransferase OS=Desulfovibrio bizertensis DSM 18034 OX=1121442 GN=tgt PE=3 SV=1
MHEDIISQLTKPGDFRVAATEGKARQGYLMTAHGLVKTPVFMPVGTVGSVKSIDPRDLHEMEAQVILGNTYHLYLRPGDELVKRRGGLHAFNGWDGPILTDSGGFQVFSLSGLRKITDDGVEFRSHIDGSKHFFTPEKAISIQQNLGSDIMMCFDECAAYGASYEYTKKALELTTRWAKRCREFHKPGQNGQLLFGITQGGFFQDLRDRSIAELSELPFDGFALGGLSVGEPKPKMLEVLRASAPLLPVDKPRYLMGVGTPLDILDGIEAGIDMFDCVLPSRNARNGTLFTSQGKVNIKRAEFKEDDSPLDPECNCYTCRTFSKAYLRHLYTAKELLSYRLNTIHNLSYFLKLTKDARQAIREGRFAEFKKGVEAVYGPNK

SEQ ID NO: 54638 - protein, 373 aa, Desulfovibrio carbinolicus
  REGION 1..373: note = tr|A0A4P6HKG4|A0A4P6HKG4_9DELT Queuine tRNA-ribosyltransferase OS=Desulfovibrio carbinolicus; OX = 296842 GN=tgt PE=3 SV=1
MNAPGTFTLGPGDGSARTGRLTTAHGEIETPVFMPVGTQGTVKSLCPTDLQDIKARIILGNTYHLYLRPGDELVAKLGGLHRFMGWDGPILTDSGGFQVFSLSGLRRITEEGVTFASHIDGSKHLFSPEKVVSIQRNLGSDIMMVLDECVPYGADRAYTEKSLGLTTRWARRCREAHPAGDRGQLMFGIVQGGFFKDLRAQSAEQIIEVGFDGYALGGLSVGESRAEMYDILGDAAPLLPAERPRYLMGVGAPRDLLAGMAAGIDMFDCVLPTRNARNGTLFTFQGKVNIKRAEYREDDSPLDPTCPCYACRTFSRAYLRHLYIAKELLSYRLNTLHNLTFFSIMMERARQAIREGRFAAYRAEMEALYPEGE

SEQ ID NO: 54639 - protein, 378 aa, Desulfovibrio carbinoliphilus
  REGION 1..378: note = tr|G7Q3U3|G7Q3U3_9DELT Queuine tRNA-ribosyltransferase OS=Desulfovibrio carbinoliphilus subsp. oakridgensis OX=694327 GN=tgt PE=3 SV=1
MNVPGTFTLGPGDGNARTGCLTTAHGDVETPIFMPVGTQGTVKSLCPTDLHDLKAQIILGNTYHLYLRPGDELVAKLGGLHRFMGWDGPILTDSGGFQVFSLSGLRQIAEEGVTFSSHIDGSRHLFSPEKVIAIQQNLGSDIMMVLDECVPYGADRAYTEKSLALTTRWARRCRQAHPGGHRGQLLFGIVQGGFFKDLRAESAAQLLEIGFDGYALGGLSVGESREEMYDILGDATPLLPADRPRYLMGVGAPRDLLAGMAAGIDMFDCVLPTRNARNGTLFTFQGKVNIKRAEYREDDTPLDPTCPCYACQTFSKAYLRHLYVARELLSYRLNTLHNLTFFSIMMERARQAIRDGRFAAFRAEMEAVYPTDEEQTEE

SEQ ID NO: 54640 - protein, 379 aa, Desulfovibrio desulfuricans
  REGION 1..379: note = tr|A0A4P7UFE9|A0A4P7UFE9_DESDE Queuine tRNA-ribosyltransferase OS=Desulfovibrio desulfuricans; OX = 876 GN=tgt PE=3 SV=1
MSQTVFTIEHTDGAARAGVLRTAHGAIPTPIFMPVGTVGSVKALAPDDLAAIGAPIILGNTYHLYLRPGDELVHRRGGLHKFASWPGSILTDSGGFQVFSLSSLRKIREEGVEFRSHLDGSKHLFTPEKVLEIQRNLDSDIMMVLDECVPFGADYDYTEKSLALTTRWARRAIEAYPPGSAHNLLFGITQGGFYKDLRERSVSELCGMDFDGFAIGGLSVGEPKDKMYDLLYHTAPLLPGAKPRYLMGVGTPLDIVTGIHAGVDMFDCVLPTRNARNGTLYTSLGKINIKRREFAEDDGPLDPNCRCYACRNFSRAYLRHLYASQELLSFRLNSLHNLTYYLDLARNARQAIVEGRFTDFLAKITALYPDEAARAAAGA

SEQ ID NO: 54641 - protein, 372 aa, Desulfovibrio desulfuricans
  REGION 1..372: note = tr|F0JG86|F0JG86_DESDE Queuine tRNA-ribosyltransferase OS=Desulfovibrio desulfuricans ND132 OX=641491 GN=tgt PE=3 SV=1
MARPGDFTVHAKDNLARRGTLTTAHGDIQTPIFMPVGTQGTVKSLTPRDLEEMEAQIILGNTYHLYLRPGDELVARRGGLHKFANWKRPILTDSGGFQVFSLEGIRKLSEEGVEFRSYIDGSKHFFSPEKAIDIQRNLGSDIMMVLDECVGYGNDRAYTEKSLEMTTRWAKRCRDHYPKGSGYQLMFGIVQGGFYKDLRDRSLEQLRGIDFEGFAIGGLSVGESTEEMYDLLHHITPKMPADKPRYLMGVGTPLDILEGVSVGVDMFDCVLPSRNARNGTLFTSLGKVNIKRAEYAEDDSPLDPNCGCYTCRNFSKAYLRHLYMAKELLSYRLNTYHNLYFYLNLMKQIRQAIEEGTFRELKAKYEAAYGRE

SEQ ID NO: 54642 - protein, 378 aa, unidentified
  source 1..378: note = Desulfovibrio fairfieldensis
  REGION 1..378: note = tr|A0A0X8JMF7|A0A0X8JMF7_9DELT Queuine tRNA-ribosyltransferase OS=Desulfovibrio fairfieldensis; OX = 44742 GN=tgt PE=3 SV=1
MSEPVFTLQHTDGAARAGLLRTAHGVIPTPIFMPVGTVGSVKAIAPDDLAAIGAPIILGNTYHLYLRPGDELVARHGGLHGFASWPGAVLTDSGGFQVFSLSSLRKIREEGVEFRSHLDGSRHLFTPEKVISIQRNLNSDIMMVLDECVPYGADYAYTETSLALTTRWAARARAAYPAGTGSNLLFGITQGGFFKDLRCRSVEEICALDFDGFAIGGLSVGEGKAEMYDLLYHTAPLLPSHKPRYLMGVGTPLDIAHGIHAGVDMFDCVLPTRNARNGTLYTSLGKVNIKRKEYAEDDGPLDPACGCYTCRTFSRAYLRHLYVSKELLSFRLNSLHNLTYFLRLAREARQAVLENRFGAFLAGMEGLYPEEAAQAAGV

SEQ ID NO: 54643 - protein, 377 aa, Desulfovibrio ferrireducens
  REGION 1..377: note = tr|A0A1G9HEE9|A0A1G9HEE9_9DELT Queuine tRNA-ribosyltransferase OS=Desulfovibrio ferrireducens; OX = 246191 GN=tgt PE=3 SV=1
MTENTTKPGTFKIHATDGNARLGTLTTAHGDIETPVYMPVGTQGTVKAVSPRDLKEIGSQIILGNTYHLYLRPGDELIARRGGLHKFSNWDRPILTDSGGFQVFSLESIRKITEQGVEFRSYLDGSKHFFSPEKVISIQKNLGSDIMMVLDECVGYGNDREYTERSLEMTTRWAQRCRDAYPVGSGDQLMFGIIQGGFHKDLREKSLEQLTEIPFEGYAIGGLSVGEPIPDMYDILRHIGPKLPQDKPRYLMGVGTPLDILEGIANGVDMFDCVLPTRNARNGTLYTSQGKVNIKRAQYREDDSPLDPNCDCYTCRNFSKAYLRHIYTAKELLSSQLNSIHNLRFFLNLTEQAREAIKNGTFADLRKKYEAVYEPVV

SEQ ID NO: 54644 - protein, 390 aa, unidentified
  source 1..390: note = Desulfovibrio ferrophilus
  REGION 1..390: note = tr|A0A2Z6AYP9|A0A2Z6AYP9_9DELT Queuine tRNA-ribosyltransferase OS=Desulfovibrio ferrophilus; OX = 241368 GN=tgt PE=3 SV=1
MSKEQLIPAEETAQQELTAPGDFRVCATEGGARLGMLHTAHGTVHTPMFMPVGTVGSVKSVDPRDLTEVGAQVILGNTYHLYLRPGDEVVARRGGLHKFNGWDGPILTDSGGFQVFSLAGLRNITDDGVEFRSHLNGSKHFFSPEKSIEIQQNLGSDIMMVFDECAAAGSDRDYTIQALERTTAWAKRCREFHPAGKNGQLLFGICQGGFYEDLRERSIEEITAIPFEGYALGGLSVGETKPEMLRILRHSAPLLPADKPRYLMGVGTPLDILDGIEAGIDMFDCVLPTRNARNGTLYTSQGKVNIKRAEFMEDDSPLDPNCDCYTCRTFSKAYLRHLYIAKELLSSRLNTIHNLAYFLRLAKDARDALRRGGFAEFKKSVEAIYGVNGE

SEQ ID NO: 54645 - protein, 374 aa, Desulfovibrio fructosivorans
  REGION 1..374: note = tr|E1JRG5|E1JRG5_DESFR Queuine tRNA-ribosyltransferase OS=Desulfovibrio fructosivorans JJ; OX = 596151 GN=tgt PE=3 SV=1
MNLPGTFTLGPGDGSARTGRLTTAHGEIETPVFMPVGTQGTVKSLCPDDLRTIGARIILGNTYHLYLRPGDELVAKMGGLHRFMAWDGPILTDSGGFQVFSLSGLRRITEEGVTFSSHIDGSKHLFSPEKVISIERNLGSDIMMVLDECVPYGADRAYTEKSLGLTTRWATRCRAAHAPLDRGQLLFGIVQGGFFKDLRAESARQLIDLAFEGYALGGLSVGESRAEMYDILYDATPLLPADKPRYLMGVGAPRDLLAGMAAGIDMFDCVLPTRNARNGTLFTFQGKVNIKRAEYREDDSPLEADCPCYACRTFSKAYLRHLYVARELLSYRLNTLHNLTFFSRFMAQARQAIREGRFEAFRTAMEAAYPETDA

SEQ ID NO: 54646 - protein, 390 aa, Desulfovibrio gigas
  REGION 1..390: note = tr|T2GBA9|T2GBA9_DESGG Queuine tRNA-ribosyltransferase OS=Desulfovibrio gigas (strain ATCC 19364 / DSM 1382 / NCIMB 9332 / VKM B-1759); OX = 1121448 GN=tgt PE=3 SV=1
MTTHLQPGEFSLLTQCGTARAGLLGTAHGTLETPVFMPVGTQGTVKALGPDDLAALGPRIILGNTYHLYLRPGDERVARLGGLHQFMGWNGAILTDSGGFQVFSLQGLRRIEEEGVTFQSHIDGSRHLFSPEKVVSIQRNLGSDIMMVLDECVPYGADREYTAKSLQLTTRWARRCREAHPALDRGQLLFGIVQGGFFPDLRAESARQLMEIPFDGFAIGGLSVGESRAEMLDILAHTAPLLPQDKPRYLMGVGTPRDLLDGIALGVDMFDCVLPTRNARNGTLFTSFGKTNIKLAKYAEDPAPLDPACTCYTCRTFSRAYLRHLYMARELLAYRLNTIHNIHYYLDLMRQARAAILEHRFEAFRRDILAHYEDEATPSGDAACPSSPTP

SEQ ID NO: 54647 - protein, 377 aa, unidentified
  source 1..377: note = Desulfovibrio gilichinskyi
  REGION 1..377: note = tr|A0A1X7C4I5|A0A1X7C4I5_9DELT Queuine tRNA-ribosyltransferase OS=Desulfovibrio gilichinskyi; OX = 1519643 GN=tgt PE=3 SV=1
MTENTKKPGTFKIHATDGNARLGTLTTAHGDIETPVYMPVGTQGTVKGVSPRDLKEIKSQIILGNTYHLYLRPGDELIARRGGLHKFANWDRPILTDSGGFQVFSLESIRKISEQGVEFRSYLDGSKHFFSPEKVISIQNNIGSDIMMVLDECVGYGNDREYTDRSLEMTTRWAKRCRDAYPVGSGDQLMFGIVQGGFHKDLREKSLEQLAEIPFEGYAIGGLSVGEPIPDMYDILRHIAPKLPQDKPRYLMGVGTPLDILEGIANGVDMFDCVLPTRNARNGTLYTSQGKVNIKRAQYREDDTPLDPNCDCYTCRTFSKAYLRHIYTSKELLSAQLNSIHNLRFFLNLTEQAREAIKNGTFANLRKKYEAVYAPVE

SEQ ID NO: 54648 - protein, 390 aa, Desulfovibrio gracilis
  REGION 1..390: note = tr|A0A1T4WJQ0|A0A1T4WJQ0_9DELT Queuine tRNA-ribosyltransferase OS=Desulfovibrio gracilis DSM 16080 OX=1121449 GN=tgt PE=3 SV=1
MPVPGRFTIHARDGKARRATLHTAHGEIQTPVFMPVGTQGSVKAVGPDDLLQAGSQIILGNTYHLYLRPGDELVARRGGLHRFMSWDKPILTDSGGFQVFSLSTIRKISEKGVEFRSYLDGSKHFFSPEKAISIQQNLGSDIMMVLDECVGYGADREYTARSLERTTRWARRCREVHTPGADGQLMFGIIQGGFHEDLREESLGQLLEIPFEGYAIGGLSVGESTEDMYRILNHIGPRMPEEKPRYLMGVGTPMDILEGIESGVDMFDCVLPTRNARNGTLFTSQGKVNIKRAEFREDDGPLDPNCQCYTCRNFSRAYLRHLYTAREILSYRLNSLHNIAFFLELARQAREAIEGGRFAELKAHYQGIYGTDGRNQRKGGAHHKPKRRFG

SEQ ID NO: 54649 - protein, 378 aa, Desulfovibrio hydrothermalis
  REGION 1..378: note = tr|L0RDQ3|L0RDQ3_9DELT Queuine tRNA-ribosyltransferase OS=Desulfovibrio hydrothermalis AM13 = DSM 14728 OX=1121451 GN=tgt PE=3 SV=1
MSKEIKKPGNFTVHATDGNARRGTLVTAHGDIQTPVYMPVGTQGAVKAVSPRDLREIGSQIILGNTYHLYLRPGDELIARRGGLHKFANWDRPILTDSGGFQVFSLESIRKITEQGVEFRSYIDGSKHFFSPEKVISIQNNIGSDIMMVLDECVGYGNDRDYTAKSLELTTRWARRCREAYPAGSGDQLMFGIIQGGFHKDLREVSLEQLSEIPFEGYAIGGLSVGEPIPDMYDILQHIGPKLPFEKPRYLMGVGTPLDILEGIANGVDMFDCVLPTRNARNGTLYTSLGKVNIKRAQYREDDSPLDPNCDCYTCRNFSKSYLRHLYTAKELLSSQLNSIHNLRFFLKLTEQAREAIENGTFADLRKKYEAVYEAVTR

SEQ ID NO: 54650 - protein, 378 aa, unidentified
  source 1..378: note = Desulfovibrio legallii
  REGION 1..378: note = tr|A0A1G7MMK2|A0A1G7MMK2_9DELT Queuine tRNA-ribosyltransferase OS=Desulfovibrio legallii; OX = 571438 GN=tgt PE=3 SV=1
MTHLTFTLEHTDGAARAGTLRTAHGPVPTPVFMPVGTVGSVKALAPDDLLAIGAPIILGNTYHLYLRPGHELVARRGGLHNFAAWPGAILTDSGGFQVFSLSSLRKIREEGVEFRSHLDGSRHLFTPESVLEIQRALHSDVMMVLDECVPFGADYAYTERSLALTGRWARRARAAYPAGTARNLLFGIVQGGFFKDLRQRSAEEICALDFDGFAIGGLSVGEPKPQMYDLLYHTAPLLPREKPRYLMGVGTPLDIVTGIHAGVDMFDCVLPTRNARNGTLYTSHGKVNIKRREYAEDDRPLDPCCRCYTCRTFTRAYLRHLFASQELLAFRLNSLHNLTYFMDLVRGAREAILQNRYNDYLARIAALYPDEAARAAAG

SEQ ID NO: 54651 - protein, 385 aa, Desulfovibrio litoralis
  REGION 1..385: note = tr|A0A1M7SCA5|A0A1M7SCA5_9DELT Queuine tRNA-ribosyltransferase OS=Desulfovibrio litoralis DSM 11393 OX=1121455 GN=tgt PE=3 SV=1
MQKENIGTFKLLNKDNKARTGLFYTAHGVIQTPIFMPVGTVGTVKAIAPDDLDNIQAEIILGNTYHLHLRPGDELIKGFGGLHEFISWDKPILTDSGGYQAFSLSSLRKISEAGVEFRSHLNGAKLNFTPEKVIEIQRNLNSDIMMVLDECVAYGTDKEYTAKSIELTTRWAKRSRVYYPQNSGQNLLFAITQGGFFNDLRTESVEQLTCDDLFDGYAIGGVSVGEPKPEMYQLMEHTAPLLPETRPRYLMGVGTPLDIVYGIAQGVDMFDCVLPTRNARNGTLYTSLGKVNIKRKEFAEDKNSLDPNCSCYTCRTFSRAYLRHLFVSQELLAFRLNSLHNLTYFLNIVQKARQAINEKRYNAFLNEMIALYPDEAALGGIGLGV

SEQ ID NO: 54652 - protein, 373 aa, Desulfovibrio magneticus
  REGION 1..373: note = tr|K6GUS1|K6GUS1_9DELT Queuine tRNA-ribosyltransferase OS=Desulfovibrio magneticus str. Maddingley MBC34 OX=1206767 GN=tgt PE=3 SV=1
MNAPGTFTLGPGDGSARTGRLTTAHGEIETPVFMPVGTQGTVKSLCPTDLHDIKARIILGNTYHLYLRPGDELVAKLGGLHRFMGWDGPILTDSGGFQVFSLSGLRRITEEGVTFASHIDGSKHLFSPEKVVSIQRNLGSDIMMVLDECVPYGADRAYTEKSLGLTTRWARRCRQAHPAGDRGQLMFGIVQGGFFKDLRAQSAEQIIEVGFDGYALGGLSVGESRAEMYDILGDAAPLLPANRPRYLMGVGAPRDLLAGMAAGIDMFDCVLPTRNARNGTLFTFQGKVNIKRAEYREDDSPLDPTCPCYACRTFSRAYLRHLYIAKELLSYRLNTLHNLTFFSIMMERARQAIREGRFAAYRAEMEALYPEGE

SEQ ID NO: 54653 - protein, 373 aa, Desulfovibrio magneticus
  REGION 1..373: note = sp|C4XSI9|TGT_DESMR Queuine tRNA-ribosyltransferase; OS = Desulfovibrio magneticus (strain ATCC 700980 / DSM 13731 / RS-1) OX=573370 GN=tgt PE=3 SV=1
MNAPGTFTLGPGDGSARTARLTTAHGEIETPVFMPVGTQGTVKSLCPTDLQDIKARIILGNTYHLYLRPGDELVAKLGGLHRFMGWDGPILTDSGGFQVFSLSGLRRITEEGVTFASHIDGSKHLFSPEKVVSIQRNLGSDIMMVLDECVPYGADRAYTEKSLGLTTRWARRCRKAHPAGDRGQLMFGIVQGGFFKDLRAQSAEQIIEVGFDGYALGGLSVGESRAEMYDILGDAAPLLPADRPRYLMGVGAPRDLLAGMAAGIDMFDCVLPTRNARNGTLFTFQGKVNIKRAEYREDDSPLDPTCPCYACRTFSRAYLRHLYIAKELLSYRLNTLHNLTFFSIMMERARQAIREGRFAAYRAEMEALYPEGE

SEQ ID NO: 54654 - protein, 382 aa, Desulfovibrio mexicanus
  REGION 1..382: note = tr|A0A239D5U5|A0A239D5U5_9DELT Queuine tRNA-ribosyltransferase OS=Desulfovibrio mexicanus; OX = 147047 GN=tgt PE=3 SV=1
MTYDPATLGQFTITATDGAARRGSLVTAHGVVQTPIFMPVGTQGSVKALAPDDLDAAGAQIILGNTYHLYLRPGDDLLARKGGLHRFASWNKPILTDSGGFQVFSLKDIRKLSEDGVEFRSHHDGSKHFFSPEKVMSIQNNIGSDIMMVLDECVAYGADYDYTAKSLELTTRWARRCRQAHPRHKNGQLLFGINQGGFFKDLRERSLAQLAEIDFDGFAIGGLSVGESIPEMYDMLHHIAPLMPRDTPRYLMGVGTPLDILEGISAGVDMFDCVLPTRNARNGTLYTSQGKVNIRRAEYREDDSPLDPLCPCYACRTFSKAYLRHLYVAQELLSYRLNSLHNITFFLTLARQAREAIEQGRFAALKAHYQDVFAPAKDGGKP

SEQ ID NO: 54655 - protein, 390 aa, Desulfovibrio piger
  REGION 1..390: note = tr|A0A1K1LF68|A0A1K1LF68_9DELT Queuine tRNA-ribosyltransferase OS=Desulfovibrio piger OX=901; GN = tgt PE=3 SV=1
MSFRVHPASLPAMTQSVYTLEHSDNAARAGLVRTAHGVIPTPIFMPVGTVGSVKAIAPDDLAAIGAPIILGNTYHLYLRPGDGLVARHGGLHGFASWPGAILTDSGGFQVFSLSSLRKIREEGVEFRSHLDGSRHLFTPESVVGIQRNLNSDIMMVLDECVPYGADYAYTEKSLALTTRWALRARAAYPQGSGRNLLFAITQGGFFKDLRQRSIEELCCHDFDGFAIGGLSVGESKHMLYDFMYEVAPRLPKDKPRYLMGVGTPLDIAHGINAGIDMFDCVLPTRNARNGTLYTSLGKINIKRRDYAEDDSPLDPACDCYTCRTFSRAYLRHLYVSKELLAFRLNSLHNLTYFLNVVRQARRAILEDRYASFLAHMESLYPDEAAQGRGL

SEQ ID NO: 54656 - protein, 378 aa, Desulfovibrio piger
  REGION 1..378: note = tr|B6WXW6|B6WXW6_9DELT Queuine tRNA-ribosyltransferase OS=Desulfovibrio piger ATCC 29098; OX = 411464 GN=tgt PE=3 SV=1
MTQSVYTLEHSDNAARAGQVRTAHGVIPTPIFMPVGTVGSVKAIAPDDLAAIGAPIILGNTYHLYLRPGDELVARHGGLHGFASWPGAILTDSGGFQVFSLSSLRKIREEGVEFRSHLDGSKHLFTPESVVGIQRNLNSDIMMVLDECVPYGADYAYTEKSLALTTRWALRARAAYPQGSGQNLLFAITQGGFFKDLRKRSIEELCCHDFDGFAIGGLSVGESKHMLYDFMYEVAPQLPKDKPRYLMGVGTPLDIAHGINAGIDMFDCVLPTRNARNGTLYTSLGKVNIKRKEYAEDDSPLDPACNCYTCRTFSRAYLRHLYVSKELLAFRLNSLHNLTYFLNVVRQARQAILEDRYASFLAHMESLYPDEAAQGRGL

SEQ ID NO: 54657 - protein, 378 aa, Desulfovibrio salexigens
  REGION 1..378: note = tr|C6BY31|C6BY31_DESAD Queuine tRNA-ribosyltransferase OS=Desulfovibrio salexigens (strain ATCC 14822 / DSM 2638 / NCIB 8403 / VKM B-1763); OX = 526222 GN=tgt PE=3 SV=1
MSEEKKKPGTFTVHATDGHARRGTLVTAHGEIQTPVYMPVGTQGAVKGVSPRDLKEINSQIILGNTYHLYLRPGDELVARRGGLHKFANWDKPILTDSGGFQVFSLESIRKITEQGVEFRSYLDGSKHFFSPEKVISIQNNIGSDIMMVLDECVGYGHDRDYTAKSLEMTTRWAKRCRDAYPVGSGDQLMFGIVQGGFHKDLREVSLEQLREIPFEGFAIGGLSVGEPIPDMYDILQHIGPKLPEEKPRYLMGVGTPLDILEGIANGVDMFDCVLPTRNARNGTLYTSLGKVNIKRAQYREDDSPLDPNCDCYTCRTFSKAYLRHLYTAKELLSYQLNSIHNLRFFLKLTEEARDAIEKGTFADLRKKYEAVYESPVK

SEQ ID NO: 54658 - protein, 372 aa, Desulfovibrio sp.
  REGION 1..372: note = tr|I2Q122|I2Q122_9DELT Queuine tRNA-ribosyltransferase OS=Desulfovibrio sp. U5L OX=596152; GN = tgt PE=3 SV=1
MNVPGTFIPGPGDGNARTGRLSTAHGDIETPIFMPVGTQGTVKSLCPTDLHDLKAQIILGNTYHLYLRPGDELVAKLGGLHRFMGWDGPILTDSGGFQVFSLSGLRRIAEEGVTFSSHIDGSRHLFSPEKVISIQQNLGSDIMMVLDECVPYGADRAYTEKSLALTSRWAGRCRQAHPAGHRGQLLFGIVQGGFFKDLRAASAAQLLEIGFDGYALGGLSVGESREEMYDILGDATPLLPADRPRYLMGVGAPRDLLAGMAAGIDMFDCVLPTRNARNGTLFTFQGKVNIKRAEYREGDTPLDPTCPCYACRTFSKAYLRHLYVARELLSYRLNTLHNLTFFSIFMERARQAIRDGRFAAFRADMEALYPAE

SEQ ID NO: 54659 - protein, 396 aa, Desulfovibrio sp.
  REGION 1..396: note = tr|G2HBU9|G2HBU9_9DELT Queuine tRNA-ribosyltransferase OS=Desulfovibrio sp. A2 OX=298701; GN = tgt PE=3 SV=1
MPNQTEISTAMALAEAPAPIPAEAPGTFRIHATDGAARTGVLHTAHGPVRTPIFMPVGTVGSVKAVAPDDLDAIGAEIILGNTYHLYLRPGDELVARRGGLHGFNAWKKPILTDSGGFQVFSLSALRKITEQGVEFRSHLDGSKHLFTPEKVVSIQRNLNSDIMMVLDECVPYGADKPYTEKSLALTTRWAQRCRDAYPKGTAGNLLFGITQGGFFKDLRERSIGELTQIDFDGFALGGLSVGESKPEMMDILYHSAPLLPADKPRYLMGVGTPLDIINGIAAGVDMFDCVLPTRNARNGTLYTSLGKINIKRKEFAEDDGPLDPACTCYACRTFSRAYLRHLYVAKELLAFRLNSVHNLTYFLDVVRGARTAIAEGRFAAYKAGFEAIYPEEVVA

SEQ ID NO: 54660 - protein, 375 aa, Desulfovibrio vulgaris
  REGION 1..375: note = sp|Q72E53|TGT_DESVH Queuine tRNA-ribosyltransferase; OS = Desulfovibrio vulgaris (strain Hildenborough / ATCC 29579 / DSM 644 / NCIMB 8303) OX=882 GN=tgt PE=3 SV=1
MTTPGTFEIHATDGAARTGCLHTAHGIVRTPIFMPVGTVGSVKAIAPDDLEAIGAEIILGNTYHLYLRPGDELVARRGGLHEFNAWRKPILTDSGGFQVFSLSGLRRIAEEGVEFRSHLDGSKHLFTPEKVVSIQRNLNSDIMMVLDECVPYGADRTYTEKSVGLTTRWAKRCRDAYPKGAAGNLLFGITQGGFFKDLRTRSIGALTDIDFDGFALGGLSVGEPKAEMMDLLYHSAPLLPADKPRYLMGVGTPLDIINGIAAGVDMFDCVLPTRNARNGTLYTSLGKLNIKRREFAEDDGPLDPACSCYTCRTFSRAYLRHLYTAKELLAFRLNSIHNLTYFLDLVRGARAAIAAGRFAEYKRSFEAIYPEEVVA

SEQ ID NO: 54661 - protein, 375 aa, Desulfovibrio vulgaris
  REGION 1..375: note = sp|A1VFP3|TGT_DESVV Queuine tRNA-ribosyltransferase; OS = Desulfovibrio vulgaris subsp. vulgaris (strain DP4); OX = 391774 GN=tgt PE=3 SV=1
MTTPGTFEIHATDGAARTGCLHTAHGIVRTPIFMPVGTVGSVKAIAPDDLEAIGAEIILGNTYHLYLRPGDELVARRGGLHEFNAWRKPILTDSGGFQVFSLSGLRRIAEEGVEFRSHLDGSKHLFTPEKVVSIQRNLNSDIMMVLDECVPYGADRTYTEKSVGLTTRWAKRCRDAYPKGAAGNLLFGITQGGFFKDLRTRSIGELTDIDFDGFALGGLSVGEPKAEMMDLLYHSAPLLPADKPRYLMGVGTPLDIINGIAAGVDMFDCVLPTRNARNGTLYTSLGKLNIKRREFAEDDGPLDPACSCYTCRTFSRAYLRHLYTAKELLAFRLNSIHNLTYFLDLVRGARAAIAAGRFAEYKRSFEAIYPEEVVA

SEQ ID NO: 54662 - protein, 382 aa, unidentified
  source 1..382: note = Desulfovibrionaceae bacterium
  REGION 1..382: note = tr|A0A316MUN5|A0A316MUN5_9DELT Queuine tRNA-ribosyltransferase OS=Desulfovibrionaceae bacterium; OX = 2049043 GN=tgt PE=3 SV=1
MSDIPGTFHLLAVDGNARAGLLHTAHGPIETPIFMPVGTAGSVKAIAPDDLEAIGAQIILGNTYHLYLRPGDDLVARRGGLHEFNAWRRPILTDSGGFQVFSLEGLRRITEDGVEFRSHLDGSKHFFSPEKVISIQRNLNSDIMMQLDQCIGFGASHDEARKAAELSARWARRCREAYPAGTAGNLLFGIVQGEAFPDLREMSARALMDIGFEGYAIGGLAVGEPKHIMLRCLRQLHPILPGNKPRYLMGVGTPLDILHGIEEGVDMFDCVLPTRNARNGTLYTSRGKINIKRKEFAEDDGPLDPECACYTCRTFSRAYLRHLYVSGEILSFRLNSLHNLTYFLNMVKGARKAILEGRYAEYKARYEAMYPEEDPLFDEPEA

SEQ ID NO: 54663 - protein, 385 aa, unidentified
  source 1..385: note = Desulfovibrionaceae bacterium
  REGION 1..385: note = tr|A0A1J4T1Z8|A0A1J4T1Z8_9DELT Queuine tRNA-ribosyltransferase OS=Desulfovibrionaceae bacterium CG1_02_65_16 OX=1805130 GN=tgt PE=3 SV=1
MENLGRFHITHTDGLARRGSLVTSHGVIETPIFMPVGTQGSVKALAPDDLVNAGSQIILGNTYHLYLRPGDELLARMGGLHRFANWTKPILTDSGGFQVFSLKEIRKLSEEGVEFRSHLDGSKHFFSPEKVMSIQNNIGSDIMMVLDECVGYGADYDYTEKSLELTTRWAKRCRAAHPRHKNGQLLFGITQGGFFKDLRERSLEQLAEIDFDGFAIGGLSVGESIPEMYDMLRHIAPMLPADKPRYLMGVGTPMDILTGIENGVDMFDCVLPTRNARNGTLYTSQGKVNIRRAEYREDPSPLDPDCQCYTCRTFSKAYLRHLYVAQELLSYRLNSLHNITFFLTLVRQARQAIEQGRFTQLKARYAEVFAPASAKGDGPALEPGA

SEQ ID NO: 54664 - protein, 382 aa, unidentified
  source 1..382: note = Desulfovibrionales bacterium
  REGION 1..382: note = tr|A0A1F9QBF6|A0A1F9QBF6_9DELT Queuine tRNA-ribosyltransferase OS=Desulfovibrionales bacterium GWA2_65_9 OX=1797915 GN=tgt PE=3 SV=1
MTTAQNSAAALGRFTITARDGQARRGSLTTAHGVVQTPIFMPVGTQGSVKSLCPQDLDNAGAQIILGNTYHLYLRPGDELLARRGGLHRFMGWKGPILTDSGGFQVFSLKEIRKISEQGVEFRSHIDGSTHFFSPEKVMSIQENIGSDIMMVLDECVAYGADHDYTAKSLELTTRWARRCREAHPRHKNGQLLFGIIQGGFYKDLREKSLEQLRAIDFDGLAIGGLSVGESIPEMYDMLHHITPQMPENLPRYLMGVGTPLDILEGIEAGVDMFDCVLPTRNARNGTLYTSRGKVNIRRAEYREDDSPLDPDCSCYTCRTFSRAYLRHLYVAQELLSYRLNSLHNVSFFLDLVRRAREAIEQGRFAALKQRYVDIFRPGADS

SEQ ID NO: 54665 - protein, 367 aa, Desulfurella acetivorans
  REGION 1..367: note = tr|W0JFP8|W0JFP8_DESAE Queuine tRNA-ribosyltransferase OS=Desulfurella acetivorans A63; OX = 694431 GN=tgt PE=3 SV=1
MQFKCLKTSDNARLSLLWLKDEIELPAFMPVGTQGIVKALLPDTLIDIGYKLMLSNTYHLYLRPGVEIIEAFGGLHKFTNFKGSILTDSGGFQVFSLSDLRKVTQEGVVFKSHIDGSYHLFTPEKVLDIQFRFKSDIAMVLDECPAYSLDKSFVEKSLNITLNWAKRSSVIKRPPHTAVFGIVQGGVFEDLRKKSALEIAGMDFDGIAIGGLSVGESTQEMYDTVASVMQYLPEDKPRYAMGVGRPEDIVRLVGFGVDMFDCVMPTRNARNGYLFTDFGNINIKNAAYAKDESPIDENCDCYTCKNYSRAFLRHLYKSKELSFYTLATIHNLSYYYNLMQRIGQAIKNNSFAEFSKSFLDKRKYGYS

SEQ ID NO: 54666 - protein, 339 aa, unidentified
  source 1..339: note = Desulfurella amilsii
  REGION 1..339: note = tr|A0A1X4XXH7|A0A1X4XXH7_9DELT Queuine tRNA-ribosyltransferase OS=Desulfurella amilsii OX=1562698; GN = tgt PE=3 SV=1
MPVGTQGIVKALLPDMLTSIGYKLMLSNTYHLYLRPGIEIIEAFGGLHKFANFNGSILTDSGGFQVFSLSDLRKVAIEGVRFKSHIDGSYHFFTPEKVLDLQFRFKSDIAMVLDECPAYGLDKSATEKSLNITLNWAKRSSVIERPKDTAVFGIVQGGIFEDLRKKSALEISDMNFDGIAIGGLSVGEPLQQMYDTVAFTIEHLPKDKPRYAMGVGRPEDIITLVGFGIDMFDCVMPTRNARNGYLFTDFGNINIKNAIYAKDKSPIDEHCNCYTCKNFSRGFLRHLYKAKELSFYTLATIHNLTYYYNLIQSIKDAIKKGEFEQFAKSFLEKRRYGNS

SEQ ID NO: 54667 - protein, 367 aa, Desulfurella multipotens
  REGION 1..367: note = tr|A0A1G6IS09|A0A1G6IS09_9DELT Queuine tRNA-ribosyltransferase OS=Desulfurella multipotens; OX = 79269 GN=tgt PE=3 SV=1
MEFKCLKTSDNARLSLLWLKDEIELPAFMPVGTQGIVKALLPDTLIDIGYKLMLSNTYHLYLRPGVEIIEAFGGLHKFTNFKGSILTDSGGFQVFSLSDLRKVTQEGVVFKSHIDGSYHLFTPEKVLDIQFRFKSDIAMVLDECPAYSLDKSFVEKSLNITLNWAKRSSVIKRPPHTAVFGIVQGGVFEDLRKKSALEIAGMDFDGIAIGGLSVGESTQEMYDTVASVMQYLPEDKPRYAMGVGRPEDIVRLVGFGVDMFDCVMPTRNARNGYLFTDFGNINIKNAAYAKDESPIDENCDCYTCKNYSRAFLRHLYKSKELSFYTLATIHNLSYYYNLMQRIGQAIKNNSFAEFSKSFLDKRKYGYS

SEQ ID NO: 54668 - protein, 369 aa, unidentified
  source 1..369: note = Desulfuribacillus alkaliarsenatis
  REGION 1..369: note = tr|A0A1E5G0I2|A0A1E5G0I2_9BACL Queuine tRNA-ribosyltransferase OS=Desulfuribacillus alkaliarsenatis OX=766136 GN=tgt PE=3 SV=1
MAVTYELVKTCKQTGARAGIIHTPNGSFETPMFMPVGTLATVKAMSPEELKEIGAGIILSNTYHLFLRPGHDIVKEAGGLHKFMNWDQAILTDSGGFQVFSLSNLRKIKEEGVEFRSHLNGEKLFLSPEKATEIQNALGADIIMAFDECPPYPADYEYVKDSLERTTRWAKRCLDAHRNTDKQALFGIVQGGMYKDLRIESAKQLVDLDFPGYAIGGLSVGEEADIMYEVLEYTTPELPKDKARYLMGVGAPENLVEGVIRGIDMFDCVLPTRIARNGTVFTSKGKLVIRNAQYARDFQPIDSDCACYVCRNYTRAYIRHLIKCNEIFGMRLTTYHNLYYLINMMKQVRQAILEDRLGDFQKHFYAIRQ

SEQ ID NO: 54669 - protein, 369 aa, unidentified
  source 1..369: note = Desulfuribacillus stibiiarsenatis
  REGION 1..369: note = tr|A0A1E5L339|A0A1E5L339_9BACL Queuine tRNA-ribosyltransferase OS=Desulfuribacillus stibiiarsenatis OX=1390249 GN=tgt PE=3 SV=1
MAVTYELIKTCKQTGARLGKIHTPHGSFDTPMFMPVGTLATVKAMSPEELKEIGSGIILSNTYHLFLRPGHEIVKEAGGLHKFMNWDQAILTDSGGFQVFSLSNLRKIREEGVEFRSHLNGEKLFLSPEKATEIQNALGADIIMAFDECPPFPAEYQYVKDSLERTTRWAKRCLEAHANPDRQALFGIVQGGMYKDLRIESAQQLLDLNFPGYAIGGLSVGESADLMYEMLEHTVPILPQNKPRYLMGVGAPENLVEGVMRGIDMFDCVLPTRIARNGTMMTSKGKLVIRNAEYARDFRTVDENCQCKVCQNYSRAYIRHLIKCNEIFGFRLTTYHNLYYLINLMKQIRQAIAEDRLADFQKEFYAMRS

SEQ ID NO: 54670 - protein, 368 aa, Desulfurispirillum indicum
  REGION 1..368: note = tr|E6W4K6|E6W4K6_DESIS Queuine tRNA-ribosyltransferase OS=Desulfurispirillum indicum (strain ATCC BAA-1389 / S5) OX=653733 GN=tgt PE=3 SV=1
MQSLSFQLKHTCGQARAGTVTTRHGTIHTPIFMPVGTQATVKALSPRELDEAQAQIILGNTYHLYLRPGHELVKRFGGLHGFMNWPKPILTDSGGYQVFSLGSLRKITEEGVEFRSHIDGSRHFISPEKSLEIQQALGSDIMMVFDECPPSTADRGYIEKSLAMTLRWASRSRTAWTNRQQQALFGIIQGGLYPDLRLQSLSALVEMDFPGYAIGGLSVGEPPEKMYEVVEHIAPAMPADRPRYLMGVGTPVDLIQCIDRGVDMFDCVMPTRNARNGTLFTSTGKVNIKNARYAEDHEPLDSQCSCYTCRNFSRGYLRHLYQCGEILGLRLNTLHNIHYYLQLMAGARAAIADGTWNRWKNQQLDIYK

SEQ ID NO: 54671 - protein, 370 aa, Desulfurivibrio alkaliphilus
  REGION 1..370: note = tr|D6Z4W9|D6Z4W9_DESAT Queuine tRNA-ribosyltransferase OS=Desulfurivibrio alkaliphilus (strain DSM 19089 / UNIQEM U267 / AHT2) OX=589865 GN=tgt; PE = 3 SV=1
MSNPFTLLSSSSQCAARRGELRTLHGTVQTPVFMPVGTQATVKGVTPEQVRELGAEIILGNTYHLYLRPGHELIKKFGGLHRFMNWSGPILTDSGGFQIFSLQQLAKITEEGAAFKSHIDGSSLFLSPESAVAVQEDLGADIMMCLDTCIPYPADYRQAEEATELTSRWAARCRASQRVDGRLLFGIIQGGMYHDLRLRSLAALQEIGFDGYAIGGLSVGEPEELMYEICEATAAAMPAARARYLMGVGTPRNLVEAVYRGIDMFDCVMPTRNARNGMLFTSRGRLVIKNARYQDDPRPPDEECGCYTCRHYSRAYLRHLYQAREIMASVLMTIHNLSYYTGLMAAMRRAIEEDRFLEFYRDFNNATNAA

SEQ ID NO: 54672 - protein, 374 aa, Desulfurivibrio sp.
  REGION 1..374: note = tr|A0A3A6NK55|A0A3A6NK55_9DELT Queuine tRNA-ribosyltransferase OS=Desulfurivibrio sp. OX=2093369; GN = tgt PE=3 SV=1
MNSPFTLHARSSQCAARAGEVRTLHGAIQTPVFMPVGTQATVKGVTPENLLELGARIILANTYHLFLRPGHELIRQFGGLHSFMNWHGPILTDSGGFQIYSLRELARITEEGATFKSHLDGSSHFLSPEDAVAVQEALGSDIMMCLDTCIPFPATRQEAETATALTARWAARCRAAQRETGQLLFGIVQGGMYPELRARSVADMTAIGFDGYALGGLSVGEPTAVMYDMTARTAALLPADFPKYVMGVGTPEDLVECVFRGIDMFDCVMPTRNARNGMLFTSQGRLVIKNACYYNDPRPADENCGCYTCRNYSRAYLRHLYMAREIMASQLNTIHNLHYFVNLMAQMRQAIREDRFEIFRKEFYAMREQQIPPF

SEQ ID NO: 54673 - protein, 375 aa, Desulfurobacterium atlanticum
  REGION 1..375: note = tr|A0A238YDL8|A0A238YDL8_9BACT Queuine tRNA-ribosyltransferase OS=Desulfurobacterium atlanticum; OX = 240169 GN=tgt PE=3 SV=1
MLKFEIIETDGNARTGILKGTHGLTETPCFMPVATAGAVKGVRWEEIKESGYSLVLSNIYHLYLRPGIELIEKMGGLHRFINWNGLILTDSGGFQVFSLGDLMKLTEEGVYFRSHIDGSKHFFSPELVVEFEEKIGVDIGMVLDECTPYPATKEYALHSLERTYRWAKRSVEARSTDKTAIFGIVQGGVYDDLRLKSAKLTAELPFEGIAIGGLSVGEPKEDMYRITSLIAPKLPFEKPRYLMGVGKPEDIVVAVEHGVDMFDCVMPTRNARNGTLFTWNGKLNIKSAKYKEDEKPIDETCDCYTCKNFSRAYLRHLFAAKEINALILNSIHNLHFYSKLMEKIRKAIKEKRFKEFKQEFFSKYKVDEESPYYLT

SEQ ID NO: 54674 - protein, 375 aa, unidentified
  source 1..375: note = Desulfurobacterium indicum
  REGION 1..375: note = tr|A0A1R1MM95|A0A1R1MM95_9BACT Queuine tRNA-ribosyltransferase OS=Desulfurobacterium indicum; OX = 1914305 GN=tgt PE=3 SV=1
MLNFEILASDGKARTGILKGTHGQTETPCFMPVATAGAIKGVRWEEVKSSGYSMVLSNIYHLYLRPGTELIENVGGIHKFVGWDGLILTDSGGFQVFSLGDLMKLTEEGVYFRSHIDGSKHFFSPELVIEYEEKIGVDIGMVLDECTPYPATREYAKHSLERTYRWAKRSIEARTSDKTAIFGIVQGGTFDDLRILSAKLTSDLPFDGVAIGGLSVGEPKEDMYRITSLIAPLLPYEKPRYLMGVGKPEDIIVAVEHGVDMFDCVMPTRNARNGTLFTWNGKLNIKSAKYKSDERPVDENCDCYTCRNFSRAYLRHLFASKEINALILNSIHNLHFYAQLMEKTREAIKNKQFKEFKKEFFSKYKTDEESFYYLT

SEQ ID NO: 54675 - protein, 296 aa, Desulfurobacterium sp.
  REGION 1..296: note = tr|A0A432QS67|A0A432QS67_9BACT Queuine tRNA-ribosyltransferase (Fragment) OS=Desulfurobacterium sp. OX=2004706 GN=DSY34_02910 PE=3 SV=1
MEFQVLATDSRARYGKLKGTHGETETPCFMPVGTPGAVKGVTWDRISEMGYSLVLSNVYHLYLRPGIDIVEKAGGFHRFVNWNGLILTDSGGFQVFSLGKLMKITEDGIYFKSHIDGSEHFFSPELVVQFEERMGVDIGMVLDECTPYPATYEYAKHSMERTVRWALRSVRARTTDKTAIFGIVQGGVYDDLRIKCVELLKDLPFEGFAIGGLSVGEPKEEMYRITELVAPLLPEEKPRYLMGVGKPEDIIKAVEAGVDMFDCVIPTRNARNGTLFTSRGKINIKSAKYKNDFSPL

SEQ ID NO: 54676 - protein, 370 aa, Desulfurobacterium sp.
  REGION 1..370: note = tr|A0A432QYN1|A0A432QYN1_9BACT Queuine tRNA-ribosyltransferase OS=Desulfurobacterium sp.; OX = 2004706 GN=tgt PE=3 SV=1
MEFQVIKRDGNARLGILRGTHGETETPCFMPVGTLGAVKGVTWDRIKEMGYSLVLSNVYHLYLRPGLEILKEGGGLHSFTGWQNLILTDSGGFQVFSLSKLVKITEEGIYFKSHVDGSEHFFSPEFVVEFEEKVGVDIGMVLDECTPYPATYEYAKYSMERTVRWALRSIKARTTDKTAIFAIVQGGVYDDLRLKCVEMLSNLSFDGFAIGGLSVGEPKEEMYRITKLIAPQLPEDKPRYLMGVGKPEDILEAVEAGVDMFDCVIPTRNARNGTLFTSRGKINIKAAKFKKDFSPVDPECDCYTCKNFTRAYLRHLYVSGEINAAILNTIHNLHFYAKLMENIRNAIREGRFSEFKKSFLEKYLQWERSG

SEQ ID NO: 54677 - protein, 366 aa, Desulfurobacterium thermolithotrophum
  REGION 1..366: note = tr|F0S473|F0S473_DESTD Queuine tRNA-ribosyltransferase OS=Desulfurobacterium thermolithotrophum (strain DSM 11699 / BSA) OX=868864; GN = tgt PE=3 SV=1
MEFKVLATDGKARYGKLKGTHGETETPCFMPVGTLGAVKGVTWNEISEMGYSLVLSNVYHLYLRPGIEVIEKAGGLHRFVNWNGLILTDSGGFQVFSLGKLMKISEEGIYFKSHIDGSEHFFSPELVVELEEKMGVDIGMVLDECTPYPATYEYAKHSMERTVRWALRSIKARTTDKTAIFGIVQGGTYDDLRLKCVELLKGLPFEGFAIGGLSVGEPKEEMYRITKLVAPTLPEEKPRYLMGVGKPEDIIEAVEAGVDMFDCVIPTRNARNGTLFTSRGKVNIKSAKYKNDFSPLDPECDCYTCRNFTKAYLRHLYVSKEINSAILNTIHNLYFYNRLMKKMREAIKNGEFQEFKKEFFSKYLTF

SEQ ID NO: 54678 - protein, 365 aa, unidentified
  source 1..365: note = Desulfuromonadaceae bacterium
  REGION 1..365: note = tr|A0A1G2WH13|A0A1G2WH13_9DELT Queuine tRNA-ribosyltransferase OS=Desulfuromonadaceae bacterium GWC2_58_13 OX=1801896 GN=tgt PE=3 SV=1
MDAGSQARRGRVHTRRGIIETPVFMPVGTQGTVKAMYPETLKEIGAQIILANTYHLFLRPGHDLVRRLGGLHAFMNWDRPILTDSGGFQVFSLGALRKIDEEGVRFQSHLDGSSHVLTPESSIAIQEALGADIIMAFDECIPYPSSREYVAASTDRSSRWARRCRQARQVDDGAALYGIVQGGMHRDLRARSVADLLEIGFEGYAVGGLSVGESADLMYEIMEWTMPLLPENQPRYVMGVGTPENLVEGVRRGVDMFDCVMPTRNARNGVMFTSFGKVSIKQARYLDDARPLDPECSCYVCRNYSRAYLRHLYQSNEILSSMLNTHHNLHYYQQLMSSMRNAIEAGAFERFRKDFYEKRQIDGGN

SEQ ID NO: 54679 - protein, 375 aa, unidentified
  source 1..375: note = Desulfuromonadaceae bacterium
  REGION 1..375: note = tr|A0A1G2W3W2|A0A1G2W3W2_9DELT Queuine tRNA-ribosyltransferase OS=Desulfuromonadaceae bacterium GWC2_58_13 OX=1801896 GN=tgt PE=3 SV=1
MFQFTLLNTDSETSARRGRLDTPHGTIETPIFMPVGTHAAMKAMTPAQVEETGAQIILSNTYHLHLRPGEGLVEKAGGLHAFMNWKRPILTDSGGFQVFSLPKKKITEDGVFFKHEVSGNEIFLGPAEAMAIQNALGADIIMAFDECIPYPATHDYAAKSIRKTLRWAEACLKAHQRPDQALFGIVQGSVFDDLRRDCAREMTAMGFPGYAIGGVSVGEGLDLLKKVVDYTAPFLPENKPRYLMGVGLPEDILESVERGMDMFDCVIPTRYARSATLFTSRGKLRLTHRRYRRDFYPVDASCDCYCCRNFTRAYLHHLFNANEILSAILSAIHNVHFYLNMMAGIRSAIEQNQFRAFKEEFLGLYGFSGPEDSEH

SEQ ID NO: 54680 - protein, 375 aa, unidentified
  source 1..375: note = Desulfuromonadales bacterium
  REGION 1..375: note = tr|A0A1F9Q0P9|A0A1F9Q0P9_9DELT Queuine tRNA-ribosyltransferase OS=Desulfuromonadales bacterium GWD2_61_12 OX=1797918 GN=tgt PE=3 SV=1
MSVFELLQQDGASPARRGRLRTRRGDIETPAFMPVGTRGTVKAMSVEGLEEVGAQIILANTYHLLLRPGHELVGRRGGLHRFMHWDRPILTDSGGFQVFSLGELRRISEEGVRFQSHIDGASHFLSPEVAMQVQETLGADILMAFDECIPYPATRDYAATATARSGRWARRSKAARTPGDDAALFGIVQGGMYEDLRRRSTEELLDIGFDGYALGGLSVGESAEVMYQVMDWTLPLLPAGQPRYVMGVGTPENLVEAVSRGADMFDCVMPTRNARNGLLFTTFGKVSIKQARYAEDDGPLDPACSCRVCRNYSRAYLRHLYQSGEILSSMLNTHHNLHYYLTLMQGMRTALEEGSFKVFKDDFYRRRQASATAAV

SEQ ID NO: 54681 - protein, 369 aa, unidentified
  source 1..369: note = Desulfuromonadales bacterium
  REGION 1..369: note = tr|A0A1E7GY68|A0A1E7GY68_9DELT Queuine tRNA-ribosyltransferase OS=Desulfuromonadales bacterium C00003096 OX=1869311 GN=tgt PE=3 SV=1
MFKFDLLNTDPSCAARRGRLTTPHGVIETPIFMPVGTHGALKAMTPAQVEETGAQIILSNTYHLHLSPGEGLVEKAGGLHRFMNWKGPILTDSGGFQVFSLPKKRITETGVFFRHENTGEEIYLGPQEAMQIQNTLGADIIMAFDECIPFPATHDYASKSIRKTLRWAEECIKHQARKDQALFGIVQGGIYEDLRQECARIMGDMDFPGYAVGGVSVGEGLELLKKVVDYTAPMLPELKPRYLMGVGLPEDILESVERGMDMFDCVIPTRYARSATLFTKRGKIRLTNRRYRRDFFPVDPSCDCYCCRNFSRAYLHHLFRSNEILSATLSAIHNVHFYLNMMSQARQAIEQNDFKAFKTEFLGEYLSGD

SEQ ID NO: 54682 - protein, 373 aa, Desulfuromonas acetexigens
  REGION 1..373: note = tr|A0A550JLI0|A0A550JLI0_9DELT Queuine tRNA-ribosyltransferase OS=Desulfuromonas acetexigens; OX = 38815 GN=tgt PE=3 SV=1
MFQFTLLNTDSESAARRGRLQTPHGVIETPIFMPVGTHAAMKAMTPAQVEETGAQIILSNTYHLHLRPGEGLVEKAGGLHAFMNWKKPILTDSGGFQVFSLPKKKITEEGVFFKHEVNGNEIFLGPAEAMAIQNALGADIIMAFDECIPYPATHDYAAKSIGKTLRWAENCLKAHKRKDQALFGIVQGSVYDDLRRDCAKALTAMDFPGYAIGGVSVGEGLELLKKVVDYTAPFLPENKPRYLMGVGLPEDILESVERGMDMFDCVIPTRYARSATLFTSRGKLRLTHRRYRRDFYPVDASCSCYCCRNFTRAYLHHLFNANEILSAILSAIHNVHFYLDMMAQTRAAIERNEFKAFKAQFLGRYGFSGAGDE

SEQ ID NO: 54683 - protein, 371 aa, Desulfuromonas acetexigens
  REGION 1..371: note = tr|A0A550JKH6|A0A550JKH6_9DELT Queuine tRNA-ribosyltransferase OS=Desulfuromonas acetexigens; OX = 38815 GN=tgt PE=3 SV=1
MTSFSFDLLHEDGRARRGRLHTRRGVVETPVFMPVGTQATVKAMYPETLKEIGAQIILANTYHLLLRPGHERVRALGGLHRFMNWDRPILTDSGGFQVFSLGELRKIDEQGVRFQSHLDGAAHVLTPESSIAIQEALGSDIIMAFDECIPYPATREYVAESTARSSRWAARCRQARQPEDGAALFGIVQGGMHRDLRAQSVADLLAIGFEGYAVGGLSVGESAELMYEVMDWTMPLLPRDCPRYVMGVGTPENLVEGVRRGVDMFDCVMPTRNARNGVLFTSFGKISIKQARFLDDESPIDPDCDCYVCRHYSRAYLRHLYQSNEILSSMLNTHHNLHYYQQLMARMRDAIESGTFETFRAEFLAARRIDP

SEQ ID NO: 54684 - protein, 371 aa, Desulfuromonas acetoxidans
  REGION 1..371: note = tr|Q1JY76|Q1JY76_DESA6 Queuine tRNA-ribosyltransferase OS=Desulfuromonas acetoxidans (strain DSM 684 / 11070) OX=281689 GN=tgt PE=3 SV=1
MFSFELLHNDRSCRARRGRLHTPHGAIETPIFMPVGTHGALKAMTPAQVEETGAQIILSNTYHLHLKPGESLVKKAGGLHRFMNWDKPILTDSGGFQVFSLPKKKITESGVFFRHEHTGEEIFLGPKEAMQIENDLGADIIMAFDECIPYPSSHDYAKKSIHKTLRWANSCLEAHGRSDQALFGIVQGSVYEDLRRECAEQLTAMDFPGYAIGGVSVGEGLELLKQVVDYTEPFLPSNKPRYLMGVGLPEDILESIERGMDMFDCVIPTRYARSATAFTSRGKLRLTNRNYRRDFFPVDPACDCYCCRNFTRAYLHHLFNANEILSATLMAIHNVHFYLNMVKQAREAIEQNCYIDFKNDFLGEYGFFEKK

SEQ ID NO: 54685 - protein, 376 aa, Desulfuromonas acetoxidans
  REGION 1..376: note = tr|Q1K1D5|Q1K1D5_DESA6 Queuine tRNA-ribosyltransferase OS=Desulfuromonas acetoxidans (strain DSM 684 / 11070) OX=281689 GN=tgt PE=3 SV=1
MTIPFDLITTDPNSSARRGRLHTAHGVVETPVFMPVGTQGTVKGMLPESLHDLGAQIILGNTYHLFLRPGHDLVKKMGGLHRFMNWSGPILTDSGGFQVFSLGKLRKIDEEGVRFQSHLDGAHQILTPESSIEIQQALGSDIIMVFDECIPYPATRDYVIDSTERSMRWAKRCKQAHNRQDGSALFGIVQGGMHEDLRRKSAHDLMEIGFDGYAIGGLSVGEEAEVMYEVMDYTLPELPADRPRYVMGVGTPENLIEGVRRGVDMFDCVMPTRNARNGVLFTSFGKISIKQAQYREDERPIDPDCDCYVCRHYSRAYLRHLYQSNEILSSMLNTMHNLHYYVQLMAQVRQALDEGNFATFYKEFYQRRQSGVVLES

SEQ ID NO: 54686 - protein, 376 aa, unidentified
  source 1..376: note = Desulfuromonas soudanensis
  REGION 1..376: note = tr|A0A0M3QFI8|A0A0M3QFI8_9DELT Queuine tRNA-ribosyltransferase OS=Desulfuromonas soudanensis; OX = 1603606 GN=tgt-2 PE=3 SV=1
MTEFTFDLLATDSGSAARRGRMTTRRGLIETPIFMPVGTQGTVKAMLPEALKEIGAQIILGNTYHLFLRPGHELIRNLGGLHRFMNWDRPILTDSGGFQVFSLGALRKIDEEGVRFQSHLDGSSHVLSPESSIAVQEALGADIIMAFDECIPYPASREYVAESTARSGRWARRCKLARSQGDGAALFGIVQGGMHPDLRAGSVNELLEIGFEGYAIGGLSVGEEAALMYEVMDNTLPLLPRDRPRYVMGVGTPENLIEGVSRGVDMFDCVMPTRNARNGVLFTSFGKVSIKQARYLADPLPVDPDCSCYVCGNYSRAYLRHLYQSNEILSSVLNTHHNLHYYLGLMQGVRDALDGGRFGEFKKDFYRKRADNPSGT

SEQ ID NO: 54687 - protein, 373 aa, unidentified
  source 1..373: note = Desulfuromonas soudanensis
  REGION 1..373: note = tr|A0A0M3QFL1|A0A0M3QFL1_9DELT Queuine tRNA-ribosyltransferase OS=Desulfuromonas soudanensis; OX = 1603606 GN=tgt-1 PE=3 SV=1
MFEFTLQCTDPGSAARRGRLETPHGVIETPIFMPVGTHGAVKAMTPAQVEETGAQIILSNTYHLHLKPGEGLVEKAGGLHKFMNWHRPILTDSGGFQVFSLPKKKITETGVYFRHEVTGEEIFLGPKEATTIQNALGADIIMAFDECIPYPATHAYSAKSIRTTLKWADECLKAHTRSDQALFGIVQGSVYEDLRRDCARELTAMDFPGYAIGGVSVGEGLELLKKVVDYTAPFLPENKPRYLMGVGLPEDILESVERGIDMFDCVIPTRYARSATLFTSRGKIRLTHRRYRRDFYPVDAACSCYCCRNFTRAYLHHLYNSNEILSAILAAIHNVHFYLEMMAGARRAIEEGNFKGYKEEFLGSYGFSDSDDG

SEQ ID NO: 54688 - protein, 378 aa, Desulfuromonas sp.
  REGION 1..378: note = tr|A0A2J6JE85|A0A2J6JE85_9DELT Queuine tRNA-ribosyltransferase OS=Desulfuromonas sp. OX=892; GN = tgt PE=3 SV=1
MSTFSFSLLHKDPKSQARRGRIETRRGVIETPVFMPVGTQATVKGMRPEDLLTAGAQIILGNTYHLYLRPGHTLIEKLGGLHRFMNWEKPILTDSGGFQVFSLGALRKISEEGVRFQSHLDGSKHMLTPELSIAIQQSLDADIVMAFDECIPYPSERRYVENSTALSGRWARRCRDAFDTSRGAALFGIVQGGMHPDLRAASAEELQEIGFDGYAVGGLSVGEEAELMYGMMECTMPLLPEDRPRYVMGVGTPENLIEGVRRGVDMFDCVMPTRNARNGVLFTSFGKISIKQARYREDEGPIDPTCSCNVCRSYSRAYLRHLYQSHEILASMLNTQHNLHYYLSLMANARAAIAQGRFTAFAQEFYRLRQTGGDGDTI

SEQ ID NO: 54689 - protein, 374 aa, Desulfuromonas sp.
  REGION 1..374: note = tr|A0A357YG01|A0A357YG01_9DELT Queuine tRNA-ribosyltransferase OS=Desulfuromonas sp. OX=892; GN = tgt PE=3 SV=1
MFEFSLLATDPSTAARRGRLTTPHGVIETPIFMPVGTHAAMKAMTPAQVTACGAQIILANTYHLHLKPGESLVEKAGGLHSFMGWDKPILTDSGGFQVFSLPKKKIADNGVYFRHEVTGDEIFLGPKEATTIQNQLGADIIMAFDECIPYPATLDYAAKSIKKTIRWAEDCKKAHSRSDQALFGIVQGSVYPNLRKECALALAAMDFPGYAVGGVSVGEGLDLLKQVVDCTAPFLPEHKPRYLMGVGLPEDILESVERGMDMFDCVIPTRYARSATLFTTRGKLRLTHRRYRRDFFPVDASCDCYCCRNFTRAYLHHLFNANEILSAILSAIHNVRFYLKMMEGCRSAIEQGAYRDFKRDFLGSYGSSADGNEA

SEQ ID NO: 54690 - protein, 374 aa, Desulfuromonas thiophila
  REGION 1..374: note = tr|A0A1G7CCN6|A0A1G7CCN6_9DELT Queuine tRNA-ribosyltransferase OS=Desulfuromonas thiophila; OX = 57664 GN=tgt PE=3 SV=1
MTSYELLCRDPSSAARRGRLQTRRGPVETPAFMPVGTQGTVKAMLPETLQELGAQILLGNTYHLFLRPGHERIARLGGLHRFMHWDGPILTDSGGFQVFSLGKLRKIDEAGVRFQSHLDGSAQVLTPESSIAIQQALDSDVIMVFDECIPYPAERAYVADSTARSMRWAARCKAAHQPDGSALFGIVQGGMHADLRRRSVEELLAIGFDGYALGGLSVGEEAALMYQVMDWTLPLLPDSQPRYVMGVGTPENLVEGVRRGVDLFDCVMPTRNARNGVLFTHFGRLSIKQARYQDDAGPIDPACDCYVCRHYSRAYLRHLYQCNEILAAMLNTHHNLHYYLGLMARMRQALEQGRFAAFCQDFYQRRSSAETDCG

SEQ ID NO: 54691 - protein, 373 aa, Desulfuromonas thiophila
  REGION 1..373: note = tr|A0A1G6Z1A3|A0A1G6Z1A3_9DELT Queuine tRNA-ribosyltransferase OS=Desulfuromonas thiophila; OX = 57664 GN=tgt PE=3 SV=1
MFSFELLHQDRHSRARRGRLQTPHGVIETPIFMPVGTHGALKALTPDQVEACGAQIILSNTYHLHLKPGEGLVEKAGGLHRFMHWNKPILTDSGGFQVFSLPKKRITADGVFFRHEVSGEEIFLGPQQAMEIQNALGADIIMAFDECIPYPSDIGYARQSIQKTLRWAECCLKAHRRSDQALFGIVQGSVYPELRRECAEQLRQLDFPGYAIGGVSVGEGLELLKKVVDDTEPHLPADKPRYLMGVGLPEDILESIERGMDMFDCVIPTRYARSATLFTSRGKLRLTHRRYRRDFFPVDASCGCYCCRNFSRAYLHHLYNANEILSATLAAIHNVHFYLDLVRQAREAIEQNRFSAFKASFLQQYGAAGNSDD

SEQ ID NO: 54692 - protein, 370 aa, Desulfuromusa kysingii
  REGION 1..370: note = tr|A0A1H3Y673|A0A1H3Y673_9DELT Queuine tRNA-ribosyltransferase OS=Desulfuromusa kysingii OX=37625; GN = tgt PE=3 SV=1
MFQFKLLKEDPHSRARRGRLETPHGTIETPIFMPVGTHGAVKAMTPAQVEETEAQIILSNTYHLHLKPGEGLVKKAGGLHKFMNWKRPILTDSGGFQVFSLPKKRIGDDGVHFRHELTGEEIFLGPKEAMQIENDLGADIIMAFDECIPYPTTHDYAAKSVKKTIRWAESCLKHHARDDQALFGIVQGGVYEDLRRECAETLTAMNFPGYAIGGVSVGEGLDLLKQVVEYTEPFMPKNKPRYLMGVGLPEDILESIERGMDMFDCVIPTRYARSATLFTKRGKIRLTNRNFRRDFFPVDPSCDCYCCRNFTRAYLHHLYNANEILSATLAAIHNVRFYLNMVAGARAAIEAGDYLRFKEDFLGEYLPSKK

SEQ ID NO: 54693 - protein, 378 aa, Desulfuromusa kysingii
  REGION 1..378: note = tr|A0A1H3YDD0|A0A1H3YDD0_9DELT Queuine tRNA-ribosyltransferase OS=Desulfuromusa kysingii OX=37625; GN = tgt PE=3 SV=1
MSAFKYALLQQDTGSQARRGRITTSRGEIETPAFMPVGTSATVKGILPEALKEIGAQIVLANTYHLYLRPGHKLIQQLGGLHKFMHWDRPILTDSGGFQVFSLGDIRKITEEGAAFQSHVDGSKHMLTPELSIEIQLALGSDIVMVFDECIPHPAERSYISESTNRSARWAKRCREVLSPGSSSALFGIVQGGMELDLRKQSVEQLREIGFEGYALGGLSVGEETSLMYDMMEYSLPLLPIDHPRYVMGVGTPENLIEGVARGCDMFDCVMPTRNARNGLLFTTFGKVSIKQARYRDDERPLDPDCQCYVCQHFSRAYLRHLYVSKEVLASVLNTHHNLYYYQQLMAGIRQSLEDGTFSKFRKDFYHKREKHSLNLID

SEQ ID NO: 54694 - protein, 373 aa, Dethiobacter alkaliphilus
  REGION 1..373: note = tr|C0GKE6|C0GKE6_9FIRM Queuine tRNA-ribosyltransferase OS=Dethiobacter alkaliphilus AHT 1; OX = 555088 GN=tgt PE=3 SV=1
MAVTYTLIKECPTTGARAGILHTPHGDVPTPVFMPVGTQATVKTMSPEELKEIGAGIILSNTYHLYLRPGHELIREAGGLHKFMNWDRAILTDSGGFQVFSLGDLRKIKEEGVTFRSHIDGSEHFLSPEKVMEIQEALGSDIIMAFDECAPYPADREYIKNSLERTTRWAERCKKAHTRQDQALFGIVQGGMYADLRQESARQLVPMDFPGYAVGGLSVGEPAHLMYEMLEATVPLLPQNKPRYLMGVGTADYLIEGVSRGIDMFDCVLPTRIARNGTVMTRDGYLTVRNAPYAKDFRPLEEGCECYACRNYTRAYIRHLIKTNEIFGFRLTTYHNLYVLAHFMAKLRESILNGTFPDVYQEFTARFGRKKED

SEQ ID NO: 54695 - protein, 373 aa, Dethiobacter sp.
  REGION 1..373: note = tr|A0A3A6NJL3|A0A3A6NJL3_9FIRM Queuine tRNA-ribosyltransferase OS=Dethiobacter sp. OX=2093370; GN = tgt PE=3 SV=1
MAINLTITAKYGRARAGEIKTPRGLIRTPAFMPVGTQATVKAMTPEELEEIGVDIILNNTYHLYLRPGTDIIDQAGGLHRFMHWQRPILTDSGGFQVFSLSALREVDEEGVTFRSHIDGSTHSFSPEKAVEVQNILGADIIMPLDHVVPYPAAYGDTRQAMERTIRWAGRSRDCHKNTDAQALFAIVQGGTYDDLREKCCRELVGMDFPGYALGGLSVGEPKEIMYHLLDISVPFLPEEKPRYLMGVGSADALLEGVHRGVDLFDCVLPTRIARNGRVMISRGYLTLRNAEFARDMRPVDPECSCYVCRNYSRAYIRHLLKANEILGLRLTTYHNLFFLKDFMDKIRQAIVEQQFAQFYEEFWAKFQSSPLKK

SEQ ID NO: 54696 - protein, 379 aa, unidentified
  source 1..379: note = Dethiosulfatarculus sandiegensis
  REGION 1..379: note = tr|A0A0D2IZ54|A0A0D2IZ54_9DELT Queuine tRNA-ribosyltransferase OS=Dethiosulfatarculus sandiegensis OX=1429043 GN=tgt PE=3 SV=1
MAKLDFDILAQSGRARRGRLTTRKGVVETPTFMPVGTVGSVKSLTPGEVSDLGAGIILGNTYHLLLRPGVDLVAEMGGLHRFMGGWTGSILTDSGGFQVFSLASRRVVTEEGVSFRSHLDGALMELTPEKAMDAQTLLGSDILMALDECPPPDADREYAEKALLRDARWAKRAKSALRPESGALFGIVQGGMYKDLRAQSAELICELDLPGHSLGGLSVGEPKETMLEVIDATQPLMPRKKPLYLMGVGAPEDLINCVGLGVDMFDCVLPTRMARTGTMLTKDGRLNLRNARFARDSRPIEEDCGCPACRNYSRAYLRHLFAARELLAYRLGTLHNLYFTLNLMARIRQAIENDNYAAFAREALDRLSRGEHRAAADDQ

SEQ ID NO: 54697 - protein, 372 aa, Dethiosulfatibacter aminovorans
  REGION 1..372: note = tr|A0A1M6D3F1|A0A1M6D3F1_9FIRM Queuine tRNA-ribosyltransferase OS=Dethiosulfatibacter aminovorans DSM 17477 OX=1121476 GN=tgt PE=3 SV=1
MALEYKLLYESKECNARLGEIHTPHGVIETPIFMPVGTKATVKTMTPDELKDLEAQIILSNTYHLYLRPGHSLVKEAGGLHKFMNWDRPILTDSGGFQVFSLGKMRKITEEGVVFKSHIDGSEHFISPEKAVEIQNCLGSDIMMAFDECTPYPATYEYAKQSMERTTRWAKRCKEAHKNTDKQALFGIVQGSMYKDLRLESLRQLVELDLPGYALGGLSVGEPAEIMKEVLDYMVHEMPRNKPRYLMGVGSPDYIFEAVERGIDMADCVMPTRMARNGAFMTSKGRITIKNAVHRNDFSPIDDECECYCCKNYSRAYLRHLFKENEILGARLATIHNLFFLINLMKNIRISIREERFLEFKNDFYQKYGYKK

SEQ ID NO: 54698 - protein, 373 aa, Dethiosulfovibrio peptidovorans
  REGION 1..373: note = tr|D2Z903|D2Z903_9BACT Queuine tRNA-ribosyltransferase OS=Dethiosulfovibrio peptidovorans DSM 11002 OX=469381 GN=tgt PE=3 SV=1
MMFEFRVQAVCPETGARAGELVTPHGIIETPVFMPVGTRATVKAMSPREMEEIEAQIVLSNTYHLYLRPGVELIEKAGGLHRFMNWHRPILTDSGGFQVFSLSGINRIKEDGVEFSSHLDGSRHFMTPELATRVQEGLGSDIAMCFDQCVELPCDEETARKSVERTLRWARRCKEVHRRDDQALFGIVQGALFDDLRKDCARELIAMDFPGYSIGGLSVGESHDEMYRILDLLNPILPQEKPRYLMGVGFPTNLVEGVARGVDMFDCVLPTRNGRNGTLLTSRGKFNIKHSRFEEDWGPIDPDCDCYACREFSKAYIRHLYRSGEMLGARLCSWHNLRYLISLMKGAREAILEGRFPQFRDRFHELFSTGKVL

SEQ ID NO: 54699 - protein, 371 aa, Dethiosulfovibrio peptidovorans
  REGION 1..371: note = tr|A0A2G6M267|A0A2G6M267_9BACT Queuine tRNA-ribosyltransferase OS=Dethiosulfovibrio peptidovorans; OX = 47055 GN=tgt PE=3 SV=1
MFEFRILGICPETGARAGELITPHGVIPTPVFMPVGTRATVKAMSPREMLEIGTSILLSNTYHLYLRPGVDLIRKAGGLHRFMNWDGPILTDSGGFQVFSLSGINRVLDEGVEFASHLDGSRHLMTPELATSVQEGLGSDIAMCFDQCVELPCAKDEARQSVERTLRWARQSQEAHTREDQALFGIVQGALFDDLRSFCAQELIQMKFPGYAIGGLSVGESHDEMYRILDLLNPVLPQDKPRYLMGVGYPTNLVEGVARGVDMFDCVLPTRNGRNGTILTSQGRYNIKHGRFTEDWGPLDPHCDCYACREFSRAYIRHLYRSGEILGARLCSWHNLRYLIRLVKGAREAILNGTFPLYRASFHRLFEGGES

SEQ ID NO: 54700 - protein, 366 aa, Dethiosulfovibrio salsuginis
  REGION 1..366: note = tr|A0A1X7J8W8|A0A1X7J8W8_9BACT Queuine tRNA-ribosyltransferase OS=Dethiosulfovibrio salsuginis; OX = 561720 GN=tgt PE=3 SV=1
MAECPETGARAGELVTPHGIIETPVFMPVGTAATVKAMSPKEMAEIETQILLSNTYHLYLRPGAELVEEAGGLHRFMNWNGPILTDSGGFQVFSLAGINKILEDGVEFVSHLDGSRHFMTPELATQTQEKLGSDIAMCFDQCVKLPCTREEAGKSVDRTLRWAARCQSIHRREDQALFGIVQGALYDDLRVKCAEKLIDMDFPGYSIGGLSVGESHQEMYRILDLLNPVMPKGKPRYLMGVGYPTNLVEGVARGVDMFDCVLPTRNGRNGTLLTSRGKFNIKHSRFTHDWGPIDPDCDCYACREFSRAYVRHLYRSGEMLSARLCSWHNLRFLISLMKRARQSILDGVFPAFRAEFHRLFGESNPL

SEQ ID NO: 54701 - protein, 375 aa, Devosia chinhatensis
  REGION 1..375: note = tr|A0A0F5FND6|A0A0F5FND6_9RHIZ Queuine tRNA-ribosyltransferase OS=Devosia chinhatensis OX=429727; GN = tgt PE=3 SV=1
MKQVSFTIAATDGMARRGRIDTPRGEINTPAFMPVGTAGTVKAMYPEQVRETGADILLGNTYHLMLRPGAERVASLGGLHDFMDWQRPILTDSGGFQVMSLAKLRKLTEKGVTFKSHIDGSSHELTPERSIEIQTLLDSDIIMQLDECIALPAERKEMERAMELSIRWADRSKTAFNNQLNRALFGIVQGGDDAELRARSAAGLKSIGFDGYAVGGLAVGEPQEVMFRVLSEITPELPQDKPRYLMGVGKPDDILGGIERGIDMFDCVHPTRAGRHGHAYTRFGVINLKNARHKDDHRPLDEASPNPNCRRWSRAYLHHLVRTEEILGAMVLSQINLAYYQELTAGTRAAIEAGRMSDFAAETRAAWAAGDLPVL

SEQ ID NO: 54702 - protein, 379 aa, Devosia crocina
  REGION 1..379: note = tr|A0A1I7N935|A0A1I7N935_9RHIZ Queuine tRNA-ribosyltransferase OS=Devosia crocina OX=429728; GN = tgt PE=3 SV=1
MSTSTKLVTFSVSATDGLARRGRIDTPRGEINTPAFMPVGTAGTVKAMYPEQVRETGADILLGNTYHLMLRPGAERVASLGGLHTFMDWQRPILTDSGGFQVMSLAKLRKLTEKGVTFKSHIDGSSHELTPERSIEIQTLLDSDIIMQLDECIALPAERKEMARAMELSLRWADRSKTAFNNQKNRALFGIVQGGDDPELRARSAAGLQSIGFDGYSIGGLAVGEPQEVMFRVLSNITPELPLDKPRYLMGVGKPDDILGGIERGVDMFDCVHPTRAGRHGHAYTRFGVINLKNARHKDDHRPLDEASPNPNCRRWSRAYLHHLVRTEEILGAMVLSQINLAYYQELTAGARVAIEDGRMADFAAETRAAWAAGDLPVL

SEQ ID NO: 54703 - protein, 375 aa, unidentified
  source 1..375: note = Devosia elaeis
  REGION 1..375: note = tr|A0A178HVD7|A0A178HVD7_9RHIZ Queuine tRNA-ribosyltransferase OS=Devosia elaeis OX=1770058; GN = tgt PE=3 SV=1
MKQVNFSLIASDGMARRGRIDTPRGEINTPAFMPVGTAGTVKAMYPEQVRETGADILLGNTYHLMLRPGAERVAGLGGLHTFMDWQRPILTDSGGFQVMSLAKLRKLTEKGVTFKSHIDGSSHELTPERSIEIQTLLDSDIIMQLDECIALPAERKEMERAMELSLRWADRSKTAFNNQANRALFGIVQGGDDPELRARSAAGLQSIGFDGYSIGGLAVGEPQEVMFRVLSDITPELPWDRPRYLMGVGKPDDILGGIERGVDMFDCVHPTRAGRHGHAYTRFGVINLKNARHKDDHRPLDEASPNPNCRRWSRAYLHHLVRTEEILGAMVLSQINLAYYQELTAGARAAIEAGRISDFAAETRAAWAAGDLPVL

SEQ ID NO: 54704 - protein, 377 aa, unidentified
  source 1..377: note = Devosia enhydra
  REGION 1..377: note = tr|A0A1K2HVC3|A0A1K2HVC3_9RHIZ Queuine tRNA-ribosyltransferase OS=Devosia enhydra OX=665118; GN = tgt PE=3 SV=1
MTSPVTFTLEATDGMARRGRIDTHRGAINTPAFMPVGTAGTVKGLYPEQVRETGADILLGNTYHLMLRPGAERVARLGGLHEFMDWARPILTDSGGFQVMSLAKLRKLTEKGVTFRSHIDGSAHELTPERSIEIQKLLDSDIIMQLDECIALPAEHREIERAMELSLRWAQRSKDAFAEAPGRALFGIVQGGDDPELRARSAAGLQDIGFHGYSIGGLAVGEPQEVMFRVLSDLTPLMPQDRPRYLMGVGKPDDILGGIERGVDMFDCVHPTRAGRHGHAYTRFGVINLKNARHKDDHRPLDEASPNPNCRRFSRAYLHHLVKAEEMLGAMLLSQINLHYYQELTAGARTAISAGRMADFAVETRNGWARGDLPPLA

SEQ ID NO: 54705 - protein, 379 aa, unidentified
  source 1..379: note = Devosia epidermidihirudinis
  REGION 1..379: note = tr|A0A0F5QHD8|A0A0F5QHD8_9RHIZ Queuine tRNA-ribosyltransferase OS=Devosia epidermidihirudinis; OX = 1293439 GN=tgt PE=3 SV=1
MSQTTKQVTFTISATDGAARRGRIDTPRGDIQTPAFMPVGTAGTVKAMYPEQVRETGADILLGNTYHLMLRPGAERVASLGGLHDFMDWQRPILTDSGGFQVMSLAQLRKLTERGVTFKSHIDGSSHDLTPERSIEIQTLLDSDIIMQLDECLKLPAETKEIERAMELSLRWADRSKTAFNNQANRALFGIVQGGDNADLRLRSAQGLKSIGFDGYAVGGLAVGEPQEVMFRVLDDIVPELPADRPHYLMGVGKPDDILGAIGRGIDMFDCVHPTRAGRHGHVYTRFGVINLKNARHKDDHRPLDEASPNPNCRRWSRAYLHHLVKTEEILGAMILSQINLAYYQELVQGCRVAIEGSRFTDFAAETRAAWAAGDLPTL

SEQ ID NO: 54706 - protein, 381 aa, Devosia geojensis
  REGION 1..381: note = tr|A0A0F5FTT1|A0A0F5FTT1_9RHIZ Queuine tRNA-ribosyltransferase OS=Devosia geojensis OX=443610; GN = tgt PE=3 SV=1
MNKTMKQVSFSLAATDGMARRGRIDTPRGDIQTPAFMPVGTAGTVKALYPEQVRETGADILLGNTYHLMLRPGAERVAKLGGLHVFMDWPRPILTDSGGFQVMSLSKLRKITEQGVTFRSHLDGSAYELTPERSIEIQTLLDSDIIMQLDECIPLPSEKKEMERAMELSLRWGDRSKTAFDSQMNRALFGIVQGGDDAELRGKSAAGLRSIGFDGYAVGGLAVGEPQEVMFRVLGEITPELPVDRPRYLMGVGKPDDILGGIERGIDMFDCVHPTRAGRHGHAYTRFGVINLKNARHKDDPRPLDEASPNPNCRRFSRAYLHHLVKTEEILGAMILSQINLSYYQELVSGARGAIEAGRFSDFAAETRAQWAAGDLPVIDG

SEQ ID NO: 54707 - protein, 376 aa, Devosia insulae
  REGION 1..376: note = tr|A0A1E5XL32|A0A1E5XL32_9RHIZ Queuine tRNA-ribosyltransferase OS=Devosia insulae DS-56; OX = 1116389 GN=tgt PE=3 SV=1
MKSDYSFTLLATDGMARRGRIDTWRGDVQTPAFMPVGTVGTVKGMYPEQVRDTGADILLGNTYHLMLRPGAERVAALGGLHDFMDWQRPILTDSGGFQVMSLTKLRKLTEKGVTFRSHIDGSAHELTPERSIEIQTLLDSDIIMQLDECIPLPSEHKEMERAMELSLRWAQRSKDAFGNQPHRSLHGIVQGGDNAELRGRSAAGLKSIGFNGYSIGGLAVGEPQEVMFRVLSEITPELPTDKPRYLMGVGKPDDILGGIERGVDMFDCVHPTRAGRHGHAYTRFGVINLKNARHKDDPRPLDEESPNPNCRRFSRAYLHHLIRTEEMLGAMILSQINLSYYQQLCIGARTAIEAGTLADYAAQTRATWAAGDIAVI

SEQ ID NO: 54708 - protein, 375 aa, Devosia limi
  REGION 1..375: note = tr|A0A0F5LL37|A0A0F5LL37_9RHIZ Queuine tRNA-ribosyltransferase OS=Devosia limi DSM 17137; OX = 1121477 GN=tgt PE=3 SV=1
MKQVTFTLSATDGKARRGRIDTPRGDIQTPAFMPVGTAGTVKAMYPEQVRETGADILLGNTYHLMLRPGAERVASLGGLHTFMDWERPILTDSGGFQVMSLSQLRKMSERGVTFKSHIDGSTHELTPERSIEIQTLLDSDIIMQLDECIALPAEHKEMERAMELSLRWADRSKTAFNNQANRALFGIVQGGDAPDLRARSAQGLTSIGFDGYAVGGLAVGEPQEVMFRVLDEIVPELPTDRPHYLMGVGKPDDILGAIGRGIDMFDCVHPTRAGRHGHVYTRFGVINLKNARHKDDHRPIDEASPNRNCRRFSRAYLHHLVKTEEILGAMILSQINLAYYQELVQGARTAIESSRFTDFAAETRAAWAAGDLPTL

SEQ ID NO: 54709 - protein, 375 aa, unidentified
  source 1..375: note = Devosia lucknowensis
  REGION 1..375: note = tr|A0A1Y6ES23|A0A1Y6ES23_9RHIZ Queuine tRNA-ribosyltransferase OS=Devosia lucknowensis OX=1096929; GN = tgt PE=3 SV=1
MKQVTFSVLASDGMARQGRIDTPRGEINTPAFMPVGTAGTVKAMYPEQVRETGADILLGNTYHLMLRPGAERVASLGGLHDFMDWQRPILTDSGGFQVMSLAKLRKLTEKGVTFKSHIDGSAYELTPERSIEIQTLLDSDIIMQLDECIALPAERKEMERAMELSIRWAERSKTAFNNQQNRALFGIVQGGDDAELRGRSAAGLKSIGFDGYAVGGLAVGEPQAVMFRVLSDITPELPEDRPRYLMGVGKPDDILGGIERGIDMFDCVHPTRAGRHGHAYTRFGVINLKNARHKDDHRPLDEASPNPNCRRWSRAYLHHLVKTEEILGAMVLSQINLAYYQELTAGTRAAIAAGRMTDFAAETRAAWAAGDLPPL

SEQ ID NO: 54710 - protein, 379 aa, Devosia psychrophila
  REGION 1..379: note = tr|A0A0F5PVH9|A0A0F5PVH9_9RHIZ Queuine tRNA-ribosyltransferase OS=Devosia psychrophila OX=728005; GN = tgt PE=3 SV=1
MSSPTKLVTFTLSATDGMARRGRIDTPRGDIQTPAFMPVGTAGTVKAMYPEQVRETGADILLGNTYHLMLRPGAERVASQGGLHTFMDWQRPILTDSGGFQVMSLAQLRKLTEKGVTFRSHIDGSSHELTPERSIEIQTLLDSDIIMQLDECLKLPAEKKEIERAMQLSLRWADRSKTAFNNQQNRALFGIVQGGDDPELRAKSAQGLKSIGFDGYAVGGLAVGEPQEVMFKVIEEITPELPDDRPRYLMGVGKPDDILGAIGRGIDMFDCVHPTRAGRHGHVYSRFGVINLKNARHRDDHRPIDELSPNPNCRRWSRAYLHHLVKTEEILGAMILSQMNLAYYQELVQGCRGAIEGSRFNDFAAETRAAWAAGDLPVL

SEQ ID NO: 54711 - protein, 379 aa, Devosia riboflavina
  REGION 1..379: note = tr|A0A087M1L5|A0A087M1L5_9RHIZ Queuine tRNA-ribosyltransferase OS=Devosia riboflavina OX=46914; GN = tgt PE=3 SV=1
MSTTTKQVTFSLLATDGAARRGRIDTPRGEINTPAFMPVGTAGTVKAMYPEQVRETGADILLGNTYHLMLRPGAERVASLGGLHDFMDWQRPILTDSGGFQVMSLAKLRKLTEKGVTFKSHIDGSAYELTPERSIEIQTLLDSDIIMQLDECIALPAERKEIERAMELSLRWADRSKTAFNNQQNRALFGIVQGGDDAELRAKSAAGLKSIGFDGYSIGGLAVGEPQDVMFRVLSEITPELPTDRPRYLMGVGKPDDILGGIERGVDMFDCVHPTRAGRHGHAYTRFGVINLKNARHKDDHRPLDEASPNPNCRRWSRAYLHHLVRTEEILGAMVLSQINLAYYQELTAGTRAAIEAGRMADFAAETRAAWAAGDLPVL

SEQ ID NO: 54712 - protein, 379 aa, Devosia soli
  REGION 1..379: note = tr|A0A0F5LDS2|A0A0F5LDS2_9RHIZ Queuine tRNA-ribosyltransferase OS=Devosia soli OX=361041 GN=tgt; PE = 3 SV=1
MSTTSKLVTFSLTASDGMARCGRIDTPRGEISTPAFMPVGTAGTVKAMYPEQVRETGADILLGNTYHLMLRPGAERVASLGGLHDFMDWQRPILTDSGGFQVMSLAKLRKLTEKGVTFKSHIDGSAYELTPERSIEIQTLLDSDIIMQLDECIALPAERKEIERAMELSLRWADRSKTAFNNQQNRMLFGIVQGGDDAELRAKSAAGLKSIGFDGYSIGGLAVGEPQDVMFRVLSDITPDLPWDRPRYLMGVGKPDDILGAIERGVDMFDCVHPTRAGRHGHAYTRFGVINLKNARHKDDHRPLDEASPNPNCRRWSRAYLHHLVRTEEILGAMVLSQINLAYYQELTAGARAAIKAQRMTDFAAETRAAWAAGDLPVL

SEQ ID NO: 54713 - protein, 376 aa, Devosia sp.
  REGION 1..376: note = tr|A0A1E4A5V9|A0A1E4A5V9_9RHIZ Queuine tRNA-ribosyltransferase OS=Devosia sp. SCN 66-27; OX = 1660097 GN=tgt PE=3 SV=1
MKSDYSFTLLATDGMARRGRIDTWRGDVQTPAFMPVGTVGTVKAMYPEQVRDTGADILLGNTYHLMLRPGAERVAALGGLHDFMDWQCPILTDSGGFQVMSLAKLRKLTEKGVTFRSHIDGSAHELTPERSIEIQTLLDSDIIMQLDECIPLPSDYKEMERAMELSLRWAQRSKDAFGNQPHRSLHGIVQGGDNAELRGRSAAGLKSIGFNGYSIGGLAVGEPQEVMFRVLSEITPELPTDKPRYLMGVGKPDDILGGIERGVDMFDCVHPTRAGRHGHAYTRFGVINLKNARHKDDPRPLDEESPNPNCRRFSRAYLHHLIRTEEMLGAMILSQINLSYYQQLCIGARAAIDAGALADYAAQTRATWAAGDLPVL

SEQ ID NO: 54714 - protein, 375 aa, Devosia sp.
  REGION 1..375: note = tr|A0A087LN16|A0A087LN16_9RHIZ Queuine tRNA-ribosyltransferase OS=Devosia sp. 17-2-E-8 OX=1535287; GN = tgt PE=3 SV=1
MKQVSFSLLATDGNARRGRIDTPRGDIQTPAFMPVGTAGTVKAMYPEQVRETGADILLGNTYHLMLRPGAERVASLGGLHTFMDWERPILTDSGGFQVMSLAKLRKLDEKGVTFRSHIDGSAHSLTPERSIEIQTLLDSDIIMQLDECISLPNETREMERAMELSLRWADRSKTAFNGQNNRALFGIVQGGDDLRLRAKSAAGLQSIGFDGYAVGGLAVGEPQAVMFEVLSGVCPLLPEDRPRYLMGVGKPDDILGGIERGIDMFDCVHPTRAGRHGHIYTRFGVINMKNARHKDDGRPVDEQSPNRNCRRFSRAYLHHLVKTEEILGAMILSQINLAYYQELTAGARAAIEAGSFSDFVETTRAGWAAGDLPPL

SEQ ID NO: 54715 - protein, 369 aa, Dialister invisus
  REGION 1..369: note = tr|R5TB25|R5TB25_9FIRM Queuine tRNA-ribosyltransferase OS=Dialister invisus CAG:218; OX = 1263072 GN=tgt PE=3 SV=1
MVVNYELVAEDRKTGARAGLLHTPHGVFKTPMFMPVGTQATVKTVTPEELEEMGAQIILSNTYHLFLRPGTELIHEAGELHRFMNWNKGILTDSGGFQVFSLGAMRKITEEGVYFRSFLDGSKQFLSPEISIRAQEDLGSDIAMAFDECIPYPADYEYARKSTERTTRWAKRCIKAHQRTDRGIFGIIQGGMYKDLRKQSAMEISSLPFDGVAVGGLSVGEPHDLMYDILEETIQWMPKGKARYLMGVGTPDCLVEGVARGVDMFDCVFPTRVARNGMAMIHTRRMNMKNKQYERDFRPIEESCGCYTCRNYTRAYIRHLYKSEELLAFRLVTIHNLYFLLQFMRDMREAIVQGNFFEFREHFMEHYKR

SEQ ID NO: 54716 - protein, 369 aa, Dialister invisus
  REGION 1..369: note = tr|C9LLI6|C9LLI6_9FIRM Queuine tRNA-ribosyltransferase OS=Dialister invisus DSM 15470; OX = 592028 GN=tgt PE=3 SV=1
MVVNYELVAEDRKTGARAGLLHTPHGVFKTPMFMPVGTQATVKTVTPEELEEMGAQIILSNTYHLFLRPGTELIHEAGELHRFMNWNKGILTDSGGFQVFSLGAMRKITEEGVYFRSFLDGSKQFLSPEISIRAQEDLGSDIAMAFDECIPYPADYEYARKSTERTTRWAKRCIKAHQRTDRGIFGIIQGGMYKDLRKQSAMEISSLPFDGVAVGGLSVGEPHDLMYDILEETTQWMPKGKARYLMGVGTPDCLVEGVARGVDMFDCVFPTRVARNGMAMIHTGRMNMKNKQYERDFRPIEESCGCYTCRNYTRAYIRHLYKSEELLAFRLVTIHNLYFLLQFMRDMREAIVQGNFSEFREHFMEHYKQ

SEQ ID NO: 54717 - protein, 372 aa, Dialister micraerophilus
  REGION 1..372: note = tr|F2BYB5|F2BYB5_9FIRM Queuine tRNA-ribosyltransferase OS=Dialister micraerophilus DSM 19965 OX=888062 GN=tgt PE=3 SV=1
MIIMVIKYELIAKDEHTGARAGLLHTPHGTFKTPMFMPVGTQATVKTLTPHELKEMGAQIILSNTYHLFLRPGTELIKEAGELHSFMNWDGGILTDSGGFQVFSLGKMRKITEKGVYFRSHLDGSKRFLSPEVAAHAQENLGSDIAMALDECIPYPADYEYSKKSTERTTRWAERFVKAHTRTDRGMFGIIQGGMYKDLRKQSADEICGLPFDGIAIGGLSVGEPLELMYEILEYTTQFIPENKVRYLMGVGTPDCLVEGVARGVDMFDCVYPTRVARNGMAMVKSGRMNMKNKKYEKDFLPLDITCGCYTCKNFTRSYIRHLYKAEEILAFRLVTIHNLYFLLQFMRDMRDSIINGSFVDFMKNFKENYAR

SEQ ID NO: 54718 - protein, 369 aa, unidentified
  source 1..369: note = Dialister microaerophilus
  REGION 1..369: note = tr|E4L7T7|E4L7T7_9FIRM Queuine tRNA-ribosyltransferase OS=Dialister microaerophilus UPII 345-E OX=910314 GN=tgt PE=3 SV=1
MVIKYELIAKDEHTGARAGLLHTPHGTFKTPMFMPVGTQATVKTLTPHELKEMGAQIILSNTYHLFLRPGTELIKEAGELHSFMNWDGGILTDSGGFQVFSLGKMRKITEKGVYFRSHLDGSKRFLSPEVAAHAQENLGSDIAMALDECIPYPADYEYSKKSTERTTRWAERFVKAHTRTDRGMFGIIQGGMYKDLRKQSADEICGLPFDGIAIGGLSVGEPLDLMYEILEYTTQFIPENKVRYLMGVGTPDCLVEGVARGVDMFDCVYPTRVARNGMAMVKSGRMNMKNKKYEKDFLPLDITCGCYTCKNFTRSYIRHLYKAEEILAFRLVTIHNLYFLLQFMRDMRDSIINGSFVDFMKNFKENYVR

SEQ ID NO: 54719 - protein, 369 aa, Dialister pneumosintes
  REGION 1..369: note = tr|A0A1B3WD32|A0A1B3WD32_9FIRM Queuine tRNA-ribosyltransferase OS=Dialister pneumosintes OX=39950; GN = tgt PE=3 SV=1
MVINYELIAQDSKTGARAGLLHTPHGTFTTPMFMPVGTRATVKTLSPDELTMMGAQIILGNTYHLFLRPGTELIKEAGGLHGFMNWKKGILTDSGGFQVFSLGNTRTIKEEGVYFRSILDGSKQFLSPEVATKAQEDLGSDIAMAFDECIPYPADYNYAKKSTERTTRWAERCIKARTRSDRGMFGIVQGGMYKDLRKQSALEIASLPFDGIAIGGLSVGEPHDIMYEVLEYTTPYLPVNKARYLMGVGTPDCLLEGVTRGIDMFDCVFPTRVARNGMAMVHTGRMNMKNKKYEKDFSPIEEECQCYTCKNFTRAYIRHLYKAEELLAFRLVTIHNLFFLLQFMRDMRASIINGSFTVFRENFWAEYAK

SEQ ID NO: 54720 - protein, 369 aa, Dialister sp.
  REGION 1..369: note = tr|A0A3B9DVL1|A0A3B9DVL1_9FIRM Queuine tRNA-ribosyltransferase OS=Dialister sp. OX=1955814 GN=tgt; PE = 3 SV=1
MVINYELVAEDKKTGARAGLLHTPHGTFKTPMFMPVGTQATVKTVTPEELEGMGAQIILSNTYHLFLRPGTELIKEAGELHRFMNWPKGILTDSGGFQVFSLGAMRKITEEGVHFRSFLDGSKQFLSPEVSIHAQEDLGSDIAMAFDECIPYPADYEYADHSTARTTRWAERCIKAHTRTDRGMFGIVQGGMYKDLRKRSALEISSMPFDGMAIGGLSVGEPHDLMYDILEYTTQFLPVNKARYLMGVGTPDCLVEGVARGIDMFDCVFPTRVARNGMAMVHSGRMNMKNKKYEKDWAPLEEGCGCYTCQHYSRAYIRHLYKSEELLAFRLVTIHNLFFLLQFMRDMRQAIIDGNFTEFRESFMAGYHR

SEQ ID NO: 54721 - protein, 369 aa, Dialister sp.
  REGION 1..369: note = tr|R7PNB2|R7PNB2_9FIRM Queuine tRNA-ribosyltransferase OS=Dialister sp. CAG:588; OX = 1262871 GN=tgt PE=3 SV=1
MVINYELIAQDSKTGARAGLLHTPHGTFTTPMFMPVGTRATVKTLSPDELTMMGAQIILGNTYHLFLRPGTELIKEAGGLHGFMNWKKGILTDSGGFQVFSLGNTRTIKEEGVYFRSILDGSKQFLSPEVATKAQEDLGSDIAMAFDECIPYPADYNYAKKSTERTTRWAERCIKARTRSDRGMFGIVQGGMYKDLRKQSALEIASLPFDGIAIGGLSVGEPHDIMYEVLEYTTPYLPVNKARYLMGVGTPDCLLEGVTRGIDMFDCVFPTRVARNGMAMVHTGRMNMKNKKYEKDFSPIEEECQCYTCKNFTRAYIRHLYKAEELLAFRLVTIHNLFFLLQFMRDMRASIINGSFTAFRENFWAEYAK

SEQ ID NO: 54722 - protein, 369 aa, Dialister succinatiphilus
  REGION 1..369: note = tr|H1D2U7|H1D2U7_9FIRM Queuine tRNA-ribosyltransferase OS=Dialister succinatiphilus YIT 11850 OX=742743 GN=tgt PE=3 SV=1
MVINYELIAEDKKTGARAGLLHTPHGTFKTPMFMPVGTQATVKTVTPEELEDMGAQIILSNTYHLFLRPGTELIREAGGLHDFMNWHKGILTDSGGFQVFSLGAMRKITEEGVHFRSFLDGSKQFLSPEVSIHAQEDLGSDIAMAFDECIPYPADYDYADHSTARTTRWAERCIKAHTRTDRGMFGIVQGGMYKDLRKRSAEEISAMPFDGMAIGGLSVGEPHDLMYEMLEYTTQFLPVNKARYLMGVGTPDCLVEGVARGVDMFDCVFPTRVARNGMAMVHSGRMNMKNKKYEKDWAPLEEGCQCYTCTHYSRAYIRHLYKSEELLAFRLVTIHNLYFLLQFMRDMRQAIIDGNFTEFRENFMANYKR

SEQ ID NO: 54723 - protein, 390 aa, Diaphorobacter nitroreducens
  REGION 1..390: note = tr|A0A3N1YKM7|A0A3N1YKM7_9BURK Queuine tRNA-ribosyltransferase OS=Diaphorobacter nitroreducens; OX = 164759 GN=tgt PE=3 SV=1
MLKFEILATDTSSHARRGTLTLNHGVVQTPIFMPVGTYGTVKGVMPRSLREMGAQIILGNTFHLWMRPGLDVMQSFGGLHAFEQWDKPILTDSGGFQVWSLGSMRKITEEGVHFASPVNGDKLFMSPEVSMQIQTTLNSDIVMQLDECTPYETNGHKTTEAEARKSMEMSRRWAVRSKNEFERLGNPNALFGIVQGGMYKNLRQESLEALVEMDFPGYAVGGVSVGEPKDEMLDIMAHTPHRLPAHKPRYLMGVGTPEDLVEGVAQGVDMFDCVMPTRNARNGTLFTRYGDLKIRNARHKTDHQPLDPSCTCHACAGTEGVSWNDGGRGGFSRAYLHHLDRCGEMLGPMLTTIHNLHYYLNLMREVREALDAGQFGAFRARFKAERARGV

SEQ ID NO: 54724 - protein, 390 aa, unidentified; identical to SEQ ID NO: 51087
  source 1..390: note = Diaphorobacter polyhydroxybutyrativorans
  REGION 1..390: note = tr|A0A2Z2LNP4|A0A2Z2LNP4_9BURK Queuine tRNA-ribosyltransferase OS=Diaphorobacter polyhydroxybutyrativorans OX=1546149 GN=tgt PE=3 SV=1

SEQ ID NO: 54725 - protein, 379 aa, Diaphorobacter sp.; identical to SEQ ID NO: 52047
  REGION 1..379: note = tr|A0A4Y8ZLD6|A0A4Y8ZLD6_9BURK Queuine tRNA-ribosyltransferase OS=Diaphorobacter sp. DS2; OX = 1302548 GN=tgt PE=3 SV=1

SEQ ID NO: 54726 - protein, 390 aa, Diaphorobacter sp.
  REGION 1..390: note = tr|A0A2S4KF12|A0A2S4KF12_9BURK Queuine tRNA-ribosyltransferase OS=Diaphorobacter sp. LR2014-1; OX = 1933219 GN=tgt PE=3 SV=1
MLKFEILATDTSSHARRGTLTLNHGVVQTPIFMPVGTYGTVKGVMPRSLREMGAQIILGNTFHLWMRPGLDVMQSFGGLHGFEQWDKPILTDSGGFQVWSLGSMRKITEEGVHFASPVNGDKLFMSPEVSMQIQTTLNSDIVMQLDECTPYETNGHKTTEAEARKSMEMSRRWAVRSKNEFERLGNPNALFGIVQGGMYKNLRQESLEALVEMDFPGYAVGGVSVGEPKDEMLDIMAHTPHRLPAHKPRYLMGVGTPEDLVEGVAQGVDMFDCVMPTRNARNGTLFTRYGDLKIRNARHKTDHQPLDPSCTCHACAGTEGVSWNDGGRSGFSRAYLHHLDRCGEMLGPMLTTIHNLHYYLNLMREVREALDAGQFGAFRARFKAERARGV

SEQ ID NO: 54727 - protein, 364 aa, Dichelobacter nodosus
  REGION 1..364: note = tr|A0A5F1A9K3|A0A5F1A9K3_DICNO Queuine tRNA-ribosyltransferase OS=Dichelobacter nodosus OX=870; GN = tgt PE=3 SV=1
MTQDGRARRGRIIFDNGQIVQTPVFMPVGTQATVKGLSPEELDALGAEIILGNTFHLMLRPGAEIIQAHGGLHQFMHWQKPILTDSGGFQVFSLAKIRKLTEEGARFRSPIDGREVFLTPEKSIAVQHALNSNIIMQLDECTPYPATYDEAANSMRMSLRWARRSQQAHGDHANHLFGIVQGGIYPDLRQESAQALVELDLPGYAIGGLAVGEPKDAREATLDAVLPFVPKNKPRYLMGVGKPADLVEGVRRGIDMFDCVMPSRNARNAYLFTRFGILKLRNSRYKEDLRPIDETCNCYTCQRYSRSYLHHLDKCNEILGARLNTIHNLYYYVHLMHEMRRAIEEHRFDDFARAFYAEQECGND

SEQ ID NO: 54728 - protein, 369 aa, Dichelobacter nodosus
  REGION 1..369: note = sp|A5EW66|TGT_DICNV Queuine tRNA-ribosyltransferase; OS = Dichelobacter nodosus (strain VCS1703A) OX=246195; GN = tgt PE=3 SV=1
MNYECMTQDGRARRGRIIFDNGQIVQTPVFMPVGTQATVKGLSPEELDALGAEIILGNTFHLMLRPGAEIIQAHGGLHQFMHWQKPILTDSGGFQVFSLAKIRKLTEEGARFRSPIDGREVFLTPEKSIAVQHALNSNIIMQLDECTPYPATYDEAANSMRMSLRWARRSQQAHGDHANHLFGIVQGGIYPDLRQESAQALVELDLPGYAIGGLAVGEPKDAREATLDAVLPFVPKNKPRYLMGVGKPADLVEGVRRGIDMFDCVMPSRNARNAYLFTRFGILKLRNSRYKEDLRPIDETCNCYTCQRYSRSYLHHLDKCNEILGARLNTIHNLYYYVHLMHEMRRAIEEHRFDDFARAFYAEQECGND

SEQ ID NO: 54729 - protein, 370 aa, Dichotomicrobium thermohalophilum
  REGION 1..370: note = tr|A0A397Q6Y7|A0A397Q6Y7_9RHIZ Queuine tRNA-ribosyltransferase OS=Dichotomicrobium thermohalophilum OX=933063 GN=tgt PE=3 SV=1
MSALAFDIHGRDGEARTGALTTPRGTIRTPAFMPVGTAASVKAMFPDTVRETGADIILGNTYHLMLRPGAERIARLGGLHDFMNWPGPILTDSGGFQVMSLSKLRKLSEDGVTFQSHIDGSTHLLTPERAVEIQCLLGSDIQMQLDECPPYPCTREEAASAVELSLRWAERSQDAFAKRAAAGHALFGIVQGSIHPDLRERSARALMEMDFPGYAIGGLAVGEGPDLMLETLAQTTPHLPADKPRYLMGVGTPLDIVEAVARGVDMFDCVMPTRSGRHGQAFTWAGKVNLRNAAHADDPGPLDPESPCPAARDYSRAYLHHLVKAGEYLAPMLLTWANVAFYQDLMRAVRAAIQEGRLDELRTRIRVAYG

SEQ ID NO: 54730 - protein, 387 aa, unidentified
  source 1..387: note = Dickeya aquatica
  REGION 1..387: note = tr|A0A375ADA0|A0A375ADA0_9GAMM Queuine tRNA-ribosyltransferase OS=Dickeya aquatica OX=1401087; GN = tgt PE=3 SV=1
MKYQLLNTQGRARRGRLVFERGVVETPAFMPVGTYGTVKGMTPEEVKETGAQIILGNTFHLWLRPGQEIMKQHGDLHGFMQWHGPILTDSGGFQVFSLGDIRKITEEGVHFRNPINGDAIFLSPEKSMEIQYDLGSDIVMIFDECTPYPADWDYAKRSMEMSLRWAKRSRQRFDELGNPNALFGIIQGSVYEDLRDVSVKGLVDIGFDGYAVGGLAVGEPKADMHRILEHVCPQLPADKPRYLMGVGKPEDLVEGVRRGIDMFDCVMPTRNARNGHLFVTDGVVKIRNAKHKDDTAPLDAECDCYTCRNYSRAYLHHLDRCNEILGARLNTIHNLRYYQRLMAGLRQAIEEGNLERFVTEFYQRIGKPVPPLADKAAGDDHEGHVPQ

SEQ ID NO: 54731 - protein, 387 aa, Dickeya chrysanthemi
  REGION 1..387: note = tr|C6CEL3|C6CEL3_DICC1 Queuine tRNA-ribosyltransferase OS=Dickeya chrysanthemi (strain Ech1591) OX=561229 GN=tgt PE=3 SV=1
MKYELLQTDGRARRGRLVFERGVVETPAFMPVGTYGTVKGMTPEEVKDTGAQIILGNTFHLWLRPGQEIMKRHGDLHDFMQWHGPILTDSGGFQVFSLGDIRKITEEGVHFRNPINGDAIFLSPEKSMEIQYDLGSDIVMIFDECTPYPADWDYAKRSMEMSLRWAKRSRQRFDELSNKNALFGIVQGSVYEDLRDVSVKGLVDIGFDGYAVGGLAVGEPKADMHRILEHVCPQLPTDKPRYLMGVGKPEDLVEGVRRGIDMFDCVMPTRNARNGHLFVTDGVVKIRNARHKDDTGPLDEHCDCYTCRNYSRAYLHHLDRCNEILGARLNTIHNLRYYQRLMAGLRQAIEEGRLESFVTEFYQRIGKPVPPLVDKAAGDDHEGHVPQ

SEQ ID NO: 54732 - protein, 386 aa, Dickeya dadantii
  REGION 1..386: note = tr|E0SD35|E0SD35_DICD3 Queuine tRNA-ribosyltransferase OS=Dickeya dadantii (strain 3937); OX = 198628 GN=tgt PE=3 SV=1
MKYELLQTDGRARRGRLVFDRGMVETPAFMPVGTYGTVKGMTPEEVKDTGAQIILGNTFHLWLRPGQEIMKRHGDLHDFMQWHGPILTDSGGFQVFSLGDIRKITEEGVHFRNPINGDAIFLSPEKSMEIQYDLGSDIVMIFDECTPYPADWDYAKRSMEMSLRWAKRSRQRFDELSNKNALFGIVQGSVYEDLRDVSVKGLVDIGFDGYAVGGLAVGEPKADMHRILEHVCPQLPTDKPRYLMGVGKPEDLVEGVRRGIDMFDCVMPTRNARNGHLFVTDGVVKIRNAKHKDDTGPLDEHCDCYTCRNYSRAYLHHLDRCNEILGARLNTIHNLRYYQRLMAGLRQAIEEGRLESFVTEFYQRIGKPVPPVDNVAGNDHEGHAPQ

SEQ ID NO: 54733 - protein, 384 aa, Dickeya dianthicola
  REGION 1..384: note = tr|A0A385XWM1|A0A385XWM1_9GAMM Queuine tRNA-ribosyltransferase OS=Dickeya dianthicola OX=204039; GN = tgt PE=3 SV=1
MKYELLQTDGRARRGRLVFERGVVETPAFMPVGTYGTVKGMTPEEVKDTGAQIILGNTFHLWLRPGQEIMKRHGDLHDFMQWHGPILTDSGGFQVFSLGDIRKITEEGVHFRNPINGDAIFLSPEKSMEIQYDLGSDIVMIFDECTPYPADWDYAKRSMEMSLRWAKRSRQRFDELSNKNALFGIVQGSVYEDLRDVSVKGLVDIGFDGYAVGGLAVGEPKADMHRILEHVCPQLPTDKPRYLMGVGKPEDLVEGVRRGIDMFDCVMPTRNARNGHLFVTDGVVKIRNAKHKDDTGPLDEHCDCYTCRNYSRAYLHHLDRCNEILGARLNTIHNLRYYQRLMAGLRQAIEEGRLEGFAAEFYQRIGKPVPPLVDNAVGNDCGGK

SEQ ID NO: 54734 - protein, 387 aa, unidentified
  source 1..387: note = Dickeya fangzhongdai
  REGION 1..387: note = tr|A0A2K8QJ58|A0A2K8QJ58_9GAMM Queuine tRNA-ribosyltransferase OS=Dickeya fangzhongdai OX=1778540; GN = tgt PE=3 SV=1
MKYELLQTDGRARRGRLVFDRGMVETPAFMPVGTYGTVKGMTPEEVKDTGAQIILGNTFHLWLRPGQEIMKRHGDLHDFMQWHGPILTDSGGFQVFSLGDIRKITEEGVHFRNPINGDAIFLSPEKSMEIQYDLGSDIVMIFDECTPYPADWDYAKRSMEMSLRWAKRSRQRFDELSNKNALFGIVQGSVYEDLRDVSVKGLVDIGFDGYAVGGLAVGEPKADMHRILEHVCPQLPTDKPRYLMGVGKPEDLVEGVRRGIDMFDCVMPTRNARNGHLFVTDGVVKIRNAKHKDDTGPLDEHCDCYTCRNYSRAYLHHLDRCNEILGARLNTIHNLRYYQRLMAGLRQAIEDGRLESFVTEFYQRIGKPVPPLVDNAAGNDHEGHAPQ

SEQ ID NO: 54735 - protein, 387 aa, Dickeya paradisiaca
  REGION 1..387: note = tr|C6CBF3|C6CBF3_DICP7 Queuine tRNA-ribosyltransferase OS=Dickeya paradisiaca (strain Ech703) OX=579405 GN=tgt PE=3 SV=1
MKYELLKTDGRARRGRLVFERGVVETPAFMPVGTYGTVKGMTPEEVKDTGAQIILGNTFHLWLRPGQEIMKLHGDLHDFMQWKGPILTDSGGFQVFSLGDIRKITEEGVHFRNPINGDAIFLSPEKSMEIQYDLGSDIVMIFDECTPYPADWDYAKRSMEMSLRWAQRSRRRFDELGNRNALFGIIQGSVYEDLRDISVKGLVDIGFDGYAVGGLAVGEPKADMHRILEHVCPQIPADKPRYLMGVGKPEDLVEGVRRGIDMFDCVMPTRNARNGHLFVTDGVVKIRNAKHKDDTGPLDEHCDCYTCRNYSRAYLHHLDRCNEILGARLNTIHNLRYYQRLMAGLRQAIEEGKLEDFAAAFYQRIGKPAPPLADNSAGDDHEGHVSQ

SEQ ID NO: 54736 - protein, 387 aa, unidentified
  source 1..387: note = Dickeya solani
  REGION 1..387: note = tr|A0A2K8W3F1|A0A2K8W3F1_9GAMM Queuine tRNA-ribosyltransferase OS=Dickeya solani RNS 08.23.3.1.A; OX = 1240086 GN=tgt PE=3 SV=1
MKYELLQTDGRARRGRLVFDRGMVETPAFMPVGTYGTVKGMTPEEVKDTGAQIILGNTFHLWLRPGQEIMKRHGDLHDFMQWHGPILTDSGGFQVFSLGDIRKITEEGVHFRNPINGDAIFLSPEKSMEIQYDLGSDIVMIFDECTPYPADWDYAKRSMEMSLRWAKRSRQRFDELSNNNALFGIVQGSVYEDLRDVSVKGLVDIGFDGYAVGGLAVGEPKADMHRILEHVCPQLPTDKPRYLMGVGKPEDLVEGVRRGIDMFDCVMPTRNARNGHLFVTDGVVKIRNAKHKDDTGPLDEHCDCYTCRNYSRAYLHHLDRCNEILGARLNTIHNLRYYQRLMAGLRQAIEDGKLESFVTEFYQRIGKPVPPLADNAVGNDHEGHAPQ

SEQ ID NO: 54737 - protein, 387 aa, Dickeya sp.
  REGION 1..387: note = tr|A0A5B8HQ94|A0A5B8HQ94_9GAMM Queuine tRNA-ribosyltransferase OS=Dickeya sp. NCPPB 569 OX=568768; GN = tgt PE=3 SV=1
MKYELLQTDGHARRGRLVFERGVVETPAFMPVGTYGTVKGMTPEEVKDTGAQIILGNTFHLWLRPGQEIMKRHGDLHDFMQWHGPILTDSGGFQVFSLGDIRKITEEGVHFRNPINGDAIFLSPEKSMEIQYDLGSDIVMIFDECTPYPADWDYAKRSMEMSLRWAKRSRQRFDELSNKNALFGIVQGSVYEDLRDVSVKGLVDIGFDGYAVGGLAVGEPKADMHRILEHVCPQLPADKPRYLMGVGKPEDLVEGVRRGIDMFDCVMPTRNARNGHLFVTDGVVKIRNAKHKDDTGPLDEHCDCYTCRNYSRAYLHHLDRCNEILGARLNTIHNLRYYQRLMAGLRQAIEDGKLESFVAEFYQRIGKPLPPLVDNAVDVDREGHALQ

SEQ ID NO: 54738 - protein, 387 aa, Dickeya sp.
  REGION 1..387: note = tr|A0A454UTU8|A0A454UTU8_9GAMM Queuine tRNA-ribosyltransferase OS=Dickeya sp. FVG10-MFV-A16; OX = 2487135 GN=tgt PE=3 SV=1
MKYELLQTDGRARRGRLVFERGMVETPAFMPVGTYGTVKGMTPEEVKDTGAQIILGNTFHLWLRPGQEIMKRHGDLHDFMQWHGPILTDSGGFQVFSLGDIRKITEEGVHFRNPINGDAIFLSPEKSMEIQYDLGSDIVMIFDECTPYPADWDYAKRSMEMSLRWAKRSRQRFDELSNKNALFGIVQGSVYEDLRDVSVKGLVDIGFDGYAVGGLAVGEPKADMHRILEHVCPQLPTDKPRYLMGVGKPEDLVEGVRRGIDMFDCVMPTRNARNGHLFVTDGVVKIRNAKHKDDTGPLDEHCDCYTCRNYSRAYLHHLDRCNEILGARLNTIHNLRYYQRLMAGLRQAIEDGRLESFVTEFYQRIGKPVPPVVDNAARNDHEGHAPQ

SEQ ID NO: 54739 - protein, 387 aa, Dickeya zeae
  REGION 1..387: note = tr|A0A2K9QCX3|A0A2K9QCX3_9GAMM Queuine tRNA-ribosyltransferase OS=Dickeya zeae OX=204042 GN=tgt; PE = 3 SV=1
MKYELLQTDGRARRGRLVFERGVVETPAFMPVGTYGTVKGMTPEEVKETGAQIILGNTFHLWLRPGQEIMKRHGDLHDFMQWHGPILTDSGGFQVFSLGDIRKITEEGVHFRNPINGDAIFLSPEKSMEIQYDLGSDIVMIFDECTPYPADWDYAKRSMEMSLRWAKRSRQRFDELSNKNALFGIVQGSVYEDLRDVSVKGLVDIGFDGYAVGGLAVGEPKADMHRILEHVCPQLPTDKPRYLMGVGKPEDLVEGVRRGIDMFDCVMPTRNARNGHLFVTDGVVKIRNAKHKDDTGPLDEHCDCYTCRNYSRAYLHHLDRCNEILGARLNTIHNLRYYQRLMAGLRQAIGEGRLESFVAEFYQRIGKPVPPLADSAAGNDHEGHVPQ

SEQ ID NO: 54740 - protein, 387 aa, Dickeya zeae
  REGION 1..387: note = tr|A0A0A8FFZ6|A0A0A8FFZ6_9GAMM Queuine tRNA-ribosyltransferase OS=Dickeya zeae EC1 OX=1427366; GN = tgt PE=3 SV=1
MKYELLQTDGRARRGRLVFERGVVETPAFMPVGTYGTVKGMTPEEVKETGAQIILGNTFHLWLRPGQEIMKRHGDLHDFMQWHGPILTDSGGFQVFSLGDIRKITEEGVHFRNPINGDAIFLSPEKSMEIQYDLGSDIVMIFDECTPYPADWDYAKRSMEMSLRWAKRSRQRFDELSNKNALFGIVQGSVYEDLRDVSVKGLVDIGFDGYAVGGLAVGEPKADMHRILEHVCPQLPTDKPRYLMGVGKPEDLVEGVRRGIDMFDCVMPTRNARNGHLFVTDGVVKIRNAKHKDDTGPLDEHCDCYTCRNYSRAYLHHLDRCNEILGARLNTIHNLRYYQRLMAGLRQAIGEGRLESFVSEFYQCIGKPVPPLADSAAGNDHEGHVPQ

SEQ ID NO: 54741 - protein, 393 aa, unidentified
  source 1..393: note = Dictyobacter alpinus
  REGION 1..393: note = tr|A0A402B3X6|A0A402B3X6_9CHLR Queuine tRNA-ribosyltransferase OS=Dictyobacter alpinus OX=2014873; GN = tgt PE=3 SV=1
MSSFNFTIDAECPDTWARAGTVQTPHGTIQTPIFMPVGTQATVKSVAPEELHAAGAQIILANTYHLMLRPGSELIDSFGGLHSFMQWHGPILTDSGGFQVWSLGHLRKLNENGVVFKSHIDGSLHTLTPERVMQIEAELGADIILPLDICAPYPCSPAEAKKAMEWTHRWEERALVEKEKQRPEQTLFGIVQGAFEPELRAESARVIGNMPFQGLSIGGLSVGEPKDEMWGMLKHVTPNLPRDKPRHLLGVGSPEDLVIGVGLGMDMFDCVLPTRVARHGGLFTRDGRVSIKGARFRTARGPIEDGCDCYTCQHYSAAYVNHLARAEEQLYFRLGSIHNIRFMLRLAGDLRASIINGTYPAFQEEFLARYVPASEKVRVAQREKWKEARDKRA

SEQ ID NO: 54742 - protein, 376 aa, unidentified
  source 1..376: note = Dictyobacter alpinus
  REGION 1..376: note = tr|A0A402B374|A0A402B374_9CHLR Queuine tRNA-ribosyltransferase OS=Dictyobacter alpinus OX=2014873; GN = KDA_12830 PE=3 SV=1
MEHGRAEQPQYGSMHLPHGTIELPVFMPDATLGVVRSTDATDLRNHHIQALVMNTFHLMQRPGTSTIQALGGLHTMSGWKGPIITDSGGFQAYSLIQQNAKFGSLSHDGIAFKPEGSDRKFQLTPEKAVQLQMSYGADIIMCLDYCTHVDAPADIQEVAVMHTIDWAKRSKKEFERLLKQKKLSDDKRPLLFGVIQGGGSEELRKRCAEALLEIGFDGFGYGGWPLDKQGKLLTDIITYTRELIPAQYQMHALGVGHPTSIVELTRLGYAIFDCAMPTRDARHARMYTFSAATSTFAPGEKWFSYIYVNDDKYIKSDHAVSAYCDCLCCTNYSVGYLHHLFKINDTLFFRLATIHNLRFMTMLTERLRELYYAQDR

SEQ ID NO: 54743 - protein, 376 aa, unidentified
  source 1..376: note = Dictyobacter aurantiacus
  REGION 1..376: note = tr|A0A401ZBA9|A0A401ZBA9_9CHLR Queuine tRNA-ribosyltransferase OS=Dictyobacter aurantiacus; OX = 1936993 GN=KDAU_14990 PE=3 SV=1
MQYGPTAQPQYGSLHLPHGAIDLPVFMPDATLGVVRSTDATDLQNCQIQALVMNTFHLMQRPGTSTIQSLGGLHAMSGWQGPIVTDSGGFQAYSLIQQNAKFGSLNADGITFKPEGADRKFQLTPEKAVQLQMSYGADIIMCLDYCTHVDADAALQTEAVTRTIDWAKRCKKEYERLLKQKKLAEEKRPLLFGVVQGGGSEELRRRCAEALLEIGFDGFGYGGWPLDKHGNLLTDIITYTRNLIPAQYQMHALGVGHPGSIAELTRLGYGIFDCAMPTRDARHARLYSFTSATTSFASGERWFSYIYVNDDKYIKNDRPVSEFCDCLCCTHYSAGYLHHLFKINDTLFFRLATIHNLRFMTMLTQRIRNEYYGQIR

SEQ ID NO: 54744 - protein, 393 aa, unidentified
  source 1..393: note = Dictyobacter aurantiacus
  REGION 1..393: note = tr|A0A401ZC09|A0A401ZC09_9CHLR Queuine tRNA-ribosyltransferase OS=Dictyobacter aurantiacus; OX = 1936993 GN=tgt PE=3 SV=1
MSSFNFTIEAECPETWARAGTIQTPHGTIQTPIFMPVGTQATVKSVAPEELHAAGAQIILSNTYHLMLRPGSALIDSFGGLHSFMQWHGPILTDSGGFQVWSLGHLRKLNEDGVVFKSHIDGSLHTLTPERVMQIEAEIGADIILPLDICAPYPCSPKEARKAMEWTHRWEERALVEKEKQRPEQTLFGIVQGAFEPDLRAESARVIGNMPFKGLSIGGLSVGEPKEEMWGMLKHVTPNLPRDKPRHLLGVGSPEDLVVGVGLGMDMFDCVLPTRVARHGGLFTRDGRVSIKGARFRTARGPIEEGCDCYTCQHYSAAYVNHLARAEEQLYFRLGSIHNIRFMLRLAGQLRQSIIDGTYPAFRDEFLARYVPASEKVREAQREKWKEARDKRA

SEQ ID NO: 54745 - protein, 393 aa, unidentified
  source 1..393: note = Dictyobacter kobayashii
  REGION 1..393: note = tr|A0A402AGN8|A0A402AGN8_9CHLR Queuine tRNA-ribosyltransferase OS=Dictyobacter kobayashii; OX = 2014872 GN=tgt PE=3 SV=1
MSSFNFTIDAECPETWARAGTIQTPHGTIQTPIFMPVGTQATVKSVAPEELHAAGAQIILANTYHLMLRPGSALIDSFGGLHSFMQWHGPILTDSGGFQVWSLGHLRKLNEDGVVFKSHIDGSLHTLTPERVMQIEAELGSDIILPLDICAPYPCSPKEAKKAMEWTHRWEERALVEKEKLRPEQTLFGIVQGAFEPELRAQSAQVIGNMPFQGLSIGGLSVGEPKEEMWGMLKHVTPNLPRDKPRHLLGVGSPEDLVIGVGLGMDMFDCVLPTRVARHGGLFTRDGRVSIKGARFRTARGPIEEGCDCYTCQHYSAAYVNHLARAEEQLYFRLGSIHNIRFMLRLAGQLRDSIINGTYPAFRDEFLARYIPASEKVREAQREKWKEARDKRA

SEQ ID NO: 54746 - protein, 379 aa, unidentified
  source 1..379: note = Dictyobacter kobayashii
  REGION 1..379: note = tr|A0A402AFW5|A0A402AFW5_9CHLR Queuine tRNA-ribosyltransferase OS=Dictyobacter kobayashii; OX = 2014872 GN=KDK_17890 PE=3 SV=1
MESGLANQPTQPQYGSLQLPHGSIDLPVFMPDATLGVVRSTDATDLRQCQIQALVMNTFHLMQKPGTSTIQSLGGLHTMSGWTGPIVTDSGGFQAYSLIQQNAKFGSLTSDGITFKPEGADRKFQLTPEKAIQLQMSYDADVIMCLDYCTHVDAPYDFQATAVTHTIDWAKRSKKEYKRLLKQKKLTPDKRPLLFGVIQGGGSEELRRRCAEELLAIGFDGFGYGGWPLDKQGKLLTDIITYTRELIPAHYQMHALGVGHPGSIAELTRLGYGIFDCAMPTRDARHARLYSFTSASSSFASDEKWFTYLYLNDDKYIKNDRPVSEFCDCLCCTNYSAGYLHHLFKINDTLFFRLATIHNLRFMTMLTQRIRELYHAQNR

SEQ ID NO: 54747 - protein, 393 aa, unidentified
  source 1..393: note = Dictyobacter sp.
  REGION 1..393: note = tr|A0A5A5T8W8|A0A5A5T8W8_9CHLR Queuine tRNA-ribosyltransferase OS=Dictyobacter sp. Uno17; OX = 2014874 GN=tgt PE=3 SV=1
MSSFNFTIDAESSETWARAGTIQTPHGTIETPIFMPVGTQATVKSVSPEELHGVGAQIILANTYHLMLRPGSALIDSFGGLHSFMNWQGPILTDSGGFQVWSLAHNRKLNEDGVVFKSHLDGSSHALTPERVMQIEAELGADIVLPLDICAPYPSNPTEARKAMEWTHRWEERALVEKEKLRPEQTLFGIVQGAFEADLRAQSAQVIGNMPFQGLSIGGLSVGEPKEQMWEMLKHVTPELPRDKPRHLLGVGSPEDLVIGVGLGMDMFDCVLPTRVARHGGLFTRDGRVSIKGARFRTAHGPIEEGCDCYTCQHYSAAYVCHLARAEEQLYYRLGSIHNIRFMLRLAKELRESIINGTYPTFRETFLARYVPASEKVREAQREKWIKARDQRA

SEQ ID NO: 54748 - protein, 375 aa, unidentified
  source 1..375: note = Dictyobacter sp.
  REGION 1..375: note = tr|A0A5A5TKE2|A0A5A5TKE2_9CHLR Queuine tRNA-ribosyltransferase OS=Dictyobacter sp. Uno17; OX = 2014874 GN=KDI_49280 PE=3 SV=1
MEHALGGPLSQDQLHLPNGTIDLPVFMPDATLGVVRATDASDLQNCQIQALVMNTFHLMQRPGTSTIQALGGLHRLSGWTGPIVTDSGGFQAYSLIQQNAKFGSLNSDGITFKPEGADRKFQLTPEKAVQLQMSYGADIIMCLDYCTHVDAPQELQEEAVLHTIAWAKRSKKEYDNLLKQKKLPSEKRPLLFGVIQGGGSEELRKRCAEALLEIGFDGFGYGGWPLDKHGNLLIDIITYTRSLIPAHYQMHALGVGHPNSIVDCVRMGYQIFDCAMPTRDGRHARLYTFTDPGTSFASGEKWFTYIYVNDDKYIKHDRPVSAYCDGLCCTRYSAGYLHHLFKINDTLFFRLATMHNLRFMTMLTQRLREMYHVQS

SEQ ID NO: 54749 - protein, 359 aa, Dictyoglomus sp.
  REGION 1..359: note = tr|A0A2J6XXL4|A0A2J6XXL4_9BACT Queuine tRNA-ribosyltransferase OS=Dictyoglomus sp. NZ13-RE01; OX = 2010949 GN=tgt PE=3 SV=1
MNKLILNLSGKELKLPNFLPDATYGVVKSLDTKDLKQVGVHGLVVNTFHLINKPGISVIDSLNGIKNFMNWDGIILSDSGGFQIFSVLRENPKFGSINEDEIILKNNEKIIITPEKIINAQFKLKSDIMMALDYCTHPDDSYEINKLSVKLTIDWGKRSKKEYEKLIKSKENYKPLIFGIIQGGKDKNLRKECAEALMEIGFDGFGFGGYPIDSKGNLIEDILQYTAELIPDNLPKYAMGIGKPENIVTCAQMGYNLFDCVIPTREGRKGKLYIYNDKMEKVDIFSKDFYSNIFILDGKYVRDKKPISEFCDCLLCQNYSRAYLHHLFKLEDPLAYRLASIHNLRFYMQLIDLIWKKIS

SEQ ID NO: 54750 - protein, 387 aa, Dictyoglomus sp.
  REGION 1..387: note = tr|A0A2J6XX13|A0A2J6XX13_9BACT Queuine tRNA-ribosyltransferase OS=Dictyoglomus sp. NZ13-RE01; OX = 2010949 GN=tgt PE=3 SV=1
MKFEVLIRDQKSKARICKIETYHGEITTPVFMPVGTQGAVKTLSPEEVREQGAEIILSNTYHLFLRPGPEIIEKAGGLHKFMSWDGPILTDSGGYQVFSLAKLRKIDNDGIHFSSHIDGTRYFFTPELVIDTQSKLGSDIVMPLDVCLGYGADYWETEEALRLTIEWLKRSINYNNRKHYQNLFGIIQGGFYKDLRLEAINKMLELPLDGFALGGISVGEPKELMYEISQFITDNLPDDKPRYLMGVGAPEDLVVMVGFGIDMFDCVLPTRLARHGIFYTRDGRRNIKNAIYKEDLSPLEEDCDCYTCRKFSRAYIRHLYLQYETFSYRLLTIHNLRFLFRIMSELKRSIIEGRYEEYKKSFLKRFLSNDRENRLEKEELWTKILGV

SEQ ID NO: 54751 - protein, 388 aa, Dictyoglomus thermophilum
  REGION 1..388: note = sp|B5YFK5|TGT_DICT6 Queuine tRNA-ribosyltransferase; OS = Dictyoglomus thermophilum (strain ATCC 35947 / DSM 3960 / H-6-12) OX=309799 GN=tgt PE=3 SV=1
MSFEVIQRDKNTRARLGRLKTFHGEVNTPVFMPVGTQGAVKTLSPEEVEEVGAEIILSNTYHLFLRPGQEIIKKGGGLHRFIGWDKPILTDSGGYQVFSLARLRKIEEDGIYFNSHIDGSQYFFTPELVMEVQKALGSDIIMPLDICLGYGASYWETKEALEITLRWLKRSIDYKKNNNMETQLLFGIIQGGFYRELRKEAVERMLDMELPGFALGGISVGEPKDKMYEITDYTVSLLPEEKPRYLMGVGAPEDLVMGVSMGIDMFDCVLPTRLARHGVFYTKTGRRNIKNAQYKEDFSPLEEDCDCYTCRRFTKAYIRHLFLQHETFSYRLLTIHNLRFLFRLMEDVRRSIREGRLEEFKKEFLTQYLANDRENRLEKEEVWNRLLI

SEQ ID NO: 54752 - protein, 388 aa, Dictyoglomus thermophilum
  REGION 1..388: note = tr|A0A5D4XK33|A0A5D4XK33_DICTH Queuine tRNA-ribosyltransferase OS=Dictyoglomus thermophilum OX=14; GN = tgt PE=3 SV=1
MSFEVIQRDKNTRARLGRLKTFHGEVSTPVFMPVGTQGAVKTLSPEEVEEVGAEIILSNTYHLFLRPGQEIIKKGGGLHRFIGWNKPILTDSGGYQVFSLARLRKIEEDGIYFNSHIDGSQYFFTPEIVMEVQKALGSDIIMPLDICLGYGASYWETKEALEITLRWLKRSIDYKENSNMETQLLFGIIQGGFYRELRKEAVERMLDMELPGFALGGISVGEPKDKMYEITDYTVSLLPEEKPRYLMGVGAPEDLVIGVSMGIDMFDCVLPTRLARHGVFYTKTGRRNIKNAQYKEDFSPLEEDCDCYTCRRFTKAYIRHLFLQHETFSYRLLTIHNLRFLFRLMENIRRSIREGRLEEFKKEFLTQYLANDRENRLEKEEVWNKLLI

SEQ ID NO: 54753 - protein, 388 aa, Dictyoglomus turgidum
  REGION 1..388: note = sp|B8E2N5|TGT_DICTD Queuine tRNA-ribosyltransferase; OS = Dictyoglomus turgidum (strain Z-1310 / DSM 6724); OX = 515635 GN=tgt PE=3 SV=1
MIFEIIVRDKKTRARLGKLKTFHGEINTPVFMPVGTQGAVKTLSPEEVEKVGAEIILSNTYHLFLRPGHEIVRKGGGLHKFMGWEKPILTDSGGYQVFSLARLRRIDEDGIYFNSHIDGTRYFYTPELVMEIQKSLGSDIIMPLDICLGYGASYWETKEALEITLRWLKRSIDYKNNSNMDHQLLFGIVQGGFYKELRKEAVERMLNIDLPGLALGGISVGEPKDKMYEIIDYTVSLLPEEKPRYLMGVGAPEDLVVGVSMGIDMFDCVLPTRLARHGVFYTSKGRKNIKNAQYKEDFSPLEEDCDCYTCRKFTKAYIRHLFLQHETFSYRLLTIHNLRFLFRLMENIRKSIREGRLEEFKKEFLTEYLRDDRENRLEKEELWSKLLI

SEQ ID NO: 54754 - protein, 379 aa, unidentified
  source 1..379: note = Dielma fastidiosa
  REGION 1..379: note = tr|A0A2V2EW39|A0A2V2EW39_9FIRM Queuine tRNA-ribosyltransferase OS=Dielma fastidiosa OX=1034346; GN = tgt PE=3 SV=1
MSAIKFEITHVCKQSGARCGILHTPHGDVETPMFMPVGTLATVKYVSPEELKAIGAGVILSNTYHLWLRPGEDIVAEAGGVQKFMNYNGPMLTDSGGFQVFSLADSRKIHEEGVTFKSHLDGSTLFLSPEKSIQIQNKIGADFIMSFDECAPYPSTYDYMKNSVERTLRWAKRGKEAHQRPEEQALFGIVQGGEFEDLRKLCAETLAEMDFPGYSIGGTSVGESKETMYKMIDYSVKYLPWEKPRYLMGVGSVDAILEGIARNVDMFDCVLPTRIARHGTLMTSQGRVNIKRKEYERDFTPLDPECDCPTCRNYTKAYLRHLNKCNEGLGARLMSIHNLRFLLKLSEDARKAIKEDRFGDFKDEMFKKYGLNSVDSRGF

SEQ ID NO: 54755 - protein, 425 aa, Dietzia alimentaria
  REGION 1..425: note = tr|A0A1E3S084|A0A1E3S084_9ACTN Queuine tRNA-ribosyltransferase OS=Dietzia alimentaria OX=665550; GN = tgt PE=3 SV=1
MPDNATPTTRATTFDVGERMVLDGTAGGRTGVIHTPHGDIATPAFIPVGTKATVKTLTPEQVRSTGAQAVLANAYHLYLQPGHEVVDAAGGLGEFMRWSGPTYTDSGGFQVMSLGVGFKKVIEMSAGATPDDAATNKGQGRLAKVDEDGVTFTSHLDGSRHRFSPEVSMRIQHSLGADILFAFDELTTLMNTRKYQESSVERTRRWAQRCLDEHERLSLERGHRPGQSLWGVIQGAQFEDLRRQAVRGLVEMSERAEAEGRRGFGGYGIGGALEKENLGTIVGWCTEELPEDRPRHLLGISEPDDIFTAVENGADTFDCVAPTRLARHGGIYTLDGRVNITRAQFRHDHTPLDPEGPSEVSREYSRAYLHHLFKAKEFLGSTLLTLHNLAFVVRLVDEVRAAMAAGPDEYVAYKEQFLGRYYSGR

SEQ ID NO: 54756 - protein, 427 aa, Dietzia cinnamea
  REGION 1..427: note = tr|A0A4R3ZR37|A0A4R3ZR37_9ACTN Queuine tRNA-ribosyltransferase OS=Dietzia cinnamea OX=321318; GN = tgt PE=3 SV=1
MPDSATPDTRPTTFDVGERMVLDGTAGGRTGVIHTPHGDIATPAFIPVGTKATVKTLTPEQVRSTGAQAVLANAYHLYLQPGHEIVDAAGGLAEFMRWDGPTYTDSGGFQVMSLGVGFKKVIEMSAGTKAAPDDSATNKGQGRLAKVDEDGVTFTSHLDGSRHRFSPEVSMRIQHSLGADIIFAFDELTTLMNTRRYQENSVERTRRWAQRCLDEHERLSTERTHRPGQSLWGVVQGAQFEDLRRQAVRGLVEMSERAEDQGRRGFGGYGIGGALEKENLGTIVGWCTEELPEDRPRHLLGISEPDDIFTAVENGADTFDCVAPTRLARHGGIYTLDGRVNITRAQFRHDHTPLDPEGPSEVSREYSRAYLHHLFKAKEFLGSTLLTLHNLAFVVRLVDEVRAAMAAGPDEYVAYKTEFLGRYYAGR

SEQ ID NO: 54757 - protein, 427 aa, Dietzia cinnamea
  REGION 1..427: note = tr|E6J6L7|E6J6L7_9ACTN Queuine tRNA-ribosyltransferase OS=Dietzia cinnamea P4 OX=910954; GN = tgt PE=3 SV=1
MPDSAAPDTRPTTFDVGERMVLDGTAGGRTGVIHTPHGDIATPAFIPVGTKATVKTLTPEQVRSTGAQAVLANAYHLYLQPGHEIVDAAGGLAEFMRWDGPTYTDSGGFQVMSLGVGFKKVIEMSAGTKAAPDDSATNKGQGRLAKVDEDGVTFTSHLDGSRHRFSPEVSMRIQHSLGADIIFAFDELTTLMNTRRYQENSVERTRRWAQRCLDEHERLSTERTHRPGQSLWGVVQGAQFEDLRRQAVRGLVEMSERAEEQGRRGFGGYGIGGALEKENLGTIVGWCTEELPEDRPRHLLGISEPDDIFTAVENGADTFDCVAPTRLARHGGIYTLDGRVNITRAQFRHDHTPLDPEGPSEVSREYSRAYLHHLFKAKEFLGSTLLTLHNLAFVVRLVDEVRAAMAAGPDEYLAYKEQFLGRYYTGR

SEQ ID NO: 54758 - protein, 425 aa, Dietzia kunjamensis
  REGION 1..425: note = tr|A0A420C959|A0A420C959_9ACTN Queuine tRNA-ribosyltransferase OS=Dietzia kunjamensis OX=322509; GN = tgt PE=3 SV=1
MPDNDTPTTRATTFDVGERMVLDGTAGGRTGVIHTPHGDIATPAFIPVGTKATVKTLTPEQVRSTGAQAVLANAYHLYLQPGHEVIDAAGGLGEFMRWPGPTYTDSGGFQVMSLGVGFKKVIEMSAGAKPDDKATNKGQGRLAKVDEDGVTFTSHLDGSRHRFSPEVSMRIQHSLGADILFAFDELTTLMNTRKYQESSVERTRRWAQRCLDEHERLSQERGHRPGQSLWGVIQGAQFEDLRRQAVRGLVEMSERAEAEGRRGFGGYGIGGALEKENLGTIVGWCTEELPEDRPRHLLGISEPDDIFTAVENGADTFDCVAPTRLARHGGIYTLDGRVNITRAQFRHDHTPLDPEGASPVSREYSRAYLHHLFKAKEFLGQTLLTLHNLAFVVRLVDEVRAAMAAGPDEYVAYKEQFLGRYYSGR

SEQ ID NO: 54759 - protein, 427 aa, Dietzia lutea
  REGION 1..427: note = tr|A0A2S1R4E5|A0A2S1R4E5_9ACTN Queuine tRNA-ribosyltransferase OS=Dietzia lutea OX=546160 GN=tgt; PE = 3 SV=1
MPDSATPDTRPTTFDVGERMVLDGTAGGRTGVIHTPHGDIATPAFIPVGTKATVKTLTPDQVRSTGAQAVLANAYHLYLQPGHEIVDAAGGVGEFMRWDGPTYTDSGGFQVMSLGVGFKKVIEMSAGTKAAPDDSATNKGQGRLAKVDEDGVTFTSHLDGSRHRFSPEVSMRIQHSLGADIIFAFDELTTLMNTRRYQENSVERTRRWAQRCLDEHERLSTERTHRPGQSLWGVVQGAQFEDLRRQAVRGLVEMSERAEEQGRRGFGGYGIGGALEKENLGTIVGWCTEELPEDRPRHLLGISEPDDIFTAVENGADTFDCVAPTRLARHGGIYTLDGRVNITRAQFRHDHTPLDPEGPSEVSREYSRAYLHHLFKAKEFLGSTLLTLHNLAFVVRLVDEVRAAMAAGPDEYAAYKEQFLGRYYSGR

SEQ ID NO: 54760 - protein, 427 aa, Dietzia maris
  REGION 1..427: note = tr|A0A166NW24|A0A166NW24_9ACTN Queuine tRNA-ribosyltransferase OS=Dietzia maris OX=37915 GN=tgt; PE = 3 SV=1
MPDSAAPDTRPTTFDVGERMVLDGTAGGRTGVIHTPHGDIATPAFIPVGTKATVKTLTPEQVRSTGAQAVLANAYHLYLQPGHEIVDAAGGLAEFMRWDGPTYTDSGGFQVMSLGVGFKKVIEMSAGTKAAPDDSATNKGQGRLAKVDEDGVTFTSHLDGSRHRFSPEVSMRIQHSLGADIIFAFDELTTLMNTRGYQENSVERTRRWAQRCLDEHERLSTERTHRPGQSLWGVVQGAQFEDLRRQAVRGLVEMSERAEDQGRRGFGGYGIGGALEKENLGTIVGWCTEELPEDRPRHLLGISEPDDIFTAVENGADTFDCVAPTRLARHGGIYTLDGRVNITRAQFRHDHTPLDPEGPSEVSREYSRAYLHHLFKAKEFLGSTLLTLHNLAFVVRLVDEVRAAMAAGPDEYVAYKEQFLGRYYAGR

SEQ ID NO: 54761 - protein, 406 aa, Dietzia maris
  REGION 1..406: note = tr|A0A365PCH0|A0A365PCH0_9ACTN Queuine tRNA-ribosyltransferase OS=Dietzia maris OX=37915 GN=tgt; PE = 3 SV=1
MVLDGTAGGRTGVIHTPHGDIATPAFIPVGTKATVKTLTPEQVRSTGAQAVLANAYHLYLQPGHEVVDAGGGLGEFMRWSGPTYTDSGGFQVMSLGVGFKKVIEMSAGATPDDAATNKGQGRLAKVDEDGVTFTSHLDGSRHRFSPEVSMRIQHSLGADILFAFDELTTLMNTRKYQESSVERTRRWAQRCLDEHERLSLERGHRPGQSLWGVIQGAQFEDLRRQAVRGLVEMSERAEAEGRRGFGGYGIGGALEKENLGTIVGWCTEELPEDRPRHLLGISEPDDIFTAVENGADTFDCVAPTRLARHGGIYTLDGRVNITRAQFRHDHTPLDPEGPSEVSREYSRAYLHHLFKAKEFLGSTLLTLHNLAFVVRLVDEVRAAMAAGPDEYVAYKEQFLGRYYSGR

SEQ ID NO: 54762 - protein, 407 aa, Dietzia natronolimnaea
  REGION 1..407: note = tr|A0A2A2WU98|A0A2A2WU98_9ACTN Queuine tRNA-ribosyltransferase OS=Dietzia natronolimnaea; OX = 161920 GN=tgt PE=3 SV=1
MVLDGTAGGRTGVIHTPHGDIATPAFVPVGTKATVKTLTPEQVRSTGAQAVLANAYHLYLQPGHDVVDAAGGLGEFMRWSGPTYTDSGGFQVMSLGVGFKKVIEMSAGAAGAPDDSATNKGQGRLAKVDEDGVTFTSHLDGSPHRFSPEVSMRIQHGLGADILFAFDELTTLMNTREYQERSVERTRRWAQRCLDEHERLSVERGHRPGQSLWGVVQGAQFEDLRRQAVRGLVEMSDRAEEQGRRGFGGYGIGGALEKENLGTIVGWCTEELPEDRPRHLLGISEPDDIFTAVENGADTFDCVAPTRLARHGGIYTLDGRVNVTRAQFRHDHSALDPEGPSEVSREYSRAYLHHLFKAKEFLGSTLLTLHNLAFVVRLVDEVRAAMDAGPDEYLAYKSQFLGRYYST

SEQ ID NO: 54763 - protein, 431 aa, Dietzia psychralcaliphila
  REGION 1..431: note = tr|A0A2T5AMX9|A0A2T5AMX9_9ACTN Queuine tRNA-ribosyltransferase OS=Dietzia psychralcaliphila; OX = 139021 GN=tgt PE=3 SV=1
MGPMSDHTPPTPRATTFDVGSRMVLDGTAGGRTGVIHTPHGDIATPAFIPVGTKATVKTLTPEQVRSTGAQAVLANAYHLYLQPGHDVVDAAGGLGEFMRWSGPTYTDSGGFQVMSLGVGFKKVIEMSAGAATAPDDSATNKGQGRLAKVDEDGVTFTSHLDGSPHRFSPEVSMRIQHGLGADIMFAFDELTTLMNTRKYQESSVERTRRWAQRCLDEHQLLSEQRTHRPGQSLWGVVQGAQFEDLRRQAVRGLVEMSDRAEGQGRRGFGGYGIGGALEKENLGTIVGWCTEELPEDRPRHLLGISEPDDIFTAVENGADTFDCVAPTRLARHGGIYTLDGRVNVTRAQFRHDHTPLDPEGPSEVSRDYSRAYLHHLFKAKEFLGSTLLTLHNLAFVVRLVDEVRAAMEAGPDEYAAYKAEFLGRYYSAKV

SEQ ID NO: 54764 - protein, 425 aa, Dietzia schimae
  REGION 1..425: note = tr|A0A521CC30|A0A521CC30_9ACTN Queuine tRNA-ribosyltransferase OS=Dietzia schimae OX=498198; GN = tgt PE=3 SV=1
MPDNDTPTTRATTFDVGERMVLDGTAGGRTGVIHTPHGDIATPAFIPVGTKATVKTLTPEQVRSTGAQAVLANAYHLYLQPGHEVVDAAGGLGEFMRWPGPTYTDSGGFQVMSLGVGFKKVIEMSAGAKPDDKATNKGQGRLAKVDEDGVTFTSHLDGSRHRFSPEVSMRIQHSLGADILFAFDELTTLMNTRKYQESSVERTRRWAQRCLDEHERLSQERGHRPGQSLWGVIQGAQFEDLRRQAVRGLVEMSERAEAEGRRGFGGYGIGGALEKENLGTIVGWCTEELPEDRPRHLLGISEPDDIFTAVENGADTFDCVAPTRLARHGGIYTLDGRVNITRAQFRHDHTPLDPEGPSEVSREYSRAYLHHLFKAKEFLGSTLLTLHNLAFVVRLVDEVRAAMAAGPDEYVAYKEQFLGRYYSGR

SEQ ID NO: 54765 - protein, 425 aa, Dietzia sp.
  REGION 1..425: note = tr|A0A199AZ99|A0A199AZ99_9ACTN Queuine tRNA-ribosyltransferase OS=Dietzia sp. 111N12-1 OX=1785156; GN = tgt PE=3 SV=1
MPDNATPTTRATTFDVGERMVLDGTAGGRTGVIHTPHGDIATPAFIPVGTKATVKTLTPEQVRSTGAQAVLANAYHLYLQPGHEVVDAAGGLGEFMRWSGPTYTDSGGFQVMSLGVGFKKVIEMSAGATPDDAATNKGQGRLAKVDEDGVTFTSHLDGSRHRFSPEVSMSIQHSLGADILFAFDELTTLMNTRKYQESSVERTRRWAQRCLDEHERLSLERGHRPGQSLWGVIQGAQFEDLRRQAVRGLVEMSERAEAEGRRGFGGYGIGGALEKENLGTIVGWCTEELPDDRPRHLLGISEPDDIFTAVENGADTFDCVAPTRLARHGGIYTLDGRVNITRAQFRHDHTPLDPEGPSEVSREYSRAYLHHLFKAKEFLGSTLLTLHNLAFVVRLVDEVRAAMAAGPDEYVAYKEQFLGRYYSGR

SEQ ID NO: 54766 - protein, 426 aa, Dietzia sp.
  REGION 1..426: note = tr|A0A022L4M0|A0A022L4M0_9ACTN Queuine tRNA-ribosyltransferase OS=Dietzia sp. UCD-THP OX=1292020; GN = tgt PE=3 SV=1
MSVHTPPTPRATTFDVRSRMALDGTAGGRTGVIRTPHGDIATPAFIPVGTKATVKTLTPEQVRSTGAQAVLANAYHLYLQPGHDVVDAAGGLAEFMRWPGPTYTDSGGFQVMSLGVGFKKVIEMSAGAAKAPDDSATNKGQGRLAKVDEDGVTFTSHLDGSAHRFSPEVSMRIQHGLGADILFAFDELTTLMNTREYQERSVERTRRWAQRCLDEHERLSVERTHRPGQSLWGVVQGAQFEDLRRQAVRGLVEMSDRAEDRGRRGFGGYGIGGALEKENLGTIVGWCTEELPEDRPRHLLGISEPDDIFTAVENGADTFDCVAPTRLARHGGIYTLNGRVNITRAQFRHDHTPLDPEGPSEVSRDYSRAYLHHLFKAKEFLGSTLLTMHNLAFVVRLVDEVRAAMDAGPDEYLAYKAEFLGRYYSA

SEQ ID NO: 54767 - protein, 445 aa, Dietzia timorensis
  REGION 1..445: note = tr|A0A173LIC8|A0A173LIC8_9ACTN Queuine tRNA-ribosyltransferase OS=Dietzia timorensis OX=499555; GN = tgt PE=3 SV=1
MLRAAPIPACGTMDFMPNPAPEPHGSAKSEYFETTARLAVPGTAGGRSGVIMTPHGAIETPAFIPVGTKATVKTLLPEQIASTGAQAVLANAYHLYLQPGHDIVDAAGGVGAFMNWPGPTYTDSGGFQVMSLGVGFKKVIEMSATGTPDDSATRANKERLARVDEEGVTFRSHLDGSSHRFTPEVSMQIQHGLGADIMFAFDELTTLMNTRGYQEQSVERTRRWAERCLVEHNRLTAERADKPPQSLWGVIQGAQYEDLRRQAVRGLLEMSDRFTESGQRGFGGFGIGGALEKENLGTIVGWCTSEMPEDMPRHLLGISEPDDVFTAVENGADTFDCVAPTRLARHGGIYTRSGKVNITKAMYRRDFTPLDPEGDHPVDAQYTRAYLHHMFKAKEYLGAQICTLHNVRFIIRMVADIRSAIAGGTDEYLAFKEDFLGRYYAGRAK

SEQ ID NO: 54768 - protein, 378 aa, unidentified
  source 1..378: note = Dinghuibacter silviterrae
  REGION 1..378: note = tr|A0A4R8DRK5|A0A4R8DRK5_9BACT Queuine tRNA-ribosyltransferase OS=Dinghuibacter silviterrae; OX = 1539049 GN=tgt PE=3 SV=1
MELTFAIEGTDPGTAARAGRIRTDHGEIETPIFMPVGTVGSVKAVTQQQLQSDVNAQIILGNTYHLYLRPGTGVLSKAGGLHRFNGWPRPILTDSGGYQVFSLAENRKITEEGVVFQSHIDGSRHLFSPEGVMDIQRAIGADIIMAFDECPPYPAEYRYVRQSMDLTHRWLDRCIARLADTPDAYGYTQNLFPIVQGGTFADLRKASSEYIASRGAAGNAIGGLSVGEPEEQMYEMCGLCCSFLPADKPRYLMGVGTPWNILESIALGVDMFDCVMPTRNGRNGMLFTTEGVINIRNKKWADDFSPVDPGLTDSPASAYSKAYLRHLFVAGEILGLTLASLQNLTFYLHLVREARVHILAGDFAAWKAAILPRIKQRL

SEQ ID NO: 54769 - protein, 376 aa, Dinoroseobacter shibae
  REGION 1..376: note = sp|A8LRQ1|TGT_DINSH Queuine tRNA-ribosyltransferase; OS = Dinoroseobacter shibae (strain DSM 16493 / NCIMB 14021 / DFL 12) OX=398580 GN=tgt PE=3 SV=1
MTQRFSFTRLGQDGAARLGRINTPRGEIRTPAFMPVGTAATVKAMRPESVRETGADILLGNTYHLMLRPTAERIARLGGLHRFMNWDRPILTDSGGFQVMSLTGLRKLTEQGVTFKSHIDGSKHMLSPERSMEIQKLLRSDIVMCFDECPALPAPRERITESMELSMRWAARSREAFGDWPGHALFGIQQGGLEEDLRGKSAEALRAIEFDGYAVGGLAVGEGQEAMFGVLDYAPGMLPEDKPRYLMGVGKPGDLVGAVKRGIDMFDCVLPSRSGRTGQVFTRRGVVNIKNARHADDPRPLDEDCTCPACRSYSRAYLHHVFRAGEILSSMLLTWHNLHYYQELMQGMRDAIGAGDFAGFEARFLAQQAEGDIAPV

SEQ ID NO: 54770 - protein, 371 aa, unidentified
  source 1..371: note = Dissulfuribacter thermophilus
  REGION 1..371: note = tr|A0A1B9F9F7|A0A1B9F9F7_9DELT Queuine tRNA-ribosyltransferase OS=Dissulfuribacter thermophilus; OX = 1156395 GN=tgt PE=3 SV=1
MPDSFKILHSSKDGPYRTGILNLFHGQVKTPCFMPVGTLATVKAVSPDELKEAGVGFILSNAYHLYLRPGHELIRDLGGLHSFMNWDRPILTDSGGFQVYSLASMRKITEDGVVFQSHLDGSYHKFTPEKVIAIQEALGSDVMMCLDWCTGYPVERQEVEKAVEITTLWAKRSIEARERRELRLFGIIQGGMHKDLRRRSANELLCLDFDGYAIGGLSVGESQDIMLEMIEEVVPIVPRSYPLYLMGVGTPEDIVEAVHRGVDMFDCVLPTRNARNGMAFTRFGNLNIKNAAFERDSSPLDPECSCYTCSRFSRAYLRHLYKSRELLVYRLLTIHNIFYYMELMNSIRQSIEKDTFMDFKKRFYEQRANKK

SEQ ID NO: 54771 - protein, 370 aa, Dokdonella fugitiva
  REGION 1..370: note = tr|A0A4R2I3M4|A0A4R2I3M4_9GAMM Queuine tRNA-ribosyltransferase OS=Dokdonella fugitiva OX=328517; GN = tgt PE=3 SV=1
MSAMRFELLGSDGAARRGRLAFPRGTIETPAFMPVGTYGSVKAMSPRDLLDIGAEIILGNTFHLFLRPGLDVVGEFGGLHRFIGWNKPILTDSGGFQVFSLAHKRKITEQGVTFASPVDGAKVFLSPEESMRIQHVLDSEIAMIFDECTPYPATEKQARDSMELSLRWAERSRRAFDDRGNPNSLFGIVQGGVYPELRRRSAEALIDIGFDGYAIGGLAVGEPEHERNATLERVEPLLPRDRPRYLMGVGRPEDIVEAVRRGVDMFDCVMPTRNARNAHLFTRHGTLRIRNAKYERDTRPLDEECACYTCRSGFSRAYLRHLDRCGEMLGPMLATIHNLHYYQELMAGLRSAIAERRLGDFVAAFYAARS

SEQ ID NO: 54772 - protein, 371 aa, unidentified
  source 1..371: note = Dokdonella immobilis
  REGION 1..371: note = tr|A0A1I4V6N2|A0A1I4V6N2_9GAMM Queuine tRNA-ribosyltransferase OS=Dokdonella immobilis OX=578942; GN = tgt PE=3 SV=1
MHFELLATDANARRGRLTFARGTIETPAFMPVGTYGTVKAMTPRDVEEIGAEIILGNTFHLFLRPGLDVIGDFGGLHRFIGWNRPILTDSGGFQVFSLAHKRKITEEGVTFASPVDGSKVFLSPEESMRIQRVLDSDIAMIFDECTPYPATEPVARTSMELSLRWALRSRQHFDALGNPNALFGIVQGSVYPDLRKRSAQGLIEIGFDGYAIGGLAVGEPEDERNATLELVEPFLPKDRPRYLMGVGRPEDIVEAVRRGVDMFDCVMPTRNARNGFLFTRHGTLRIRNAKFARDTRVIEEGCACYACRSGFSRAYLRHLDRCGEILGSQLATIHNLHHYQQLMAGLRAAIAASRLDAFVAEFYALRTGEGE

SEQ ID NO: 54773 - protein, 377 aa, Dokdonella koreensis
  REGION 1..377: note = tr|A0A160DWY7|A0A160DWY7_9GAMM Queuine tRNA-ribosyltransferase OS=Dokdonella koreensis DS-123; OX = 1300342 GN=tgt PE=3 SV=1
MSALEFTLSARDGAARRGCLTLARGTIQTPAFMPVGTYGSVKAMTPRDIEETGAEIILGNTFHLFLRPGLDVVGDFGGLHRFIGWQRPILTDSGGFQVFSLAHKRRISEDGVTFASPVDGSKVFLSPEESMRIQRALDSDIVMIFDECTPYPASEPVARDSMELSLRWALRSRRAFDAQENPHALFGIVQGSVYPDLRKRSADALVAIGFDGYAIGGLAVGEPEHERNAMLETVCPFLPDDRPRYLMGVGRPEDIVEAVRRGVDMFDCVMPTRNARNGFLFTREGTLRIRNARYARDARVIEAGCTCYTCRSGFSRAYLRHLDKCGEILACQLATIHNLHHYQQLMAGLRAAIAEARLDAFVADFYAQRQAGSAESP

SEQ ID NO: 54774 - protein, 376 aa, Dokdonia donghaensis
  REGION 1..376: note = tr|A0A0A2GSS1|A0A0A2GSS1_9FLAO Queuine tRNA-ribosyltransferase OS=Dokdonia donghaensis DSW-1; OX = 1300343 GN=tgt PE=3 SV=1
MQFDLLTTDPASKARAGKLTTDHGVIETPIFMPVGTVASVKGVHQRELREDINPDIILGNTYHLYLRPKMDILQRAGGLHKFMNWDRPILTDSGGYQVYSLSNRRKIKEEGVRFKSHVDGSMHLFTPENVMEIQRQIGADIMMAFDECTPYPCDYRYAKRSMHMTHRWLDRCINHFNKIPALYGHEQALFPIVQGSTYKDLRARSAEYIANAGAFGNAIGGLSVGEPAEEMYGMTEVVTAILPEEKPRYLMGVGTPINILENIALGVDMFDCVMPTRNARNGMLFTAHGSINIKNLKWEDDFSPIDEMGITWVDTEYSKAYLRHLFKCHELLGMQIATIHNLGFYMWLVREARKHILAGDFSTWKEKMVKQMDNRL

SEQ ID NO: 54775 - protein, 376 aa, unidentified
  source 1..376: note = Dokdonia pacifica
  REGION 1..376: note = tr|A0A239BAV5|A0A239BAV5_9FLAO Queuine tRNA-ribosyltransferase OS=Dokdonia pacifica OX=1627892; GN = tgt PE=3 SV=1
MQFDLLTTDPASKARAGKLTTDHGVIETPIFMPVGTVASVKGVHQRELREDINPDIILGNTYHLYLRPGTGTLQKAGGLHKFMNWDRPILTDSGGFQVYSLSNRRKIKEEGVRFKSHVDGSMHLFTPENVMEIQRQIGADIIMAFDECTPYPCDYRYAKRSMHMTHRWLDRCITHFEKTPALYGYEQALFPIIQGSTYKDLRTQSAEYIANSNAFGNAIGGLSVGEPAEEMYAMTEVVTAVLPEEKPRYLMGVGTPINILENIALGIDMFDCVMPTRNARNGMLFTAHGTINIKNLKWAEDFSPIDEMGITWVDTEYSKAYLRHLFKCHELLGMQIATIHNLGFYLWLVREARKQILAGTFTAWKDKMVKQMDKRL

SEQ ID NO: 54776 - protein, 376 aa, Dokdonia sp.
  REGION 1..376: note = tr|F4B2V3|F4B2V3_DOKS4 Queuine tRNA-ribosyltransferase OS=Dokdonia sp. (strain 4H-3-7-5); OX = 983548 GN=tgt PE=3 SV=1
MQFDLLTTDPASQARAGKLTTDHGVIETPIFMPVGTVASVKGVHQRELREDINPDIILGNTYHLYLRPKMDIMQKAGGLHKFMNWDRPILTDSGGYQVYSLSNRRKIKEEGVRFKSHVDGSMHLFTPENVMEIQRQIGADIMMAFDECTPYPCDYRYAKRSMHMTHRWLDRCINHFNKIPALYGHEQALFPIVQGSTYKDLRAQSAEYIANAGAFGNAIGGLSVGEPAEEMYGMTEVVTAILPKDKPRYLMGVGTPINILENIALGVDMFDCVMPTRNARNGMLFTAYGSINIKNLKWEEDFSPIDEMGLTWVDTEYSKAYLRHLFKCHELLGMQIATIHNLGFYMWLVREARKHIIAGDFVTWKEMMVKQMNNRL

SEQ ID NO: 54777 - protein, 376 aa, Dokdonia sp.
  REGION 1..376: note = tr|A0A2S1Q9A5|A0A2S1Q9A5_9FLAO Queuine tRNA-ribosyltransferase OS=Dokdonia sp. Dokd-P16; OX = 2173169 GN=tgt PE=3 SV=1
MQFDLLTTDPASQARAGKLTTDHGVIETPIFMPVGTVASVKGVHQRELREDINPDIILGNTYHLYLRPKMDIMQKAGGLHKFMNWDRPILTDSGGYQVYSLSNRRKIKEEGVRFKSHVDGSMHLFTPENVMEIQRQIGADIMMAFDECTPYPCDYRYAKRSMHMTHRWLDRCINHFNKIPALYGHEQALFPIVQGSTYKDLRAQSAEYIANAGAFGNAIGGLSVGEPAEEMYGMTEVVTAILPKDKPRYLMGVGTPINILENIALGVDMFDCVMPTRNARNGMLFTAYGSINIKNLKWEDDFSPIDEMGLTWVDTEYSKAYLRHLFKCHELLGMQIATIHNLGFYMWLVREARKHIIAGDFVTWKEMMVKQMDNRL

SEQ ID NO: 54778 - protein, 343 aa, unidentified
  source 1..343: note = Dolichospermum compactum
  REGION 1..343: note = tr|A0A1Z4UZ30|A0A1Z4UZ30_9CYAN Queuine tRNA-ribosyltransferase OS=Dolichospermum compactum NIES-806 OX=1973481 GN=tgt PE=3 SV=1
MPVGTLANVKTITPAQLGATGAQMVLANTYHLHLQPGEAIVAGGGGLHKFMGWSGPMLTDSGGFQVFSLSEMRKITEEGVTFRSPHDGQIIKLTPERSIEIQNVLGADVIMAFDECPPYPATRQEVEAATDRTYRWLKRSISAHQRADQALFPIVQGGVYLDLRARAAQELAQLDMPGYAIGGVSVGEPTDLMAQIVQTTAPLLPVNKPRYLMGVGTYREMAIAIASGVDLFDCVIPTRWARHGTAIVAGERWNIKNAKFREDFTPLDETCPCYTCENFSRAYLSHLVRSQEILAYTLLTIHNITELIRFTQKIRASILSDRFVTDFGHWLEPSEIELEKTDN

SEQ ID NO: 54779 - protein, 343 aa, unidentified
  source 1..343: note = Dolichospermum planctonicum
  REGION 1..343: note = tr|A0A480AD50|A0A480AD50_9CYAN Queuine tRNA-ribosyltransferase OS=Dolichospermum planctonicum; OX = 136072 GN=tgt PE=3 SV=1
MPVGTLANVKTITPAQLAATGAQMVLANTYHLHLQPGEAIVAGGGGLHKFMGWPGPMLTDSGGFQVFSLSEMRKITEEGVTFRSPHDGQMIKLTPERSIEIQNILGADVIMAFDECPPYPATRQEVEAATDRTYRWLKRSISAHKRQDQALFPIVQGGVYLDLRARAAAELAQLDMPGYAIGGVSVGEPTDLMAQIVQTTAPLLPVNKPRYLMGVGTYREMAIAIASGVDLFDCVIPTRWARHGTAIVDGERWNLKNAKFREDFTPLDTTCPCYTCENFSRAYISHLVRSQEILAYTLLTIHNITELIRFTQKIRASILSDRFITDFGHWLQHDAIDLEKTED

SEQ ID NO: 54780 - protein, 343 aa, unidentified
  source 1..343: note = Dolichospermum sp.
  REGION 1..343: note = tr|A0A5C0DRF9|A0A5C0DRF9_9CYAN Queuine tRNA-ribosyltransferase OS=Dolichospermum sp. UHCC 0315A; OX = 1914871 GN=tgt PE=3 SV=1
MPVGTLANVKTITPAQLGATGAQMVLANTYHLHLQPGEAIVAGGGGLHKFMGWSGPMLTDSGGFQVFSLSEMRKITEEGVTFRSPHDGQIIKLTPERSIEIQNILGADVIMAFDECPPYPATRQEVEAATDRTYRWLKRSISAHQRQDQALFPIVQGGVYLDLRARAAQELAQLDMPGYAIGGVSVGEPTDLMAQIVQTTAPLLPMNKPRYLMGVGTYREMAIAIASGVDLFDCVIPTRWARHGTAIVSGERWNIKNAKFREDFTPLDTTCPCYTCENFSRAYLSHLVRSQEILAYTLLTIHNITELIRFTQKIRASILSDRFVTDFGHWLEPSAIDLEKTED

SEQ ID NO: 54781 - protein, 381 aa, Dolosicoccus paucivorans
  REGION 1..381: note = tr|A0A2N6SN25|A0A2N6SN25_9LACT Queuine tRNA-ribosyltransferase OS=Dolosicoccus paucivorans; OX = 84521 GN=tgt PE=3 SV=1
MTQGPIHYELLHEEKHTKARYGILHTPHGSYETPMYMPVGTLATVKGLSPEELKDMGAGVILSNTYHLWLRPGEDIVEQAGGLHQFMNWDQGLLTDSGGFQVFSLSDMRKIEEEGVHFRNHISGEKLFLTPEKAIQIQNSLGADIIMSFDECPDFRHTYDYVKDSIARTTRWAERGLNAHQKSDTQALFGIVQGAGFKDLRIQHAKDLMSLDFPGYSIGGLSVGETKEEMDEVLDYLLPVLPKHKPRYLMGVGTPDSLIDGAMYGVDMFDCVLATRVARNGTCMTSTGRLVVKNAQYARDFKPIDENCDCYACRNYTRAYIRHLIKCNEMLGLRLASIHNTHFLLDLMRQVRYHIQNDTLLEFRQEFYERYGYNKKNAPAF

SEQ ID NO: 54782 - protein, 379 aa, unidentified
  source 1..379: note = Domibacillus aminovorans
  REGION 1..379: note = tr|A0A177LAE7|A0A177LAE7_9BACI Queuine tRNA-ribosyltransferase OS=Domibacillus aminovorans; OX = 29332 GN=tgt PE=3 SV=1
MTAIKYELIKTCKQTGARLGRVHTPHGSFETPVFMPVGTLATVKTMSPEDIKQMGANILLSNTYHLWLRPGHDIVQEAGGLHKFMNWDGAILTDSGGFQVFSLSEFRKIEEEGVHFRNHINGDKLFLSPEKAMDIQNALGSDIMMAFDECPPYPAEYEYMKKSVERTSRWAERCLTAHKRPEDQGLFGIVQGGEYEELRRQSARDLVSLDFPGYAIGGLSVGEPKDVMNRVLDFTTPHLPADKPRYLMGVGSPDSLIDGAMRGIDMFDCVLPTRIARNGTLMTSEGRLVVKNAKYARDFGPLDPNCDCYTCKNYSRAYIRHLLHCNETFGIRLTTYHNLHFLVNLMENVRQAIREDRLGDFREEFFEQYGFNRPDAKNF

SEQ ID NO: 54783 - protein, 379 aa, unidentified
  source 1..379: note = Domibacillus aminovorans
  REGION 1..379: note = tr|A0A177KSR4|A0A177KSR4_9BACI Queuine tRNA-ribosyltransferase OS=Domibacillus aminovorans; OX = 29332 GN=tgt PE=3 SV=1
MTAIKYELIKTCKQTGARLGRVHTPHGSFETPVFMPVGTLATVKTMSPEDIKQMGANILLSNTYHLWLRPGHDIVQEAGGLHKFMNWDGAILTDSGGFQVFSLSEFRKIEEEGVHFRNHINGDKLFLSPEKAMDIQNALGSDIMMAFDECPPYPAEYEYMKKSVERTSRWAERCLTAHKRPEDQGLFGIVQGGEYEELRRQSARDLVSLDFPGYAIGGLSVGEPKDVMNRVLDFTTPHLPTDKPRYLMGVGSPDSLIDGAMRGIDMFDCVLPTRIARNGTLMTSEGRLVVKNAKYARDFGPLDPNCDCYTCKNYSRAYIRHLLHCNETFGIRLTTYHNLHFLVNLMENVRQAIREDRLGDFREEFFEQYGFNRPDAKNF

SEQ ID NO: 54784 - protein, 379 aa, unidentified
  source 1..379: note = Domibacillus antri
  REGION 1..379: note = tr|A0A1Q8Q7Y8|A0A1Q8Q7Y8_9BACI Queuine tRNA-ribosyltransferase OS=Domibacillus antri OX=1714264; GN = tgt PE=3 SV=1
MSAIKYELIKTCKQTGARLGRVHTPHGSFETPVFMPVGTLATVKTMSPEDIKQMGANILLSNTYHLWLRPGHDIVQEAGGLHKFMNWDGAILTDSGGFQVFSLSEFRKIEEEGVHFRNHLNGDKLFLSPEKAMEIQNALGSDIMMVFDECPPYPAEYDYMKKSVERTSRWAERCLTAHKRPEDQGLFGIVQGGEYEELRRQSAKDLVSLDFPGYAIGGLSVGEPKDVMNRVLDFTTPHLPADKPRYLMGVGSPDSLIDGAMRGVDMFDCVLPTRIARNGTLMTSEGRLVVKNAKYARDFGPLDPNCDCYTCKNYSRAYIRHLLHCNETFGIRLTTYHNLHFLIKLMENVRQAIREDRLGDFREEFFEQYGFNRPDAKNF

SEQ ID NO: 54785 - protein, 379 aa, unidentified
  source 1..379: note = Domibacillus enclensis
  REGION 1..379: note = tr|A0A1N6PWS7|A0A1N6PWS7_9BACI Queuine tRNA-ribosyltransferase OS=Domibacillus enclensis; OX = 1017273 GN=tgt PE=3 SV=1
MTAIKYELIKTCKQTGARLGRVHTPHGSFETPVFMPVGTLATVKTMAPEDIKAMGANILLSNTYHLWLRPGHDIVKEAGGLHKFMNWDGAILTDSGGFQVFSLSEFRKIEEEGVHFRNHINGDKLFLSPEKAMDIQNALGSDIMMAFDECPPYPAEYDYMKKSVERTSRWAERCLTAHKRPEDQGLFGIVQGGEYEELRKQSARDLVSLDFPGYAIGGLSVGEPKDVMNRVLDFTTPHLPSDKPRYLMGVGSPDSLIDGAMRGVDMFDCVLPTRIARNGTLMTSEGRLVVKNAKYARDFGPLDPNCDCYTCKNYSRAYIRHLLHCNETFGIRLTTYHNLHFLINLMENVRQAIREDRLGDFREEFFEQYGFNRPDAKNF

SEQ ID NO: 54786 - protein, 379 aa, unidentified
  source 1..379: note = Domibacillus epiphyticus
  REGION 1..379: note = tr|A0A1V2A9D0|A0A1V2A9D0_9BACI Queuine tRNA-ribosyltransferase OS=Domibacillus epiphyticus; OX = 1714355 GN=tgt PE=3 SV=1
MSAIKYELIKTCKQTGARLGRVHTPHGSFETPVFMPVGTLATVKTMSPEDIKQMGANILLSNTYHLWLRPGHDIVQEAGGLHKFMNWDGAILTDSGGFQVFSLSEFRKIEEEGVHFRNHLNGDKLFLSPEKAMEIQNALGSDIMMAFDECPPYPAEYEYMKKSVERTSRWAERCLAAHKRPEDQGLFGIVQGGEYEELRRQSAKDLVSLDFPGYAIGGLSVGEPKDVMNRVLDFTTPHLPADKPRYLMGVGSPDSLIDGAMRGVDMFDCVLPTRIARNGTLMTSEGRLVVKNAKYARDFGPLDENCDCYTCKNYSRAYIRHLLHCNETFGIRLTTYHNLHFLIKLMENVRQAIREDRLGDFREEFFEQYGFNRPDAKNF

SEQ ID NO: 54787 - protein, 379 aa, unidentified
  source 1..379: note = Domibacillus iocasae
  REGION 1..379: note = tr|A0A1E7DMH4|A0A1E7DMH4_9BACI Queuine tRNA-ribosyltransferase OS=Domibacillus iocasae OX=1714016; GN = tgt PE=3 SV=1
MTAIKYEFIKACKQTGARLGRVHTPHGSFETPVFMPVGTLATVKTMAPEDIKAMGANILLSNTYHLWLRPGHDIVQEAGGLHKFMNWDGAILTDSGGFQVFSLSEFRKIEEEGVHFRNHINGDKLFLSPEKAMDIQNALGSDIMMAFDECPPYPAEYDYMKKSVERTSRWAERCLTAHKRPNDQGLFGIVQGGEYEELRKQSARDLVSLDFPGYAIGGLSVGEPKDVMNRVLDFTTPHLPADKPRYLMGVGSPDSLIDGAIRGIDMFDCVLPTRIARNGTLMTSEGRLVVKNAKYARDFGPLDPNCDCYACKNYSRAYIRHLLHCNETFGIRLTTYHNLHFLINLMENVRQAIREDRLGDFREEFFEQYGFNRPDAKNF

SEQ ID NO: 54788 - protein, 379 aa, unidentified
  source 1..379: note = Domibacillus mangrovi
  REGION 1..379: note = tr|A0A1Q5P7H5|A0A1Q5P7H5_9BACI Queuine tRNA-ribosyltransferase OS=Domibacillus mangrovi; OX = 1714354 GN=tgt PE=3 SV=1
MTAIKYELIKTCKQTGARLGRVHTPHGSFETPVFMPVGTLATVKTMSPEDIKQMGANILLSNTYHLWLRPGHDIVQEAGGLHKFMNWDGAILTDSGGFQVFSLSKFRQIEEEGVHFRNHINGDKLFLSPEKAMDIQNALGSDIMMAFDECPPYPAEYEYMKKSVERTSRWAERCLTAHKRPEDQGLFGIVQGGEYEELRRQSARDLVSLDFPGYAIGGLSVGEPKDIMNRVLDFTTPHLPADKPRYLMGVGSPDSLIDGAMRGIDMFDCVLPTRIARNGTLMTSEGRLVVKNAKYARDFGPLDPNCDCYTCKNYSRAYIRHLLHCNETFGIRLTTYHNLHFLVNLMENVRQAIREDRLGDFREEFFEQYGFNRPDAKNF

SEQ ID NO: 54789 - protein, 376 aa, Donghicola sp.
  REGION 1..376: note = tr|A0A1M4N0W4|A0A1M4N0W4_9RHOB Queuine tRNA-ribosyltransferase OS=Donghicola sp. KarMa OX=1779855; GN = tgt PE=3 SV=1
MATGFGFELKATDGKARTGVISTPRGDIRTPAFMPVGTAATVKAMLPESVRETGADILLGNTYHLMLRPTAERIDRLGGLHKFMNWERPILTDSGGFQVMSLAGLRKLTEKGVTFKSHVDGSKHEITPERSMEIQRLLGSDIVMCFDECTPFPATEEQALESMRLSMRWAQRSRDAFGDRPGHALFGIQQGSTFRDQREESAEALQKIGFDGYAVGGLAVGEGQEMMFDVLDYAPDMLPVDKPRYLMGVGKPDDIVGAVKRGIDMMDCVLPSRSGRTGQVFTRRGVLNIKNARHQDDPRPLDEDCTCPACRNYSRAYLHHTFRAKEIIQSMLLTWHNLHYYQDLMQGMCDAIAAGTFAEWEADFHAKRAEGDIEPL

SEQ ID NO: 54790 - protein, 376 aa, unidentified
  source 1..376: note = Donghicola tyrosinivorans
  REGION 1..376: note = tr|A0A2T0X5E5|A0A2T0X5E5_9RHOB Queuine tRNA-ribosyltransferase OS=Donghicola tyrosinivorans; OX = 1652492 GN=tgt PE=3 SV=1
MATGFRFDLKATDGKARTGVIETPRGEIRTPAFMPVGTAATVKAMLPESVRATGADILLGNTYHLMLRPTAERIDRLGGLHKFMNWDRPILTDSGGFQVMSLAGLRKLTEKGVTFKSHVDGSKHEITPERSMEIQRLLGSDIVMCFDECTPFPATEAQALESMRLSMRWAQRSRDAFGDRPGHALFGIQQGSVFRDQREESAEALQKIGFDGYAVGGLAVGEGQDMMFDVLEYAPDMLPVDKPRYLMGVGKPDDIVGAVKRGIDMMDCVLPSRSGRTGQVFTRRGVLNIKNARHQDDPRPLDEECGCPACRNYSRAYFHHTFRAKEIIQSMLLTWHNLHYYQDLMQGMRDAISAGTFAAWEADFHAKRAEGDIEPL

SEQ ID NO: 54791 - protein, 373 aa, Dongia mobilis
  REGION 1..373: note = tr|A0A4R6WTF5|A0A4R6WTF5_9PROT Queuine tRNA-ribosyltransferase OS=Dongia mobilis OX=578943 GN=tgt; PE = 3 SV=1
MSGRFDLLATDGKARRGRIHTAHGIVNTPAFMPVGTAGTVKAMLPESVKATGAEIVLGNTYHLMLRPGAERVASFGGLHKFMNWPGPILTDSGGFQAMSLSDLRKISEQGVEFRSHIDGSKHMLTPERSIEIQDLLDSNITMVLDECTPFPATPEQAAESMRRSMRWAARCREAFRDRDGYLLFGIVQGGIYPNLRRESAEALVRIGFDGYAIGGLAIGEGQQQMFGVLDYTPDLLPREKPRYLMGVGKPGDIVGAVARGIDMFDCVMPTRSGRTGLAHTRYGDINMRNARHASDDRPIDPKCACPACSAYVRGYIHHLMKTKEILGAMLLTWHNLHYYQELMQGMRAAIEQGRLADFIAEFERGQALGDLPG

SEQ ID NO: 54792 - protein, 376 aa, Dorea formicigenerans
  REGION 1..376: note = tr|A0A3E4F3H0|A0A3E4F3H0_9FIRM Queuine tRNA-ribosyltransferase OS=Dorea formicigenerans OX=39486; GN = tgt PE=3 SV=1
MYELLKTDGLAKRGRLHTVHGVIETPVFMNVGTIAAIKGAVSTTDLQEIGTQVELSNTYHLHVRPGDEVVKKLGGLHKFMVWDKPILTDSGGFQVFSLAGLRRIKEEGVYFNSHIDGRKIFMGPEQSMQIQSNLASTIAMAFDECPSSVADRDYMENSVNRTTRWLKRCKAEMDRLNSLPDTINKHQMLFGINQGGVYEDIRVRHAQEISELNLDGYAVGGLAVGESHEEMYRILDAVVPHLPQNKPTYLMGVGTPANILEAVERGVDFFDCVYPSRNGRHGHVYTNHGKMNLFNAKYELDTRPIEEGCNCPVCRTYSRAYVRHLLKAKEMLGMRFCVLHNLYFYNKMMEEIREAIEAGRYKEYKEEKLRRMAEGE

SEQ ID NO: 54793 - protein, 376 aa, Dorea formicigenerans
  REGION 1..376: note = tr|G1WMQ3|G1WMQ3_9FIRM Queuine tRNA-ribosyltransferase OS=Dorea formicigenerans 4_6_53AFAA OX=742765 GN=tgt PE=3 SV=1
MYELLKTDGLAKRGRLHTVHGVIETPVFMNVGTIAAIKGAVSTTDLQEIGTQVELSNTYHLHVRPGDEVVKKLGGLHKFMVWDKPILTDSGGFQVFSLAGLRRIKEEGVYFNSHIDGRKIFMGPEQSMQIQSNLASTIAMAFDECPSSVADRDYMENSVNRTTRWLKRCKAEMDRLNSLPDTINKHQMLFGINQGGVYEDIRVRHAQEISELNLDGYAVGGLAVGESHEEMYRILDAVVPHLPQNKPTYLMGVGTPANILEAVERGVDFFDCVYPSRNGRHGHVYTNHGKMNLFNAKYELDTRPIEEGCNCPVCRTYSRAYVRHLLKAKEMLGMRFCVLHNLYFYNKMMEEVREAIEAGRYKEYKEEKLRRMAEGE

SEQ ID NO: 54794 - protein, 377 aa, Dorea longicatena
  REGION 1..377: note = tr|R7FTP8|R7FTP8_9FIRM Queuine tRNA-ribosyltransferase OS=Dorea longicatena CAG:42; OX = 1263074 GN=tgt PE=3 SV=1
MYELIKKDGLAKRGRLHTVHGVIETPVFMNVGTAAAIKGAVATTDLQEIKTQVELSNTYHLHVRPGDEVVKKLGGLHKFMNWDKPILTDSGGFQVFSLAGLRRIKEEGVYFNSHIDGHKIFMGPEESMRIQSNLASTIAMAFDECPSSVADREYIEKSVARTTRWLVRCKKEMERLNSLPDTINKHQMLFGINQGGVYEDIRIKHADEISKLDLDGYAVGGLAVGESHEEMYRILDAVVPHLPDHKPTYLMGVGTPVNILEAVDRGVDFFDCVYPSRNGRHGHVYTNHGKLNLFNAKFELDDRPIEEGCQCPACRNYSRAYIRHLLKAKEMLGMRLCVLHNLYFYNTMMEEIRDAIDHDCYKEYKERKIAAVTGKNE

SEQ ID NO: 54795 - protein, 377 aa, Dorea longicatena
  REGION 1..377: note = tr|A0A174UIK9|A0A174UIK9_9FIRM Queuine tRNA-ribosyltransferase OS=Dorea longicatena OX=88431; GN = tgt PE=3 SV=1
MYELIKKDGLAKRGRLHTVHGVIETPVFMNVGTAAAIKGAVATSDLQEIKTQVELSNTYHLHVRPGDEVVKKLGGLHKFMNWDKPILTDSGGFQVFSLAGLRRIKEEGVYFNSHIDGRKIFMGPEESMQIQSNLASTIAMAFDECPSSVADRDYMEKSVARTTRWLVRCKKEMERLNALPDTINKHQMLFGINQGGVYEDIRIKHADEISKLDLDGYAVGGLAVGESHEEMYRILDAVVPHLPDNKPTYLMGVGTPANILEAVDRGVDFFDCVYPSRNGRHGHVYTNHGKLNLFNARFELDARPIEEGCQCPACRNYSRAYIRHLLKAKEMLGMRLCVLHNLYFYNTMMEEIRDAIDHDCYKEYKTQKIAAVTGKNE

SEQ ID NO: 54796 - protein, 377 aa, Dorea sp.
  REGION 1..377: note = tr|A0A396L0F5|A0A396L0F5_9FIRM Queuine tRNA-ribosyltransferase OS=Dorea sp. AF36-15AT OX=2292041; GN = tgt PE=3 SV=1
MYELLKKDGRAKRGRLHTVHGDIETPVFMNVGTAAAIKGAVSTADLQQIGTKVELSNTYHLHVRPGDQVVKKMGGLHKFMVWDKPILTDSGGFQVFSLAGLRKIKEEGVYFQSHIDGHKIFMGPEESMQIQSNLASTIAMAFDECPSSVADRDYMQKSVDRTTRWLKRCKAEMDRLNSLPDTINKHQMLFGINQGGIYEDIRVAHADEISKLDLDGYAVGGLAVGESHEDMYRILDEVVPHLPENKPTYLMGVGTPANILEAVDRGVDFFDCVYPSRNGRHGHVYTKHGKLNLFNARFELDDRPIEDGCGCPACQMYSRAYIRHLLKAKEMLGMRLCVLHNLYFYNHLMEEIRDAIDAGRYKEYKEETLRGFETPED

SEQ ID NO: 54797 - protein, 376 aa, Dorea sp.
  REGION 1..376: note = tr|R6XJL2|R6XJL2_9FIRM Queuine tRNA-ribosyltransferase OS=Dorea sp. CAG:317 OX=1262873; GN = tgt PE=3 SV=1
MYELLKQDGLAKRGRLHTVHGVIETPVFMNVGTAAAIKGAVSTDDLRQIKTQVELSNTYHLHVRPGDDVIKKLGGLHKFMAWDKPILTDSGGFQVFSLAGLRKIKEEGVYFNSHIDGKKIFMGPEESMQIQSNLASTIAMAFDECPSSVADRDYMERSVDRTTRWLARCKAEMDRLNSLPDTINKKQMLFGINQGGIYEDIRIRHAQEISKLDLDGYAVGGLAVGESHEEMYRILDAVVPHLPKNKPTYLMGVGTPANILEAVDRGVDFFDCVYPSRNGRHGHVYTNAGKLNLFNAKYELDDRPIEEGCQCPACRTYSRAYIRHLLKAKEMLGMRLCVLHNLYFYNTMMEEIRDAIDQGCYKEYKEAKLAGMAVKK

SEQ ID NO: 54798 - protein, 375 aa, unidentified
  source 1..375: note = Draconibacterium orientale
  REGION 1..375: note = tr|X5DI15|X5DI15_9BACT Queuine tRNA-ribosyltransferase OS=Draconibacterium orientale; OX = 1168034 GN=tgt PE=3 SV=1
MQFELQKTTDNSRARAGVITTDHGTIETPIFMPVGTAGSVKGIHTRDIKEDINAQIILGNTYHLYLRPGIDVIEKAGGLHKFNRWNRPILTDSGGFQVFSLGDIRKLSEEGARFQSHIDGSYHMFTPENVMDIQRTIGADIIMAFDECTPGDADYNYAKRSLQLTQRWLERCFKQFNSTEPKYGYAQTLFPIVQGNTFTDLRKAAVAHVKTFDADGYAIGGLSVGETEQEMYEMTEVCTADLPENKPRYLMGVGTPVNILEGIHRGIDMFDCVMPTRNGRNGMLFTSEGIINIRNKKWENDHSPIDENGTSFVDHYSKAYLRHLIISNEMLGAQIASQHNLAFYLWLVKTARQKIQSGDFVSWKNEMVLKLKERL

SEQ ID NO: 54799 - protein, 375 aa, unidentified
  source 1..375: note = Draconibacterium sediminis
  REGION 1..375: note = tr|A0A0D8J6G3|A0A0D8J6G3_9BACT Queuine tRNA-ribosyltransferase OS=Draconibacterium sediminis; OX = 1544798 GN=tgt PE=3 SV=1
MQFELQKTTDNSRARAGVITTDNGTIETPIFMPVGTAGSVKGIHTRDIKEDINAQIILGNTYHLYLRPGIDVIEKAGGLHKFNRWDRPILTDSGGFQVFSLGDIRKLSEEGARFQSHIDGSYHMFTPENVMDIQRTIGADIIMAFDECTPGDADYNYAKKSLELTQRWLERCFKQFNSTEPKYGYSQTLFPIVQGNTFTDLRKAAVANVKTFDADGYAIGGLSVGETEQEMYEMTEVCTADLPENKPRYLMGVGTPVNILEGIHRGIDMFDCVMPTRNGRNGMLFTSEGIINIRNKKWENDHSPIDENGTSFVDQYSKAYLRHLIISNEMLGAQIASQHNLAFYLWLVKTARQKIQSGDFVSWKNEMVLKLKERL

SEQ ID NO: 54800 - protein, 375 aa, unidentified
  source 1..375: note = Draconibacterium sp.
  REGION 1..375: note = tr|A0A2G6R943|A0A2G6R943_9BACT Queuine tRNA-ribosyltransferase OS=Draconibacterium sp. OX=1965318; GN = tgt PE=3 SV=1
MDFELKTVSEQSRARAGIISTAHGQIETPIFMPVGTGGSVKGIHTRDLKEDIEAQIILGNTYHLYLRPGIKVIEEAGGLHKFNMWNKPILTDSGGYQVFSLGDIRKLSEEGARFQSHIDGSYHLFTPENVIDIQRSIGADIVMAFDECPPGDADYAYAKESLELTKRWLHRCFQRFNTTMPIYGYDQSLFPIIQGGTYADLRKSATENAVGYDADGYAIGGLSVGEPEAVMYEMTEVVTERLPAEKPRYLMGVGTPVNILESIDRGVDMFDCVMPTRNGRNGMLFTSEGTINIRNKKWENDHSPIDAGGTSFADQYSKAYLRHLIISKEMLGAQIASQHNLAFYLWLVKEARKQIIGGTFAAWKKEMVQKLNQRL

SEQ ID NO: 54801 - protein, 378 aa, unidentified
  source 1..378: note = Drancourtella sp.
  REGION 1..378: note = tr|A0A1Y4HBW2|A0A1Y4HBW2_9FIRM Queuine tRNA-ribosyltransferase OS=Drancourtella sp. An210; OX = 1965589 GN=tgt PE=3 SV=1
MYELIKRDGLAKRGRFTTVHGVIETPVFMNVGTAAAIKGAVSTEDLNRIGTQVELSNTYHLHVRPGDEVVKKLGGLHKFMVWDKPILTDSGGFQVFSLAGLRKIKEEGVHFQSHIDGRKIFMGPEESMRIQSNLASTIAMAFDECPASTKDRDYIEKSVARTTRWLRRCKTEMERLNSLPDTINPDQMLFGINQGGILEDVRIAHAQAISELDLPGYAIGGLAVGESHEEMYRILDAVVPHLPLHKPTYLMGVGTPANILEAVERGVDFFDCVYPTRNGRHGHVYTNQGKLNLFNAKYELDDRPIEEGCQCPVCQKYSRAYIRHLLKAKEMLGMRFCVLHNLYFYNTMMEEIRQAIEEGRFKEYKKQKLAGMEQTKNV

SEQ ID NO: 54802 - protein, 378 aa, unidentified
  source 1..378: note = Drancourtella sp.
  REGION 1..378: note = tr|A0A1Y4M844|A0A1Y4M844_9FIRM Queuine tRNA-ribosyltransferase OS=Drancourtella sp. An177; OX = 1965573 GN=tgt PE=3 SV=1
MYELIKRDGLAKRGRFTTVHGVIETPVFMNVGTAAAIKGAVSTEDLNRIGTQVELSNTYHLHVRPGDEVVKKLGGLHKFMVWDKPILTDSGGFQVFSLAGLRKIKEEGVHFQSHIDGRKIFMGPEESMRIQSNLASTIAMAFDECPASTKDRDYIEKSVARTTRWLRRCKTEMERLNSLPDTINPDQMLFGINQGGILEDVRIAHAQAISELDLPGYAIGGLAVGESHEEMYRILDAVVPHLPLHKPTYLMGVGTPANILEAVERGVDFFDCVYPTRNGRHGHVYTNQGKLNLFNAKYELDDRPIEEGCQCPVCQKYSRAYIRHLLKAKEMLGMRFCVLHNLYFYNTMMEEIRQAIEQGRFKEYKKQKLAGMEQTKNV

SEQ ID NO: 54803 - protein, 416 aa, unidentified
  source 1..416: note = Dubosiella newyorkensis
  REGION 1..416: note = tr|A0A1U7NQG1|A0A1U7NQG1_9FIRM Queuine tRNA-ribosyltransferase OS=Dubosiella newyorkensis; OX = 1862672 GN=BO225_00930 PE=3 SV=1
MDRKEDSQRMSQNKFSFDINARIPNQLGRAGTIHTPHGDIKTPAFMCVGTHGHVKFLSMEDLHAIGAQAMLSNGYHLRNISPTIAQEGGLAKWSGWNGPTLTDSGGFQVMSLGSGIGKVVSMEREKEVVNTPKKERLALVQEGGIQFFDPFTQQEDFIGPKESMEIQCRIGADIHMAFDELTSLADTYDYNKEALERTERWAQISLDVHKQHRDDLGYRQSLYGVLQGGRWEDLRRSTAKKMGQMDFDGYGLGGAFLKSSLGDILTWCNEELPEHKPRHLLGLSRPDDILIGVENGADTFDCVAPSREARHGRIYTKHGYYSLARQACQDCHEPLEVGCDCPTCQQGYTQSQLRQMMKSEDPKVREQYFRLSTIHNLRFTIRMMEEVRQAILDGTFQEYKEQFLKDYYGTKKEAIL

SEQ ID NO: 54804 - protein, 274 aa, unidentified
  source 1..274: note = Duganella phyllosphaerae
  REGION 1..274: note = tr|A0A1E7WJX0|A0A1E7WJX0_9BURK Queuine tRNA-ribosyltransferase OS=Duganella phyllosphaerae; OX = 762836 GN=tgt PE=3 SV=1
MRKITEEGVHFNSPINGDKLFLSPEVSMQIQRVLNSDIVMQFDECTPYEIDNRPATIEEAAKSMRMSLRWAQRSNDEFHRGENPNALFGIVQGGMFEHLRDESLAGLEAIDFPGLAIGGLSVGEPKEDMMRILKHVGPKLPANKPHYLMGVGTPEDLVAGVSHGVDMFDCVMPTRNARNGWLFTRFGDIKIKNARYKEDKEPLDSTCSCYACRNFSRAYLHHLNRTQEILGARLNTIHNLHYYLDIMRQMREALDEDRFHAWTLQFHADRARGV

SEQ ID NO: 54805 - protein, 379 aa, unidentified
  source 1..379: note = Duganella sacchari
  REGION 1..379: note = tr|A0A1M7PZW8|A0A1M7PZW8_9BURK Queuine tRNA-ribosyltransferase OS=Duganella sacchari OX=551987; GN = tgt PE=3 SV=1
MLEFKLHKTDTTGVTKARRGEVKLNHGVVQTPIFMPVGTYGSVKAMSPLELKEINAQIILGNTFHLWLRPGNDVMAKFGGLHDFMGWDKPILTDSGGFQVFSLGAMRKITEEGVHFNSPINGDKLFLSPEISMQIQRVLNSDIVMQFDECTPYEINNRPATLDEAAKSMRMSLRWAQRSHDEFHRGENPNALFGIVQGGMFEKLRDESLAGLEEIDFPGLAIGGLSVGEPKEDMMRILQHVGPKLPANKPHYLMGVGTPEDLVAGVSHGVDMFDCVMPTRNARNGWIFTRFGDVKIKNARYKDDKEPFDSTCSCYACKNFSRAYLHHLNRTQEILGARLNTIHNLHYYLDIMQQMRDALDADRFPAWVQQFHADRARGV

SEQ ID NO: 54806 - protein, 379 aa, Duganella sp.
  REGION 1..379: note = tr|A0A3E1S6N8|A0A3E1S6N8_9BURK Queuine tRNA-ribosyltransferase OS=Duganella sp. BJB480 OX=1871181; GN = tgt PE=3 SV=1
MLEFKLHKTDSSGLTKARRGEVKLNHGVVQTPIFMPVGTYGSVKAMSPLELKEIGAQIILGNTFHLWLRPGNDVMAKFGGLHDFMGWDKPILTDSGGFQVFSLGAMRKITEEGVHFNSPINGDKLFLSPEVSMQIQRVLNSDIVMQFDECTPYEIDNRPATLDEAAKSMRMSLRWAQRSMDEFNRGENPNALFGIVQGGMFENLRDESLAKLEEIDFPGLAIGGLSVGEPKEDMMRILAHVGPKMPANKPHYLMGVGTPEDLVNGVSNGVDMFDCVMPTRNARNGWIFTRFGDVKIKNARYKEDKEPLDSSCSCYACRNFSRAYLHHLNRTQEILGARLNTIHNLHYYLDIMRQMREALDEDRFHAWTLQFHADRARGV

SEQ ID NO: 54807 - protein, 379 aa, Duganella sp.
  REGION 1..379: note = tr|A0A0Q7W903|A0A0Q7W903_9BURK Queuine tRNA-ribosyltransferase OS=Duganella sp. Root1480D1; OX = 1736471 GN=tgt PE=3 SV=1
MLEFKLIKKDTTGKTHARRGTVKLNHGEVQTPIFMPVGTYGSVKAMSPLELKEIGAQIILGNTFHLWLRPGNDVMSKFGGLHGFMGWDKPILTDSGGFQVFSLGEMRKITEEGVTFNSPINGDKLFLSPEISMQIQRVLNSDIVMQFDECTPYEIDGRPATLEEAAKSMRMSLRWAQRSMNEFKAGENPNALFGIVQGGMYENLRDESLAGLQEIDFPGLAIGGLSVGEPKEDMMRILQHVGPRLPENKPHYLMGVGTPEDLVNGVANGVDMFDCVMPTRNARNGWIFTRFGDVKIKNARYKDDKEPLDPTCSCYTCRNFSRAYLHHLHRAQEILGARLNTIHNLHYYLDIMQQMRDALDADRFPDWVQQFHADRARGI

SEQ ID NO: 54808 - protein, 376 aa, unidentified
  source 1..376: note = Duncaniella muris
  REGION 1..376: note = tr|A0A2V1IL03|A0A2V1IL03_9BACT Queuine tRNA-ribosyltransferase OS=Duncaniella muris OX=2094150; GN = tgt PE=3 SV=1
MDFKLEATAPGTAARAGLITTDHGEIRTPIFMPVGTVGSVKAVHQRELREDVKAQIILGNTYHLYLRPGIEILEKAGGLHKFNGWDRPILTDSGGFQVFSLSANRKLTEEGAWFRSHIDGSKHLFTPEKVVDIERSIGADIMMALDECPPGTAERSYARKSLDLTHRWLARGWKRYKETEGKYGYSQAYFPIVQGVTYPDLRRESAKFVADLGADGNAIGGLAVGEPAEVMYEMIEVVNDILPADRPRYLMGVGTPANILEAIDRGVDMMDCVMPTRNGRNGMLFTRHGIMNMRNRKWADDFSPLQEDGPSYVDTAYTKAYVRHLFIADEILAMQIASIHNLAFYLWLVEEARRHIMAGDFSSWKREMLECVTRRL

SEQ ID NO: 54809 - protein, 376 aa, unidentified; identical to SEQ ID NO: 54808
  source 1..376: note = Duncaniella sp.
  REGION 1..376: note = tr|A0A4P7VUL1|A0A4P7VUL1_9BACT Queuine tRNA-ribosyltransferase OS=Duncaniella sp. C9 OX=2530392; GN = tgt PE=3 SV=1

SEQ ID NO: 54810 - protein, 376 aa, unidentified
  source 1..376: note = Duncaniella sp.
  REGION 1..376: note = tr|A0A4Z0V5E8|A0A4Z0V5E8_9BACT Queuine tRNA-ribosyltransferase OS=Duncaniella sp. TLL-A3; OX = 2530391 GN=tgt PE=3 SV=1
MDFVLQSTASGSNARAGLITTDHGVIETPIFMPVGTLGSVKSVHQHELRDDIKAQIILGNTYHLYLRPGIDILEKAGGLHKFNGWERPILTDSGGFQVFSLAANRKLTEEGAWFRSHIDGSKHLFTPESVVDIERSIGADIMMALDECPPGTADIDYARKSLRLTQRWLERGWKRYKETEGRYGYRQAYFPIVQGVVYPELRRDAAKHVADLGADGNAIGGLAVGEPTEVMYDMIEVVNEILPADKPRYLMGVGTPANILEAIDRGVDMMDCVMPTRNGRNGMLFTAHGIMNMRNRKWADDFSPIQEDGPSYVDRTYTKAYLRHLFISDEILAMQIASIHNLAFYLWLVGEARRHIIAGDFKVWKTEMVERVTRRL

SEQ ID NO: 54811 - protein, 377 aa, Dyadobacter fermentans
  REGION 1..377: note = tr|C6VS49|C6VS49_DYAFD Queuine tRNA-ribosyltransferase OS=Dyadobacter fermentans (strain ATCC 700827 / DSM 18053 / NS114) OX=471854 GN=tgt PE=3 SV=1
MKFTLQVEDPHSKARAGLIETDHGVIQTPIFMPVGTAGTVKAVHQRELKEDVKAQIILGNTYHLYLRPGLDLMEKAGGLHAFNGWDRPILTDSGGYQVYSLAGTGRKINEEGVVFKSHIDGGVHTFTPENVMDIQRTIGADIIMAFDECTPYPCEFTYARKSMEMTHRWLTRCCDRFDSTEPRYGHSQTLFPIVQGSVYKDLRKQSAEFIASAGREGNAIGGLSVGEPAEIMYELTEVVCDILPRNKPRYLMGVGTPANILECIALGVDMFDCVMPTRNARNGMIFTTEGIINIRNEKWKDDLSPIDAGLGGHVSTFYSKAYLRHLVKSGEMLGAQIASIHNLTFYLWLVNSAREKIIDGSFASWKREIEKKLNQRL

SEQ ID NO: 54812 - protein, 377 aa, unidentified
  source 1..377: note = Dyadobacter jejuensis
  REGION 1..377: note = tr|A0A316AJV2|A0A316AJV2_9BACT Queuine tRNA-ribosyltransferase OS=Dyadobacter jejuensis; OX = 1082580 GN=tgt PE=3 SV=1
MKFTLEAQDKASKARAGSVETDHGTIETPIFMPVGTAGTVKAVHQRELKEDIKAQIILGNTYHLYLRPELPVIQKAGGLHRFNGWDKPILTDSGGYQVYSLAGTGRKINEEGVVFKSHIDGSIHTFTPEGVMDIQRSIGADIIMAFDECTPYPCEFTYARKSMEMTHRWLKRCCQRFDSTSPHYDYQQTLFPIVQGSVYKDLRVQSAEFIAAQDREGNAIGGLSVGEPAEIMYELTEVVCDILPSDKPRYLMGVGTPANILECIALGVDMFDCVMPTRNARNGMIFTTEGIINIKNEKWKDDLSPLDPSLGGYVSGNYSKAYLRHLIKSGEMLGAQIASIQNLTFYLWLVNTAREKIKSGEFLPWKNQMTNKLMQRL

SEQ ID NO: 54813 - protein, 377 aa, unidentified
  source 1..377: note = Dyadobacter jiangsuensis
  REGION 1..377: note = tr|A0A2P8G5A8|A0A2P8G5A8_9BACT Queuine tRNA-ribosyltransferase OS=Dyadobacter jiangsuensis; OX = 1591085 GN=tgt PE=3 SV=1
MKFTLQVEDPHSKARAGLVETDHGVIQTPIFMPVGTAGTVKAVHQRELKEDVKAQIILGNTYHLYLRPGLDILEKAGGLHAFNGWDKPILTDSGGYQVYSLAGTGRKINEEGVVFKSHIDGGVHTFTPENVMDIQRTIGADIIMAFDECTPYPCDFGYARKSMEMTHRWLTRCCNRFDSTEPRYGHSQTLFPIVQGSVYKDLRKQSAEFIASAGREGNAIGGLSVGEPAEIMYELTEVVCDILPKDKPRYLMGVGTPANILECISLGVDMFDCVMPTRNARNGMIFTTEGIINIRNEKWKDDLSPINPGLGGHVSTFYSKAYLRHLVKSGEMLGAQIASIHNLTFYLWLVNSAREKIIDGTFASWKREMEKKLNQRL

SEQ ID NO: 54814 - protein, 377 aa, Dyadobacter koreensis
  REGION 1..377: note = tr|A0A1H6WQV7|A0A1H6WQV7_9BACT Queuine tRNA-ribosyltransferase OS=Dyadobacter koreensis OX=408657; GN = tgt PE=3 SV=1
MKFTLQTQDPQSKARAGVVETDHGTIQTPIFMPVGTAGTVKAVHQRELKEDIKAQIILGNTYHLYLRPGLDILQKAGGLHKFNGWDRPILTDSGGYQVYSLAGTGRKINEQGVVFKSHIDGGIHTFTPEGVMDIQRTIGADIIMAFDECTPYPCDFTYARNSMEMTHRWLGRCCTRFDETQPLYGHSQTLFPIVQGSVYKDLRKQSAEVIASYEREGNAIGGLSVGEPAEIMYELTEVVCDILPKDKPRYLMGVGTPANILECIALGVDMFDCVMPTRNARNGMIFTTEGIINIKNEKWKDDLSAIDKNLGGYVSTFYSKAYLRHLVKSEEMLGAQIASVHNLTFYLWLVNTAREKIIEGTFTIWKKEIEKKLMQRL

SEQ ID NO: 54815 - protein, 377 aa, Dyadobacter psychrophilus
  REGION 1..377: note = tr|A0A1T5HBG2|A0A1T5HBG2_9BACT Queuine tRNA-ribosyltransferase OS=Dyadobacter psychrophilus; OX = 651661 GN=tgt PE=3 SV=1
MKFTLQVEDPASKARAGFIETSHGTIQTPIFMPVGTAGTVKAVHQRELKEDIRAQIILGNTYHLYLRPGLDILQKAGGLHGFNGWDRPILTDSGGYQVYSLAGTGRKINEEGVVFKSHIDGGVHTFTPEYVMDIQRIIGADIIMAFDECTPYPCDFTYARKSMEMTHRWLGRCCARFDSTTDLYGHSQTLFPIVQGSVYKDLRVQSAETIASYGREGNAIGGLSVGEPAEIMYELTEVVCDILPRDKPRYLMGVGTPANILECIALGVDMFDCVMPTRNARNGMIFTTEGVINIRNEKWKDDLSPIDAGLGGYVSTFYSKAYLRHLVKSDEMLGAQIASVHNLTFYLWLVNSAREKIIAGEFVPWKKEMEKKLNQRL

SEQ ID NO: 54816 - protein, 377 aa, Dyadobacter soli
  REGION 1..377: note = tr|A0A1G7ZG02|A0A1G7ZG02_9BACT Queuine tRNA-ribosyltransferase OS=Dyadobacter soli OX=659014; GN = tgt PE=3 SV=1
MKFTLQVEDPHSKARAGLVETDHGVIQTPIFMPVGTAGTVKAVHQRELKEDVKAQIILGNTYHLYLRPGLDILEKAGGLHKFNGWDKPILTDSGGYQVYSLAGTGRKINEEGVVFKSHIDGGVHTFTPENVMDIQRTIGADIIMAFDECTPYPCDFTYARKSMEMTHRWLTRCCNRFDSTEPRYGHSQTLFPIVQGSVYKDLRKQSAEFIASAGREGNAIGGLSVGEPAEIMYELTEVVCDILPKDKPRYLMGVGTPANILECISLGVDMFDCVMPTRNARNGMIFTTEGIINIRNEKWKDDLSPIDSGLGGHISTFYSKAYLRHLVKSGEMLGAQIASIHNLTFYLWLVNSAREKIIDGTFASWKREVEKKLNQRL

SEQ ID NO: 54817 - protein, 377 aa, Dyadobacter sp.
  REGION 1..377: note = tr|A0A1H6Z4E2|A0A1H6Z4E2_9BACT Queuine tRNA-ribosyltransferase OS=Dyadobacter sp. SG02 OX=1855291; GN = tgt PE=3 SV=1
MKFTLQVEDPHSKARAGLVETDHGVIQTPIFMPVGTAGTVKAVHQRELKEDVKAQIILGNTYHLYLRPGLDILEKAGGLHAFNGWDRPILTDSGGYQVYSLAGTGRKINEEGVVFKSHIDGGVHTFTPENVMDIQRTIGADIIMAFDECTPYPCDFTYARKSMEMTHRWLTRCCRRFDETEPLYGHSQTLFPIVQGSVYKDLRKQSAEFIASAGREGNAIGGLSVGEPAEIMYELTEVVCDILPKDKPRYLMGVGTPANILECISLGVDMFDCVMPTRNARNGMIFTTEGIINIRNEKWKDDLSPIDAGLGGHVSTFYSKAYLRHLVKSGEMLGAQIASIHNLTFYLWLVNSAREKIIDGTFASWKREMEKKLNQRL

SEQ ID NO: 54818 - protein, 377 aa, Dyadobacter sp.
  REGION 1..377: note = tr|A0A5B0FFS3|A0A5B0FFS3_9BACT Queuine tRNA-ribosyltransferase OS=Dyadobacter sp. UC 10; OX = 2605428 GN=tgt PE=3 SV=1
MKFTLEAKDPGSKARAGYIETDHGMIETPIFMPVGTAGTVKAVHQRELHDDVKAQIILGNTYHLYLRPGLDIISRAGGLHAFNGWDKPILTDSGGYQVYSLAGTGRKINEAGVVFKSHIDGGVHTFTPENVMDIQRTIGADIVMAFDECTPYPCEFSYARQSMEMTHRWLKRCCERFDSTVPLYGHNQTLFPIVQGSVYKDLRKQSAEFIASCQREGNAIGGLSVGEPAEIMYELTEVVCDILPADKPRYLMGVGTPANILECIALGVDMFDCVMPTRNARNGMIFTTEGVVNIRNEKWKDDFSPIDAGLGGYVSTFHSKAYLRHLVKSDEMLGAQIASVHNLTFYLWLVRSARERIKEGNFVSWKKEIEKKINQRL

SEQ ID NO: 54819 - protein, 375 aa, Dyella japonica
  REGION 1..375: note = tr|A0A075K596|A0A075K596_9GAMM Queuine tRNA-ribosyltransferase OS=Dyella japonica A8 OX=1217721; GN = tgt PE=3 SV=1
MTSLTFELQATDGAARRGRLTFDRGTVETPAFMPVGTYGSVKAMTPRDVRDIGAEIILGNTFHLFLRPGLEVVEQFGGLHKFIGWDKPILTDSGGFQVFSLAHKRKITEEGVAFASPVDGSKVFLSPEESMRIQKVLDSDIAMIFDECTPYPATEKVASTSMELSLRWAERSRRAFDDLKNPNALFGIVQGSVYENLRRRSAEGLVNIGFDGYAVGGLAVGEPEAERNHTLDFTVPLLPADKPRYLMGVGRPEDIVEAVRRGIDMFDCVMPTRNARNGFLFTDQGTLRIRNAKYALDTRVIEEGCDCYACSNGFSRAYLRHLDRCNEILGSQLATMHNLRHYQRLMAGLRGAIAAGQLDDFVAEFYARRAGGVAA

SEQ ID NO: 54820 - protein, 375 aa, Dyella japonica
  REGION 1..375: note = tr|A0A0G9H889|A0A0G9H889_9GAMM Queuine tRNA-ribosyltransferase OS=Dyella japonica DSM 16301; OX = 1440762 GN=tgt PE=3 SV=1
MTSLTFELQATDGAARRGRLTFDRGTVETPAFMPVGTYGSVKAMTPRDVREIGAEIILGNTFHLYLRPGLEVVEQFGGLHKFIGWDKPILTDSGGFQVFSLAHKRKITEEGVAFASPVDGSKVFLSPEESMRIQTVLDSDIAMIFDECTPYPATEKVASTSMELSLRWAERSRRAFDDLNNPNALFGIVQGSVYENLRRRSAEGLVNIGFDGYAVGGLAVGEPEAERNHALDFTVPMLPADKPRYLMGVGRPEDIVEAVRRGIDMFDCVMPTRNARNGFLFTAEGTLRIRNAKFALDTRVIEEGCDCYACSNGFSRAYLRHLDRCNEILGSQLATMHNLRHYQRLMAGLRDAIAAGKLEDFVAEFYARRAGGVVA

SEQ ID NO: 54821 - protein, 375 aa, unidentified
  source 1..375: note = Dyella jiangningensis
  REGION 1..375: note = tr|A0A328P3F0|A0A328P3F0_9GAMM Queuine tRNA-ribosyltransferase OS=Dyella jiangningensis; OX = 1379159 GN=tgt PE=3 SV=1
MTSLTFELQATDGAARRGRLMFDRGTVETPAFMPVGTYGSVKAMTPRDIREIGAEIILGNTFHLFLRPGLEVVEQFGGLHKFIGWDKPILTDSGGFQVFSLAHKRKITEEGVAFASPVDGSKVFLSPEESMRIQKVLDSDIAMIFDECTPYPATEKVASTSMELSLRWAERSRRAFDDLKNPNALFGIVQGSVYENLRRRSAEGLVNIGFDGYAVGGLAVGEPEAERNHTLDFTVPLLPADKPRYLMGVGRPEDIVEAVRRGIDMFDCVMPTRNARNGFLFTAEGTLRIRNAKFALDTRVIEEGCDCYACSNGFSRAYLRHLDRCNEILGSQLATMHNLRHYQRLMAGLREAIAAGKLDDFVAEFYARRQGGLAA

SEQ ID NO: 54822 - protein, 375 aa, unidentified
  source 1..375: note = Dyella jiangningensis
  REGION 1..375: note = tr|A0A023NN76|A0A023NN76_9GAMM Queuine tRNA-ribosyltransferase OS=Dyella jiangningensis; OX = 1379159 GN=tgt PE=3 SV=1
MTSLTFELQATDGAARRGRLTFDRGTVETPAFMPVGTYGSVKAMTPRDIREIGAEIILGNTFHLFLRPGLEVVEQFGGLHKFIGWDKPILTDSGGFQVFSLAHKRKITEEGVAFASPVDGSKVFLSPEESMRIQKVLDSDIAMIFDECTPYPATEKVASTSMELSLRWAERSRRAFDDLKNPNALFGIVQGSVYENLRRRSAEGLVNIGFDGYAVGGLAVGEPEAERNHTLDFTVPLLPADKPRYLMGVGRPEDIVEAVRRGIDMFDCVMPTRNARNGFLFTAEGTLRIRNAKYALDTRVIEEGCDCYACSNGFSRAYLRHLDRCNEILGSQLATMHNLRHYQRLMAGLREAIAAGKLDDFVAEFYARRQGGVAA

SEQ ID NO: 54823 - protein, 413 aa, Dyella marensis
  REGION 1..413: note = tr|A0A1I2IAD6|A0A1I2IAD6_9GAMM Queuine tRNA-ribosyltransferase OS=Dyella marensis OX=500610; GN = tgt PE=3 SV=1
MRVRAEWGAPLRPYPHPPAGTFSRREKDFQLGGKPQTGDNLPMTSLRFDISATDGAARRGRLSFDRGTVETPAFMPVGTYGSVKAMTPRDIVEIGAEIILGNTFHLYLRPGLEIVEQFGGLHRFIGWDKPILTDSGGFQVFSLAHKRKITEEGVTFASPVDGSKVFLSPEESMRIQKTLDSDVVMIFDECTPYPATEKVAATSMELSLRWAERSRRAFDELHNPNSLFGIVQGSVYENLRRRSAEGLVGIGFDGYAVGGLAVGEPEAERNHTLDFTVPLLPADKPRYLMGVGRPEDIVEAVRRGIDMFDCVMPTRNARNGFLFTAEGTLRIRNAKFAMDTRVIEEGCDCYACAGGFSRAYLRHLDRCNEILASQLATMHNLRHYQRLMAGLREAIAAGKLEEFVAEFYARRMD

SEQ ID NO: 54824 - protein, 375 aa, Dyella soli
  REGION 1..375: note = tr|A0A4R0YW89|A0A4R0YW89_9GAMM Queuine tRNA-ribosyltransferase OS=Dyella soli OX=522319 GN=tgt; PE = 3 SV=1
MTSMTFELQATDGAARRGRLTFGRGTVETPAFMPVGTYGSVKAMTPRDIREVGAEIILGNTFHLFLRPGLEVVEQFGGLHKFIGWDKPILTDSGGFQVFSLAHKRKITEEGVAFASPVDGSKVFLSPEESMRIQKVLDSDIAMIFDECTPYPATEKVASTSMELSLRWAERSRRAFDDLKNPNALFGIVQGSVYENLRRRSAEGLVNIGFDGYAVGGLAVGEPEAERNHTLDFTVPLLPADKPRYLMGVGRPEDIVEAVRRGIDMFDCVMPTRNARNGFLFTDEGTLRIRNAKFALDTRVIEEGCDCYACSNGFSRAYLRHLDRCNEILGSQLATMHNLRHYQRLMAGLRQAIAAGQLDDFVAAFYARRQAGVAA

SEQ ID NO: 54825 - protein, 373 aa, Dyella soli
  REGION 1..373: note = tr|A0A4V2NM88|A0A4V2NM88_9GAMM Queuine tRNA-ribosyltransferase OS=Dyella soli OX=522319 GN=tgt; PE = 3 SV=1
MTSLQFDISATDGAARRGRLTFARGTVETPAFMPVGTYGSVKAMTPRDITDIGAEIILGNTFHLFLRPGLEIVEQFGGLHKFIGWDKPILTDSGGFQVFSLAHKRKITEEGVTFASPVDGSKVFLSPEESMRIQKTLDSDVVMIFDECTPYPATEKVASTSMELSLRWAERSRRAFDDLKNPNSLFGIVQGSVYENLRRRSAEGLVGIGFDGYAVGGLAVGEPEAERNHTLDFTVPLLPQDKPRYLMGVGRPEDIVEAVRRGIDMFDCVMPTRNARNGFLFTDQGTLRIRNAKFAMDTRVIEEGCDCYACSNGFSRAYLRHLDRCNEILGSQLATMHNLRHYQRLMAGLRGAIADGKLDDFVAEFYARRQAGT

SEQ ID NO: 54826 - protein, 384 aa, Dyella sp.
  REGION 1..384: note = tr|A0A370XAP2|A0A370XAP2_9GAMM Queuine tRNA-ribosyltransferase OS=Dyella sp. 4MSK11 OX=1927960; GN = tgt PE=3 SV=1
MTAMHFDLLATDGPARRGRLTFERGTVETPAFMPVGTYGSVKAMTPRDLVEVDAEIILGNTFHLFLRPGLDIVGEFGGLHKFIGWKAPILTDSGGFQVFSLAHKRKITEQGVTFASPVDGSKVFLSPEESMRIQTVLDSDIAMIFDECTPYPATEKVASESMELSLRWAERSRRAFDDLKNPNALFGIVQGSVYENLRRRSAEGLVQIGFDGYAVGGLAVGEPEAERNHALDFTVPLLPQDRPRYLMGVGRPEDIVEAVRRGIDMFDCVMPTRNARNGFLFTSEGTLRIRNAKFANDTRVIEEGCDCYACSQGFSRAYLRHLDRCNEILGSQLATIHNLRHYQRLMAGLRDAIAAGSLGDFVTEFYARRQGGEYSLSPSGRGLG

SEQ ID NO: 54827 - protein, 376 aa, Dyella sp.
  REGION 1..376: note = tr|A0A1G7PZR6|A0A1G7PZR6_9GAMM Queuine tRNA-ribosyltransferase OS=Dyella sp. 333MFSha OX=1798240; GN = tgt PE=3 SV=1
MTQLPFELLATDGAARRGRLRFGRGTVETPAFMPVGTYGSVKAMTPRDVLDTGAEIILGNTFHLFLRPGLEIVGEFGGLHKFIGWNKPILTDSGGFQVFSLAHKRKITEEGVTFASPVDGSKVFLSPEESMRIQKVLDSDVAMIFDECTPYPATEKVASDSMELSLRWAERSRQSFDHLKNPNALFGIVQGSTYEKLRHRSAERLVEIGFDGYAVGGLAVGEPEAERNHTLDLTLPMLPKDRPRYLMGVGRPEDIVEAVRRGIDMFDCVMPTRNARNGFLFTYEGTLRIRNAKFATDTRVIEEGCDCYACANGFSRAYLRHLDRCNEILASQLATMHNLRHYQRLMAGLRGAIETGTLDDFVTAFYAARQKAVVDG

SEQ ID NO: 54828 - protein, 377 aa, Dyella thiooxydans
  REGION 1..377: note = tr|A0A161JXB8|A0A161JXB8_9GAMM Queuine tRNA-ribosyltransferase OS=Dyella thiooxydans OX=445710; GN = tgt PE=3 SV=1
MRRMTSLTFDLKATDGAARRGQLTFARGTVQTPAFMPVGTYGSVKAMTPRDIVDVGAEIILGNTFHLFLRPGLEIVEKFGGLHKFIGWNKPILTDSGGFQVFSLAHKRKLAEEGVTFASPVDGSKVFLSPEVSMKIQTVLDSDIAMIFDECTPYPATEKVASDSMELSLRWAERSRRAFDELKNPNNLFGIVQGSVYEPLRRRSAEGLVNIGFDGYAVGGLAVGEPEAERNHTLDFTVSLLPADKPRYLMGVGRPEDIVEAVRRGIDMFDCVMPTRNARNGFLFVPEGTLRIRNARFADDTRVIEEGCDCYACANGFSRAYLRHLDRCNEILASQLATMHNLRHYQRLMAGLRGAIEAGTLDDFTARFYALRQGAKA

SEQ ID NO: 54829 - protein, 376 aa, unidentified
  source 1..376: note = Dysgonamonadaceae bacterium
  REGION 1..376: note = tr|A0A2N4S8D2|A0A2N4S8D2_9BACT Queuine tRNA-ribosyltransferase OS=Dysgonamonadaceae bacterium; OX = 2065189 GN=tgt PE=3 SV=1
MDFQLIHTDAKSSARAGIITTDHGLIETPIFMPVGTVGSVKAVHISELKNDIGAQIILGNTYHLYLRPGVEILRQGGGLHKFNSWDRPILTDSGGYQVFSLSDNRKLNPEGAEFRSHIDGSKHFFTPEKVVDIQRIIGADIMMAFDECTPGNADYNYAKSSLELTEQWLDRCLKRFAETECPYGHRQTLFPIVQGCIYPDLRKRAAENVASKEADGNAIGGLAVGEPTEKMYEMVELVNEILPKDKPRYLMGVGTPANILEAIERGVDMFDCIMPTRNGRNGQIFTKNGIMNMRNEKWKDDFSPIEEDGASFVDSLYSKAYLRHLINVNEILGLQIASIHNLAFYIWLVKEARKHIIADDFPLWKSKMIENVTRRL

SEQ ID NO: 54830 - protein, 376 aa, unidentified
  source 1..376: note = Dysgonomonas alginatilytica
  REGION 1..376: note = tr|A0A2V3PMB6|A0A2V3PMB6_9BACT Queuine tRNA-ribosyltransferase OS=Dysgonomonas alginatilytica; OX = 1605892 GN=tgt PE=3 SV=1
MKFELQHTDVQSKARAGLITTDHGQIETPIFMPVGTQGAVKAVHMPELENDIKAQIILGNTYHLYLRPGLEILEQAGGLHKFNSWNKPILTDSGGFQVFSLAHNRKLTEEGAIFRSHIDGSKHMFTPERVMDIERTIGADIMMAFDECTPGDAEYSYAKKSLDLTERWLDRCITRFNETECTYGYKQALFPIVQGCVYPDLRRRAAENVASKGAEGNAIGGLAVGEPTEKMYEMIEIVNEILPQDKPRYLMGVGTPVNLLEAIERGVDMFDCIMPTRNGRNGQIFTRHGIMNMKNKRWANDFSPIDPEGASFVDTLYSKAYLRHLFIVNEILALQIASIHNLAFYLWLVKEARKHIIAGDFTSWKASIIEDVTRRL

SEQ ID NO: 54831 - protein, 376 aa, Dysgonomonas capnocytophagoides
  REGION 1..376: note = tr|A0A4Y8LB22|A0A4Y8LB22_9BACT Queuine tRNA-ribosyltransferase OS=Dysgonomonas capnocytophagoides; OX = 45254 GN=tgt PE=3 SV=1
MKFELQYNDSQSNARAGLITTDHGQIETPIFMPVGTQGAVKAVHMPELVNDIQAQIILGNTYHLYLRPGLDILKQAGGLHKFNSWDKPILTDSGGFQVFSLAHNRKLTEDGAIFRSHIDGSKHIFSPERVMDIERTIGADIMMAFDECTPGDAEYSYAKKSLDLTERWLDRCIARFNETECEYGYKQALFPIVQGCVYPDLRKRAAENVASKGAQGNAIGGLAVGEPTEKMYEMIEVVNEILPKDKPRYLMGVGTPANILEAIERGVDMFDCIMPTRNGRNGQLFTKYGILNMRNKKWATDFSPIDPEGTSFVDTLYSKAYLRHLFIVNEILALQIASIHNLAFYLWLVKEARKHIIAGDYYLWKRSIIDDVTRRL

SEQ ID NO: 54832 - protein, 391 aa, Dysgonomonas gadei
  REGION 1..391: note = tr|F5ISV7|F5ISV7_9BACT Queuine tRNA-ribosyltransferase OS=Dysgonomonas gadei ATCC BAA-286; OX = 742766 GN=tgt PE=3 SV=1
MLNNQRPLKSDQNGIMDFKLQYTDGQTKARAGLITTDHGQIETPIFMPVGTQGAVKAVHMTELKNDIEAQIILGNTYHLYLRPGLEILKQAGGLHKFNSWDKPILTDSGGFQVFSLAENRKLTEEGAIFRSHIDGSKHFFTPESVMDIQRVIGADIIMAFDECTPGDADYAYAKKSLDLTERWLDRCFTRFNGTECEYGYKQALFPIVQGCVYPDLRRRAAENVASKGADGNAIGGLAVGEPTEKMYEMIEVVNEILPAGKPRYLMGVGTPANILEAIERGVDMFDCIMPTRNGRNGQLFTRNGIMNMRNKKWANDFSPIEENGASFVDTLYTKAYLRHLFITNEILGLQIASIHNLAFYLQLVKDAREHIIAGDFSGWKREMVENVSRRI

SEQ ID NO: 54833 - protein, 376 aa, unidentified
  source 1..376: note = Dysgonomonas macrotermitis
  REGION 1..376: note = tr|A0A1M5E4I2|A0A1M5E4I2_9BACT Queuine tRNA-ribosyltransferase OS=Dysgonomonas macrotermitis; OX = 1346286 GN=tgt PE=3 SV=1
MKFELQYNDSQSNARAGLITTDHGQIETPIFMPVGTQGAVKAVHMPELEKDIQAQIILGNTYHLYLRPGLDILRQAGGLHKFNSWNKPILTDSGGFQVFSLAHNRKLTEEGAIFRSHVDGSKHIFTPENVMDIERTIGADIMMAFDECTPGDAEYSYAKKSLDLTERWLDRCITRFNETECEYGYKQALFPIVQGCVYPDLRKRAAENIASKEAEGNAIGGLAVGEPTEKMYEMIEVVNEILPKDKPRYLMGVGTPANILEAIERGVDMFDCIMPTRNGRNGQLFTRRGILNMRNKKWANDFNPIDAEGTSFVDTLYSKAYLRHLFIVNEILALQIASIHNLAFYLWLVKEARKHIIAGDYSNWKRSIIDDVTRRL

SEQ ID NO: 54834 - protein, 376 aa, Dysgonomonas mossii
  REGION 1..376: note = tr|F8X373|F8X373_9BACT Queuine tRNA-ribosyltransferase OS=Dysgonomonas mossii DSM 22836; OX = 742767 GN=tgt PE=3 SV=1
MDFELQYTDDQSSARAGLITTDHGQIETPIFMPVGTQGAVKAVHMTELENDIQAQIILGNTYHLYLRPGLDILKQAGGLHRFNSWNKPILTDSGGFQVFSLAHNRKLTEEGAIFRSHIDGSKHIFTPEYVMDIERTIGADIMMAFDECTPGDADYTYAKKSLDLTERWLDRCIKRFNETECEYGYKQALFPIVQGCVYPDLRRRAAENVASKGADGNAIGGLAVGEPTEKMYEMIEVVNEILPKDKPRYLMGVGTPANILEAIERGVDMFDCIMPTRNGRNGQLFTRNGIMNMRNQKWAKDFSAIEENGASFVDTLYTKAYLRHLFITNEILALQIASIHNLAFYLWLVKEARQHIIAGDFLSWKRMMIENVSRRL

SEQ ID NO: 54835 - protein, 376 aa, Dysgonomonas mossii
  REGION 1..376: note = tr|A0A4Y9IKA9|A0A4Y9IKA9_9BACT Queuine tRNA-ribosyltransferase OS=Dysgonomonas mossii OX=163665; GN = tgt PE=3 SV=1
MDFELQYTDDQSSARAGLITTDHGQIETPIFMPVGTQGAVKAVHMTELENDIQAQIILGNTYHLYLRPGLDILQQAGGLHKFNSWNKPILTDSGGFQVFSLAHNRKLTEEGAIFRSHIDGSKHVFTPEYVMDIERTIGADIMMAFDECTPGDADYTYAKKSLDLTERWLDRCIKRFNETECEYGYKQALFPIVQGCVYPDLRRRAAENVASKGADGNAIGGLAVGEPTEKMYEMIEVVNEILPKDKPRYLMGVGTPANILEAIERGVDMFDCIMPTRNGRNGQLFTRNGIMNMRNQKWAKDFSAIEENGASFVDTLYTKAYLRHLFITNEILALQIASIHNLAFYLWLVKEARQHIIAGDFLSWKRMMIENVSRRL

SEQ ID NO: 54836 - protein, 376 aa, Dysgonomonas sp.
  REGION 1..376: note = tr|A0A3D3TEU6|A0A3D3TEU6_9BACT Queuine tRNA-ribosyltransferase OS=Dysgonomonas sp. OX=1891233; GN = tgt PE=3 SV=1
MKFELQHTDVQSNARAGLITTDHGQIETPIFMPVGTQGSVKAVHMTELENDIQAQIILGNTYHLYLRPGLEILEQAGGLHKFNSWNKPILTDSGGFQVFSLADNRKLTEEGAIFRSHVDGSKHFFTPESVMDIERTIGADIMMAFDECTPGDADYTYAKKSLDLTERWLDRCIARFNETECKYGYKQALFPIVQGCVYTDLRKRAAENVASKEAEGNAIGGLAVGEPTEKMYEMIEVVNEILPQDKPRYLMGVGTPANILEAVERGVDMFDCIMPTRNGRNGQLFTWNGILNMRNKKWANDFSPIDEQGTSYVDTLYSKAYLRHLFIVNEILALQIASIHNLAFYLQLVKEARRHIIQGDFTIWKKSVIEDISRRI

SEQ ID NO: 54837 - protein, 376 aa, Dysgonomonas sp.
  REGION 1..376: note = tr|A0A1M3KVQ6|A0A1M3KVQ6_9BACT Queuine tRNA-ribosyltransferase OS=Dysgonomonas sp. 37-18; OX = 1895907 GN=tgt PE=3 SV=1
MDFELQYTDDQSSARAGLITTDHGQIETPIFMPVGTQGAVKAVHMTELENDIQAQIILGNTYHLYLRPGLDILQQAGGLHKFNSWNKPILTDSGGFQVFSLAHNRKLTEEGAIFRSHIDGSKHVFTPESVMDIERTIGADIMMAFDECTPGDADYTYAKKSLDLTERWLDRCIKRFNETECEYGYKQALFPIVQGCVYPDLRRRAAENVASKGADGNAIGGLAVGEPTEKMYEMIEVVNEILPKDKPRYLMGVGTPANILEAIERGVDMFDCIMPTRNGRNGQLFTRNGIMNMRNQKWAKDFSAIEENGASFVDTLYTKAYLRHLFITNEILALQIASIHNLAFYLWLVKEARQHIIAGDFLSWKRMMIENVSRRL

SEQ ID NO: 54838 - protein, 377 aa, unidentified
  source 1..377: note = Dysosmobacter welbionis
  REGION 1..377: note = tr|A0A4D7ATT7|A0A4D7ATT7_9FIRM Queuine tRNA-ribosyltransferase OS=Dysosmobacter welbionis; OX = 2093857 GN=tgt PE=3 SV=1
MFKVLKTEGRARRGEFSCAHGGVVQTPVFMNVGTQGAIKGGVSAHDLKEVGCQIELSNTYHLHLRPGDHIVRQMGGLHKFMDWDGPILTDSGGFQVFSLASLRKIREEGVTFASHIDGHRIFMGPEESMQIQSNLGSDIAMAFDECVENPATYEYAKASCERTARWLERCKAEHDRLNALPDTVNPGQMLFGINQGATFADLRVWHMDQIAKIDCDGYAIGGLAVGEPAEVMYEIIDAVEPHMPKDKPRYLMGVGTPSNIIEGVARGVDFFDCVMPSRNGRHGKLFTWEGTVNILNEKYATDPRPISESCGCPACRHFSRAYIRHLFKADEVLALRLAVLHNLYFYNELAARIRRALDEGTFADFRARYSGNLEKRA

SEQ ID NO: 54839 - protein, 376 aa, Echinicola sp.
  REGION 1..376: note = tr|A0A514CHL0|A0A514CHL0_9BACT Queuine tRNA-ribosyltransferase OS=Echinicola sp. LN3S3 OX=2591634; GN = tgt PE=3 SV=1
MKFILENTDQKSKARTGVVKTDHGDIQTPIFMPVGTAGSVKAVHQRELTYDIKAQIILGNTYHLYLRPGLDVLEKAGGLHKFNGWNKPILTDSGGYQVFSLAGTRKITEEGVLFKSHIDGSKHKFTPENVMDIQRSIGADIIMAFDECTPYPCEFGYARKSMEMTHRWLKRCIDQVDSTSGKYGYSQALFPIVQGSVYKDLRKQSAEFVASCGRDGNAIGGLSVGEPAEMMYEMTELVTDILPGDKPRYLMGVGTPANILECIALGVDMFDCVMPTRNARNGMLFTSEGFMNMRNEKWKDDFSPIDPNINSYVSSFYSRAYLRHLTVSKEILAAQIASVHNLSFYLWLVDEAREKIKAGEFAVWKDEMVKKVSRRL

SEQ ID NO: 54840 - protein, 376 aa, unidentified
  source 1..376: note = Echinicola strongylocentroti
  REGION 1..376: note = tr|A0A2Z4ILP7|A0A2Z4ILP7_9BACT Queuine tRNA-ribosyltransferase OS=Echinicola strongylocentroti; OX = 1795355 GN=tgt PE=3 SV=1
MKFILENTDPKSKARTGVVKTDHGDIQTPIFMPVGTAGSVKAVHQRELTYDVKAQIILGNTYHLYLRPGLDVLEKAGGLHKFNGWNKPILTDSGGYQVFSLAGTRKITEEGVLFKSHIDGSKHKFTPEYVMDIQRSIGADIIMAFDECTPYPCEFGYARNSMEMTHRWLKRCIEQVDNTSGKYGYSQALFPIVQGSVYKDLRKQSAEFVASCGREGNAIGGLSVGEPAEMMYEMTELVTDILPGDKPRYLMGVGTPANILECIALGVDMFDCVMPTRNARNGMLFTSEGIMNMRNEKWKDDFSPIDPNINSYVSSFYSRAYLRHLTVSKEILAAQIASVHNLSFYLWLVAEAREKIKSGEFAAWKDEMVKKVSTRL

SEQ ID NO: 54841 - protein, 376 aa, Echinicola vietnamensis
  REGION 1..376: note = tr|L0FZW3|L0FZW3_ECHVK Queuine tRNA-ribosyltransferase OS=Echinicola vietnamensis (strain DSM 17526 / LMG 23754 / KMM 6221) OX=926556 GN=tgt PE=3; SV = 1
MKFILENTDQKSKARTGVVKTDHGDIQTPIFMPVGTAGSVKAVHQRELTYDIKAQIILGNTYHLYLRPGLDVLEKAGGLHKFNGWNKPILTDSGGYQVFSLAGTRKITEEGVLFKSHIDGSKHKFTPENVMDIQRSIGADIIMAFDECTPYPCEFGYARKSMEMTHRWLKRCIDQVDSTEGKYGYSQALFPIVQGSVYKDLRKQSAEFVASCGREGNAIGGLSVGEPAEMMYEMTELVTDILPEDKPRYLMGVGTPANILECIALGVDMFDCVMPTRNARNGMLFTSEGIMNMRNEKWKDDFSPIDPNINSHVSSFYSKAYLRHLTVSKEILAAQIASVHNLSFYLWLVAEAREKIKAGEFAVWKDEMVKKVSRRL

SEQ ID NO: 54842 - protein, 371 aa, Ectothiorhodosinus mongolicus
  REGION 1..371: note = tr|A0A1R3W8N9|A0A1R3W8N9_9GAMM Queuine tRNA-ribosyltransferase OS=Ectothiorhodosinus mongolicus; OX = 233100 GN=tgt PE=3 SV=1
MKFNLQTQDGAARRGQLQFARGVVDTPAFMPVGTYGTVKGMTPEELQDLGAQIILGNTFHLMLRPGTEVIKAHGDLHDFMHWQGPILTDSGGFQVFSLQDLRKLTEEGAKFRSPVDGSPIMLTPELSMQVQRDLGSDIVMIFDECTPYPATHGEARESMQLSLRWAERSKTAHGDNPSALFGIVQGGMYEDLRRESLQGLTQIGFDGYAIGGLSVGEPEDERHLVLDALMPHMPAQAPRYLMGVGRPEDIVEAVRRGVDMFDCVIPTRNARNGFLYTSTGVMRIRNARFREDTAPIDKDCGCYTCRHYSRAYLKHLDRCNEILASRLATIHNLYYYQQLMREIRAAITEQRFEDWVKSFYAKRAQTPPSMP

SEQ ID NO: 54843 - protein, 371 aa, Ectothiorhodospira haloalkaliphila
  REGION 1..371: note = tr|W8KVH4|W8KVH4_9GAMM Queuine tRNA-ribosyltransferase OS=Ectothiorhodospira haloalkaliphila OX=421628 GN=tgt PE=3 SV=1
MQFELLGQDGAARRGQLRFDRGTVETPAFMPVGTYGTVKAMTPEELEGLGAQIILGNTFHLMLRPGTDVIQAHGDLHDFMHWERPILTDSGGFQVFSLAELRKITEKGVRFRSPVDGSPILLTPERSMEVQRALGSDIVMIFDECTPHPATEDQARESMELSLRWAARSRQAHGDNPSALFGIVQGGMYDGLRRRSLDGLMEIGFDGYAIGGLSVGETEEERHRVLDGLMPHMPVQRPRYLMGVGRPEDIVEAVRRGVDMFDCVIPTRNARNGFLYTREGVMRIRNARFRDDTGPIDPHCDCYTCRNYSRAYLKHLDKCNEMLASRLATIHNLYFYQTLMREMREAIAQGQLGAWVAEFHGRRAQTPRSMP

SEQ ID NO: 54844 - protein, 371 aa, Ectothiorhodospira magna
  REGION 1..371: note = tr|A0A1H9DGN3|A0A1H9DGN3_9GAMM Queuine tRNA-ribosyltransferase OS=Ectothiorhodospira magna; OX = 867345 GN=tgt PE=3 SV=1
MQFELMARDGAARRGRLIFDRGVVDTPAFMPVGTYGTVKAMTPEELEGLGAQIILGNTFHLMLRPGTEVIRAHGDLHDFMHWERPILTDSGGFQVFSLAKLRKITEEGVRFASPVDGSKILLTPERSMEVQRALGSDIVMIFDECTPYPATEDQARHSMELSLRWAARSRVAHGDNPSALFGIVQGGMYADLRRRSLDGLMQIGFDGYAIGGLSVGEPEAERNQVLDGLTPLMPVDRPRYLMGVGKPEDIVEAVRRGVDMFDCVIPTRNARNGFLYTHDGVMRIRNARFRDDTLPIDPECDCYTCRHYSRAYLKHLDKCNEILASRLATLHNLHYYQTLMGEMRQAIAAGTLEMWANAFHERRAQTPRSVT

SEQ ID NO: 54845 - protein, 371 aa, Ectothiorhodospira marina
  REGION 1..371: note = tr|A0A1H7FN53|A0A1H7FN53_9GAMM Queuine tRNA-ribosyltransferase OS=Ectothiorhodospira marina; OX = 1396821 GN=tgt PE=3 SV=1
MQFELIGQDGAARRGRLRFDRGTVETPAFMPVGTYGTVKAMTPEELEGLGAEIILGNTFHLMLRPGTEVIQAHGDLHDFMHWERPILTDSGGFQVFSLAELRKITEEGVRFRSPVDGSPILLTPERSMEVQRALGSDIVMIFDECTPHPATEDQARESMELSLRWAARSRQAHGDSPAALFGIVQGGMYDGLRRRSLDGLVEIGFDGYAIGGLSVGETEEERHRVLDGLMPHMPVQRPRYLMGVGRPEDIVAAVQRGVDMFDCVIPTRNARNGFLYTREGVMRIRNARFRDDIGPIDPHCDCYTCRNYSRAYLKHLDKCNEMLASRLATLHNLYFYQTLMREMREAIAQGQLDAWVAEFHGRRAQTPRSMP

SEQ ID NO: 54846 - protein, 364 aa, Ectothiorhodospira mobilis
  REGION 1..364: note = tr|A0A1I4SS68|A0A1I4SS68_ECTMO Queuine tRNA-ribosyltransferase OS=Ectothiorhodospira mobilis; OX = 195064 GN=tgt PE=3 SV=1
MRFELLGRDGAARRGRLIFDRGSVETPAFMPVGTYGSVKAMTPEELEGLGAEIILGNTFHLMLRPGTEVIQRHGDLHGFMHWERPILTDSGGFQVFSLADLRKISEEGVRFRSPVDGAPILLTPERSMEVQRALGSDIVMIFDECTPYPATEEVARRSMELSLRWAARSREGHGANPAALFGIVQGGMYPHLRRRSLEGLQAIGFDGYAIGGLSVGEPEAERHQVLDALMPHMPTDRPRYLMGVGRPEDLVEAVRRGVDMFDCVIPTRNARNGFLYTRDGVMRIRNARFRDDTRPIDPECDCYACRHYSRAYLKHLDKCNEILASRLATIHNLRYYQWLMGEMRTAIAEGRLDAWAQDFHPGQL

SEQ ID NO: 54847 - protein, 371 aa, Ectothiorhodospira sp.
  REGION 1..371: note = tr|A0A167BIC1|A0A167BIC1_9GAMM Queuine tRNA-ribosyltransferase OS=Ectothiorhodospira sp. BSL-9; OX = 1442136 GN=tgt PE=3 SV=1
MQFELFGQDGAARRGQLRFDRGTVETPAFMPVGTYGTVKAMTPEELEGLGAEIILGNTFHLMLRPGTDVIQAHGDLHDFMHWERPILTDSGGFQVFSLAELRKITEEGVRFRSPVDGSPILLTPERSMEVQRALGSDIVMIFDECTPHPATEDQARESMELSLRWAARSRQAHGDNPSALFGIVQGGMYDGLRRRSLEGLMEIGFDGYAIGGLSVGETEEERHRVLDGLMPHMPVQRPRYLMGVGRPEDIVEAVRRGVDMFDCVIPTRNARNGFLYTREGVMRIRNARFRDDTGPIDPHCDCYTCRNYSRAYLKHLDKCNEMLASRLATIHNLYFYQTLMREMREAIARGQLQEWVTEFYSRRAQTLRSMP

SEQ ID NO: 54848 - protein, 371 aa, Ectothiorhodospira sp.
  REGION 1..371: note = tr|H1G2U1|H1G2U1_9GAMM Queuine tRNA-ribosyltransferase OS=Ectothiorhodospira sp. PHS-1; OX = 519989 GN=tgt PE=3 SV=1
MQFELMARDGAARRGRLIFDRGVVDTPAFMPVGTYGTVKAMTPEELEGLGAQIILGNTFHLMLRPGTEVIRAHGDLHDFMHWERPILTDSGGFQVFSLAKLRKITEEGVRFASPVDGSKILLTPERSMEVQRALGSDIVMIFDECTPYPATEDQARHSMELSLRWAARSRVAHGDNPSALFGIVQGGMYADLRRRSLEGLMQIGFDGYAIGGLSVGEPEAERNRVLDGLTPLMPVDRPRYLMGVGKPEDIVEAVRRGVDMFDCVIPTRNARNGFLYTHDGVMRIRNARFRDDTQPIDPECDCYTCRHYSRAYLKHLDKCNEILASRLATLHNLHYYQTLMREMRQAIAAGTLETWARAFHERRAQTPRSVT

SEQ ID NO: 54849 - protein, 371 aa, unidentified
  source 1..371: note = Ectothiorhodospiraceae bacterium
  REGION 1..371: note = tr|A0A2A4XVY6|A0A2A4XVY6_9GAMM Queuine tRNA-ribosyltransferase OS=Ectothiorhodospiraceae bacterium OX=2026737 GN=tgt PE=3 SV=1
  VARIANT 6: note = Xaa can be any naturally occurring amino acid
  VARIANT 157: note = Xaa can be any naturally occurring amino acid
MKFDLXNTDGPARRGRLTFDRGTVETPAFMPVGTYGTVKAMTPEELSGMGAEIILGNTFHLMLRPGTEVIKAHGDLHNFMHWQGPILTDSGGFQVFSLGKMRKITEEGVTFRSPVNGDKVFLGPEESMAVQRDLGSDIVMCFDECTPYPADERQSRXSMQMSLRWGLRSKEAFADNPNALFGIVQGGMYEALRDESAAGLVDIGFDGYAIGGLSVGEPKDDMMRVLEHTTPLLPTDKPRYLMGVGKPEDLVQAVLRGVDMFDCVMPTRNARNGHLFTRQGVVKIRNACHELDTRPLDEACGCYTCQNYSRSYLRHLDKTGEILGARLNTIHNLHYYQDVMRGLRDAITANELQAFVDDFYTGLGQETPSAQ

SEQ ID NO: 54850 - protein, 383 aa, unidentified
  source 1..383: note = Ectothiorhodospiraceae bacterium
  REGION 1..383: note = tr|A0A2E0UN58|A0A2E0UN58_9GAMM Queuine tRNA-ribosyltransferase OS=Ectothiorhodospiraceae bacterium OX=2026737 GN=tgt PE=3 SV=1
MFFNLQHVDPRSGARAGTLATERGEIHTPIFMPVGTQGTVKAVQQRELAEIGAEVILANTYHLALRPGADFLRDAGGLHRFMNWDRPILTDSGGYQVFSLNELRKIRDDSVTFQSHIDGSYHTFSPESVIDIQRAIGSDIMMILDECPPADCGYEYAKRSNDLTIRWAERARQQLDATGPLYGKAQFAFGIVQGNVFKDIREQSARQLIDIGFDGYSIGGLAVGESHEVMYDITEFTTGILPSEKPRYLMGVGTPLNIVESIARGVDMFDCVMPTRNGRNAMLFTRQGPVTIKKEHYLQDFRPVDGACSCYTCRTFTRSYLCHLYRAKEILGLQLASIHNLTFYLELTRDARNAILNDGFSEWKAAFIREYTAGGDDADISTV

SEQ ID NO: 54851 - protein, 380 aa, unidentified
  source 1..380: note = Edaphobacillus lindanitolerans
  REGION 1..380: note = tr|A0A1U7PQ81|A0A1U7PQ81_9BACI Queuine tRNA-ribosyltransferase OS=Edaphobacillus lindanitolerans; OX = 550447 GN=tgt PE=3 SV=1
MTPAVTYELIKKDKQTGARLGIVHTPHGSFETPAFMPVGTQATVKTMSPEELKEIGSGIILSNTYHLWLRPGHDIIGEAGGLHKFMNWDRPILTDSGGFQVFSLSDMRKIEEEGVHFRHHLDGSKLFLSPEKSMEIQNALGSDIMMAFDECPPYPASHDYMKASVERTSRWAERCLGAHSRPEDQGLFGIVQGGEYEDLRRQSAADLVSLDFPGYAVGGLSVGEPKDVMNRVLEFTTPLLPEGKPRYLMGVGSPDALIDGSIRGIDMFDCVLPTRIARNGTLMTSQGRLVVRNAKFARDFGPLDPNCDCHVCKNYSRAYIRHLIKAEESFGIRLTSYHNLYFLLNLMEQVRQAIREDRLGDFREEFFEQYGYNKPNAKNF

SEQ ID NO: 54852 - protein, 383 aa, Edaphobacter aggregans
  REGION 1..383: note = tr|A0A3R9NYM7|A0A3R9NYM7_9BACT Queuine tRNA-ribosyltransferase OS=Edaphobacter aggregans; OX = 570835 GN=tgt PE=3 SV=1
MSISFDVQRTAEGGGRRAALTLPHGVVETPVFMPVGTAASVKAVEQGVLEKIGPENRGAQIILANTYHLYLRPGHELIARAGGVHRFMSWERPMLTDSGGFQVFSLSSLRKVTQDGVEFRSHLDGSKHFFSPEHSMDVQIALGADIAMVFDECVEHPATYERTRDSMGLTHAWAQRSKDHFELHKHRVPWHEALGGATQSLFGIVQGGMYVDLRKESADRLVEMDFPGYAIGGLAVGEPREVTREMIARTLEWLPKDKPRYVMGVGYPDEIEEYAKMGVDMMDCVLPTRAGRHGLVFARDADGVVVRMNIKRKEYAEDPGPIDASCGCMVCARYSRAYLRHLFVSGEPLGLTLNSVHNLHFYLATMERVRADIAGTARSHSTL

SEQ ID NO: 54853 - protein, 384 aa, unidentified
  source 1..384: note = Edaphobacter dinghuensis
  REGION 1..384: note = tr|A0A495BV45|A0A495BV45_9BACT Queuine tRNA-ribosyltransferase OS=Edaphobacter dinghuensis; OX = 1560005 GN=tgt PE=3 SV=1
MALSFERDVIDAEGGRRGRLVLPHGIVETPVFMPVGTAASVKAVEQGVLEEIGGDGVGAQIILANTYHLYLRPGHELIARMGGVHRFMSWERPMLTDSGGFQVFSLSSLRKVTPDGVEFRSHLDGSKHFFSPEHSMDVQIALGADVMMVFDECVEHPATYERTRDSMALTHAWAQRSKDHFEANKERVPWFEERGGRTQSLFGIVQGGMYADLRRESAERLMEMELPGYAIGGLAVGEPREVTREMIARTLEWLPKDKPRYVMGVGYPDEIEEYAKMGVDMMDCVLPTRAGRHGLVFMREEHGGPVVRMNIKRKEYAEDARPIDETCGCMVCRRYSRAYLRHLYVSGEALGLTLNSVHNLAFYLDTMSRVRAELGVPPLGVSCA

SEQ ID NO: 54854 - protein, 377 aa, Edaphobacter modestus
  REGION 1..377: note = tr|A0A4Q7YWT5|A0A4Q7YWT5_9BACT Queuine tRNA-ribosyltransferase OS=Edaphobacter modestus OX=388466; GN = tgt PE=3 SV=1
MQKMGLSFEIQKTAESGGRRGTLALPHGMVQTPVFMPVGTAASVKAVEQGVLERIGPGERGAEIILANTYHLYLRPGHELIARMGGVHRFMGWERPMLTDSGGFQVFSLSSLRKVTPDGVEFRSHLDGSKHFFSPEHSIDVQIALGADIAMVFDECVETPASWERTKDSMGLTHAWAGRSKDHFEANKHRVPWFSEMQGKTQSLFGIVQGGMYVDLRKESAEHLVEMDLPGYAIGGLAVGEPREVTREMIARTLEWLPKDKPRYVMGVGYPDEIEEYAKMGVDMMDCVLPTRAGRHGLVFARGEDGGIVRMNIKRKEYAEDQGPIDATCGCMVCARYSRAYLRHLFVVGEPLGLTLNSVHNLHFYLATMERVRAELA

SEQ ID NO: 54855 - protein, 379 aa, unidentified
  source 1..379: note = Edwardsiella anguillarum
  REGION 1..379: note = tr|A0A076LUS2|A0A076LUS2_9GAMM Queuine tRNA-ribosyltransferase OS=Edwardsiella anguillarum ET080813 OX=667120 GN=tgt PE=3 SV=1
MKYELVSTDGRARRGRLIFERGVVETPAFMPVGTYGTVKGMTPEEVAQTGAQILLGNTFHLWLRPGQEIMKLHGDLHDFMQWPGPILTDSGGFQVFSLGAMRKIKEEGVYFRNPINGSPVFLSPEKSMEIQYDLGSDIVMIFDECTPYPADWDYAKRSMEMSLRWAKRSRQRFDELGNQNALFGIIQGSVYEDLRDVSLKGLVEIGFDGYAVGGLAVGEPKEDMHRILEHVCPMIPQDKPRYLMGVGKPEDLVEGVRRGIDMFDCVMPTRNARNGHLFVTGGVVKIRNAKYKEDTAALDPECDCYTCRNYSRAYLHHLDRCNEILGARLNTIHNLRYYQRLMAALRQAIEEGKLERFAADFYGRRGRTVPPLGAADAAS

SEQ ID NO: 54856 - protein, 378 aa, Edwardsiella hoshinae
  REGION 1..378: note = tr|A0A376DKE6|A0A376DKE6_9GAMM Queuine tRNA-ribosyltransferase OS=Edwardsiella hoshinae OX=93378; GN = tgt PE=3 SV=1
MKYELVTTDGRARRGRLIFERGVVETPAFMPVGTYGTVKGMTPEEVAQTGAQILLGNTFHLWLRPGQEIMKLHGDLHDFMQWPGPILTDSGGFQVFSLGAMRKIKEEGVYFRNPINGSPIFLSPEKSMEIQYDLGSDIVMIFDECTPYPADWDYAKRSMEMSLRWAKRSRQRFDELGNKNALFGIIQGSVYEDLRDVSLKGLVEIGFDGYAVGGLAVGEPKEDMHRILEHVCPMIPQDKPRYLMGVGKPEDLVEGVRRGIDMFDCVMPTRNARNGHLFVTGGVVKIRNAKYKEDTRPLDAECDCYTCRNYSRAYLHHLDRCNEILGARLNTIHNLRYYQRLMAGLRQAIEEGKLETFVAEFYGRRGCTVPPLGDAAAS

SEQ ID NO: 54857 - protein, 379 aa, Edwardsiella ictaluri
  REGION 1..379: note = sp|C5BCF7|TGT_EDWI9 Queuine tRNA-ribosyltransferase; OS = Edwardsiella ictaluri (strain 93-146) OX=634503 GN=tgt; PE = 3 SV=1
MKYELVSTDGRARRGRLIFERGVVETPAFMPVGTYGTVKGMTPEEVAQTGAQILLGNTFHLWLRPGQEIMKLHGDLHDFMQWPGPILTDSGGFQVFSLGAMRKIKEEGVYFRNPINGSPVFLSPEKSMEIQYDLGSDIVMIFDECTPYPADWDYAKRSMEMSLRWAKRSRQRFDELGNQNALFGIIQGSVYEDLRDVSLKGLVEIGFDGYAVGGLAVGEPKEDMHRILEHVCPMIPQDKPRYLMGVGKPEDLVEGVRRGIDMFDCVMPTRNARNGHLFVTGGVVKIRNAQYKEDTTALDPECDCYTCRNYSRAYLHHLDRCNEILGARLNTIHNLRYYQRLMAALRQAIEEGKLERFAADFYGRRGRTVPPLGAADAAS

SEQ ID NO: 54858 - protein, 379 aa, unidentified
  source 1..379: note = Edwardsiella piscicida
  REGION 1..379: note = tr|A0A411GZV3|A0A411GZV3_9GAMM Queuine tRNA-ribosyltransferase OS=Edwardsiella piscicida; OX = 1263550 GN=tgt PE=3 SV=1
MKYELVSTDGRARRGRLIFERGVVETPAFMPVGTYGTVKGMTPEEVAQTGAQILLGNTFHLWLRPGQEIMKLHGDLHDFMQWPGPILTDSGGFQVFSLGAMRKIKEEGVYFRNPINGSPVFLSPEKSMEIQYDLGSDIVMIFDECTPYPADWDYAKRSMEMSLRWAKRSRQRFDELGNKNALFGIIQGSVYEDLRDVSLKGLVEIGFDGYAVGGLAVGEPKEDMHRILEHVCPMIPQDKPRYLMGVGKPEDLVEGVRRGIDMFDCVMPTRNARNGHLFVTGGVVKIRNAKYKEDTTALDPECDCYTCRNYSRAYLHHLDRCNEILGARLNTIHNLRYYQRLMAALRQAIEEGKLERFAADFYGRRGRTVPPLGAADAAS

SEQ ID NO: 54859 - protein, 379 aa, unidentified; identical to SEQ ID NO: 54855
  source 1..379: note = Edwardsiella piscicida
  REGION 1..379: note = tr|A0A034T3R7|A0A034T3R7_9GAMM Queuine tRNA-ribosyltransferase OS=Edwardsiella piscicida; OX = 1263550 GN=tgt PE=3 SV=1

SEQ ID NO: 54860 - protein, 383 aa, Edwardsiella tarda
  REGION 1..383: note = tr|D4F2X1|D4F2X1_EDWTA Queuine tRNA-ribosyltransferase OS=Edwardsiella tarda ATCC 23685; OX = 500638 GN=tgt PE=3 SV=1
MTEVYVKYELVTTDGRARRGRLIFERGVVETPAFMPVGTYGTVKGMTPEEVAQTGAQILLGNTFHLWLRPGQEIMKLHGDLHDFMQWPGPILTDSGGFQVFSLGAMRKIKEEGVYFRNPINGSPIFLSPEKSMEIQYDLGSDIVMIFDECTPYPADWDYAKRSMEMSLRWAKRSRQRFDELGNKNALFGIIQGSVYEDLRDVSLKGLVEIGFDGYAVGGLAVGEPKEDMHRILEHVCPMIPQDKPRYLMGVGKPEDLVEGVRRGIDMFDCVMPTRNARNGHLFVTGGVVKIRNAKYKEDTLPLDPECDCYTCRNYSRAYLHHLDRCNEILGARLNTIHNLRYYQRLMAGLRQAIEEGKLETFVADFYDRRGRTVPPLGEVAAS

SEQ ID NO: 54861 - protein, 379 aa, Edwardsiella tarda; identical to SEQ ID NO: 54858
  REGION 1..379: note = tr|D0ZE73|D0ZE73_EDWTE Queuine tRNA-ribosyltransferase OS=Edwardsiella tarda (strain EIB202) OX=498217 GN=tgt PE=3 SV=1

SEQ ID NO: 54862 - protein, 381 aa, Eggerthella lenta
  REGION 1..381: note = tr|A0A369N6B1|A0A369N6B1_EGGLN Queuine tRNA-ribosyltransferase OS=Eggerthella lenta OX=84112; GN = tgt PE=3 SV=1
MALFDCELQATSGHARALSYETAHGSFQTPMFMPVGTSASVKGVTVGQLNDLNAQVVLANTYHLSLRPGADVVAEAGGVHRFMNYDGPMLTDSGGFQVFSLADTLKLDDEGLTFRSIYDGTKVRWTPESNMEIQEQLGADIAMQLDQCTPYPAEKAFVAKAVDLSANWARRCLAAHQRPDQTLFGIVQGGMELDLRLESIRRLREIEDESLARGGRRFGGFGIGGYSVGEDHEVMFETLGPVARACPEDRPRYLMGVGNPTTLVRAVREGVDMFDCVLPTRTARMGTAFSSTGRMNMRNAKFTRDFGPLDPACTCPTCRNHSRAYIRHLVKQNEMLGGILLSVHNLHYLIDLMRRAREAVLAGAYEEFYEAWMASPAAKDY

SEQ ID NO: 54863 - protein, 381 aa, Eggerthella lenta
  REGION 1..381: note = tr|A0A369NTE7|A0A369NTE7_EGGLN Queuine tRNA-ribosyltransferase OS=Eggerthella lenta OX=84112; GN = tgt PE=3 SV=1
MTLFDCELQATSGHARALSYETAHGSFQTPMFMPVGTSASVKGVTVGQLNDLGSQVVLANTYHLSLRPGADVVAEAGGVHRFMNYDGPMLTDSGGFQVFSLADTLKLDDEGLTFRSIYDGTKVRWTPESNMEIQQQLGADIAMQLDQCTPYPAEKAFVAKAVDLSANWARRCLAAHTRPDQTLFGIVQGGMELDLRLESVRRLREIEDESLARGGRRFGGFGIGGYSVGEDHEVMFETLGPVARACPEDRPRYLMGVGNPTTLVRAVREGVDMFDCVLPTRTARMGTAFSSEGRMNMRNAKFTRDFGPLDPACTCPTCQNHSRAYIRHLVKQNEMLGGILLSVHNLHYLIDLMRRAREAVLADAYEEFYEAWMSSPAAKDY

SEQ ID NO: 54864 - protein, 381 aa, Eggerthella sinensis
  REGION 1..381: note = tr|A0A3N0IXS1|A0A3N0IXS1_9ACTN Queuine tRNA-ribosyltransferase OS=Eggerthella sinensis OX=242230; GN = tgt PE=3 SV=1
MALFDCTHEAQSGHARALAYETAHGTFRTPMFMPVGTSATVKGVTVGQLNDLGSQVVLANTYHLSLRPGADVVAEAGGVHRFMNYAGPMLTDSGGFQVFSLADTLKLDADGLTFRSIYDGSKIRWTPESNMAIQEQLGADIAMQLDQCTPYPAERSFVANAVDLSANWARRCLAAHQRPDQTLFGIVQGGMELDLRLESIRRLREIEDESVSNGGRRFGGFGIGGYSVGEDHEVMFETLGPVARAVPEDRPRYLMGVGNPTTLVRAVREGVDMFDCVLPTRTARMGTAFSSTGRMNMRNAKFTRDFGPLDPACTCPTCQNHSRAYIRHLVKQNEMLGGILLSVHNLHYLIDLMRRAREAVLADAYEEFYEAWMNSPAAKDY

SEQ ID NO: 54865 - protein, 381 aa, Eggerthella sp.
  REGION 1..381: note = tr|R5FY72|R5FY72_9ACTN Queuine tRNA-ribosyltransferase OS=Eggerthella sp. CAG:1427; OX = 1262874 GN=tgt PE=3 SV=1
MALFDFTLEAQSGHARAGLFETAHGTVRTPLFMPVGTSATVKGIRPQMLKELGAQIVLSNTYHLSLRPGADLIAEAGGLHKFMAYDGPILTDSGGFQIFSLADTLKLDDDGVTFSSIYDGSKIRWTPETNMDIQQKLGADIIMQLDQCPPYPATREFVQRAVDLSSAWAKRCLAAHTREDQALFAICQGGMNLDMRLESIRRLKEISDESVRSGHKDFKGFGIGGYSVGEDHEVMFETLGDVARTCPENKPRYVMGVGNPTTLVRAVHEGVDMFDCVLPTRTARMGTAFSSQGRMNMRNARFIHDFGPLDEKCTCPTCQTHSRSYIRHLVKQNEMLGSVLLSIHNLHFLIDLMNRAREAILQDAYEDFYQEWMHSPAAQDY

SEQ ID NO: 54866 - protein, 381 aa, Eggerthella sp.
  REGION 1..381: note = tr|F7UVK3|F7UVK3_EEGSY Queuine tRNA-ribosyltransferase OS=Eggerthella sp. (strain YY7918); OX = 502558 GN=tgt PE=3 SV=1
MALFDCTCEAQSGHARALAYETAHGTFHTPMFMPVGTSATVKGVTAGQLRDLGSQVVLSNTYHLSLRPGADVVAEAGGVHRFMNYDGPMLTDSGGFQVFSLADTLKLDDDGLTFRSIYDGTKIRWTPESNMEIQEQLGADIAMQLDQCTPYPAEKTFVARAVDLSANWARRCLAAHKRPDQTLFGIVQGGMELDLRLESIRRLREIEDESLAAGGRRFGGFGIGGYSVGEDHEVMFQTLGDVARACPEDRPRYLMGVGNPTTLVRAVREGVDMFDCVLPTRTARMGTAFSSAGRMNMRNAKFTRDFGPLDPACTCPTCQNHSRAYIRHLVKQNEMLGGILLSIHNLHYLLDLMRRARVAVLADAYEEFYQEWMASPAAQDY

SEQ ID NO: 54867 - protein, 381 aa, unidentified
  source 1..381: note = Eggerthellales bacterium
  REGION 1..381: note = tr|A0A316PS71|A0A316PS71_9ACTN Queuine tRNA-ribosyltransferase OS=Eggerthellales bacterium; OX = 2137879 GN=tgt PE=3 SV=1
MALFDYTLEATSGHARAGIFETAHGIVRTPLFMSVGTSATVKGIRPETLHEIGAQIILANTYHLSLRPGADLVEEAGGLHSFMNYSGPILTDSGGFQVFSLADTLKLDEDGLTFKSIYDGSKIRWTPESNMEIQQKLGADIVMQLDQCTPYPAEYDFVDHAVELSANWARRCLAAHTRSDQTLFGIVQGGMELDLRMKSIELLTSINDESIANGHKGFGGFGIGGYSVGEEHEVMFETLGAVAQSLPENKPRYLMGVGNPTTLVKAVGVGVDMFDCVLPTRTARMGTAFSSSGRMNMRNAKYTHDFGPLDPQCSCPTCKNHSRAYIRHLVKQNEMLGAILLSIHNLYFLIQLMNRARDAIIADCYDEFLNDWMNSPAAQDY

SEQ ID NO: 54868 - protein, 377 aa, Eggerthia catenaformis
  REGION 1..377: note = tr|M2PPB9|M2PPB9_9FIRM Queuine tRNA-ribosyltransferase OS=Eggerthia catenaformis OT 569 = DSM 20559 OX=999415 GN=tgt PE=3 SV=1
MKDFWFELKHREKETGARYGILHTPHGDVETPMFMPVGTQATVKGIWPEMLHQMKSQVVLANTYHLWLRPGDDVVKMAGGLHQFMNYHGPLLTDSGGFQVFSLGKMRKIEEEGVYFRSYIDGSKLFLSPEKSIEIQENLGADIIMSFDECAPYPCSYDYMKRSVERTLRWAKRGQDAHRKENQALFGIVQGGEYADLRKLSATALSDMDFPGYSIGGTSVGEPKDVMYQMIDDSVKWLPDHKPRYLMGVGNPIDLIEGAIRGIDMFDCVLPTRVARHGALMTHQGRLNINNEKYKYDFTPIDEKCSCYACKNYTKAYIRHLHKEDEIFGKSLMSIHNVQFLLDLSKEIRDAVKEDRLLEFKKKFLDEYGHNVYERAF

SEQ ID NO: 54869 - protein, 377 aa, Eggerthia catenaformis
  REGION 1..377: note = tr|A0A251WTH8|A0A251WTH8_9FIRM Queuine tRNA-ribosyltransferase OS=Eggerthia catenaformis OX=31973; GN = tgt PE=3 SV=1
MKDFWFELKHIEKDTGARYGILHTPHGDVETPMFMPVGTQATVKGIWPEMLHQMKSQVVLANTYHLWLRPGDDVVKMAGGLHQFMNYHGPLLTDSGGFQVFSLGKMRKIEEEGVYFRSYIDGSKLFLSPEKSIEIQENLGADIIMSFDECAPYPCSYDYMKRSVERTLRWAKRGQDAHRKENQALFGIVQGGEYADLRKLSATALSDMDFPGYSIGGTSVGEPKDVMYQMIDDSVKWLPDHKPRYLMGVGNPIDLIEGAIRGIDMFDCVLPTRVARHGALMTHQGRLNINNEKYKYDFTPIDEKCSCYACKNYTKAYIRHLHKEDEIFGKSLMSIHNVQFLLDLSKEIRDAVKEDRLLEFKKKFLDEYGHNVYERAF

SEQ ID NO: 54870 - protein, 396 aa, Ehrlichia canis
  REGION 1..396: note = tr|Q3YRP4|Q3YRP4_EHRCJ Queuine tRNA-ribosyltransferase OS=Ehrlichia canis (strain Jake); OX = 269484 GN=tgt PE=3 SV=1
MYKNFDFKIIHQYNNARLGTILTPHGTINTPAFIFCATKGAIKSVDISKIKESDTQIILSNTYHLMLQPGADIIEKLGGLHKVTGWNKPMLTDSGGYQIFSLGYGSVSHEIKNAGRSYGSRTLVSISEEGAVFKSYINGNLYHLTPEKSIQIQQKLGADLIVVLDECTPFHISYKYTKDSMNMSHRWAVRCIEQFKKNNDNSQALYGIIQGGIYEDLRIDSCNFTNDMPFFGHAIGGSLGACKQQMYDIVSLTTSKLDKNRTIHLLGIGNIDDIFQGVKSGIDTFDCVYPTRIARHGGALVKPKYRKEETRTKEYINLRNQRFKIDTNPIESDCLCFTCCNHSRGYIHHLLKAQELLAYSLITIHNIYFMNNLMQSIRKAILNNTLEEEQNQWVIQ

SEQ ID NO: 54871 - protein, 396 aa, unidentified
  source 1..396: note = Ehrlichia cf.
  REGION 1..396: note = tr|A0A0F3NBG0|A0A0F3NBG0_9RICK Queuine tRNA-ribosyltransferase OS=Ehrlichia cf. muris str. EmCRT; OX = 1359167 GN=tgt PE=3 SV=1
MYKNFNFKITHQHNNARLGTIFTPHGVIDTPAFIFCATKAAIKSVDISKIKESNTQIILSNTYHLMLQPGEDIIEKLGGLHKITGWNKPMLTDSGGYQIFSLGYGSVSDEIKSAGRNRTSRTLVSISEEGAVFKSYINGSLYHLTPEKSIQIQQKLGADLIVVLDECTPFHISYDYTKKSTNMSHRWAVRCIDQFKKNNDNSQALYGIIQGGVYEDLRINSCNFINDMPFFGHAIGGSLGACKQQMYDIVSLTTSKLNKNRPIHLLGIGNIDDIFQGVKVGIDTFDCVYPTRIARHGGALVKPKHRTEHTHNKEYINLKNTRFKVDTNPIEPECICFTCCHHSRGYIHHLLKAQELLAYSLISIHNIYFMNNLMQSIRKAILNNRLEEEQNKWVIQ

SEQ ID NO: 54872 - protein, 396 aa, Ehrlichia chaffeensis
  REGION 1..396: note = tr|Q2GH20|Q2GH20_EHRCR Queuine tRNA-ribosyltransferase OS=Ehrlichia chaffeensis (strain ATCC CRL-10679 / Arkansas) OX=205920 GN=tgt PE=3 SV=1
MYKNFNFKIIHQHNNARLGTILTPHGIINTPAFIFCATKAAIKSVDISKIKESNTQIILSNTYHLMLQPGEDIIEKLGGLHKITGWNKPMLTDSGGYQIFSLGYGSVSHEIKSAGRKYTSKTLVSINEEGAIFKSYINGSTYHLTPEKSIQIQQKLGADLIVVLDECTPFHVSYDYTKNSMNMSHRWAVRCIDQFKKNNNYSQALYGIIQGGIHEDLRINSCSFINDMPFFGHAIGGSLGACKQQMYDIVSLTTSNLDKNRPIHLLGIGNIDDIFQGVKAGIDTFDCVYPTRIARHGGALVKPNHRKEETRTKEHINLRNERFKIDTNPIEPDCLCFTCCNHSRGYIHHLLKAQELLAYSLISIHNIYFMNNLMESIRKAILNNTLAEEQNQWVIK

SEQ ID NO: 54873 - protein, 396 aa, unidentified
  source 1..396: note = Ehrlichia minasensis
  REGION 1..396: note = tr|A0A4Q6I5E3|A0A4Q6I5E3_9RICK Queuine tRNA-ribosyltransferase OS=Ehrlichia minasensis OX=1242993; GN = tgt PE=3 SV=1
MYKNFDFKITHQYNNARVGTILTPHGTINTPAFIFCATKGAIKSVDISKIKESGTQIILSNTYHLMLQPGADTIEKLGGLHKITGWNKPMLTDSGGYQIFSLGHGSVSHEIKNAGRSYGSRTLVSINEEGAVFKSYINGNLYHLTPEKSIQIQQKLGADLIVVLDECTPFHISYKYTKDSMNMSHRWAVRCIEQFKKNNDNSQALYGIIQGGVYEDLRINSCNFINDIPFFGHAIGGSLGACKQQMYDIVSLTTSKLDRNRPIHLLGIGNIDDIFQGVKSGIDTFDCVYPTRIARHGGALVKPKYRKEEAPTKEYINLRNQRFKIDTNPIESDCSCFTCCNHSRGYIHHLLKAQELLAYSLITIHNIYFMNNLMQSIRKAILNNTLEEEQNQWVIQ

SEQ ID NO: 54874 - protein, 396 aa, Ehrlichia muris
  REGION 1..396: note = tr|V9R933|V9R933_9RICK Queuine tRNA-ribosyltransferase OS=Ehrlichia muris AS145; OX = 1423892 GN=tgt PE=3 SV=1
MYKNFNFKITHQHNNARLGTIFTPHGVIDTPAFIFCATKAAIKSVDISKIKESNTQIILSNTYHLMLQPGEDIIEKLGGLHKITGWNKPMLTDSGGYQIFSLGYGSVSDEIKSAGRNRTSRTLVSISEEGAVFKSYINGSLYHLTPEKSIQIQQKLGADLIVVLDECTPFHISYDYTKKSMNMSHRWAVRCIDQFKKNNDNSQALYGIIQGGVYEDLRINSCNFINDMPFFGHAIGGSLGACKQQMYDIVSLTTSKLDKNRPIHLLGIGNIDDIFQGVKVGIDTFDCVYPTRIARHGGALVKPKHRTEHTYNKEYINLKNKRFKVDTNPIEPECICFTCCHHSRGYIHHLLKAQELLAYSLISIHNIYFMNNLMQSIRKAILNNRLEEEQNKWVIQ

SEQ ID NO: 54875 - protein, 397 aa, Ehrlichia ruminantium
  REGION 1..397: note = tr|A0A170QVE1|A0A170QVE1_EHRRU Queuine tRNA-ribosyltransferase OS=Ehrlichia ruminantium OX=779; GN = tgt PE=3 SV=1
MYKNFQFKVKHQHNNARLCMIHTPHGVINTPAFIFCATKAAIKAVDISKVKESNTQIILSNTYHLMLQPGEDIIKKLGGLHKITGWDRPILTDSGGYQIFSLGYGSVSQEIKSAGRPYKSKTLISINEEGAIFKSYINGNTYHLTPEKSIQIQHKLGADLVVVLDECTPFHISYDYTKNSMYMSNRWAIRCINEFKKINDNSQALYGIIQGGIYEDLRRESCNFINNTPFFGHAIGGSLGNCKQQMYDIVSFTSEKLNRDRPIHLLGIGNIDDIFQGVKSGIDTFDCVYPTRLARHGGALIKVQYRSEENATKEHINLRNERFKIDTNPIEPDCKCFTCAHHSRGYIHHLLKAQEILAHSLLTIHNIYFMNNLMSAIRESILNNTLDIEQKKWVVTP

SEQ ID NO: 54876 - protein, 399 aa, Ehrlichia ruminantium
  REGION 1..399: note = tr|Q5FFT2|Q5FFT2_EHRRG Queuine tRNA-ribosyltransferase OS=Ehrlichia ruminantium (strain Gardel) OX=302409 GN=tgt PE=3 SV=1
MFMYKNFQFKVKHQHNNARLCMIHTPHGVINTPAFIFCATKAAVKAVDISKVKESNTQIILSNTYHLMLQPGEDIIKKLGGLHKIMGWDRPILTDSGGYPIFSLGYGSVSQEIKSAGRPHKSKTLISINEEGPIFKSYINANTYHLTPEKSIQIQHKLGADLVVVLDECTPFHISYDYTKNSMHMSNRWAIRCINEFKKINDNSQALYGIIQGGIYEDLRRESCNFINNTPFFGHAIGGSLGNCKQQMYDIVSFTSEKLNRDRPIHLLGIGNINDIFQGVKSGIDTFDCVYPTRLARHGGALIKVQYRNEENATKEYINLRNERFKIDTNPIEADCKCFTCSHHSRGYIHHLLKAQEILAHSLLTIHNIYFMNNLMSAIRESILNNTLDIEQKKWVVTS

SEQ ID NO: 54877 - protein, 396 aa, Ehrlichia sp.
  REGION 1..396: note = tr|X5GKE1|X5GKE1_9RICK Queuine tRNA-ribosyltransferase OS=Ehrlichia sp. HF OX=391036; GN = tgt PE=3 SV=1
MYKNFNFKITHQHNNARLGTIFTPHGVIDTPAFIFCATKAAIKSVDISKIKESNTQIILSNTYHLMLQPGEDIIEKLGGLHKITGWNKPMLTDSGGYQIFSLGYGSVSDEIKSAGRNHASRTLISISEEGAVFKSYINGSLYHLTPEKSIQIQQKLGADLIVVLDECTPFHVSYDYTKKSMNMSHRWAVRCIDQFKKNNDNSQALYGIIQGGVYEDLRINSCSFINDMPFFGHAIGGSLGACKQQMYDIVSLTTSNLDKNRPIHLLGIGNIDDIFQGVKVGIDTFDCVYPTRIARHGGALVKPKHRTEQARNKEYINLKNKRFKVDTNPIEPECICFTCCHHSRGYIHHLLKAQELLAYSLISIHNIYFMNNLMQSIRKAILNNRLEEEQNKWVIQ

SEQ ID NO: 54878 - protein, 371 aa, Eikenella corrodens
  REGION 1..371: note = tr|A0A254MND6|A0A254MND6_EIKCO Queuine tRNA-ribosyltransferase OS=Eikenella corrodens OX=539; GN = tgt PE=3 SV=1
MLKFTLHKKDGHARRGTIELNHGTIETPVFMPVGTYGSVKAMTPQNLHDIKAQIILGNTYHLWLRPGLEVIEQFGGLHDFISWNKPILTDSGGFQVFSLSDMRKLTEEGCTFKSPINGDKLFLSPEISMKIQTVLNSDIAMQLDECTPGEATREQAEKSLQMSLRWAERSKKAFEDLNNPNALFGIVQGAMYEDLREQSLRGLEQLDFPGLAIGGLSVGEPKPEMYRMLRAVGPILPEHKPHYLMGVGTPEDLVYGVAHGVDMFDCVMPTRNARNGWLFTRFGDIKIKNAKHKHDTRPLDESCTCYACQNFSRAYLHHLHRAGEILGAQLNTIHNLHFYQTIMAEMREAIEQGKFADWQAQFHENRAKGTD

SEQ ID NO: 54879 - protein, 371 aa, Eikenella corrodens
  REGION 1..371: note = tr|C0DZ12|C0DZ12_EIKCO Queuine tRNA-ribosyltransferase OS=Eikenella corrodens ATCC 23834; OX = 546274 GN=tgt PE=3 SV=1
MLKFTLHKKDGHARRATIELNHGSIETPVFMPVGTYGSVKAMTPQNLHDIKAQIILGNTYHLWLRPGLEVIEQFGGLHQFIGWNKPILTDSGGFQVFSLSDMRKLTEEGCTFKSPINGDKLFLSPEISMKIQTVLNSDIAMQLDECTPGEATREQAEKSLQMSLRWAERSKKAFEDLNNPNALFGIVQGAMYEDLREQSLRGLEQLDFPGLAIGGLSVGEPKPEMYRMLRAVGPILPEHKPHYLMGVGTPEDLVYGVAHGVDMFDCVMPTRNARNGWLFTRFGDIKIKNAKHKHDTRPLDESCTCYACQNFSRAYLHHLHRAGEILGAQLNTIHNLHFYQTIMAEMREAIEQGKFADWQAQFHENRAKGTD

SEQ ID NO: 54880 - protein, 371 aa, unidentified
  source 1..371: note = Eikenella exigua
  REGION 1..371: note = tr|A0A5B9BTD6|A0A5B9BTD6_9NEIS Queuine tRNA-ribosyltransferase OS=Eikenella exigua OX=2528037; GN = tgt PE=3 SV=1
MLKFTLHKKDGHARRATIELNHGSIETPVFMPVGTYGSVKAMTPQNLHDIGSQIILGNTYHLWLRPGLEVIEQFGGLHDFIGWNKPILTDSGGFQVFSLSDMRKLTEEGCTFKSPINGDKLFLSPEISMKIQTVLNSDIAMQLDECTPGEATREQAEKSLQMSLRWAERSKKAFEDLNNSNALFGIVQGAMYEDLREQSLRGLEQLNFPGLAIGGLSVGEPKPEMYRMLRAVGLMLPEHKPHYLMGVGTPEDLVYGVANGVDMFDCVMPTRNARNGWLFTRFGDIKIKNAKYKHDTHPLNESCTCYACTHFSRAYLHHLHRAGEILGAQLNTIHNLHFYQTIMAEMREAIEQGKFADWQEQFHENRGRGVD

SEQ ID NO: 54881 - protein, 371 aa, Eikenella sp.
  REGION 1..371: note = tr|A0A1A9S352|A0A1A9S352_9NEIS Queuine tRNA-ribosyltransferase OS=Eikenella sp. NML03-A-027; OX = 1795828 GN=tgt PE=3 SV=1
MLKFTLHKKDGHARRATIELNHGSIETPVFMPVGTYGSVKAMTPQNLHDINAQIILGNTYHLWLRPGLEVIEQFGGLHDFIGWNKPILTDSGGFQVFSLSDMRKLTEEGCTFKSPINGDKLFLSPEISMKIQTVLNSDIAMQLDECTPGEATREQAEKSLQMSLRWAERSKKAFEDLNNPNALFGIVQGAMYEDLREQSLRGLEQLNFPGLAIGGLSVGEPKPEMYRMLRAVGLMLPEHKPHYLMGVGTPEDLVYGVANGVDMFDCVMPTRNARNGWLFTRFGDIKIKNAKYKHDTHPLDESCTCYACTHFSRAYLHHLHRAGEILGAQLNTIHNLHFYQTIMAEMREAIEQGKFADWQEQFHENRGRGVD

SEQ ID NO: 54882 - protein, 371 aa, Eikenella sp.
  REGION 1..371: note = tr|A0A1F0FG70|A0A1F0FG70_9NEIS Queuine tRNA-ribosyltransferase OS=Eikenella sp. HMSC073A11; OX = 1739535 GN=tgt PE=3 SV=1
MLKFTLHKKDGHARRATIELNHGSIETPVFMPVGTYGSVKAMTPQNLHDINAQIILGNTYHLWLRPGLEVIEQFGGLHDFIGWNKPILTDSGGFQVFSLSNMRKLTEDGCTFKSPINGDKLFLSPEISMEIQTVLNSDIAMQLDECTPGEATREQAEKSLQMSLRWAERSKKAFEDLNNPNALFGIVQGAMYEDLREQSLRGLEQFDFPGLAIGGLSVGEPKPEMYRMLRAVGPILPEHKPHYLMGVGTPEDLVYGVAHGVDMFDCVMPTRNARNGWLFTRFGDIKIKNAKHKHDTRPLDESCTCYACTHFSRAYLHHLHRAGEILGAQLNTIHNLHFYQTIMVEMCEAIEQGKFADWQAQFHENRAKGTD

SEQ ID NO: 54883 - protein, 381 aa, unidentified
  source 1..381: note = Eilatimonas milleporae
  REGION 1..381: note = tr|A0A3M0CIV5|A0A3M0CIV5_9PROT Queuine tRNA-ribosyltransferase OS=Eilatimonas milleporae; OX = 911205 GN=tgt PE=3 SV=1
MTRPRFAFETHAVDGRARTGVLAMRRGDIRTPAFMPVGTAGTVKAMLPEHVRETGADILLGNTYHLMLRPTAERVHHLGGLHTFMNWPHPILTDSGGFQVMSLAGLRKLTEEGVTFQSHLDGRRILLTPERSMEIQRLLGSDIVMAFDECTPYPATRDEAAASMALSMRWARRSRDGFDAGGDHAAGSALFGIVQGGVYGDLRAQSAADLLDIGFDGYAVGGLAVGEGQELMFKVLDETVPHLPAGAPRYLMGVGKPDDIVGAVERGIDMFDCVLPTRSGRTGQAFTRRGPVNMKNARHKDDPRPIDEACGCPACRSYSRAYVHHLLKAGEILGAMLLTWHNLCFYQDLMQGLRDAIAAGRLAEHAADFRATYAAGDIDPV

SEQ ID NO: 54884 - protein, 377 aa, unidentified
  source 1..377: note = Eisenbergiella massiliensis
  REGION 1..377: note = tr|A0A3E3I223|A0A3E3I223_9FIRM Queuine tRNA-ribosyltransferase OS=Eisenbergiella massiliensis; OX = 1720294 GN=tgt PE=3 SV=1
MYRLLKQEGRAKRGEFETVHGTIQTPVFMNVGTVAAIKGAVSTQDLEQIKTQVELSNTYHLHVRPGDKIIKQLGGLHKFMSWNKPILTDSGGFQVFSLATLRKIKEEGVYFNSHIDGRKIFMGPEESMQIQSNLASTIAMAFDECAPAKAERAYVENSVARTTRWLERCKAEMARLNSQEDTINKNQLLFGINQGAIYTDIRIEHAKRISELNLDGYAVGGLAVGESHEEMYHVLDETVPYLPVDKPTYLMGVGTPANILEGVERGIDFFDCVYPSRNGRHGHLYTNHGKINLFNAKYELDDRPIEEGCECPACRRYTRAYIRHLLKAKEMLGMRLCVLHNLYFYNTMMEEIRAALDAGNFAAYKKTKLDNMSHPED

SEQ ID NO: 54885 - protein, 377 aa, unidentified
  source 1..377: note = Eisenbergiella massiliensis
  REGION 1..377: note = tr|A0A3E3HUY2|A0A3E3HUY2_9FIRM Queuine tRNA-ribosyltransferase OS=Eisenbergiella massiliensis; OX = 1720294 GN=tgt PE=3 SV=1
MYRLLKQEGRAKRGEFETVHGTIQTPVFMNVGTVAAIKGAVSTQDLEQIKTQVELSNTYHLHVRPGDKIIKQLGGLHKFMSWNKPILTDSGGFQVFSLATLRKIKEEGVYFNSHIDGRKIFMGPEESMQIQSNLASTIAMAFDECAPAKAERAYVENSVARTTRWLERCKAEMARLNSQEDTINKNQLLFGINQGAIYTDIRIEHAKRISELNLDGYAVGGLAVGESHEEMYHVLDETVPYLPVDKPTYLMGVGTPANILEGVERGIDFFDCVYPSRNGRHGHLYTNHGKINLFNAKYELDDRPIEEGCDCPACRRYTRAYIRHLLKAKEMLGMRLCVLHNLYFYNTMMEEIRAALDAGNFAAYKKTKLDNMSHPED

SEQ ID NO: 54886 - protein, 383 aa, unidentified
  source 1..383: note = Eisenbergiella sp.
  REGION 1..383: note = tr|A0A416I3U9|A0A416I3U9_9FIRM Queuine tRNA-ribosyltransferase OS=Eisenbergiella sp. OF01-20; OX = 2292348 GN=tgt PE=3 SV=1
MYRLLKQEGRAKRGELVTVHGTVQTPVFMNVGTVAAIKGAVSTGDLEQIKTQVQLSNTYHLHVRPGDKIVKQLGGLHKFMSWDKPILTDSGGFQVFSLSTLRKIKEEGVYFNSHIDGRKIFMGPEESMQIQSNLASTIAMAFDECAPAKAERGYVENSVACTTRWLERCKTEMSRLNGLADTINKKQLLFGINQGAIYADIRIEHAKRIRELDLDGYAVGGLAVGETHEEMYHILDETVPYLPADKPTYLMGVGTPANILEGVERGIDFFDCVYPSRNGRHGHLYTNQGKINLFNAKFELDDRPIEEGCGCPACSRYSRAYIRHLLKAKEMLGMRLCVLHNLYFYNTMMEEIRDSLDRGEFSSYKKAKLEGMSRRQSDSGLLP

SEQ ID NO: 54887 - protein, 379 aa, unidentified
  source 1..379: note = Eisenbergiella tayi
  REGION 1..379: note = tr|A0A1E3ANQ0|A0A1E3ANQ0_9FIRM Queuine tRNA-ribosyltransferase OS=Eisenbergiella tayi OX=1432052; GN = tgt PE=3 SV=1
MYRLLKQEGRAKRGELETVHGTVQTPVFMNVGTVAAIKGAVSTEDLEHIKTQVQLSNTYHLHVRPGDKIVKQLGGLHKFMSWNKPILTDSGGFQVFSLATLRKIKEEGVYFNSHIDGRKIFMGPEESMQIQSNLASTIAMAFDECAPAKAERDYVENSVARTTRWLERCKAEMSRLNNLDDTINKKQMLFGINQGAVYADIRIEHAKRIRELDLDGYAVGGLAVGETHEEMYHILDETVPYLPTDKPTYLMGVGTPANILEGVERGIDFFDCVYPSRNGRHGHLYTNHGKINLFNAKFELDERPIEEGCDCPACRRYSRAYIRHLLKAKEMLGMRLCVLHNLYFYNTMMEEIRDSLDRGEFASYKKAKLEGMSQPAGSM

SEQ ID NO: 54888 - protein, 377 aa, unidentified
  source 1..377: note = Eisenbergiella tayi
  REGION 1..377: note = tr|A0A1E3A6I3|A0A1E3A6I3_9FIRM Queuine tRNA-ribosyltransferase OS=Eisenbergiella tayi OX=1432052; GN = tgt PE=3 SV=1
MYRLLKQEGRAKRGELETVHGTVQTPVFMNVGTVAAIKGAVSTEDLEHIKTQVQLSNTYHLHVRPGDKIVKQLGGLHKFMSWNKPILTDSGGFQVFSLATLRKIKEEGVYFNSHIDGRKIFMGPEESMQIQSNLASTIAMAFDECAPAKAERDYVENSVARTTRWLERCKAEMSRLNNLDDTINKKQMLFGINQGAVYADIRIEHAKRIRELDLDGYAVGGLAVGETHEEMYHILDETVPYLPADKPTYLMGVGTPANILEGVERGIDFFDCVYPSRNGRHGHLYTNHGKINLFNAKFELDERPIEEGCDCPACRRYSRAYIRHLLKAKEMLGMRLCVLHNLYFYNTMMEEIRDALDRGEFTSYKKAKLEGMSQPAE

SEQ ID NO: 54889 - protein, 376 aa, Ekhidna lutea
  REGION 1..376: note = tr|A0A239JN86|A0A239JN86_9BACT Queuine tRNA-ribosyltransferase OS=Ekhidna lutea OX=447679 GN=tgt; PE = 3 SV=1
MQFDLQHTDAKSRARAGTITTDHGQIQTPIFMPVGTAGTVKAVHQRELKEDIKAQIILGNTYHLYMRPGLDIIEQAGGLHKFNGWDKPILTDSGGYQVYSLADNRKIVEEGVHFQSHKDGSRHFFTPESIMDIQRTIGADIIMAFDECTPYPCEYDYAEKSMHMTNRWLDRCINRFDETEGKYGYSQTLFPIVQGSVYKDLRTQSAEYIASKEREGNAIGGLSVGEPAEDMYEMTDHVCGILPTDKPRYLMGVGTPANILECIALGVDMFDCVMPTRNARNGMLFTTQGIINIRNEKWKDDFTPIDPELGGYASTFYTKGYLRHLITSNEILGAQIASIQNLTFYLWLVGEARKQILNDNFASWKETMVKKVSQRL

SEQ ID NO: 54890 - protein, 372 aa, Elioraea sp.
  REGION 1..372: note = tr|A0A541C5J1|A0A541C5J1_9PROT Queuine tRNA-ribosyltransferase OS=Elioraea sp. Yellowstone; OX = 2592070 GN=tgt PE=3 SV=1
MTVGFTLAATDGMARAGTLHTAHGDVPTPVFMPVGTAGTVKAMTAEAVRSTGARMVLGNTYHLMLRPGAERIAALGGLHRFMDWQGPILTDSGGFQVMSLSQLRRLDEDGVTFRSHLDGSEQRLTPERAVAIQHALGADVTMVLDECTPFPATEAEAAASMRLSMRWAARSRDAFVPRPGHGLFGIVQGSVYPALRAESVAALAAIGFDGYAVGGLAVGEGQETMFAMLDVTVPLLPTDRPRYLMGVGTPADIVGAVARGIDMFDCVIPTRSGRTGRAYTARGVLNLRNARFAGDPRPLDPDCACPACARHSRAYLHHLIKSGEMLGPMLLTWHNVAYYQDLMRGLRAAILDGRFAAHAAALAARWAQGDEA

SEQ ID NO: 54891 - protein, 378 aa, Elizabethkingia anophelis
  REGION 1..378: note = tr|A0A290MYA8|A0A290MYA8_9FLAO Queuine tRNA-ribosyltransferase OS=Elizabethkingia anophelis R26; OX = 1246994 GN=tgt PE=3 SV=1
MEKFFEVEQFSAKGKARAGVITTDHGKIQTPIFMPVGTVATVKTVHQRELKDDIKAQIILGNTYHLYLRPGMDVMQNAGGLHKFMNWNGPILTDSGGFQVFSLASSRKMTEEGVKFKSHIDGSYHFISPEVSMEIQRKIGADIFMAFDECTPYPCEYNQAKVSMELTHRWLKRCIEWTENNPEYYGHKQRLFPIVQGSVYSDLRKASAEVIAEAGAEGNAIGGLSVGEPEEEMYRITDEVTDILPKDKPRYLMGVGTPWNILESIGNGIDMMDCVMPTRNARNGMLFTWGGVINIKNEKWKNDFSPLDEFGTSYVDQEYTKAYVRHLFSAREYLGKQIASIHNLAFYLDLVKVAREHILAGDFYEWKDSIIPQLKSRM

SEQ ID NO: 54892 - protein, 378 aa, Elizabethkingia anophelis; identical to SEQ ID NO: 54891
  REGION 1..378: note = tr|X5KXZ0|X5KXZ0_9FLAO Queuine tRNA-ribosyltransferase OS=Elizabethkingia anophelis; OX = 1117645 GN=tgt PE=3 SV=1

SEQ ID NO: 54893 - protein, 378 aa, unidentified
  source 1..378: note = Elizabethkingia bruuniana
  REGION 1..378: note = tr|A0A5E8D399|A0A5E8D399_9FLAO Queuine tRNA-ribosyltransferase OS=Elizabethkingia bruuniana; OX = 1756149 GN=tgt PE=3 SV=1
MEKFFEVEQFSAKGKARAGVITTDHGKIQTPIFMPVGTVATVKTVHQRELRDDIKAQIILGNTYHLYLRPGMEVMQNAGGLHKFMNWNGPILTDSGGFQVFSLASSRKMTEEGVKFKSHIDGSYHFISPEVSMEIQRKIGADIFMAFDECTPYPCEYNQAKLSMELTHRWLKRCIEWTENNPEYYGHKQRLFPIVQGSVYSDLRKASAEVIAEAGAEGNAIGGLSVGEPEEEMYRITDEVTDILPKDKPRYLMGVGTPWNILESIGNGIDMMDCVMPTRNARNGMLFTWGGVINIKNEKWKNDFSPLDEFGTSYVDQEYTKAYVRHLFSAREYLGKQIASIHNLAFYLDLVKVAREHILAGDFYEWKDSIIPQLKSRM

SEQ ID NO: 54894 - protein, 378 aa, Elizabethkingia meningoseptica
  REGION 1..378: note = tr|A0A1T3IPE0|A0A1T3IPE0_ELIME Queuine tRNA-ribosyltransferase OS=Elizabethkingia meningoseptica; OX = 238 GN=tgt PE=3 SV=1
MEKFFEVEKFSTTGKARAGVITTDHGKIQTPIFMPVGTVATVKTVHQRELKEDIKAQIILGNTYHLYLRPGMEVMQAAGGLHKFMNWDRPILTDSGGFQVFSLASSRKMTEEGVKFKSHIDGSYHFISPEVSMEIQRNIGADIFMAFDECTPYPCEYNQAKQSMELTHRWLKRCIEWTESNQEYYGHKQRLFPIVQGSVYSDLRKISAEVIAEAGAEGNAIGGLSVGEPEEEMYRITDEVTDILPKDKPRYLMGVGTPWNILESIGNGIDMMDCVMPTRNARNGMLFTWNGVINIKNEKWKNDFSPLDEFGTSYVDQEYSKAYVRHLFSAREYLGKQIASIHNLAFYLDLVRVAREHILAGDFYEWKNSIIPQLKSRL

SEQ ID NO: 54895 - protein, 378 aa, Elizabethkingia meningoseptica; identical to SEQ ID NO: 54891
  REGION 1..378: note = tr|A0A376E9V0|A0A376E9V0_ELIME Queuine tRNA-ribosyltransferase OS=Elizabethkingia meningoseptica; OX = 238 GN=tgt PE=3 SV=1

SEQ ID NO: 54896 - protein, 378 aa, Elizabethkingia miricola; identical to SEQ ID NO: 54893
  REGION 1..378: note = tr|A0A0A2H3H0|A0A0A2H3H0_ELIMR Queuine tRNA-ribosyltransferase OS=Elizabethkingia miricola; OX = 172045 GN=tgt PE=3 SV=1

SEQ ID NO: 54897 - protein, 378 aa, Elizabethkingia miricola
  REGION 1..378: note = tr|A0A0W8EX77|A0A0W8EX77_ELIMR Queuine tRNA-ribosyltransferase OS=Elizabethkingia miricola; OX = 172045 GN=tgt PE=3 SV=1
MEKFFEVEQFSAKGKARAGVITTDHGKIQTPIFMPVGTVATVKTVHQRELRDDIKAQIILGNTYHLYLRPGMDVMQNAGGLHKFMNWELPILTDSGGFQVFSLASSRKMTEEGVKFKSHIDGSYHFISPEVSMEIQRKIGADIFMAFDECTPYPCEYNQAKLSMELTHRWLKRCIEWTENNPEYYGHKQRLFPIVQGSVYSDLRKASAEVIAEAGAEGNAIGGLSVGEPEEEMYRITDEVTDILPKDKPRYLMGVGTPWNILESIGNGIDMMDCVMPTRNARNGMLFTWGGVINIKNEKWKNDFSPLDEFGTSYVDQEYTKAYVRHLFSAREYLGKQIASIHNLAFYLDLVKVAREHILAGDFYEWKDSIIPQLKSRM

SEQ ID NO: 54898 - protein, 378 aa, unidentified; identical to SEQ ID NO: 54897
  source 1..378: note = Elizabethkingia occulta
  REGION 1..378: note = tr|A0A1T3MF13|A0A1T3MF13_9FLAO Queuine tRNA-ribosyltransferase OS=Elizabethkingia occulta; OX = 1867263 GN=tgt PE=3 SV=1

SEQ ID NO: 54899 - protein, 378 aa, Elizabethkingia sp.; identical to SEQ ID NO: 54897
  REGION 1..378: note = tr|A0A2T5RZ10|A0A2T5RZ10_9FLAO Queuine tRNA-ribosyltransferase OS=Elizabethkingia sp. YR191; OX = 2135666 GN=tgt PE=3 SV=1

SEQ ID NO: 54900 - protein, 378 aa, Elizabethkingia sp.
  REGION 1..378: note = tr|A0A5B7UF67|A0A5B7UF67_9FLAO Queuine tRNA-ribosyltransferase OS=Elizabethkingia sp. JS20170427COW OX=2583851 GN=tgt PE=3 SV=1
MDKFFEIEKFSDSGKARAGVITTDHGKIQTPIFMPVGTVASVKTVHQRELKEDIKAQIILGNTYHLYLRPGMDIMQQAGGLHKFMNWDRPILTDSGGYQVFSLSSSRKMNEEGVKFKSHIDGSYHMISPEKSMEIQRKIGADIFMAFDECTPFPCEYNLAKKSMELTHRWLKRCIDWTQNNPEIYGHKQHLFPIVQGSVYSDLRKISAEVISEAGASGNAIGGLSVGEPEEEMYRITNEVTDILPKDKPRYLMGVGTPWNILESIGLGVDMMDCVMPTRNARNGMLFTWNGVINIKNEKWKKDFSPLDPSGASYVDFEYSKAYVRHLFVAKEYLGKQIASLHNLAFYLDLVRVAREHILAGDFYEWKNSIIPQLKTRL

SEQ ID NO: 54901 - protein, 378 aa, unidentified
  source 1..378: note = Elizabethkingia ursingii
  REGION 1..378: note = tr|A0A1T3FIS0|A0A1T3FIS0_9FLAO Queuine tRNA-ribosyltransferase OS=Elizabethkingia ursingii; OX = 1756150 GN=tgt PE=3 SV=1
MEKFFEVEQFSAKGKARAGVITTDHGKIQTPIFMPVGTVATVKTVHQRELRDDIKAQIILGNTYHLYLRPGMDVMQNAGGLHKFMNWELPILTDSGGFQVFSLASSRKMTEEGVKFKSHIDGSYHFISPEISMEIQRKIGADIFMAFDECTPYPCEYNQAKLSMELTHRWLKRCIEWTENNPEYYGHKQRLFPIVQGSVYSDLRKASAEVIAEAGAEGNAIGGLSVGEPEEEMYRITDEVTDILPKDKPRYLMGVGTPWNILESIGNGIDMMDCVMPTRNARNGMLFTWGGVINIKNEKWKNDFSPLDEFGTSYVDQEYTKAYVRHLFSAREYLGKQIASIHNLAFYLDLVKVAREHILAGDFYEWKDSIIPQLKSRM

SEQ ID NO: 54902 - protein, 376 aa, unidentified
  source 1..376: note = Elstera cyanobacteriorum
  REGION 1..376: note = tr|A0A255XR35|A0A255XR35_9PROT Queuine tRNA-ribosyltransferase OS=Elstera cyanobacteriorum; OX = 2022747 GN=tgt PE=3 SV=1
MTQLRFELLNTSGRGRRGRIFTAHGTVETPTFMPVGTAATVKAMTVDAVKATGAQIVLGNTYHLMLRPTAERIARLGGLHKFMNWEGPILTDSGGYQVMSLTALRKMSEDGVTFRSHLDGSAHTLTPERSTEIQNLLDATITMAFDECTPYPATHEVAQKSMELSMRWAERSRKAFVARPGYGQFGIVQGSVYPDLRARSMDALIPMDFEGYAVGGLAVGEGQAIMFSVLDATTPRLPTDKPRYLMGVGKPSDLVGAVQRGIDMFDCVLPTRSGRTAQAFTRRGTVNIRNARHQDDPRPLDPDCACPACSNYSRAYLHHLARSGEILGAMLLTWHNIHYYQELMAGMRKAIEEDRLDAFAAEFHREQAAGDLEAWR

SEQ ID NO: 54903 - protein, 376 aa, unidentified
  source 1..376: note = Elstera litoralis
  REGION 1..376: note = tr|A0A0F3IWE5|A0A0F3IWE5_9PROT Queuine tRNA-ribosyltransferase OS=Elstera litoralis OX=552518; GN = tgt PE=3 SV=1
MTRLRFELLNTSGRGRRGRIFTAHGVVETPTFMPVGTAATVKAMTVDAVKATGAQIVLGNTYHLMLRPTAERIARLGGLHKFMNWEGPILTDSGGYQVMSLTALRKMSENGVTFRSHLDGSAHTLTPERSTEIQNLLDATITMAFDECTPYPATHEVAKQSMELSMRWAERSRKAFVARPGYGQFGIVQGSVYPDLRARSMDALIPMDFEGYAVGGLAVGEGQPIMFAVLDQTTPRLPVEKPRYLMGVGKPADLVGAVQRGIDMFDCVLPTRSGRTGQAFTRRGTVNIRNARHQDDPRPLDPDCTCPACSSYSRAYLHHLTRAGEILGAMLLTWHNIHYYQELMAGMRKAIEEDRLDSFAAEFHREQAAGDLAPWQ

SEQ ID NO: 54904 - protein, 374 aa, unidentified
  source 1..374: note = Elusimicrobia bacterium
  REGION 1..374: note = tr|A0A2M7RZ10|A0A2M7RZ10_9BACT Queuine tRNA-ribosyltransferase OS=Elusimicrobia bacterium CG_4_10_14_0_8_um_filter_37_32 OX=2014301 GN=tgt PE=3 SV=1
MEKFIIEKKCRDTKARVGRIITAYGEVETPVFMPVGTQGTVKAVSNSELRDIGVQLFISNTYHLYIRPGMDVIKNAGGLHKFINWDRAIITDSGGFQLHSLAKYCKVNNEGAEFKSHIDGSTHFFTPEKVIEIQNHLGSDIMMCFDECTSYPCSRDYAEQSMELTFRWAKRCKKFFLDTHPVDTEQQVFGIVQGSTYLDLRRTSVQELTDVGFDGYALGGLSVGEPKEIMDEIITEIVPLLPEEKPRYVMGVGTPEDIWTCIENGVDMFDCVIPTKNGRNGQALTSSGKLNLKNAVHKNDYSPLDSECPCEVCREYTKAYIHHLFRSGELLALRLLSLHNLYFLIQLVGSIKKSIRSGKFVSEKKKFFENYGKL

SEQ ID NO: 54905 - protein, 373 aa, unidentified
  source 1..373: note = Elusimicrobia bacterium
  REGION 1..373: note = tr|A0A5C7MW14|A0A5C7MW14_9BACT Queuine tRNA-ribosyltransferase OS=Elusimicrobia bacterium; OX = 2030800 GN=tgt PE=3 SV=1
MDFQLLATDNKARRGRLTFDRGTVETPAFMPVGTYGSVKAMTPRDIQEIGAEIILGNTFHLFLRPGLDIIGDFGGLHRFIGWDKPILTDSGGFQVFSLAHKRRISEQGVTFASPVDGSKVFLSPEESMRIQRVLDSDVVMIFDECTPYPASLEVARTSMELSLRWAKRSRESFDALENPNALFGIVQGSVYADLRKRSAEGLIEIGFDGYAIGGLAVGEPEHERNQTLEMVEPLLPAYEPRYLMGVGRPEDIVEAVRRGVDMFDCVMPTRNARNGFLFTRQGTLRIRNAKYARDTRVIEDGCTCYTCASGFSRAYLRHLDRCGEILASQLATIHNLHHYQTLMRELREATEAGRFDDYVRGFYAIRSADAQET

SEQ ID NO: 54906 - protein, 388 aa, Elusimicrobium minutum
  REGION 1..388: note = tr|B2KCE3|B2KCE3_ELUMP Queuine tRNA-ribosyltransferase OS=Elusimicrobium minutum (strain Pei191) OX=445932 GN=tgt PE=3 SV=1
MTKLISPFKILARDENSKARTGILYTKHGMVRTPVFMPVATQACVKALTEEDLNYVGAECLLSNTYHLYLRPGTEALKKLGGLHNFMRWNKSILTDSGGFQVHSLSHLRKITEDGIWFKSHHDGSKHFFSPESVIESEAAIGSDIWTCLDVLMPNSAHKADLRRALATTKLWAERAAAHYKKIVPEQNIQQNEDGSFSVGHSILFGIIQGSIYPDLREEAAKHMARQDVHGFCIGGLSVGETLQEMNTAVEATIPHLPEGKPRYLMGLGTPIEILECIERGVDMFDCVWPTRVARNGQAMTSEGKVNIKNNAHRLSEEPLDKNCDCWVCKRYTRAYLSHLYRAGELTSHRLISIHNIRFLIKTMERVRAAILDGTFRQLKKEIIEKYK

SEQ ID NO: 54907 - protein, 389 aa, Elusimicrobium sp.
  REGION 1..389: note = tr|A0A1Y4DG35|A0A1Y4DG35_9BACT Queuine tRNA-ribosyltransferase OS=Elusimicrobium sp. An273; OX = 1965617 GN=tgt PE=3 SV=1
MNSPFHILSKDPHSKARTGILYTKHGAVHTPVFMPVATQACVKALTDEDLKNAGAECLLSNTYHLYLRPTTPILQQMGGIHKFMHWDGSVLTDSGGFQVYSLSKFRKIKEEGVTFQSHHDGSKHLFTPENVIQFESEIGSDIWTMLDVCIHAKDPSKHDARQALNLTKRWAERAAKAYEQTVPQQHITQRADGSFEVGNSLLFGIIQGAIFPDLRKEAAQHMASLPTHGYCIGGLSLGETLEQMNESVLAVTDNLPENKPRYFMGLGTPVEILNSIERGVDMFDCVWPTRVARNGMAMTSTGRVNIKNAEYRTQDIPLDPECDCYTCRRYSRAYLCHLYRSAELTSHRLMSIHNIRFLIHLMERARQAIANGTFLAFKDEVIRKYQNFK

SEQ ID NO: 54908 - protein, 384 aa, unidentified
  source 1..384: note = Emcibacter congregatus
  REGION 1..384: note = tr|A0A2G4YNA1|A0A2G4YNA1_9PROT Queuine tRNA-ribosyltransferase OS=Emcibacter congregatus; OX = 2043170 GN=tgt PE=3 SV=1
MTETNTPFGMTITATDGNARTGVIQTCRGEIRTPAFMPVGTAATVKTLKPETVRETGADILLGNTYHLMLRPTAERINRLGGLHKFMNWQRPILTDSGGFQVMSLAKLRKITEEGVAFQSHIDGKKHMLTPERSMEIQRLLGSNIVMAFDECTPFPATEKETEKSMMMSMRWAKRSYDAFHDGSEHAEKNALFGIVQGGVYEHLRRHSVEALKEIDCEGYAVGGLAVGEGQEVMFEVLDYTMPMMLKNKPRYLMGVGKPDDIVGAVERGIDMFDCVMPSRSGRTGQAFTRRGTLNMKNARHVDDPRPIDEDCGCSACTNYSRAYISHLFRCGEVLGLMLLTEHNLTYYQDLMAGLRGAIAAEKLQIFIKDFHEKRANGDVEPIG

SEQ ID NO: 54909 - protein, 380 aa, unidentified
  source 1..380: note = Emcibacter nanhaiensis
  REGION 1..380: note = tr|A0A501PSI9|A0A501PSI9_9PROT Queuine tRNA-ribosyltransferase OS=Emcibacter nanhaiensis; OX = 1505037 GN=tgt PE=3 SV=1
MKDNFKLKIEATDGNARTGVLKTWRGDIRTPAFMPVGTAATVKAMKPETVRETGADILLGNTYHLMLRPTAERIHNLGGLHKFMNWERPILTDSGGFQVMSLAQLRKITEEGVAFQSHIDGSKHMLSPERSMEIQRLLGSNIVMAFDECTPYPATKQETADSMRLSMRWARRSFDAFHNGSVHAAKNALFGIVQGGVFEDLRLESIDALRDMGFHGLAVGGLAVGEGQEVMFEVLDYTMPKMPTDVPRYLMGVGKPDDIVGAVERGIDMFDCVLPTRSGRTAQGFTRRGTVNLKNARHTDDPRPLDEECGCDACSKYSRAYLSHLIRSGEILGAMLLTEHNLTYFQDLMQGLRDAIAAGKLSDFVADFHARRALGDIEPL

SEQ ID NO: 54910 - protein, 373 aa, unidentified
  source 1..373: note = Emergencia timonensis
  REGION 1..373: note = tr|A0A415E3Z1|A0A415E3Z1_9FIRM Queuine tRNA-ribosyltransferase OS=Emergencia timonensis; OX = 1776384 GN=tgt PE=3 SV=1
MKHAVTYELLKTDSRTKARRGIVHTPHGDIQTPVFMPVGTQATVKAMRPEQVAEMGANIILSNTYHLYLRPGHELIREAGGLHKFMNWDKAILTDSGGFQVFSLGKLRKITEEGVKFQSHIDGSRHMLTPEKAIEIQNALGSDIMMAFDECAPYPADRKYVKDSLERTTRWLARCKAAHKDVERQSLFGIMQGGMYKDLRRQSAEEIVELDLPGYAIGGLSVGEPKDLMLEVLDDCVDYLPADKARYLMGVGSPDYLFEGVERGVDMFDCVLPTRIARHGLAMTSHGRVNIKNAKFEKDFAPLDAECDCYTCKNYSKAYLRHLFKADEMLSAMLLSNHNLHFLLKMMENIRTAIEEDRFLEFKKEFYDKYGKF

SEQ ID NO: 54911 - protein, 376 aa, Empedobacter brevis
  REGION 1..376: note = tr|A0A511NIZ9|A0A511NIZ9_9FLAO Queuine tRNA-ribosyltransferase OS=Empedobacter brevis NBRC 14943 = ATCC 43319 OX=1218108 GN=tgt PE=3 SV=1
MKFSIDKKDEFSKARAGVVETDHGKIQTPIFMPVGTVGTVKAVHQRELEEDIKAQIILGNTYHLYLRPGTDILHKAGGLHQFINWQKPILTDSGGFQVYSLATSRKKSEEGVRFKSHIDGSYHMFTPEKSMEIQRYIGADIFMAFDELTGIPAKYHDAKRAMHVTHRWLERCRTWLNNNPEYYGHKQTLFPIVQGNDFKDLRQESAKYIADFGAEGNAIGGLSVGEPEPVMYEMTDIVTEILPQDKPRYLMGVGTPWNIIECIALGVDMFDCVMPTRNARNAMLFTWNGVMNMKNAKWKDCFEPLDENGTSYVDSYYTKAYVRHLFNANEALGKQIASVHNLAFYLDLVRVAREHILAGDFAQWKEQIVPQLKQRL

SEQ ID NO: 54912 - protein, 376 aa, Empedobacter brevis
  REGION 1..376: note = tr|A0A3P6MH58|A0A3P6MH58_9FLAO Queuine tRNA-ribosyltransferase OS=Empedobacter brevis OX=247; GN = tgt PE=3 SV=1
MKFSIDKKDEFSKARAGVVETDHGKIQTPIFMPVGTVGTVKSVHQRELEEDIKAQIILGNTYHLYLRPGTDILHKAGGLHQFMNWQKPILTDSGGFQVYSLSTSRKKSEEGVRFKSHIDGSYHMFTPEKSMEIQRFIGGDIFMAFDELTGIPAKYHDAKRAMHVTHRWLERCRTWLDYNPEYYGHKQTLFPIVQGNDFKDLRQESAKYISDFGAEGNAIGGLSVGEPEPIMYEMTDIVTEILPQDKPRYLMGVGTPWNIIECIALGVDMFDCVMPTRNARNGMLFTWNGVMNMKNAKWKDCFEPLDESGTSYVDSFYSKSYVRHLFNANESLGKQIASIHNLAFYLDLVRVAREHILAGDFAQWKEQIVPQLKKRL

SEQ ID NO: 54913 - protein, 376 aa, unidentified
  source 1..376: note = Empedobacter falsenii
  REGION 1..376: note = tr|A0A376G2G2|A0A376G2G2_9FLAO Queuine tRNA-ribosyltransferase OS=Empedobacter falsenii OX=343874; GN = tgt PE=3 SV=1
MKFSIDKKDEFSKARAGVVETDHGKIETPIFMPVGTVGTVKSVHQRELEEDIKAQIILGNTYHLYLRPGTDILHRAGGLHKFMNWQKPILTDSGGFQVYSLATSRKKSEEGVRFKSHIDGSYHMFTPEKSMEIQRFIGADIFMAFDELTGIPAKYHDAKRAMHVTHRWLERCRTWLNNNPEYYDHKQTLFPIVQGNDFKDLRQESAKYIADFGAEGNAIGGLSVGEPEPVMYEMTDIVTEILPQDKPRYLMGVGTPWNIIECIALGVDMFDCVMPTRNARNAMLFTWNGVMNMKNAKWKDCFEPLDENGTSYVDSYYTKAYVRHLFNANEALGKQIASVHNLAFYLDLVRVARQHILAGDFAQWKEQIVPQLKQRL

SEQ ID NO: 54914 - protein, 376 aa, unidentified
  source 1..376: note = Empedobacter falsenii
  REGION 1..376: note = tr|A0A3R8SMB3|A0A3R8SMB3_9FLAO Queuine tRNA-ribosyltransferase OS=Empedobacter falsenii OX=343874; GN = tgt PE=3 SV=1
MKFSIDKKDEFSKARAGVVETDHGKIETPIFMPVGTVGTVKSVHQRELEEDIKAQIILGNTYHLYLRPGTDILHRAGGLHKFMNWQKPILTDSGGFQVYSLATSRKKSEEGVRFKSHIDGSYHMFTPEKSMEIQRYIGADIFMAFDELTGIPAKYHDAKRAMHVTHRWLERCRTWLNNNPEYYDHKQTLFPIVQGNDFKDLRQESAKYIADFGAEGNAIGGLSVGEPEPVMYEMTDIVTEILPQDKPRYLMGVGTPWNIIECIALGVDMFDCVMPTRNARNAMLFTWNGVMNMKNAKWKDCFEPLDENGTSYVDSYYTKAYVRHLFNANEALGKQIASVHNLAFYLDLVRVARQHILAGDFAQWKEQIVPQLKQRL

SEQ ID NO: 54915 - protein, 379 aa, unidentified
  source 1..379: note = Empedobacter haloabium
  REGION 1..379: note = tr|A0A5C7BGT3|A0A5C7BGT3_9FLAO Queuine tRNA-ribosyltransferase OS=Empedobacter haloabium; OX = 592317 GN=tgt PE=3 SV=1
MLEFKLHKTDTTGLTKARRGTLKLNHGTVETPIFMPVGTYGSVKAMSPLELKEIGAQIILGNTFHLWLRPGNDVMSKFGGLHGFMGWDKPILTDSGGFQVFSLGEMRKITEEGVHFNSPINGDKLFLSPEISMQIQRVLNSDIVMQFDECTPYEINGRPATLDEAAKSMRMSLRWAQRSMNEFKAGENPNALFGIVQGGMFESLRDESLEGLEKIDFPGLAIGGLSVGEPKEDMLRVLEHVGPRLPANKPHYLMGVGTPEDLVAGVSNGVDMFDCVMPTRNARNGWIFTRFGDIKIKNARYKDDKEPLDPTCSCYACRNFSRAYLHHLHRAQEILGARLNTIHNLHYYLDIMRQMREALDEDRFPDWVRQFHADRARGV

SEQ ID NO: 54916 - protein, 376 aa, Empedobacter sp.; identical to SEQ ID NO: 54914
  REGION 1..376: note = tr|A0A4Z1B1W6|A0A4Z1B1W6_9FLAO Queuine tRNA-ribosyltransferase OS=Empedobacter sp. MRS2; OX = 2491114 GN=tgt PE=3 SV=1

SEQ ID NO: 54917 - protein, 376 aa, Emticicia sp.
  REGION 1..376: note = tr|A0A4Q5LTP9|A0A4Q5LTP9_9BACT Queuine tRNA-ribosyltransferase OS=Emticicia sp. 17J42-9; OX = 2492393 GN=tgt PE=3 SV=1
MKYELQKTDSASKARAGKITTDHGEILTPIFMPVGTAGTVKAVHQRELENDIHAQIILGNTYHLYLRPGLDILERAGGLHKFNGWTKPILTDSGGYQVFSLKDIRKISEEGVKFQSHIDGSRHLFTPESVMDIQRVIGADIIMAFDECAPYPCDYNYAKKSMEMTHRWLKRCCDRFDATEGLYGYSQTLFPIVQGSVYKDLRIQSAEFIAGQNREGNAIGGLAVGEPAEKMYETIDYVNDILPQDKPRYLMGVGTPENILESIALGIDMFDCVMPTRNARNGMLFTTQGIINIRNEKWKDDYSPIDENLGGYTSTFYSKAYLRHLVKCDEILAAQVASIHNLTFYLWLVGQAREHILAGDFVEWKKVIVKKLMERL

SEQ ID NO: 54918 - protein, 376 aa, Emticicia sp.
  REGION 1..376: note = tr|A0A2N4XEZ4|A0A2N4XEZ4_9BACT Queuine tRNA-ribosyltransferase OS=Emticicia sp. TH156 OX=2067454; GN = tgt PE=3 SV=1
MKYELQKTDSGSKARAGKITTDHGEILTPIFMPVGTAGTVKAVHQRELENDIKAQIILGNTYHLYLRPGLDILQRAGGLHKFNGWNHPILTDSGGYQVFSLKDIRKITEEGVKFQSHIDGSKHLFTPESVMDIQRVIGADIIMAFDECAPYPCDYNYAKKSMEMTHRWLKRCCDRFDATEGLYGYSQTLFPIVQGSVYKDLRIQSAEFIANQNREGNAIGGLAVGEPAEKMYETIDYVTDILPKDKPRYLMGVGTPENILESIALGIDMFDCVMPTRNARNGMLFTTQGIINIKNEKWKDDYSPIDEHLGGHVSTFYSKAYLRHLVKCDEILAAQIASVHNLTFYLWLVGQAREHILAGDFTEWKNAMVKQVMQRL

SEQ ID NO: 54919 - protein, 379 aa, unidentified
  source 1..379: note = Endomicrobium proavitum
  REGION 1..379: note = tr|A0A0G3WJ61|A0A0G3WJ61_9BACT Queuine tRNA-ribosyltransferase OS=Endomicrobium proavitum; OX = 1408281 GN=tgt PE=3 SV=1
MAEVGSYKLIKKSSQCKARLGQVYTTRGVIDTPVFMPVGTQGTVKGVPNEDLQNSGAQIILANSYHLYLRPGTEIIKKAGGIQKFNSWNRPMLTDSGGFQIFSLNEIRKLTEDGAKFQSHIDGSSHFFSPEKSMQIQKDIGADIIMCFDECTPYPATYKYAKNSMELSLRWAKRCREEFYKDDACKTQSLFGIIQGSTYEDLRKISAQEMTEMNFTGYAIGGVSVGEPKEEKEKVIETVEPYLPENKARYLMGVGMPEDLWEGVSRGIDMFDCVIPTRNGRNGQVFTSMGKINIRNAEFKEDFTSLDPQCNCPTCKGYSKAYLNHLVRAQESLYLGLLSLHNIYFMINLMSKIRKSLENDTFLEAKKEFFENYYSRGTR

SEQ ID NO: 54920 - protein, 364 aa, Riftia pachyptila
  REGION 1..364: note = tr|G2DET6|G2DET6_9GAMM Queuine tRNA-ribosyltransferase OS=endosymbiont of Riftia pachyptila (vent Ph05) OX=1048808 GN=tgt PE=3 SV=1
MYFEKIKTDGAARRGRLTFERGTIETPAFMPVGTYGTVKAMTPEELQQSGAEIILGNTFHLMLRPGTDVIRKHGDLHGFTHWERPILTDSGGFQVFSLGKMRKITEQGVAFRSPVDGSKVFMGPEESMQVQRELGSDIVMIFDECTPYPATQEEARASMELSLRWAERSKVAHGDNPAALFGIVQGGVYESLRQASLEGLMAIGFDGYAVGGLSVGEPPEDRWRILDFLADKLPADKPHYLMGVGTPEDIVGAVQRGIDMFDCVMPTRNARNGHLFTHQGVVRIRNAVHQYDEGPLDPLCDCYTCRNYSRAYLRHLQRCNEILGHRLNTIHNLHYYQSLMRGLREAIEAGRLETFVAEFYRMRE

SEQ ID NO: 54921 - protein, 372 aa, Acanthamoeba sp.
  REGION 1..372: note = tr|A0A075MHZ7|A0A075MHZ7_9PROT Queuine tRNA-ribosyltransferase OS=endosymbiont of Acanthamoeba sp. UWC8 OX=86106 GN=tgt PE=3 SV=1
MQKIGNLFMSLKYKVLAKDGNARLGVLETAHGEVRTPAFMPVGTAATVKAMFPEDIKTTGADIILGNTYHLMLRGAAERIHKFGGLRKFMNWHGPILTDSGGFQVLSLTKLRKITEEGVTFRSHLDGTKYELTPERSMEIQYFLGSNITMILDECPPYPISHMKAKKSMELSLRWAERSKAAFIKREGHGIFGIVQGSVFEDLRARSAQTLVDMDFDGYALGGVAIGEMQELMFQTLEFTVPLLPQEKPRYLMGIGKPKDIVGSVMRGVDMFDCVLPSRSGRNGQAFVRGGTINIKNAKYSEDTKPLDDKCECYTCKNYSRAYLYHLVRCKEILGAMLVTMHNLTYYQDLMQALRKAIEEKRLSSFDSQGFI

SEQ ID NO: 54922 - protein, 363 aa, unidentified
  source 1..363: note = Trimyema compressum
  REGION 1..363: note = tr|A0A191HUV4|A0A191HUV4_9FIRM Queuine tRNA-ribosyltransferase OS=endosymbiont 'TC1' of Trimyema compressum OX=243899 GN=tgt PE=3 SV=1
MSNNSRARRGRVSTTHGTIETPVFMPVGTCATVKAMTVEEMKTIGAEIILSNTYHLYLRPGHELIKKAGGLHKFMNWDRAILTDSGGFQVFSLDNLNKIAEDGVCFSSHIDGSKHFLTPEKSMEIQMDLGSDIAMAFDECTTYPADRQYTIDALERTTRWSKRCKEFHHHEYQGLFGIIQGGMYPELRKRSAEEIIAFDFDGYAIGGLSVGEPRDLMIEMLNETAPYLPYNKPRYIMGVGTPDYLIEGVRAGIDMFDCVLPTRLGRNGGVMSHNGYFTIRNAKYFDDFSPLDPECDCYVCQNYTRSYIRHLIKSNEILGFRLLTWHNLYFLIQLMENIRKSIDEDCFETYAHEFLKKYYKNLY

SEQ ID NO: 54923 - protein, 377 aa, unidentified
  source 1..377: note = Endozoicomonadaceae bacterium
  REGION 1..377: note = tr|A0A3S3SD76|A0A3S3SD76_9GAMM Queuine tRNA-ribosyltransferase OS=Endozoicomonadaceae bacterium GTF-13 OX=2506149 GN=tgt PE=3 SV=1
MSRECFMTFEQLGSDGRARRGRLTFPRGVVETPAFMPVGTYGTVKGMLPRDIEEIGAQIILGNTFHLMLRPGTEIIQSHGDLHDFNGWQGPILTDSGGFQVFSLGDLRKITEEGVSFRSPVDGAKVFLSPEVSMQVQRELGSDIVMIFDECTPYPADEKTAETSMELSLRWAKRSKEAHGDNPSALFGIIQGGMHQHLRERSLAGLNEIGFDGYAIGGLSVGEPKEEMMKVLDGVTPLMPEDRPRYLMGVGTPEDIVESVRRGVDMFDCVMPTRNARNGHLFTSTGVVRIRNAPHKRDPSTLDAECDCYTCRNFSRAYLHHLDKCNEILGSQLNTIHNLRFYQRLMAGLRDAIEQGKLSDFVDEFYRKRGLETPPLD

SEQ ID NO: 54924 - protein, 371 aa, Endozoicomonas elysicola
  REGION 1..371: note = tr|A0A081KBJ8|A0A081KBJ8_9GAMM Queuine tRNA-ribosyltransferase OS=Endozoicomonas elysicola; OX = 305900 GN=tgt PE=3 SV=1
MKFDQLATDGKARRGRLTFPRGTVETPCFMPVGTYGTVKGMLPRDIKEIGAEIILGNTFHLMLRPGTEIIQKHGDLHDFNQWHGPILTDSGGFQVFSLGKLRKITEEGVSFQSPVDGSKVFLNPEISMQVQKELGSDIVMIFDECTPGDATEEQARISMELSLRWAARSKAAHGDSPSALFGIIQGGMFEELRDVSLAGLAEVGFDGYAIGGLSVGESKEDMMRILSHITHKIPEDHPRYLMGVGKPEDIVEAVRRGVDMFDCVMPTRNARNGHLFVDEGVIKIRNSAHKKDERPLEAHCDCYTCQNFSRSYLHHLDKCGEILGSMLNTIHNLRYYQRVMEGLRSAIEQGQLDEFVVEFYRKRGQDVPDWG

SEQ ID NO: 54925 - protein, 378 aa, Endozoicomonas montiporae
  REGION 1..378: note = tr|A0A081NBA6|A0A081NBA6_9GAMM Queuine tRNA-ribosyltransferase OS=Endozoicomonas montiporae; OX = 1027273 GN=tgt PE=3 SV=1
MKREECFMQFERLATDGKARRGRLTFPRGTVETPCFMPVGTYGTVKGMMPDDIKKIGAEIILGNTFHLMLRPGTEVIKEHGDLHDFNQWEGPILTDSGGFQVFSLGKMRKITEEGVSFRSPVDGSKVFLSPEISMQVQKDLGSDIVMIFDECTDGEATEKEAEESMELSLRWAARSRKAHGDSPSALFGIIQGGMFEHLRDRSMNALVDIGFDGYAIGGLSVGESKEDMMRILSHTAHQIPDDYPRYLMGVGKPEDIVEAVRRGVDMFDCVMPTRNARNGHLFTESGVIKIRNAVHKRDTSPLEENCDCYTCRNFSRAYLHHLDKCGEILGSMLNTIHNLRYYQRVMAGLREAIEQGKLDAFVNEFYQKRGQPVPPLD

SEQ ID NO: 54926 - protein, 378 aa, Endozoicomonas montiporae; identical to SEQ ID NO: 54925
  REGION 1..378: note = tr|A0A142BB83|A0A142BB83_9GAMM Queuine tRNA-ribosyltransferase OS=Endozoicomonas montiporae CL-33; OX = 570277 GN=tgt PE=3 SV=1

SEQ ID NO: 54927 - protein, 370 aa, unidentified
  source 1..370: note = Endozoicomonas numazuensis
  REGION 1..370: note = tr|A0A081N0Z1|A0A081N0Z1_9GAMM Queuine tRNA-ribosyltransferase OS=Endozoicomonas numazuensis; OX = 1137799 GN=tgt PE=3 SV=1
MQFEELATDGEARRGRLTFPRGTVETPCFMPVGTYGTVKGMMPKDIEDTGAEIILGNTFHLMLRPGTEIIQEHGDLHDFNQWQGPILTDSGGFQVFSLGKLRKITEEGVSFKSPVDGSPVFLSPEVSMQVQRELGSDIVMIFDECTDGEATEKEAEDSMELSLRWAKRSKEAHGDNPSALFGIIQGGMFEHLRDRSLEGLAEIGFDGYAIGGLSVGETKEDMMRILSHITNKVPQGYPRYLMGVGKPEDIVEAVRRGVDMFDCVMPTRNARNGHLFVDEGVIKIRNAVHKRDASPLEESCDCYTCQNFSRSYLHHLDKCGEILGCMLNTIHNLRYYQRVMAGLRDAIEQGKLDDFVEEFYRKRGLPVPAL

SEQ ID NO: 54928 - protein, 380 aa, Endozoicomonas sp.
  REGION 1..380: note = tr|A0A1D2XA84|A0A1D2XA84_9GAMM Queuine tRNA-ribosyltransferase OS=Endozoicomonas sp. (ex Bugula neritina AB1) OX=1868284 GN=tgt PE=3 SV=1
MTRECFMKFEQLGSDGHARRGRLTFPRGTVETPCFMPVGTYGTVKGMLPRDIKEIGAEIILGNTFHLMLRPGTEIIKEHGDLHDFNQWQGPILTDSGGFQVFSLGKLRKITEEGVSFQSPVDGSKVFLSPEISMQVQKDLGSDIVMIFDECTAGDAGEEEARVSMEMSLRWAARSKAAHGDSPSALFGIIQGGMFEGLRDASLKGLSEVGFDGYAIGGLSVGESKEDMMRILSHITPQIPEGHPRYLMGVGKPEDIVEAVRRGVDMFDCVMPTRNARNGHLFVDEGVIKIRNAVHKKDNNPLEAHCDCYTCQNFSRAYLHHLDKCGEILGSMLNTIHNLRYYQRVMAGLRGAIEQGKLDDFVAEFYQKRGQEVPDWGSIA

SEQ ID NO: 54929 - protein, 377 aa, Endozoicomonas sp.; identical to SEQ ID NO: 54923
  REGION 1..377: note = tr|A0A3P3VV41|A0A3P3VV41_9GAMM Queuine tRNA-ribosyltransferase OS=Endozoicomonas sp. GTF13; OX = 2528527 GN=tgt PE=3 SV=1

SEQ ID NO: 54930 - protein, 374 aa, Enhydrobacter aerosaccus
  REGION 1..374: note = tr|A0A1T4S7A9|A0A1T4S7A9_9PROT Queuine tRNA-ribosyltransferase OS=Enhydrobacter aerosaccus; OX = 225324 GN=tgt PE=3 SV=1
MSLSFELLATDGLARRGRIATAHGTVETPAFMPVGTAGTVKAMMPQSVAETGAEIVLGNTYHLMLRPGAERVAALGGLHKFMNWPRAILTDSGGFQVMSLKELRKIDRDGVTFRSPIDGIQHRLTPERSIQIQHLLDADITMSFDECTPWPVEKEDAARSMRLSMDWAGRGKHAFVDRPGYGLFGIVQGSTFPDLREESAKALTAIGFDGYAVGGLAVGEGQELMFQTLETTVPLLPADRPRYLMGVGRPSDIVGAVRRGIDMFDCVMPTRAGRTAQAFTRRGELNLRNARHRDDPRPIDERCGCPACRHHSRAYLHHLIRSEEILGPMLLTWHNLHYYQDIMRGLRAAIETQSFGHWIAAFEQEQGRGDLPPL

SEQ ID NO: 54931 - protein, 382 aa, Enhydrobacter sp.
  REGION 1..382: note = tr|A0A5C8PGP9|A0A5C8PGP9_9PROT Queuine tRNA-ribosyltransferase OS=Enhydrobacter sp. CC-CFT640; OX = 2586908 GN=tgt PE=3 SV=1
MTLAFSLLANTHAARRGRLVTAHGTVETPAFMPVGTAATVKAMLPASVAATGAQIVLGNTYHLMLRPGAERIERLGGLHRFMNWPGPILTDSGGFQVMSLSKLRQIDAGGVDFQSHIDGSRQRLTPAISIEIQRQLGADITMSFDECTPFPATHAQAATSMRLSMRWAERGRQAFTARPGHGLFGIVQGSVYEDLRLESARTLTEIGFDGYAIGGLAVGEGQEAMFRTLDVTVPALPADRPRYLMGVGRPADIVGAVQRGIDMFDCVMPTRAGRTAQAFTWRGELNLRNARHRDDPRPLMEGCACPACTSHSRAYLHHLIKSDEILGAMLLTWHNLQFYQDVMRGLRTAIEAGTLADWAAWFHEEHAKGDIAALPDADGPAT

SEQ ID NO: 54932 - protein, 378 aa, Enhydrobacter sp.
  REGION 1..378: note = tr|A0A1V2GNR8|A0A1V2GNR8_9PROT Queuine tRNA-ribosyltransferase OS=Enhydrobacter sp. H5 OX=1907940; GN = tgt PE=3 SV=1
MQFTLHKNATGESRARRGTVHLAHGDVQTPAFMPVGTYGTVKGMLPRDIHEIGAEIILGNTFHLWLRPTTDVIDKFGGLHDFIGWNKPILTDSGGFQVFSLGAMRKIKEEGVHFRSPIDGAKVFLSPEISMQIQYSLNSDIVMQFDECTPYPATPSEADTSLELSLRWGERCKNEHEKLGNKNALFGIIQGSMYRNLREKSLEGLLNIGFDGYAIGGLSVGEPKEEMMAVLDYLPDDMPADKPRYLMGVGKPEDIVEAVRRGVDMFDCVMPTRNARNGHYFTTFGAVKIKNAVHRFDQSPLDSECDCYTCQNFSRAYLHHLFKCNEMLSAQLGTIHNLRYYQRLMADIRQSIEDDKFDAFVDTFYQQQNLPKPDLHLT

SEQ ID NO: 54933 - protein, 421 aa, Enhygromyxa salina
  REGION 1..421: note = tr|A0A2S9YQY3|A0A2S9YQY3_9DELT Queuine tRNA-ribosyltransferase OS=Enhygromyxa salina OX=215803; GN = tgt PE=3 SV=1
MTLRCDPCEGLASFAELSSDLASGLASDPDPGSATSPRPGTLELVAEDPASPARSCRLWTAHGPVETPCFMPVGTYGAVKGVMPEELRSVGSQVVLANAYHLTHRPGPERVREVGGIHAFMRWPGPILTDSGGYQVFSLRGLQKIDDAGVDYRTHFDGTPARMSPRSVLEAEAAIGPDICMILDHCPPGDGDPALVREAMDRTTKWAREAAQIRREILRPEQLCFAIVQGGTDLALRREHLETLSPLDFDGFALGGLSVGEPIPLMHATLAEIAPQMPRDKPRYVMGIGTAADLLAAIRAGVDMFDCVIPSRHARNGQLISFLGRFNIRNGRFRDDDRPVDPGCGCMVCARFSRAYLRHLHAHTDPLYVRLATMHNLYFFHEWVAVLRRAIRAGTFTAVAAALEQVLESQGQPGAESRADW

SEQ ID NO: 54934 - protein, 421 aa, Enhygromyxa salina
  REGION 1..421: note = tr|A0A0C2D4S0|A0A0C2D4S0_9DELT Queuine tRNA-ribosyltransferase OS=Enhygromyxa salina OX=215803; GN = tgt PE=3 SV=1
MTTTSDHPPQIRCDPAEGLVPFADLLAEPGPRSPGDPQPGTLQIVAEDPSGPARSCRLWTGHGPVETPCFMPVGTYGAVKGVLPEELRAVGSQVVLANAYHLTHRPGPERVREVGGIHAFMRWPGPILTDSGGYQVFSLRGLQKIDDAGVDYRTHFDGTPARMSPRSVLEGEAAIGPDICMILDHCPPGDGDAAIVREAMDRTTKWAREAAQMRRDILRPDQLCFAIVQGGTDLALRREHLETLSALDFDGFALGGLSVGEPIPLMHATLAEIAPQMPRDKPRYVMGIGTAADLLAAIRAGVDMFDCVIPSRHARNGQLISFLGRFNIRNGRFRDDDRPVDPGCGCMVCARFSRSYLRHLHAHTDPLYVRLATMHNLYFFHEWVAVLRRAIRAGTFTAVAAALEQVLEAQAQPGDAAHADW

SEQ ID NO: 54935 - protein, 379 aa, unidentified
  source 1..379: note = Enorma massiliensis
  REGION 1..379: note = tr|A0A1Y3U3M0|A0A1Y3U3M0_9ACTN Queuine tRNA-ribosyltransferase OS=Enorma massiliensis OX=1472761; GN = tgt PE=3 SV=1
MDQSLFTYDIIAEDPKTHARAGVLHTPHGDIETPIFMPVGTRATVKGVPWETVKDLGAQIVLSNTYHLAMRPGADLIDEMGGLHSFMNWHGPILTDSGGFQIFSHSDAVKLSDKGVRFIATDYDGSHVFWSPEDNMAIAQKLGSDICMQLDQCIGYPAERRDVQRAMDLSSRWAERCYKAHTRPDQALFGIVQGGMHLDLRIKSLERLEEMGSFPGYGIGGYSVGEDHETMFESLEPLAAEYMPKGKPRYLMGVGNPTTLVRGVACGIDMFDCVLPTRTGRMGTAFSSEGRLNFRNARFAHDGGPVDPQCTCPVCTGGYTRAHIRHMVTVKEMLGGILLSMHNIYYLLDLMRRARQAIIDGTYSEFVNDWMASPAAKDY

SEQ ID NO: 54936 - protein, 376 aa, Ensifer adhaerens
  REGION 1..376: note = tr|A0A285XK66|A0A285XK66_ENSAD Queuine tRNA-ribosyltransferase OS=Ensifer adhaerens OX=106592; GN = tgt PE=3 SV=1
MSQAFQFQLKNTDGKARLGQISMPRGEIRTPAFMPVGTVGTVKAMYLDQVRDLGADIILGNTYHLMLRPGAERVARLGGLHNLIRWEKPILTDSGGFQVMSLSGLRKLDEQGVTFKSHVDGSLHHMSPERSIEIQGLLDSDIQMQLDECVALPAERKEIERAMEMSVRWAERCKVAFGNQPGKAMFGIVQGGDQPDLRVRSAEALKALDLKGYAIGGLAVGEPQAVMLQMLETTLPVLPNEKPRYLMGVGTPEDILKSVAVGVDMFDCVMPTRSGRHGLAFTRRGKVNIRNARHAEDLRPLDEASSCPASRDYSRAYLHHLVRANEALGGMLLSWHNLAYYQELMQGIRAAIAENRFADFYAETMENWARGDIDPV

SEQ ID NO: 54937 - protein, 376 aa, Ensifer adhaerens
  REGION 1..376: note = tr|A0A2V4WH62|A0A2V4WH62_ENSAD Queuine tRNA-ribosyltransferase OS=Ensifer adhaerens OX=106592; GN = tgt PE=3 SV=1
MTETFQFKLHKTDGKARRGEVSMPRGTIRTPAFMPVGTVGTVKAMYLDQVKDLGADIILGNTYHLMLRPGAERVARLGGLHGLIRWQGPILTDSGGFQVMSLAGLRKLDEQGVTFKSHVDGALFHMSPERSIEIQGLLDSDIQMQLDECVALPAEPKEIERAMEMSLRWAERCKVAFGDQPGKAMFGIVQGGDIPKLRERSAEALKGLDLKGYAVGGLAVGEPQEVMLRMLDITCPIMPVDKPRYLMGVGTPDDILRSVAEGIDMFDCVMPTRSGRHGLAFTRHGRINLRNARHAEDMRPLDEQSSCPATRDYSRAYLHHLIRSNESLGGMLLSWNNLAYYQELMAGIRLAIEEGRFADFMAETQETWRRGDLPPV

SEQ ID NO: 54938 - protein, 376 aa, unidentified
  source 1..376: note = Ensifer alkalisoli
  REGION 1..376: note = tr|A0A1E3VFH7|A0A1E3VFH7_9RHIZ Queuine tRNA-ribosyltransferase OS=Ensifer alkalisoli OX=1752398; GN = tgt PE=3 SV=1
MTDTFQFKLLATDGKARRGEVLMPRGTIRTPAFMPVGTVGTVKAMYLDQVRELGADIILGNTYHLMLRPGAERVARLGGLHKFIRWERPILTDSGGFQVMSLSSLRKLNEQGVTFKSHVDGALYHMSPERSIEIQGLLDSDIQMQLDECVALPAEPDEIERAMEMSLRWAERCKTAFGDQPGKAMFGIVQGGDSPKLRERSALALKDLDLKGYAVGGLAVGEPQEVMLDMLDVTCPALPEEKPRYLMGVGTPDDILKSVAHGIDMFDCVMPTRSGRHGLAFTRHGRINLRNARHAEDTRPLDEQSSCPATRDYSRAYLHHLIRSNESLGGMLLSWNNLAYYQELMVGIRKAIEAGRYADFMAETHEGWQRGDLPPV

SEQ ID NO: 54939 - protein, 376 aa, unidentified
  source 1..376: note = Ensifer glycinis
  REGION 1..376: note = tr|A0A178Y661|A0A178Y661_9RHIZ Queuine tRNA-ribosyltransferase OS=Ensifer glycinis OX=1472378; GN = tgt PE=3 SV=1
MTETFQFKLLATDGKARRGEVSTPRGTIRTPAFMPVGTVGTVKAMYLDQVRDLGADIILGNTYHLMLRPGPERVARLGGLHNFIRWERPILTDSGGFQVMSLSSLRKLNEQGVTFKSHVDGALYHMSPERSIEIQGLLDSDIQMQLDECVALPAEPGEIERAMEMSIRWAERCKVAFGNQPGKAMFGIVQGGDIPKLRERSALALKELDLKGYAVGGLAVGEPQEVMLDMLDVTCPVLPAEKPRYLMGVGTPDDILKSVAHGIDMFDCVMPTRSGRHGLAFTRYGRINLRNARHAEDMRPLDEQSSCPAARDYSRAYLHHLIRSNESLGGMLLSWNNLAYYQELMAGIRNAIEKGRYADFMAETQDGWQRGDLPPV

SEQ ID NO: 54940 - protein, 376 aa, Ensifer sojae
  REGION 1..376: note = tr|A0A249PAL8|A0A249PAL8_9RHIZ Queuine tRNA-ribosyltransferase OS=Ensifer sojae CCBAU 05684; OX = 716928 GN=tgt PE=3 SV=1
MTETFQFKLLATDGKARRGEVLTPRGTIRTPAFMPVGTVGTVKAMYLDQVRDLGADIILGNTYHLMLRPGAERVARLGGLHKFIRWERPILTDSGGFQVMSLSSLRKLNEQGVTFKSHVDGALYHMSPERSIEIQGLLDSDIQMQLDECVALPAEPDEIERAMEMSLRWAERCKVAFGEQPGKAMFGIVQGGDNPKLRERSALALKDLDLKGYAVGGLAVGEPQEVMLDMLDVTCPVLPEAKPRYLMGVGTPDDILKSVAHGIDMFDCVMPTRSGRHGLAFTRYGRINLRNARHAEDTRPLDEQSSCPAARDYSRAYLHHLIRSNESLGGMLLSWNNLAYYQELMTGSRQAIEEGRYADFMAETQEGWRRGDLPPV

SEQ ID NO: 54941 - protein, 376 aa, Ensifer sp.
  REGION 1..376: note = tr|A0A395LBT2|A0A395LBT2_9RHIZ Queuine tRNA-ribosyltransferase OS=Ensifer sp. M14 OX=2203782; GN = tgt PE=3 SV=1
MTETFEFKLHATDGKARRGEVSMPRGTIRTPAFMPVGTVGTVKAMYLDQVKDLGADIILGNTYHLMLRPGAERVARLGGLHDLIRWQGPILTDSGGFQVMSLAGLRKLNEQGVTFKSHVDGALFHMSPERSIEIQGLLDSDIQMQLDECVALPAEPKEIERAMEMSLRWAERCKVAFGDQPGKAMFGIVQGGDIPALRVRSAEALKGLDLKGYAVGGLAVGEPQEVMLRMLDITCPELPVEKPRYLMGVGTPDDILRSVAHGIDMFDCVMPTRSGRHGLAFTRHGRINLRNARHAEDMRPLDEQSSCPATRDYSRAYLHHLIRSNESLGGMLLSWNNLAYYQELMAGIRLAIEEGRFADFMAETQETWRRGDLAPL

SEQ ID NO: 54942 - protein, 376 aa, Ensifer sp.
  REGION 1..376: note = tr|A0A1C0SEQ2|A0A1C0SEQ2_9RHIZ Queuine tRNA-ribosyltransferase OS=Ensifer sp. LC14 OX=1873714; GN = tgt PE=3 SV=1
MTETFQFKLHKTDGKARRGEVSMPRGTIRTPAFMPVGTVGTVKAMYLDQVKDLGADIILGNTYHLMLRPGAERVARLGGLHGLIRWQGPILTDSGGFQVMSLAGLRKLDEQGVTFKSHVDGALFHMSPERSIEIQGLLDSDIQMQLDECVALPAEPKEIERAMEMSLRWAERCKVAFGDQPGKAMFGIVQGGDIPKLRERSAEALKGLDLKGYAVGGLAVGEPQEVMLRMLDITCPIMPVDKPRYLMGVGTPDDILRSVAEGIDMFDCVMPTRSGRHGLAFTRHGRINLRNARHAEDMRPLDEQSSCPAARDYSRAYLHHLIRSNESLGGMLLSWNNLAYYQELMAGIRLAIEEGRFADFMAETQETWRRGDLPPV

SEQ ID NO: 54943 - protein, 422 aa, unidentified
  source 1..422: note = Enteractinococcus coprophilus
  REGION 1..422: note = tr|A0A543AFZ6|A0A543AFZ6_9MICC Queuine tRNA-ribosyltransferase OS=Enteractinococcus coprophilus; OX = 1027633 GN=tgt PE=3 SV=1
MAEPSDFSFTLGARMDGAHGRTGTIHTPHGDIQTPAYIPVGTKATVKAVLPEVVKDLGAQAVLSNAYHLYLQPGPELLDLHGGLGKFMNWDGPTFTDSGGFQVMSLGSGFKKVIDMTGPEAQGKVGSDDAVAPGKERLANVDDDGVWFTSHINGDRLRFTPEVSMTIQHQLGADVMMAFDELTTLHNSRGYQEESLERTRRWAQRSLDEHARLTEQRSHRPYQALYGVIQGAQYEDLRRKACRDLREMRAEFNGVEAGFDGYGLGGAFEKENLGTIVGWCAEELPEDKPRHLLGISEPDDLFAAIEAGADTFDAVSPTRVGRTGAFYTEYGRINLPRAEFAADLSPLQDGCDCYTCANYSKAYIRHLIKADEILAGTLMSIHNLRFTVRLVDDIRQSIIDGDFHEFKDQMLGRYYNQQKRPV

SEQ ID NO: 54944 - protein, 422 aa, unidentified
  source 1..422: note = Enteractinococcus helveticum
  REGION 1..422: note = tr|A0A1B7M3I7|A0A1B7M3I7_9MICC Queuine tRNA-ribosyltransferase OS=Enteractinococcus helveticum; OX = 1837282 GN=tgt PE=3 SV=1
MAEPSDFSFTLGTRMDGAHGRTGTIHTPHGDIQTPAYIPVGTKATVKAVLPEVVKDLGAQAVLSNAYHLYLQPGPELLDLHGGLGKFMNWEGPTFTDSGGFQVMSLGSGFKKVIDMTGPEAQGKVGSDDAVAPGKERLANVDDDGVWFTSHINGDRHRFTPEVSMNIQHQLGADVMMAFDELTTLHNSRGYQEESLERTRVWAQRSLDEHARLTEQRSHRPYQALYGVIQGAQYEDLRRKACRDLREMRADFNGTEAGFDGYGLGGAFEKENLGTIVGWCAEELPEDKPRHLLGISEPDDLFAAIEAGADTFDAVSPTRVGRTGAFYTEYGRINLPRAEFAADLSPLQEGCDCYTCANYSKAYVRHLIKADEILAGTLMSIHNLRFTIRLVDTIRQSIIDGDFCEFKEQMLGRYYDKQKRPV

SEQ ID NO: 54945 - protein, 375 aa, unidentified
  source 1..375: note = Enterobacillus tribolii
  REGION 1..375: note = tr|A0A370QNB9|A0A370QNB9_9ENTR Queuine tRNA-ribosyltransferase OS=Enterobacillus tribolii; OX = 1487935 GN=tgt PE=3 SV=1
MKYELQTTDGRARRGRLIFDRGVVETPAFMPVGTYGTVKGMTPEEVKETGAQILLGNTFHLWLRPGQEIMKLHGDLHDFMQWSGPILTDSGGFQVFSLGAMRKIKEEGVYFRNPINGSPIFLSPEKSMEIQYDLGSDIVMIFDECTPYPADWDYAKRSMELSLRWAARSRQRFDELNNKNALFGIIQGSIYEDLRDVSLKGLVEIGFDGYAVGGLAVGEPKEDMHRILEHVCPQIPQDKPRYLMGVGKPEDLVEGVRRGIDMFDCVMPTRNARNGHLFVTDGVIKIRNARFRDDTSPLDAHCDCYTCRHYSRAYLHHLDRCNEILGARLNTIHNLRYYQRLMAGLRQAIEDGKLNDFVADFYQRQGKPVPPLDAA

SEQ ID NO: 54946 - protein, 391 aa, unidentified
  source 1..391: note = Enterobacter agglomerans
  REGION 1..391: note = tr|A0A1T4JJ16|A0A1T4JJ16_ENTAG Queuine tRNA-ribosyltransferase OS=Enterobacter agglomerans OX=549; GN = tgt PE=3 SV=1
MDCFSNGGFVKFELDTTDGRARRGRLIFDRGVVETPAFMPVGTYGTVKGMTPEEVQETGAQIILGNTFHLWLRPGQEIMKLHGDLHDFMQWKGPILTDSGGFQVFSLGDIRKITEAGVHFRNPINGDPIFLDPEKSMEIQYDLGSDIVMIFDECTPYPADWDYAKRSMEMSLRWARRSRDRFDSLGNKNALFGIIQGSVYEDLRDVSVKGLVEIGFDGYAVGGLAVGEPKQDMHRILEHVCPQLPQDKPRYLMGVGKPEDLVEGVRRGVDMFDCVMPTRNARNGHLFVTEGVVKIRNARYKDDTAPLDAECDCYTCRNYSRAYLYHLDRCNEILGARLNTIHNLRYYQRLMAGLRQAIEEGKLEHFVTEFYQRTGKEVPPLTSDNSSMREI

SEQ ID NO: 54947 - protein, 382 aa, unidentified; identical to SEQ ID NO: 54379
  source 1..382: note = Enterobacter agglomerans
  REGION 1..382: note = tr|A0A379AJX6|A0A379AJX6_ENTAG Queuine tRNA-ribosyltransferase OS=Enterobacter agglomerans OX=549; GN = tgt PE=3 SV=1

SEQ ID NO: 54948 - protein, 375 aa, Enterobacter asburiae
  REGION 1..375: note = tr|A0A263VTI3|A0A263VTI3_ENTAS Queuine tRNA-ribosyltransferase OS=Enterobacter asburiae OX=61645; GN = tgt PE=3 SV=1
MKFELDTTDGRARRGRLVFERGVVETPAFMPVGTYGTVKGMTPEEVEATGAQIILGNTFHLWLRPGQEIMKLHGDLHDFMQWKGPILTDSGGFQVFSLGDIRKITEQGVHFRNPINGDPIFLDPEKSMEIQYDLGSDIVMIFDECTPYPADWDYAKRSMEMSLRWAKRSRDRFDSLQNKNALFGIIQGSVYEDLRDISVKGLVEIGFDGYAVGGLAVGEPKEDMHRILEHVCPQIPADKPRYLMGVGKPEDLVEGVRRGIDMFDCVMPTRNARNGHLFVTDGVVKIRNAKHKSDTSPLDSECDCYTCRNYSRAYLHHLDRCNEILGARLNTIHNLRYYQRLMAGLRKAIEEGKLESFVTDFYQRQGRDVPPLNVD

SEQ ID NO: 54949 - protein, 375 aa, Enterobacter asburiae
  REGION 1..375: note = tr|A0A0F1DL53|A0A0F1DL53_ENTAS Queuine tRNA-ribosyltransferase OS=Enterobacter asburiae OX=61645; GN = tgt PE=3 SV=1
MKFELDTTDGRARRGRLVFDRGVVETPAFMPVGTYGTVKGMTPEEVEATGAQIILGNTFHLWLRPGQEIMKLHGDLHDFMQWKGPILTDSGGFQVFSLGDIRKITEQGVHFRNPINGDPIFLDPEKSMEIQYDLGSDIVMIFDECTPYPADWDYAKRSMEMSLRWAKRSRDRFDSLQNKNALFGIIQGSVYEDLRDISVKGLVEIGFDGYAVGGLAVGEPKEDMHRILEHVCPQIPADKPRYLMGVGKPEDLVEGVRRGIDMFDCVMPTRNARNGHLFVTDGVVKIRNAKHKSDTSPLDSECDCYTCRNYSRAYLHHLDRCNEILGARLNTIHNLRYYQRLMAGLRKAIEEGKLESFVTDFYQRQGRDVPPLNVD

SEQ ID NO: 54950 - protein, 375 aa, unidentified
  source 1..375: note = Enterobacter bugandensis
  REGION 1..375: note = tr|A0A2J7S6F5|A0A2J7S6F5_9ENTR Queuine tRNA-ribosyltransferase OS=Enterobacter bugandensis; OX = 881260 GN=tgt PE=3 SV=1
MKFELDTTDGRARRGRLVFDRGVVETPAFMPVGTYGTVKGMTPEEVEATGAQIILGNTFHLWLRPGQEIMKLHGDLHDFMQWKGPILTDSGGFQVFSLGDIRKITEQGVHFRNPINGDPIFLDPEKSMEIQYDLGSDIVMIFDECTPYPADWDYAKRSMEMSLRWAKRSRDRFDSLQNKNALFGIIQGSVYEDLRDISVKGLVEIGFDGYAVGGLAVGEPKEDMHRILEHVCPQIPADKPRYLMGVGKPEDLVEGVRRGIDMFDCVMPTRNARNGHLFVTDGVVKIRNAKHKSDTSPLDSECDCYTCRNYSRAYLHHLDRCNEILGARLNTIHNLRYYQRLMSGLRKAIEEGKLESFVTDFYQRQGRDVPPLNVD

SEQ ID NO: 54951 - protein, 375 aa, Enterobacter cancerogenus
  REGION 1..375: note = tr|D2ZFY3|D2ZFY3_9ENTR Queuine tRNA-ribosyltransferase OS=Enterobacter cancerogenus ATCC 35316 OX=500639 GN=tgt PE=3 SV=1
MKFELDTTDGRARRGRLVFDRGVVETPAFMPVGTYGTVKGMTPEEVEATGAQIILGNTFHLWLRPGQEIMKLHGDLHDFMQWKGPILTDSGGFQVFSLGDIRKITEKGVHFRNPINGDPIFLDPEKSMEIQYDLGSDIVMIFDECTPYPADWDYAKRSMEMSLRWAQRSRDRFDALQNKNALFGIIQGSVYEDLRDISVKGLVEIGFDGYAVGGLAVGEPKEDMHRILEHVCPQIPADKPRYLMGVGKPEDLVEGVRRGIDMFDCVMPTRNARNGHLFVTDGVVKIRNAKHKSDTSPLDSECDCYTCRNYSRAYLHHLDRCNEILGARLNTIHNLRYYQRLMAGLRKAIEEGKLESFVTDFYQRQGRDVPPLNVD

SEQ ID NO: 54952 - protein, 375 aa, Enterobacter cancerogenus; identical to SEQ ID NO: 54951
  REGION 1..375: note = tr|A0A4U3HNW5|A0A4U3HNW5_9ENTR Queuine tRNA-ribosyltransferase OS=Enterobacter cancerogenus; OX = 69218 GN=tgt PE=3 SV=1

SEQ ID NO: 54953 - protein, 375 aa, unidentified; identical to SEQ ID NO: 54949
  source 1..375: note = Enterobacter chengduensis
  REGION 1..375: note = tr|A0A0F4BRS2|A0A0F4BRS2_9ENTR Queuine tRNA-ribosyltransferase OS=Enterobacter chengduensis; OX = 2494701 GN=tgt PE=3 SV=1

SEQ ID NO: 54954 - protein, 375 aa, unidentified
  source 1..375: note = Enterobacter chuandaensis
  REGION 1..375: note = tr|A0A3A3ZVZ0|A0A3A3ZVZ0_9ENTR Queuine tRNA-ribosyltransferase OS=Enterobacter chuandaensis; OX = 2497875 GN=tgt PE=3 SV=1
MKFELDTTDGRARRGRLVFDRGVVETPAFMPVGTYGTVKGMTPEEVEATGAQIILGNTFHLWLRPGQEIMKLHGDLHDFMQWKGPILTDSGGFQVFSLGDIRKITEQGVHFRNPINGDPIFLDPEKSMEIQYDLGSDIVMIFDECTPYPADWDYAKRSMEMSLRWAKRSRDRFDSLQNKNALFGIIQGSVYEDLRDISVKGLVEIGFDGYAVGGLAVGEPKEDMHRILEHVCPQIPADKPRYLMGVGKPEDLVEGVRRGIDMFDCVMPTRNARNGHLFVTDGVVKIRNAKHKSDTSPLDAECDCYTCRNYSRAYLHHLDRCNEILGARLNTIHNLRYYQRLMAGLRKAIEEGKLESFVTDFYQRQGRDVPPLNVD

SEQ ID NO: 54955 - protein, 375 aa, Enterobacter cloacae; identical to SEQ ID NO: 54949
  REGION 1..375: note = tr|A0A0A6EQ14|A0A0A6EQ14_ENTCL Queuine tRNA-ribosyltransferase OS=Enterobacter cloacae OX=550; GN = tgt PE=3 SV=1

SEQ ID NO: 54956 - protein, 375 aa, Enterobacter cloacae
  REGION 1..375: note = tr|A0A155YQC8|A0A155YQC8_ENTCL Queuine tRNA-ribosyltransferase OS=Enterobacter cloacae OX=550; GN = tgt PE=3 SV=1
MKFELDTTDGRARRGRLVFDRGVVETPAFMPVGTYGTVKGMTPEEVEATGAQIILGNTFHLWLRPGQEIMKLHGDLHDFMQWKGPILTDSGGFQVFSLGDIRKITEQGVHFRNPINGDPIFLDPEKSMEIQYDLGSDIVMIFDECTPYPADWDYAKRSMEMSLRWAKRSRDRFDALQNKNALFGIIQGSVYEDLRDISVKGLVEIGFDGYAVGGLAVGEPKEDMHRILEHVCPQIPADKPRYLMGVGKPEDLVEGVRRGIDMFDCVMPTRNARNGHLFVTDGVVKIRNAKHKSDTSPLDSECDCYTCRNYSRAYLHHLDRCNEILGARLNTIHNLRYYQRLMAGLRKAIEEGKLESFVTDFYQRQGRDVPPLNVD

SEQ ID NO: 54957 - protein, 375 aa, unidentified; identical to SEQ ID NO: 54954
  source 1..375: note = Enterobacter genomosp.
  REGION 1..375: note = tr|A0A0X4EVA8|A0A0X4EVA8_9ENTR Queuine tRNA-ribosyltransferase OS=Enterobacter genomosp. O; OX = 2364150 GN=tgt PE=3 SV=1

SEQ ID NO: 54958 - protein, 375 aa, Enterobacter hormaechei; identical to SEQ ID NO: 54949
  REGION 1..375: note = tr|F5RV42|F5RV42_9ENTR Queuine tRNA-ribosyltransferase OS=Enterobacter hormaechei ATCC 49162 OX=888063 GN=tgt PE=3 SV=1

SEQ ID NO: 54959 - protein, 356 aa, Enterobacter hormaechei
  REGION 1..356: note = tr|A0A5A9DPK7|A0A5A9DPK7_9ENTR Queuine tRNA-ribosyltransferase (Fragment) OS=Enterobacter hormaechei OX=158836 GN=tgt PE=3 SV=1
MKFELDTTDGRARRGRLVFDRGVVETPAFMPVGTYGTVKGMTPEEVEATGAQIILGNTFHLWLRPGQEIMKLHGDLHDFMQWKGPILTDSGGFQVFSLGDIRKITEQGVHFRNPINGDPIFLDPEKSMEIQYDLGSDIVMIFDECTPYPADWDYAKRSMEMSLRWAKRSRDRFDALQNKNALFGIIQGSVYEDLRDISVKGLVEIGFDGYAVGGLAVGEPKEDMHRILEHVCPQIPADKPRYLMGVGKPEDLVEGVRRGIDMFDCVMPTRNARNGHLFVTDGVVKIRNAKHKSDTSPLDSECDCYTCRNYSRAYLHHLDRCNEILGARLNTIHNLRYYQRLMAGLRKAIEEGKLES

SEQ ID NO: 54960 - protein, 375 aa, unidentified
  source 1..375: note = Enterobacter huaxiensis
  REGION 1..375: note = tr|A0A3R9NVH1|A0A3R9NVH1_9ENTR Queuine tRNA-ribosyltransferase OS=Enterobacter huaxiensis; OX = 2494702 GN=tgt PE=3 SV=1
MKFELDTTDGRARRGRLVFDRGVVETPAFMPVGTYGTVKGMTPEEVEATGAQIILGNTFHLWLRPGQEIMKLHGDLHDFMQWKGPILTDSGGFQVFSLGDIRKITEKGVHFRNPINGDPIFLDPEKSMEIQYDLGSDIVMIFDECTPYPADWDYAKRSMEMSLRWAQRSRDRFDSLQNKNALFGIIQGSVYEDLRDISVKGLVEIGFDGYAVGGLAVGEPKEDMHRILEHVCPQIPADKPRYLMGVGKPEDLVEGVRRGIDMFDCVMPTRNARNGHLFVTDGVVKIRNAKHKSDTSPLDSECDCYTCRNYSRAYLHHLDRCNEILGARLNTIHNLRYYQRLMAGLRKAIEEGKLESFVTDFYQRQGRDVPPLNVD

SEQ ID NO: 54961 - protein, 375 aa, Enterobacter kobei
  REGION 1..375: note = tr|A0A5E1A243|A0A5E1A243_9ENTR Queuine tRNA-ribosyltransferase OS=Enterobacter kobei OX=208224; GN = tgt PE=3 SV=1
MKFELDTTDGRARRGRLVFDRGVVETPAFMPVGTYGTVKGMTPEEVEATGAQIILGNTFHLWLRPGQEIMKLHGDLHDFMQWKGPILTDSGGFQVFSLGDIRKITEEGVHFRNPINGDPIFLDPEKSMEIQYDLGSDIVMIFDECTPYPADWDYAKRSMEMSLRWAKRSRDRFDSLQNKNALFGIIQGSVYEDLRDISVKGLVEIGFDGYAVGGLAVGEPKEEMHRILEHVCPQIPADKPRYLMGVGKPEDLVEGVRRGIDMFDCVMPTRNARNGHLFVTDGVVKIRNAKHKSDTSPLDAECDCYTCRNYSRAYLHHLDRCNEILGARLNTIHNLRYYQRLMAGLRKAIEEGKLESFVTDFYQRQGRTVPPLNVD

SEQ ID NO: 54962 - protein, 375 aa, Enterobacter kobei; identical to SEQ ID NO: 54949
  REGION 1..375: note = tr|A0A0F0XUR1|A0A0F0XUR1_9ENTR Queuine tRNA-ribosyltransferase OS=Enterobacter kobei OX=208224; GN = tgt PE=3 SV=1

SEQ ID NO: 54963 - protein, 375 aa, unidentified; identical to SEQ ID NO: 53884
  source 1..375: note = Enterobacter lignolyticus
  REGION 1..375: note = tr|E3G708|E3G708_ENTLS Queuine tRNA-ribosyltransferase OS=Enterobacter lignolyticus (strain SCF1) OX=701347 GN=tgt PE=3 SV=1

SEQ ID NO: 54964 - protein, 375 aa, Enterobacter ludwigii
  REGION 1..375: note = tr|W0BS86|W0BS86_9ENTR Queuine tRNA-ribosyltransferase OS=Enterobacter ludwigii OX=299767; GN = tgt PE=3 SV=1
MKFELDTTDGRARRGRLVFDRGVVETPAFMPVGTYGTVKGMTPEEVEATGAQIILGNTFHLWLRPGQEIMKLHGDLHDFMQWKGPILTDSGGFQVFSLGDIRKITEQGVHFRNPINGDPIFLDPEKSMEIQYDLGSDIVMIFDECTPYPADWDYAKRSMEMSLRWAQRSRDRFDSLQNKNALFGIIQGSVYEDLRDISVKGLVEIGFDGYAVGGLAVGEPKEDMHRILEHVCPQIPADKPRYLMGVGKPEDLVEGVRRGIDMFDCVMPTRNARNGHLFVTDGVVKIRNAKHKSDTSPLDSECDCYTCRNYSRAYLHHLDRCNEILGARLNTIHNLRYYQRLMAGLRKAIEEGKLESFVTDFYQRQGRTVPPLNVD

SEQ ID NO: 54965 - protein, 385 aa, Enterobacter ludwigii
  REGION 1..385: note = tr|G8LPA7|G8LPA7_9ENTR Queuine tRNA-ribosyltransferase OS=Enterobacter ludwigii OX=299767; GN = tgt PE=3 SV=1
MDCFSDVGEKMKFELDTTDGRARRGRLVFDRGVVETPAFMPVGTYGTVKGMTPEEVEATGAQIILGNTFHLWLRPGQEIMKLHGDLHDFMQWKGPILTDSGGFQVFSLGDIRKITEQGVHFRNPINGDPIFLDPEKSMEIQYDLGSDIVMIFDECTPYPADWDYAKRSMEMSLRWAKRSRDRFDSLQNKNALFGIIQGSVYEDLRDISVKGLVEIGFDGYAVGGLAVGEPKEDMHRILEHVCPQIPADKPRYLMGVGKPEDLVEGVRRGIDMFDCVMPTRNARNGHLFVTDGVVKIRNAKHKSDTSPLDSECDCYTCRNYSRAYLHHLDRCNEILGARLNTIHNLRYYQRLMAGLRKAIEEGKLESFVTDFYQRQGRTVPPLNVD

SEQ ID NO: 54966 - protein, 375 aa, Enterobacter mori; identical to SEQ ID NO: 54960
  REGION 1..375: note = tr|A0A2J0N9X7|A0A2J0N9X7_9ENTR Queuine tRNA-ribosyltransferase OS=Enterobacter mori OX=539813; GN = tgt PE=3 SV=1

SEQ ID NO: 54967 - protein, 375 aa, unidentified
  source 1..375: note = Enterobacter roggenkampii
  REGION 1..375: note = tr|A0A384GIL5|A0A384GIL5_9ENTR Queuine tRNA-ribosyltransferase OS=Enterobacter roggenkampii; OX = 1812935 GN=tgt PE=3 SV=1
MKFKLDTTDGRARRGRLVFDRGVVETPAFMPVGTYGTVKGMTPEEVEATGAQIILGNTFHLWLRPGQEIMKLHGDLHDFMQWKGPILTDSGGFQVFSLGDIRKITEQGVHFRNPINGDPIFLDPEKSMEIQYDLGSDIVMIFDECTPYPADWDYAKRSMEMSLRWAKRSRDRFDSLQNKNALFGIIQGSVYEDLRDISVKGLVEIGFDGYAVGGLAVGEPKEDMHRILEHVCPQIPADKPRYLMGVGKPEDLVEGVRRGIDMFDCVMPTRNARNGHLFVTDGVVKIRNAKHKSDTSPLDSECDCYTCRNYSRAYLHHLDRCNEILGARLNTIHNLRYYQRLMAGLRKAIEEGKLESFVTDFYQRQGRDVPPLNVD

SEQ ID NO: 54968 - protein, 375 aa, unidentified; identical to SEQ ID NO: 54949
  source 1..375: note = Enterobacter roggenkampii
  REGION 1..375: note = tr|A0A167QT33|A0A167QT33_9ENTR Queuine tRNA-ribosyltransferase OS=Enterobacter roggenkampii; OX = 1812935 GN=tgt PE=3 SV=1

SEQ ID NO: 54969 - protein, 375 aa, unidentified
  source 1..375: note = Enterobacter sichuanensis
  REGION 1..375: note = tr|A0A0F1B299|A0A0F1B299_9ENTR Queuine tRNA-ribosyltransferase OS=Enterobacter sichuanensis; OX = 2071710 GN=tgt PE=3 SV=1
MKFELDTTDGRARRGRLVFDRGVVETPAFMPVGTYGTVKGMTPEEVEATGAQIILGNTFHLWLRPGQEIMKLHGDLHDFMQWKGPILTDSGGFQVFSLGDIRKITEEGVHFRNPINGDPIFLDPEKSMEIQYDLGSDIVMIFDECTPYPADWDYAKRSMEMSLRWAKRSRDRFDSLQNKNALFGIIQGSVYEDLRDISVKGLVEIGFDGYAVGGLAVGEPKEDMHRILEHVCPQIPADKPRYLMGVGKPEDLVEGVRRGIDMFDCVMPTRNARNGHLFVTDGVVKIRNAKHKSDTSPLDAECDCYTCRHYSRAYLHHLDRCNEILGARLNTIHNLRYYQRLMAGLRKAIEEGKLESFVTDFYQRQGRTVPPLNVD

SEQ ID NO: 54970 - protein, 375 aa, Enterobacter soli
  REGION 1..375: note = tr|A0A198GR86|A0A198GR86_9ENTR Queuine tRNA-ribosyltransferase OS=Enterobacter soli ATCC BAA-2102; OX = 1354262 GN=tgt PE=3 SV=1
MKFELDTTDGRARRGRLVFDRGVVETPAFMPVGTYGTVKGMTPEEVEATGAQIILGNTFHLWLRPGQEIMKLHGDLHDFMQWKGPILTDSGGFQVFSLGDIRKITEKGVHFRNPINGDPIFLDPEKSMEIQYDLGSDIVMIFDECTPYPADWDYAKRSMEMSLRWAQRSRDRFDSLENKNALFGIIQGSVYEDLRDISVKGLVEIGFDGYAVGGLAVGEPKEDMHRILEHVCPQIPADKPRYLMGVGKPEDLVEGVRRGIDMFDCVMPTRNARNGHLFVTDGVVKIRNAKHKSDTSPLDSECDCYTCRNYSRAYLHHLDRCNEILGARLNTIHNLRYYQRLMAGLRKAIEEGKLESFVTDFYQRQGRDVPPLNVD

SEQ ID NO: 54971 - protein, 375 aa, Enterobacter sp.
  REGION 1..375: note = sp|A4W779|TGT_ENT38 Queuine tRNA-ribosyltransferase; OS = Enterobacter sp. (strain 638) OX=399742 GN=tgt PE=3 SV=1
MKFELDTTDGRARRGRLVFDRGVVETPAFMPVGTYGTVKGMTPEEVEATGAQIILGNTFHLWLRPGQEVMKLHGDLHDFMQWKGPILTDSGGFQVFSLGDIRKITEKGVHFRNPINGDPIFLDPEKSMEIQYDLGSDIVMIFDECTPYPADWDYAKRSMEMSLRWAQRSRDRFDSLENKNALFGIIQGSVYEDLRDISVKGLVEIGFDGYAVGGLAVGEPKEDMHRILEHVCPQIPEDKPRYLMGVGKPEDLVEGVRRGIDMFDCVMPTRNARNGHLFVTDGVVKIRNAKHKSDTSTLDAECDCYTCRHYSRAYLYHLDRCNEILGARLNTIHNLRYYQRLMAGLRKAIEEGKLESFVTDFYQRQGRDVPPLNVD

SEQ ID NO: 54972 - protein, 375 aa, Enterobacter sp.
  REGION 1..375: note = tr|R9VQL0|R9VQL0_9ENTR Queuine tRNA-ribosyltransferase OS=Enterobacter sp. R4-368; OX = 1166130 GN=tgt PE=3 SV=1
MKFELDTTDGRARRGRLVFDRGVVETPAFMPVGTYGTVKGMTPEEVEATGAQIILGNTFHLWLRPGQEIMKLHGDLHDFMQWKGPILTDSGGFQVFSLGDIRKITEAGVHFRNPINGDPIFLDPEKSMEIQYDLGSDIVMIFDECTPYPADWDYAKRSMEMSLRWAKRSRERFDGLGNKNALFGIIQGSVYEDLRDISVKGLVEIGFDGYAVGGLAVGEPKEDMHRILEHVCPQIPADKPRYLMGVGKPEDLVEGVRRGIDMFDCVMPTRNARNGHLFVTNGVVKIRNAKYKSDTGPLDSECDCYTCRNYSLAYLHHLDRCNEILGARLNTIHNLRYYQRLMAGLRKAIEEGKLESFVADFYQRQGRSVPPLNVD

SEQ ID NO: 54973 - protein, 374 aa, unidentified
  source 1..374: note = Enterobacterales bacterium
  REGION 1..374: note = tr|A0A2I0FT58|A0A2I0FT58_9GAMM Queuine tRNA-ribosyltransferase OS=Enterobacterales bacterium CwR94 OX=2025587 GN=tgt PE=3 SV=1
MKFELDTTDGRARRGRLVFERGVVETPAFMPVGTYGTVKGMTPEEVKDTGAQILLGNTFHLWLRPGQEIMKLHGDLHDFMNWQGPILTDSGGFQVFSLGDLRKITEAGVHFRNPINGDPIFLDPEKSMEIQYDLGSDIVMIFDECTPYPADWDYAKRSMEMSLRWARRSRDRFDSLGNKNALFGIIQGGVYEDLRDVSVKGLVDIGFDGYAVGGLAVGEPKEDMHRILEHVCPQIPEDKPRYLMGVGKPQDLVEGVRRGIDMFDCVMPTRNARNGHLFVSNGVVKIRNAKYKDDTATLDAECDCYTCRNYSRAYLHHLDRCNEILGARLNTIHNLRYYQRLMAGLRQAIEDGKLECFVTEFYTKTGNAVPPLNV

SEQ ID NO: 54974 - protein, 374 aa, unidentified
  source 1..374: note = Enterobacterales bacterium
  REGION 1..374: note = tr|A0A389M8V5|A0A389M8V5_9GAMM Queuine tRNA-ribosyltransferase OS=Enterobacterales bacterium; OX = 1993870 GN=tgt PE=3 SV=1
MKYELSTTDGRARRGRLVFERGVVETPAFMPVGTYGTVKGMTPEEVKETGAQILLGNTFHLWLRPGQEVMKLHGDLHDFMNWHGPILTDSGGFQVFSLGAMRKIKEEGVHFRNPINGDPVFLSPEKSMEIQHDLGSDIVMIFDECTPYPADWDYAKRSMEMSLRWAKRSRDRFNELNNKNALFGIIQGSVYEDLRDVSLKGLVDIGFDGYAVGGLAVGEPKEDMHRILEHVCPQIPEDKPRYLMGVGKPEDLVEGVRRGVDMFDCVMPTRNARNGHLFVTDGIVKIRNAKYKSDTTTLDEHCDCYTCRNYSRAYLHHLDRCNEILGARLNTIHNLRYYQRLMAGLRQAIEEGKLELFVKDFYERKGKEVPPLNF

SEQ ID NO: 54975 - protein, 321 aa, unidentified
  source 1..321: note = Enterobacteriaceae bacterium
  REGION 1..321: note = tr|A0A351NRL4|A0A351NRL4_9ENTR Queuine tRNA-ribosyltransferase (Fragment) OS=Enterobacteriaceae bacterium OX=1849603 GN=DCX28_16210 PE=3 SV=1
LGNTFHLWLRPGQEIMKLHGDLHDFMQWKGPILTDSGGFQVFSLGDIRKITEAGVHFRNPINGDPIFLDPEKSMEIQYDLGSDIVMIFDECTPYPADWDYAKRSMEMSLRWAQRSRDRFDSLGNKNALFGIIQGSVYEDLRDISVKGLVEIGFDGYAVGGLAVGEPKEDMHRILEHVCPQIPADKPRYLMGVGKPEDLVEGVRRGIDMFDCVMPTRNARNGHLFVTNGVVKIRNAKYKSDTGPLDEECDCYTCRNYSLAYLHHLDRCNEILGARLNTIHNLRHYQRLMAGLRKAIEEGKLESFVTDFYERQGRPVPPLNVD

SEQ ID NO: 54976 - protein, 375 aa, unidentified
  source 1..375: note = Enterobacteriaceae bacterium
  REGION 1..375: note = tr|A0A427BV16|A0A427BV16_9ENTR Queuine tRNA-ribosyltransferase OS=Enterobacteriaceae bacterium CCUG 66741 OX=1851514 GN=tgt PE=3 SV=1
MKFELDTTDGRARRGRLVFERGVVETPAFMPVGTYGTVKGMTPEEVEETGAQIILGNTFHLWLRPGQEIMKLHGDLHDFMQWKGPILTDSGGFQVFSLGDIRKITEAGVHFRNPINGDPIFLDPEKSMEIQNDLGSDIVMIFDECTPYPADWDYAKRSMEMSLRWAKRSRDRFDSLNNKNALFGIIQGSVYEDLRDISVKGLVEIGFDGYAVGGLAVGEPKEDMHRILEHVCPQIPADKPRYLMGVGKPEDLVEGVRRGIDMFDCVMPTRNARNGHLFVTDGVVKIRNAKHKSDTSTLDAECDCYTCRHYSRAYLHHLDRCNEILGARLNTIHNLRYYQRLMAGLRKAIEEGKLESFVTEFYQRQGRDVPPLNVD

SEQ ID NO: 54977 - protein, 381 aa, Enterococcus aquimarinus
  REGION 1..381: note = tr|A0A1L8QW69|A0A1L8QW69_9ENTE Queuine tRNA-ribosyltransferase OS=Enterococcus aquimarinus; OX = 328396 GN=tgt PE=3 SV=1
MTEPAIRYRLIKKEKHTGARLGEIITPHGTFPTPMFMPVGTLATVKTMSPEELKAMGSGIILSNTYHLWLRPGEDLIEEAGGLHKFMNWDQPILTDSGGFQVFSLADMRNIEEEGVHFRNHLNGSKLFLSPEKAIQIQNKLGSDIMMSFDECPPFNESYDYVKKSVERTSRWAARGLEAHANPDRQGLFGIIQGAGFEELRRQSAKDLISMDFPGYSIGGLSVGESKEEMNRVLDFTTPLIPDNKPRYLMGVGAPDSLIDGVIRGVDMFDCVLPTRIARNGTCMTSTGRLVVKNAQYARDFRPLDEKCDCYTCKNYSRAYIRHLIKADETFGLRLTSYHNLHFLLNLMKQVRQAIMDDNLLEFRAHFIEEYGFNKENARNF

SEQ ID NO: 54978 - protein, 381 aa, Enterococcus asini
  REGION 1..381: note = tr|R2SBS1|R2SBS1_9ENTE Queuine tRNA-ribosyltransferase OS=Enterococcus asini ATCC 700915; OX = 1158606 GN=tgt PE=3 SV=1
MTQPAIQYRLIKKEKHTGARLGELITPHGTFPTPMFMPVGTLATVKTMSPEELKEMGAGVILSNTYHLWLRPGEDLVAEAGGLHKFMNWDQPILTDSGGFQVFSLADMRNIEEEGVHFKNHLNGAPLFLSPEKAIQIQNKLGSDIMMSFDECPPFDESYDYVKKSVERTSRWAHRGLEAHANPDRQGLFGIIQGAGFEDLRRQSAKDLVAMDFPGYSIGGLSVGEPKSEMNRVLEFTTPWIPENKPRYLMGVGAADSLIDGVIRGVDMFDCVLPTRIARNGTCMTSQGRLVVKNAKYAHDFRPIDEKCDCYTCRNYTRAYIRHLIKCDETFGIRLTSYHNLYFLLNLMKQVRQAIMDDNLLEFREAFFEEYGFNKENAKSF

SEQ ID NO: 54979 - protein, 381 aa, Enterococcus avium
  REGION 1..381: note = tr|S0SNA8|S0SNA8_ENTAV Queuine tRNA-ribosyltransferase OS=Enterococcus avium ATCC 14025; OX = 1140002 GN=tgt PE=3 SV=1
MTEPAISYRLIKKEKHTGARLGEIITPHGTFPTPMFMPVGTLATVKTMSPEELKEMGAGIILSNTYHLWLRPGEDLVAEAGGLHKFMNWDQPILTDSGGFQVFSLADMRNIVEEGVHFKNHLNGSKMFLSPEKAIDIQNKLGSDIMMSFDECPPFDESYDYVKKSVERTSRWAERGLKAHANPATQGLFGIIQGAGFEDLRRQSAKDLVSMDFPGYSIGGLSVGEPKEEMNRVLEFTTPLIPENKPRYLMGVGAADSLIDGVIRGVDMFDCVLPTRIARNGTCMTSSGRLVVKNAKFAHDFRPLDEKCDCYTCRNYTRAYIRHLIHCDETFGIRLTSYHNLYFLINLMKQVRQAIMDDNLLEFRQAFFEEYGFNKQNAKSF

SEQ ID NO: 54980 - protein, 381 aa, Enterococcus avium; identical to SEQ ID NO: 54979
  REGION 1..381: note = tr|A0A437UIV6|A0A437UIV6_ENTAV Queuine tRNA-ribosyltransferase OS=Enterococcus avium OX=33945; GN = tgt PE=3 SV=1

SEQ ID NO: 54981 - protein, 381 aa, Enterococcus caccae
  REGION 1..381: note = tr|R3WJT9|R3WJT9_9ENTE Queuine tRNA-ribosyltransferase OS=Enterococcus caccae ATCC BAA-1240 OX=1158612 GN=tgt PE=3 SV=1
MTEPAIRYRLIKKEKHTGARLGEIITPHGTFPTPMFMPVGTLATVKTMSPEDLKEMGAGVILSNTYHLWLRPGDDLIAEAGGLHKFMNWDQPILTDSGGFQVFSLSDMRKITEEGVHFRHHLNGSKLFLSPEKAINIQNNLGSDIMMSFDECPPFDESYDYVKKSIERTSRWAERGLKAHANPDRQGLFGIIQGAGFEDLRRQSAKDLISMDFPGYSIGGLSVGEPKAEMNRVLDFTTPLIPDNKPRYLMGVGTADSLIDGVIRGIDMFDCVLPTRIARNGTCMTSKGRLVVKNAQYARDFRPLDEKCDCYTCKNYTRAYIRHLIKADETFGIRLTSYHNLYFLLNLMKQVRQAIMDDNLLEFRQAFFEEYGFNKENAKSF

SEQ ID NO: 54982 - protein, 382 aa, Enterococcus canintestini
  REGION 1..382: note = tr|A0A267HRS1|A0A267HRS1_9ENTE Queuine tRNA-ribosyltransferase OS=Enterococcus canintestini; OX = 317010 GN=tgt PE=3 SV=1
MAQEPAIKYRLIKKEKHTGARLGELITPHGTFPTPMFMPVGTLATVKTMAPEELKEMGAGVILSNTYHLWLRPGEDLVAEAGGLHKFMNWDQPILTDSGGFQVFSLADMRNITEEGVHFKNHLNGAPLFLSPEKAIDIQNKLGSDIMMSFDECPPFDESYDYVKKSVERTSRWAYRGLEAHANPDRQGLFGIIQGAGFEDLRRQSAKDLISMDFPGYSIGGLSVGEPKEEMNRVLDFTTPLIPDHKPRYLMGVGAADSLIDGVIRGIDMFDCVLPTRIARNGTCMTSKGRLVVKNAKFAHDFRPLDEKCDCYTCRNYSRAYIRHLIHCDETFGIRLTTYHNLYFLLNLMKQVRQAIMDDNLLEFRQAFFEEYGYNKENAKSF

SEQ ID NO: 54983 - protein, 382 aa, Enterococcus canintestini
  REGION 1..382: note = tr|A0A1L8R4K1|A0A1L8R4K1_9ENTE Queuine tRNA-ribosyltransferase OS=Enterococcus canintestini; OX = 317010 GN=tgt PE=3 SV=1
MAQEPAIKYRLIKKEKHTGARLGELITPHGTFPTPMFMPVGTLATVKTMAPEELKEMGAGVILSNTYHLWLRPGEDLVAEAGGLHKFMNWDQPILTDSGGFQVFSLADMRNITEEGVHFKNHLNGAPLFLSPEKAIDIQNKLGSDIMMSFDECPPFDESYDYVKKSVERTSRWAYRGLEAHANPDRQGLFGIIQGAGFEDLRRQSAKDLISMDFPGYSIGGLSVGEPKEEMNRVLDFTTPLIPDHKPRYLMGVGAADSLIDGVIRGIDMFDCVLPTRIARNGTCMTSKGRLVVKNAKFAHDFRPLDEKCDCYTCRNYSRAYIRHLIHCDETFGIRLTTYHNLYFLLNLMKQVRQAIMDDNLLDFRQAFFEEYGYNKENAKSF

SEQ ID NO: 54984 - protein, 381 aa, Enterococcus canis
  REGION 1..381: note = tr|A0A1L8RF69|A0A1L8RF69_9ENTE Queuine tRNA-ribosyltransferase OS=Enterococcus canis OX=214095; GN = tgt PE=3 SV=1
MTQPAIQYRLIKKEKHTGARLGEIITPHGTFPTPMFMPVGTLATVKTMSPEELKEMGAGIILSNTYHLWLRPGEDLVAEAGGLHKFMNWDQPILTDSGGFQVFSLSDMRNITEEGVHFKNHLNGSKMFLSPEKAIDIQNKLGSDIMMSFDECPPFDESYDYVKKSVERTSRWAERGLKAHANPDRQGLFGIIQGAGFEDLRKQSARDLVSMDFPGYSIGGLSVGEPKDEMNRVLDFTTPLIPENKPRYLMGVGAADSLIDGVIRGIDMFDCVLPTRIARNGTCMTSKGRLVVKNAQYARDFRPLDENCDCHVCQNYTRAYIRHLIKCDETFGIRLTSYHNLYFLVNLMKQVRQAIMDDNLLEFRQSFFEEYGFNQANAKNF

SEQ ID NO: 54985 - protein, 381 aa, Enterococcus casseliflavus
  REGION 1..381: note = tr|F0EG19|F0EG19_ENTCA Queuine tRNA-ribosyltransferase OS=Enterococcus casseliflavus ATCC 12755 OX=888066 GN=tgt PE=3 SV=1
MTEPAIRYRLIKKEKHTGARLGELITPHGTFPTPMFMPVGTLATVKTLAPEELKEMGAGVILSNTYHLWLRPGEDIVAEAGGLHKFMNWDQPILTDSGGFQVFSLAEMRNIVEEGVHFKNHLNGSKMFLSPEKAIDIQNKLGSDIMMSFDECPPFDESYDYVKKSVERTSRWAERGLKAHANPDRQGLFGIIQGAGFEDLRKQSAQDLISMDFPGYSIGGLSVGEPKAEMNRVLEFTTPWIPENKPRYLMGVGAADSLIDGVIRGVDMFDCVLPTRIARNGTCMTSKGRLVVKNAQYARDFRPIDEKCDCYTCKNYSRAYIRHLIKCDETFGMRLTSYHNVYFLLNLMKNVRQAIMDDNLLEFREHFIEEYGFNKENARNF

SEQ ID NO: 54986 - protein, 381 aa, Enterococcus casseliflavus; identical to SEQ ID NO: 54985
  REGION 1..381: note = tr|A0A1I1YPB3|A0A1I1YPB3_ENTCA Queuine tRNA-ribosyltransferase OS=Enterococcus casseliflavus; OX = 37734 GN=tgt PE=3 SV=1

SEQ ID NO: 54987 - protein, 381 aa, Enterococcus cecorum
  REGION 1..381: note = tr|S1RLN3|S1RLN3_9ENTE Queuine tRNA-ribosyltransferase OS=Enterococcus cecorum DSM 20682 = ATCC 43198 OX=1121864 GN=tgt PE=3 SV=1
MSEPAIKYRLIKKEKHTGARLGELITPHGIFPTPMFMPVGTLATVKTMSPEELKEMGAGVILSNTYHLWLRPGEDLVEKAGGLHKFMNWDQPILTDSGGFQVFSLADMRNIEEEGVHFKNHLNGSPLFLSPEKAINIQNKLGSDIMMSFDECPPFNESYDYVKKSIERTSRWAERGLKAHKNPDRQGLFGIIQGAGFEDLRRQSARDLVSLDFPGYSIGGLSVGESKEEMNRVLEFTTPLVPENKPRYLMGVGAPDSLIDGVIRGVDMFDCVLPTRIARNGTCMTSKGRLVVKNAQYAEDFRPIDEKCDCYTCRNYTRAYVRHLIKCDETFGLRLTSYHNLYFLLNLMKQVREAIMNDNLLEFREYFFEEYGFNKANAKNF

SEQ ID NO: 54988 - protein, 381 aa, Enterococcus cecorum
  REGION 1..381: note = tr|A0A366SEY6|A0A366SEY6_9ENTE Queuine tRNA-ribosyltransferase OS=Enterococcus cecorum OX=44008; GN = tgt PE=3 SV=1
MSEPAIKYRLIKKEKHTGARLGELITPHGTFPTPMFMPVGTLATVKTMSPEELKEMGAGVILSNTYHLWLRPGEDLVEKAGGLHKFMNWDQPILTDSGGFQVFSLADMRNIEEEGVHFKNHLNGSPLFLSPEKAINIQNKLGSDIMMSFDECPPFNESYDYVKKSIERTSRWAERGLKAHKNPARQGLFGIIQGAGFEDLRRQSARDLVSLDFPGYSIGGLSVGESKEEMNRVLEFTTPLVPENKPRYLMGVGAPDSLIDGVIRGVDMFDCVLPTRIARNGTCMTSKGRLVVKNAQYAEDFRPIDEKCDCYTCRNYTRAYVRHLIKCDETFGLRLTSYHNLYFLLNLMKQVREAIMNDNLLEFREYFFEEYGFNKANAKNF

SEQ ID NO: 54989 - protein, 381 aa, Enterococcus columbae
  REGION 1..381: note = tr|S0KDB3|S0KDB3_9ENTE Queuine tRNA-ribosyltransferase OS=Enterococcus columbae DSM 7374 = ATCC 51263 OX=1121865 GN=tgt PE=3 SV=1
MAEPAIRYRLIKKEKHTGARLGELITPHGTFPTPMFMPVGTLATVKTMSPEELKEMGAGVILSNTYHLWLRPGEDLVEKAGGLHKFMNWDQPILTDSGGFQVFSLADMRNIEEEGVHFKNHLNGSPLFLSPEKAINIQNKLGSDIMMSFDECPPFNESYDYVKKSIERTSRWAERGLKAHKNPDRQGLFGIVQGAGFEDLRRQSARDLVSMDFPGYSIGGLSVGESKAEMNRVLEFTTPLIPENKPRYLMGVGAADSLIDGVIRGIDMFDCVLPTRIARNGTCMTSKGRLVVKNAQYAEDFRPIDEKCDCYTCRNYTRAYVRHLIKCDETFGLRLTSYHNLYFLLNLMKQVREAIMNDNLLEFREYFFEEYGFNKADAKKF

SEQ ID NO: 54990 - protein, 381 aa, Enterococcus devriesei
  REGION 1..381: note = tr|A0A1L8SWH3|A0A1L8SWH3_9ENTE Queuine tRNA-ribosyltransferase OS=Enterococcus devriesei; OX = 319970 GN=tgt PE=3 SV=1
MTEPAISYRLIKKEKHTGARLGEIITPHGTFPTPMFMPVGTLATVKTMSPEDLKEMGAGIILSNTYHLWLRPGEDLVAEAGGLHKFMNWDQPILTDSGGFQVFSLADMRNIVEEGVHFKNHLNGSKMFLSPEKAIDIQNKLGSDIMMSFDECPPFDESYDYVKKSVERTSRWAERGLKAHANPTTQGLFGIIQGAGFEDLRRQSAKDLVSMDFPGYSIGGLSVGEPKAEMNRVLEFTTPLIPENKPRYLMGVGAADSLIDGVIRGVDMFDCVLPTRIARNGTCMTSAGRLVVKNAKYAHDFRPLDEKCDCYTCRNYTRAYIRHLIHCDETFGIRLTSYHNLYFLINLMKQVRQAIMDDNLLEFRQAFFEEYGFNKQNAKSF

SEQ ID NO: 54991 - protein, 382 aa, Enterococcus dispar
  REGION 1..382: note = tr|S1NA75|S1NA75_9ENTE Queuine tRNA-ribosyltransferase OS=Enterococcus dispar ATCC 51266; OX = 1139219 GN=tgt PE=3 SV=1
MAQEPAIKYRLIKKEKHTGARLGELITPHGTFPTPMFMPVGTLATVKTMAPEELKEMGAGVILSNTYHLWLRPGEDLVAEAGGLHKFMNWDQPILTDSGGFQVFSLADMRNITEEGVHFKNHLNGAPLFLSPEKAIDIQNKLGSDIMMSFDECPPFDESYDYVKKSVERTSRWAERGLKAHANPNQQGLFGIIQGAGFEDLRRQSAKDLIGMDFPGYSIGGLSVGEPKEEMNRVLDFTTPLIPDHKPRYLMGVGAADSLIDGVIRGIDMFDCVLPTRIARNGTCMTSKGRLVVKNAKFAHDFRPLDEKCDCYTCRNYSRAYIRHLIHCDETFGIRLTTYHNLYFLLNLMKQVRQAIMDDNLLEFRQSFFEEYGYNKENAKSF

SEQ ID NO: 54992 - protein, 381 aa, Enterococcus durans
  REGION 1..381: note = tr|A0A248V9B1|A0A248V9B1_9ENTE Queuine tRNA-ribosyltransferase OS=Enterococcus durans OX=53345; GN = tgt PE=3 SV=1
MSQPAIRYRLIKKEKHTGARLGELITPHGTFPTPMFMPVGTLATVKTMSPEELKAMGAGVILSNTYHLWLRPGEDLVEEAGGLHKFMNWDQPILTDSGGFQVFSLSDMRNIEEEGVHFKNHLNGSKMFLSPEKAINIQNKLGSDIMMSFDECPPFDESYDYVKKSVERTSRWAERGLKAHANPDRQGLFGIIQGAGFEDLRRQSAKDLVGMDFPGYSIGGLSVGEPKAEMNRVLEFTTPLIPENKPRYLMGVGAADSLIDGVIRGVDMFDCVLPTRIARNGTCMTSQGRLVVKNAQYARDFRPIDEKCDCYTCKNYTRAYIRHLIKCDETFGIRLTSYHNLYFLLNLMKQVRQAIMDDNLLEFRAAFFEEYGFNKENAKSF

SEQ ID NO: 54993 - protein, 381 aa, Enterococcus durans
  REGION 1..381: note = tr|A0A5B9A1L7|A0A5B9A1L7_9ENTE Queuine tRNA-ribosyltransferase OS=Enterococcus durans OX=53345; GN = tgt PE=3 SV=1
MSQPAIRYRLIKKEKHTGARLGELITPHGTFPTPMFMPVGTLATVKTMSPEELKAMGAGVILSNTYHLWLRPGEDLVEEAGGLHKFMNWDQPILTDSGGFQVFSLSDMRNIEEEGVHFKNHLNGSKMFLSPEKAINIQNKLGSDIMMSFDECPPFDESYDYVKKSVERTSRWAERGLKAHANPDRQGLFGIIQGAGFEDLRRQSARDLVGMDFPGYSIGGLSVGEPKAEMNRVLEFTTPLIPENKPRYLMGVGAADSLIDGVIRGVDMFDCVLPTRIARNGTCMTSQGRLVVKNAQYARDFRPIDEKCDCYTCKNYTRAYIRHLIKCDETFGIRLTSYHNLYFLLNLMKQVRQAIMDDNLLEFRAAFFEEYGFNKENAKSF

SEQ ID NO: 54994 - protein, 381 aa, Enterococcus faecalis
  REGION 1..381: note = sp|Q837E7|TGT_ENTFA Queuine tRNA-ribosyltransferase; OS = Enterococcus faecalis (strain ATCC 700802 / V583); OX = 226185 GN=tgt PE=3 SV=1
MTEPAIRYRLIKKDKHTGARLGELITPHGTFPTPMFMPVGTLATVKTMSPEELKEMGAGVILSNTYHLWLRPGEDLVEEAGGLHKFMNWDQPILTDSGGFQVFSLSDMRKIEEEGVHFRNHLNGSKMFLSPEKAINIQNKLGSDIMMSFDECPPFDESYEYVKRSIERTSRWAERGLKAHANPDRQGLFGIVQGAGFEDLRRQSAKDLVSMDFPGYSIGGLSVGESKEEMNRVLDFTTPLIPENKPRYLMGVGAPDSLIDGVIRGIDMFDCVLPTRIARNGTCMTSQGRLVVKNAQYARDFRPLDEKCDCYVCRNYTRAYIRHLIKCDETFGIRLTSYHNLYFLLDLMKNVRQAIMDDNLLEFRQAFFEEYGFNKANAKSF

SEQ ID NO: 54995 - protein, 381 aa, Enterococcus faecalis; identical to SEQ ID NO: 54994
  REGION 1..381: note = tr|J6QB71|J6QB71_ENTFL Queuine tRNA-ribosyltransferase OS=Enterococcus faecalis ERV63; OX = 1134793 GN=tgt PE=3 SV=1

SEQ ID NO: 54996 - protein, 390 aa, Enterococcus faecium
  REGION 1..390: note = tr|I3TYI8|I3TYI8_ENTFD Queuine tRNA-ribosyltransferase OS=Enterococcus faecium (strain ATCC BAA-472 / TX0016 / DO) OX=333849 GN=tgt PE=3 SV=1
MTQPAIRYRLIKKEKHTGARLGELITPHGTFPTPMFMPVGTLATVKTMSPEELKEMGAGVILSNTYHLWLRPGEDLVEEAGGLHKFMNWDQPILTDSGGFQVFSLSDMRNIEEEGVHFKNHLNGSRMFLSPEKAINIQNKLGSDIMMSFDECPPFDESYDYVKKSVERTSRWAERGLKAHANPDRQGLFGIIQGAGFEDLRRQSAKDLVGMDFPGYSIGGLSVGEPKSEMNRVLEFTTPLIPENKPRYLMGVGAADSLIDGVIRGVDMFDCVLPTRIARNGTCMTSQGRLVVKNAKYAHDFRPIDEKCDCYTCKNYTRAYIRHLIKCDETFGIRLTSYHNLYFLLNLMKQVRQAIMDDNLLEFREAFFEEYGFNKENAKSFLKENLLKIK

SEQ ID NO: 54997 - protein, 381 aa, Enterococcus faecium
  REGION 1..381: note = tr|R2LRU7|R2LRU7_ENTFC Queuine tRNA-ribosyltransferase OS=Enterococcus faecium EnGen0191; OX = 1157486 GN=tgt PE=3 SV=1
MTQPAIRYRLIKKEKHTGARLGELITPHGTFPTPMFMPVGTLATVKTMSPEELKEMGAGVILSNTYHLWLRPGEDLVEEAGGLHKFMNWDQPILTDSGGFQVFSLSDMRNIEEEGVHFKNHLNGSRMFLSPEKAINIQNKLGSDIMMSFDECPPFDESYDYVKKSVERTSRWAERGLKAHANPDRQGLFGIIQGAGFEDLRRQSAKDLVGMDFPGYSIGGLSVGEPKSEMNRVLEFTTPLIPENKPRYLMGVGAADSLIDGVIRGVDMFDCVLPTRIARNGTCMTSQGRLVVKNAKYAHDFRPIDEKCDCYTCKNYTRAYIRHLIKCDETFGIRLTSYHNLYFLLNLMKQVRQAIMDDNLLEFREAFFEEYGFNKENAKSF

SEQ ID NO: 54998 - protein, 381 aa, unidentified
  source 1..381: note = Enterococcus florum
  REGION 1..381: note = tr|A0A4P5P8I6|A0A4P5P8I6_9ENTE Queuine tRNA-ribosyltransferase OS=Enterococcus florum OX=2480627; GN = tgt PE=3 SV=1
MTQPAISYRLIKKEKHTGARLGEIITPHGTFPTPMFMPVGTLATVKTMAPEELKEMGAGIILSNTYHLWLRPGEDLVAEAGGLHKFMNWDQPILTDSGGFQVFSLADMRNIVEEGVHFKNHLNGSKMFLSPEKAIDIQNKLGSDIMMSFDECPPFDESYDYVKKSVERTSRWAERGLKAHANPDSQGLFGIIQGAGFEDLRRQSAKDLVSMDFPGYSIGGLSVGEPKEEMNRVLEFTTPLIPENKPRYLMGVGAADSLIDGVIRGVDMFDCVLPTRIARNGTTMTSQGRLVVKNAKFAHDFRPLDEKCDCYTCRNYSRAYIRHLIHCDETFGIRLTSYHNLYFLINLMKQVRQAIMDDNLLEFRQAFFEEYGFNKENAKSF

SEQ ID NO: 54999 - protein, 381 aa, Enterococcus gallinarum
  REGION 1..381: note = tr|C9A2I1|C9A2I1_ENTGE Queuine tRNA-ribosyltransferase OS=Enterococcus gallinarum (strain EG2) OX=565653 GN=tgt PE=3 SV=1
MSQPAIRYRLIKKEKHTGARLGELITPHGTFPTPMFMPVGTLATVKTLAPEELKAMGAGVILSNTYHLWLRPGEDLVAEAGGLHKFMNWDQPILTDSGGFQVFSLADMRNIVEEGVHFKNHLNGSKMFLSPEKAIDIQNKLGSDTMMSFDECPPFDESYEYVKKSVERTSRWAERGLKAHANPDSQGLFGIIQGAGFEDLRKQSAQDLISMDFPGYSIGGLSVGEPKAEMNRVLEFTTPWIPDHKPRYLMGVGAADSLIDGVIRGVDMFDCVLPTRIARNGTCMTSKGRLVVKNAQFARDFRPIDENCDCYTCKNYSRAYIRHLIKCDETFGIRLTSYHNVYFLLNLMKQVRQAIMDDNLLEFRQHFFEEYGFNKENAKNF

SEQ ID NO: 55000 - protein, 381 aa, Enterococcus gallinarum; identical to SEQ ID NO: 54985
  REGION 1..381: note = tr|A0A0X8PP41|A0A0X8PP41_ENTGA Queuine tRNA-ribosyltransferase OS=Enterococcus gallinarum OX=1353; GN = tgt PE=3 SV=1

SEQ ID NO: 55001 - protein, 381 aa, Enterococcus gilvus
  REGION 1..381: note = tr|R2V7L1|R2V7L1_9ENTE Queuine tRNA-ribosyltransferase OS=Enterococcus gilvus ATCC BAA-350 OX=1158614 GN=tgt PE=3 SV=1
MTEPAISYRLIKKEKHTGARLGEIITPHGTFPTPMFMPVGTLATVKTMSPEDLKEMGASIILSNTYHLWLRPGEDLVAEAGGLHKFMNWDQPILTDSGGFQVFSLADMRNIVEEGVHFKNHLNGSKMFLSPEKAIDIQNKLGSDIMMSFDECPPFDESYDYVKKSVERTSRWAERGLKAHANPATQGLFGIIQGAGFEDLRRQSAKDLVSMDFPGYSIGGLSVGEPKEEMNRVLEFTTPLIPENKPRYLMGVGAADSLIDGVIRGVDMFDCVLPTRIARNGTCMTSGGRLVVKNAKYAHDFRPLDEKCDCYTCRNYTRAYIRHLIHCDETFGIRLTSYHNLYFLINLMKQVRQAIMDDNLLEFRQAFFEEYGFNKQNAKSF

SEQ ID NO: 55002 - protein, 381 aa, Enterococcus gilvus
  REGION 1..381: note = tr|A0A345FVF2|A0A345FVF2_9ENTE Queuine tRNA-ribosyltransferase OS=Enterococcus gilvus OX=160453; GN = tgt PE=3 SV=1
MTEPAISYRLIKKEKHTGARLGEIITPHGTFPTPMFMPVGTLATVKTMSPEDLKEMGAGIILSNTYHLWLRPGEDLVAEAGGLHKFMNWDQPILTDSGGFQVFSLADMRNIVEEGVHFKNHLNGSKMFLSPEKAIDIQNKLGSDIMMSFDECPPFDESYDYVKKSVERTSRWAERGLKAHANPATQGLFGIIQGAGFEDLRRQSAKDLVSMDFPGYSIGGLSVGEPKEEMNRVLEFTTPLIPENKPRYLMGVGAADSLIDGVIRGVDMFDCVLPTRIARNGTCMTSGGRLVVKNAKYAHDFRPLDEKCDCYTCRNYTRAYIRHLIHCDETFGIRLTSYHNLYFLINLMKQVRQAIMDDNLLEFRQAFFEEYGFNKQNAKSF

SEQ ID NO: 55003 - protein, 381 aa, Enterococcus haemoperoxidus
  REGION 1..381: note = tr|R2SYZ3|R2SYZ3_9ENTE Queuine tRNA-ribosyltransferase OS=Enterococcus haemoperoxidus ATCC BAA-382 OX=1158608 GN=tgt PE=3 SV=1
MTEPAIRYRLIKKEKHTGARLGEIITPHGTFPTPMFMPVGTLATVKTMSPEDLKEMGAGVILSNTYHLWLRPGDDLIAEAGGLHKFMNWDQPILTDSGGFQVFSLSDMRKITEEGVHFRHHLNGSKLFLSPEKAINIQNNLGSDIMMSFDECPPFDESYDYVKKSIERTSRWAERGLKAHANPDRQGLFGIIQGAGFEDLRRQSAKDLISMDFPGYSIGGLSVGEPKAEMNRVLDFTTPLIPDNKPRYLMGVGTADSLIDGVIRGIDMFDCVLPTRIARNGTCMTSKGRLVVKNAQYARDFRPLDEKCDCYTCKNYTRAYIRHLIKADETFGIRLTSYHNLYFLLNLMKQVRQAIMDDNLLEFRQAFFEEYGFNKENPKSF

SEQ ID NO: 55004 - protein, 381 aa, Enterococcus hermanniensis
  REGION 1..381: note = tr|A0A1L8TNE2|A0A1L8TNE2_9ENTE Queuine tRNA-ribosyltransferase OS=Enterococcus hermanniensis; OX = 249189 GN=tgt PE=3 SV=1
MTEPAISYRLIKKEKHTGARLGEIITPHGTFPTPMFMPVGTLATVKTMSPEELKAMGAGIILSNTYHLWLRPGEDLVAEAGGLHKFMNWDQPILTDSGGFQVFSLADMRNIVEEGVHFKNHLNGSKMFLSPEKAIDIQNKLGSDIMMSFDECPPFDESYDYVKKSVERTSRWAERGLKAHANPSTQGLFGIIQGAGFEDLRRQSAKELVSMDFPGYSIGGLSVGEPKEEMNRVLEFTTPLIPENKPRYLMGVGAADSLIDGVIRGVDMFDCVLPTRIARNGTCMTSAGRLVVKNAKYAHDFRPLDEKCDCYTCKNYTRAYIRHLIHCDETFGIRLTSYHNLHFLINLMKQVRQAIMDDNLLEFRQAFFEEYGFNKQNAKSF

SEQ ID NO: 55005 - protein, 381 aa, Enterococcus hirae
  REGION 1..381: note = tr|A0A4V0CD04|A0A4V0CD04_ENTHR Queuine tRNA-ribosyltransferase OS=Enterococcus hirae OX=1354; GN = tgt PE=3 SV=1
MTQPAIRYRLIKKEKHTGARLGELITPHGTFPTPMFMPVGTLATVKTMSPEELKAMGAGVILSNTYHLWLRPGEDLVEEAGGLHKFMNWDQPILTDSGGFQVFSLSDMRNIEEEGVHFKNHLNGSRMFLSPEKAINIQNKLGSDIMMSFDECPPFDESYDYVKKSVERTSRWAERGLKAHLNPDRQGLFGIIQGAGFEDLRRQSAKDLISMDFPGYSIGGLSVGEPKSEMNRVLEFTTPLIPEDKPRYLMGVGAADSLIDGVIRGVDMFDCVLPTRIARNGTCMTSQGRLVVKNAQYAHDFRPIDEKCDCYTCKNYTRAYIRHLIKCDETFGIRLTSYHNLYFLLNLMKQVRQAIMDDHLLEFRAAFFEEYGFNKENAKSF

SEQ ID NO: 55006 - protein, 381 aa, Enterococcus hirae
  REGION 1..381: note = tr|A0A1V8XAN0|A0A1V8XAN0_ENTHR Queuine tRNA-ribosyltransferase OS=Enterococcus hirae OX=1354; GN = tgt PE=3 SV=1
MTQPAIRYRLIKKEKHTGARLGELITPHGTFPTPMFMPVGTLATVKTMSPEELKAMGAGVILSNTYHLWLRPGEDLVEEAGGLHKFMNWDQPILTDSGGFQVFSLSDMRNIEEEGVHFKNHLNGSRMFLSPEKAINIQNKLGSDIMMSFDECPPFDESYDYVKKSVERTSRWAERGLKAHLNPDRQGLFGIIQGAGFEDLRRQSAKDLISMDFPGYSIGGLSVGEPKSEMNRVLEFTTPLIPEDKPRYLMGVGAADSLIDGVIRGVDMFDCVLPTRIARNGTCMTSQGRLVVKNAQYAHDFRPIDEKCDCYTCKNYTRAYIRHLIKCDETFGIRLTSYHNLYFLLNLMKQVRQAIMDDNLLEFRAAFFEEYGFNKENAKSF

SEQ ID NO: 55007 - protein, 381 aa, Enterococcus italicus
  REGION 1..381: note = tr|E6LID1|E6LID1_ENTI1 Queuine tRNA-ribosyltransferase OS=Enterococcus italicus (strain DSM 15952 / LMG 22039 / TP 1.5) OX=888064 GN=tgt PE=3 SV=1
MSQPAIRYRLIKKEKHTGARLGELITPHGTFPTPMFMPVGTLATVKTIAPEELKQMGAGVILSNTYHLWLRPGEDIVEEAGGLHKFMNWDQPILTDSGGFQVFSLADMRNIEEEGVHFRNHLNGSKLFLSPEKAINIQNKLGSDIMMSFDECPPFDESYDYVKKSVERTSRWAARGLEAHLHPDRQGLFGIIQGAGFEELRRQSAKDLISMDFPGYSIGGLSVGEPKSEMNRVLEFTTPLIPEDKPRYLMGVGAADSLIDGVIRGVDMFDCVLPTRIARNGTCMTSKGRLVVKNAQYARDFRPIDENCDCYTCKNYSRAYVRHLIKCDETFGMRLTSYHNLYFLLNLMRQVRQAIMDDNLLEFRQHFFEEYGFNKENAKNF

SEQ ID NO: 55008 - protein, 381 aa, Enterococcus malodoratus
  REGION 1..381: note = tr|R2R960|R2R960_9ENTE Queuine tRNA-ribosyltransferase OS=Enterococcus malodoratus ATCC 43197 OX=1158601 GN=tgt PE=3 SV=1
MTEPAISYRLIKKEKHTGARLGEIITPHGTFPTPMFMPVGTLATVKTMSPEDLKEMGAGIILSNTYHLWLRPGEDLVAEAGGLHKFMNWDQPILTDSGGFQVFSLADMRNIVEEGVHFKNHLNGSKMFLSPEKAIDIQNKLGSDIMMSFDECPPFDESYDYVKKSVERTSRWAERGLNAHANPATQGLFGIIQGAGFEDLRRQSAKDLVSMDFPGYSIGGLSVGEPKEEMNRVLEFTTPLIPENKPRYLMGVGAADSLIDGVIRGVDMFDCVLPTRIARNGTCMTSAGRLVVKNAKYAHDFRPLDEKCDCYTCRNYTRAYIRHLIHCDETFGIRLTSYHNLYFLINLMKQVRQAIMDDNLLEFRQAFFEEYGFNKQNAKSF

SEQ ID NO: 55009 - protein, 381 aa, Enterococcus moraviensis
  REGION 1..381: note = tr|R2RBP9|R2RBP9_9ENTE Queuine tRNA-ribosyltransferase OS=Enterococcus moraviensis ATCC BAA-383 OX=1158609 GN=tgt PE=3 SV=1
MTEPAIRYRLIKKEKHTGARLGEIITPHGTFPTPMFMPVGTLATVKTMSPEDLKEMGAGVILSNTYHLWLRPGDDLIAEAGGLHKFMNWDQPILTDSGGFQVFSLSDMRKITEEGVHFRHHLNGSKLFLSPEKAINIQNNLGSDIMMSFDECPPFDESYDYVKKSIERTSRWAERGLKAHANPDRQGLFGIIQGAGFEDLRHQSAKDLISMDFPGYSIGGLSVGEPKAEMNRVLDFTTPLIPDNKPRYLMGVGTADSLIDGVIRGIDMFDCVLPTRIARNGTCMTSKGRLVVKNAQYARDFRPLDEKCDCYTCKNYTRAYIRHLIKADETFGIRLTSYHNLYFLLNLMKQVRQAIMDDNLLEFRQAFFEEYGFNKENAKSF

SEQ ID NO: 55010 - protein, 381 aa, Enterococcus mundtii
  REGION 1..381: note = tr|A0A022N8Q7|A0A022N8Q7_ENTMU Queuine tRNA-ribosyltransferase OS=Enterococcus mundtii CRL35; OX = 1450511 GN=tgt PE=3 SV=1
MTEPAIRYRLIKKEKHTGARLGELITPHGTFPTPMFMPVGTLATVKTMSPEELKEMGAGVILSNTYHLWLRPGEDLVEEAGGLHKFMNWDQPILTDSGGFQVFSLSDMRNIVEEGVHFKNHLNGSKMFLSPEKAINIQNKLGSDIMMSFDECPPFDESYDYVKKSVERTSRWAERGLKAHANPDRQGLFGIIQGAGFEDLRKQSAKDLISMDFPGYSIGGLSVGEPKAEMNRVLEFTTPLIPDHKPRYLMGVGAADSLIDGVIRGVDMFDCVLPTRIARNGTCMTSQGRLVVKNAQYARDFRPIDEKCDCYTCKNYTRAYIRHLIKCDETFGIRLTSYHNLYFLLNLMKQVRQAIMDDNLLEFRAAFFEEYGFNKENAKSF

SEQ ID NO: 55011 - protein, 381 aa, Enterococcus mundtii; identical to SEQ ID NO: 55010
  REGION 1..381: note = tr|V5XM99|V5XM99_ENTMU Queuine tRNA-ribosyltransferase OS=Enterococcus mundtii QU 25; OX = 1300150 GN=tgt PE=3 SV=1

SEQ ID NO: 55012 - protein, 381 aa, Enterococcus pallens
  REGION 1..381: note = tr|R2SQ49|R2SQ49_9ENTE Queuine tRNA-ribosyltransferase OS=Enterococcus pallens ATCC BAA-351 OX=1158607 GN=tgt PE=3 SV=1
MTQPAISYRLIKKEKHTGARLGEIITPHGTFPTPMFMPVGTLATVKTMSPEELKEMGAGIILSNTYHLWLRPGEDLVAEAGGLHKFMNWDQPILTDSGGFQVFSLADMRNIVEEGVHFKNHLNGSKMFLSPEKAIDIQNKLGSDIMMSFDECPPFDESYDYVKKSVERTSRWAERGLKAHANPDTQGLFGIIQGAGFEDLRRQSAKDLVSMDFPGYSIGGLSVGEPKAEMNRVLEFTTPLIPENKPRYLMGVGAADSLIDGVIRGVDMFDCVLPTRIARNGTTMTSQGRLVVKNAKFAHDFRPLDENCDCYTCRNYSRAYIRHLIHCDETFGIRLTSYHNLYFLINLMKQVRQAIMDDNLLEFREAFFEAYGFNKENAKSF

SEQ ID NO: 55013 - protein, 381 aa, Enterococcus phoeniculicola
  REGION 1..381: note = tr|R3TM85|R3TM85_9ENTE Queuine tRNA-ribosyltransferase OS=Enterococcus phoeniculicola ATCC BAA-412 OX=1158610 GN=tgt PE=3 SV=1
MSQPAIRYRLIKKEKHTGARLGEIITPHGTFPTPMFMPVGTLATVKTMSPEELKEMGAGIILSNTYHLWLRPGEDLVEEAGGLHKFMNWDQPILTDSGGFQVFSLSDMRNIVEEGVHFKNHLNGSKMFLSPEKAIMIQNKLGSDIMMSFDECPPFDESYDYVKKSVERTSRWAQRGLDAHANPDRQGLFGIIQGAGFEDLRRQSASDLVSMDFPGYSIGGLSVGESKEEMNRVLDFTTPLIPENKPRYLMGVGAADSLIDGVIRGVDMFDCVLPTRIARNGTCMTSQGRLVVKNAQYAHDFRPIDEKCDCYTCKNYTRAYIRHLIKCDETFGIRLTSYHNLHFLLNLMKQVRQAIMDDNLLEFRQAFFEEYGFNKENAKSF

SEQ ID NO: 55014 - protein, 381 aa, unidentified
  source 1..381: note = Enterococcus plantarum
  REGION 1..381: note = tr|A0A2W4BFU2|A0A2W4BFU2_9ENTE Queuine tRNA-ribosyltransferase OS=Enterococcus plantarum; OX = 1077675 GN=tgt PE=3 SV=1
MTEPAIRYRLIKKEKHTGARLGEIITPHGTFPTPMFMPVGTLATVKTMSPEDLKEMGAGVILSNTYHLWLRPGDDLIAEAGGLHKFMNWDQPILTDSGGFQVFSLSDMRKITEEGVHFRHHLNGSKLFLSPEKAINIQNNLGSDIMMSFDECPPFDESYEYVKKSIERTSRWAERGLKAHANPDRQGLFGIIQGAGFEDLRRQSAKELISMDFPGYSIGGLSVGEPKAEMNRVLDFTTPLIPDNKPRYLMGVGTADSLIDGVIRGIDMFDCVLPTRIARNGTCMTSKGRLVVKNAQYARDFRPLDEKCDCYTCKNYTRAYIRHLIKADETFGIRLTSYHNLYFLLNLMKQVRQAIMDDNLLEFREAFFEEYGFNKENAKSF

SEQ ID NO: 55015 - protein, 381 aa, Enterococcus pseudoavium
  REGION 1..381: note = tr|A0A3D9A1E5|A0A3D9A1E5_9ENTE Queuine tRNA-ribosyltransferase OS=Enterococcus pseudoavium; OX = 44007 GN=tgt PE=3 SV=1
MTEPAISYRLIKKEKHTGARLGEIITPHGTFPTPMFMPVGTLATVKTMSPEELKEMGAGIILSNTYHLWLRPGEDLVAEAGGLHKFMNWDQPILTDSGGFQVFSLADMRNIVEEGVHFKNHLNGSKMFLSPEKAIDIQNKLGSDIMMSFDECPPFDESYDYVKKSVERTSRWAERGLKAHANPATQGLFGIIQGAGFEDLRRQSAKDLVSMDFPGYSIGGLSVGEPKEEMNRVLEFTTPLIPENKPRYLMGVGAADSLIDGVIRGVDMFDCVLPTRIARNGTCMTSAGRLVVKNAKYAHDFRPLDEKCDCYTCRNYTRAYIRHLIHCDETFGIRLTSYHNLYFLINLMKQVRQAIMDDNLLEFRQAFFEEYGFNKQNAKSF

SEQ ID NO: 55016 - protein, 381 aa, Enterococcus quebecensis; identical to SEQ ID NO: 54981
  REGION 1..381: note = tr|A0A1E5GWC9|A0A1E5GWC9_9ENTE Queuine tRNA-ribosyltransferase OS=Enterococcus quebecensis; OX = 903983 GN=tgt PE=3 SV=1

SEQ ID NO: 55017 - protein, 381 aa, Enterococcus raffinosus; identical to SEQ ID NO: 55015
  REGION 1..381: note = tr|R2RDU7|R2RDU7_9ENTE Queuine tRNA-ribosyltransferase OS=Enterococcus raffinosus ATCC 49464 OX=1158602 GN=tgt PE=3 SV=1

SEQ ID NO: 55018 - protein, 381 aa, Enterococcus raffinosus; identical to SEQ ID NO: 55015
  REGION 1..381: note = tr|A0A1L8X522|A0A1L8X522_9ENTE Queuine tRNA-ribosyltransferase OS=Enterococcus raffinosus; OX = 71452 GN=tgt PE=3 SV=1

SEQ ID NO: 55019 - protein, 381 aa, Enterococcus ratti
  REGION 1..381: note = tr|A0A1L8WKX3|A0A1L8WKX3_9ENTE Queuine tRNA-ribosyltransferase OS=Enterococcus ratti OX=150033; GN = tgt PE=3 SV=1
MSQPAIRYRLIKKEKHTGARLGELITPHGTFPTPMFMPVGTLATVKTLSPEELKAMGAGVILSNTYHLWLRPGEDLVAEAGGLHKFMNWDQPILTDSGGFQVFSLSDMRNIEEEGVHFKNHLNGSKMFLSPEKAIAIQNKLGSDIMMSFDECPPFNESYAYVKKSVERTSRWAERGLNAHANPYHQGLFGIIQGAGFEDLRRQSAQDLVAMDFPGYSIGGLSVGEPKAEMNRVLEFTTPLIPENKPRYLMGVGAADSLIDGVIRGVDMFDCVLPTRIARNGTCMTSQGRLVVKNAQYAHDFRPIDEKCDCYTCKNYTRAYIRHLIKCDETFGIRLTSYHNLYFLLNLMKQVRQAIMDDHLLEFRTAFFEEYGFNKENAKSF

SEQ ID NO: 55020 - protein, 381 aa, unidentified
  source 1..381: note = Enterococcus rivorum
  REGION 1..381: note = tr|A0A1E5L167|A0A1E5L167_9ENTE Queuine tRNA-ribosyltransferase OS=Enterococcus rivorum OX=762845; GN = tgt PE=3 SV=1
MTQPAIRYRLIKKEKHTGARLGEIITPHGTFPTPMFMPVGTLATVKTMSPEELKEMGSGIILSNTYHLWLRPGEDLIEEAGGLHKFMNWDQPILTDSGGFQVFSLSDMRKIEEEGVHFRNHLNGSKMFLSPEKAINIQNKLGSDIMMSFDECPPFNESYDYVKRSIERTSRWAERGLKAHANPDRQGLFGIVQGAGFEDLRRQSAKDLVSMDFPGYSIGGLSVGESKEEMNRVLDFTTPLIPENKPRYLMGVGAADSLIDGVIRGVDMFDCVLPTRIARNGTCMTSQGRLVVKNAQYARDFRPLDEKCDCYTCKNYSRAYIRHLIKCDETFGIRLTSYHNLYFLLNLMKQVRQAIMDDNLLEFRQAFFEEYGFNKENAKSF

SEQ ID NO: 55021 - protein, 381 aa, unidentified; identical to SEQ ID NO: 54981
  source 1..381: note = Enterococcus rotai
  REGION 1..381: note = tr|A0A0U2XIU3|A0A0U2XIU3_9ENTE Queuine tRNA-ribosyltransferase OS=Enterococcus rotai OX=118060; GN = tgt PE=3 SV=1

SEQ ID NO: 55022 - protein, 381 aa, Enterococcus saccharolyticus
  REGION 1..381: note = tr|S0NFU0|S0NFU0_9ENTE Queuine tRNA-ribosyltransferase OS=Enterococcus saccharolyticus subsp. saccharolyticus ATCC 43076 OX=1139996 GN=tgt PE=3; SV = 1
MSEPAIRYRLIKKEKYTGARLGELITPHGTFPTPMFMPVGTLATVKTIAPEELKAMGAGVILSNTYHLWLRPGEDIVAEAGGLHKFMNWDQPILTDSGGFQVFSLADMRNIVEEGVHFKNHLNGSPLFLSPEKAIDIQNKLGSDIMMSFDECPPFDESYDYVKSSVERTSRWAERGLKAHANPDRQGLFGIIQGAGFEDLRRQSAHDLISMDFPGYSIGGLSVGEPKAEMNRVLEFTTPLIPENKPRYLMGVGTPDSLIDGVIRGIDMFDCVLPTRIARNGTCMTSKGRLVVKNAQFARDYRPIDENCDCYTCRNYSRAYIRHLIKCDETFGIRLTSYHNLYFLLNMMKQVRQAIMDDNLLEFRQHFFEEYGFNKENAKNF

SEQ ID NO: 55023 - protein, 381 aa, Enterococcus saccharolyticus
  REGION 1..381: note = tr|A0A449EWN6|A0A449EWN6_9ENTE Queuine tRNA-ribosyltransferase OS=Enterococcus saccharolyticus; OX = 41997 GN=tgt PE=3 SV=1
MSQPAIRYRLIKKEKHTGARLGELITPHGTFPTPMFMPVGTLATVKTLAPEELKAMGAGVILSNTYHLWLRPGEDLVAEAGGLHKFMNWDQPILTDSGGFQVFSLADMRNIVEEGVHFKNHLNGSKMFLSPEKAIDIQNKLGSDIMMSFDECPPFDESYEYVKKSVERTSRWAERGLKAHANPDSQGLFGIIQGAGFEDLRKQSAQDLISMDFPGYSIGGLSVGEPKAEMNRVLEFTTPWIPDHKPRYLMGVGAADSLIDGVIRGVDMFDCVLPTRIARNGTCMTSKGRLVVKNAQFARDFRPIDENCDCYTCKNYSRAYIRHLIKCDETFGIRLTSYHNVYFLLNLMKQVRQAIMDDNLLEFRQHFFEEYGFNKENAKNF

SEQ ID NO: 55024 - protein, 381 aa, Enterococcus silesiacus; identical to SEQ ID NO: 54981
  REGION 1..381: note = tr|A0A0S3KFB5|A0A0S3KFB5_9ENTE Queuine tRNA-ribosyltransferase OS=Enterococcus silesiacus; OX = 332949 GN=tgt PE=3 SV=1

SEQ ID NO: 55025 - protein, 381 aa, Enterococcus sp.
  REGION 1..381: note = tr|A0A242AZT8|A0A242AZT8_9ENTE Queuine tRNA-ribosyltransferase OS=Enterococcus sp. 7F3_DIV0205; OX = 1834189 GN=tgt PE=3 SV=1
MTEAAIRYRLIKKEKHTGARLGEIITPHGTFPTPMFMPVGTLATVKTMSPEDLKEMGAGVILSNTYHLWLRPGDDLIAEAGGLHKFMNWDQPILTDSGGFQVFSLSDMRKITEEGVHFRHHLNGSKLFLSPEKAINIQNNLGSDIMMSFDECPPFDESYDYVKKSIERTSRWAERGLKAHANPDRQGLFGIIQGAGFEDLRRQSAKDLISMDFPGYSIGGLSVGEPKAEMNRVLDFTTPLIPDNKPRYLMGVGTADSLIDGVIRGIDMFDCVLPTRIARNGTCMTSKGRLVVKNAQYARDFRPLDEKCDCYTCKNYTRAYIRHLIKADETFGIRLTSYHNLYFLLNLMKQVRQAIMDDNLLEFRQAFFEEYGFNKENAKSF

SEQ ID NO: 55026 - protein, 381 aa, Enterococcus sp.
  REGION 1..381: note = tr|A0A291DMY9|A0A291DMY9_9ENTE Queuine tRNA-ribosyltransferase OS=Enterococcus sp. FDAARGOS_375; OX = 2060307 GN=tgt PE=3 SV=1
MTEPAIRYRLIKKEKHTGARLGELITPHGTFPTPMFMPVGTLATVKTLAPEELKEMGAGVILSNTYHLWLRPGEDIVAEAGGLHKFMNWDQPILTDSGGFQVFSLAEMRNIVEEGVHFKNHLNGSKMFLSPEKAIDIQNKLGSDIMMSFDECPPFDESYDYVKKSVERTSRWAERGLKAHANPDRQGLFGIIQGAGFEDLRKQSAQDLISMDFPGYSIGGLSVGEPKAEMNRVLEFTTPCIPENKPRYLMGVGAADSLIDGVIRGVDMFDCVLPTRIARNGTCMTSKGRLVVKNAQYARDFRPIDEKCDCYTCKNYSRAYIRHLIKCDETFGMRLTSYHNVYFLLNLMKNVRQAIMDDNLLEFREHFIEEYGFNKENARNF

SEQ ID NO: 55027 - protein, 381 aa, Enterococcus sulfureus
  REGION 1..381: note = tr|S0PBD8|S0PBD8_9ENTE Queuine tRNA-ribosyltransferase OS=Enterococcus sulfureus ATCC 49903 OX=1140003 GN=tgt PE=3 SV=1
MSQPAIRYRLIKKEKHTGARLGEIITPHGTFPTPMFMPVGTLATVKTIAPEELKQMGAGIILSNTYHLWLRPGEDLVEEAGGLHKFMNWDQPILTDSGGFQVFSLADMRNIEEEGVHFKNHLNGSPLFLSPEKAINIQNKLGSDIMMSFDECPPFDESYDYVKKSVERTSRWAERGLKAHANPDRQGLFGIIQGAGFEDLRRQSAKDLISMDFPGYSIGGLSVGEPKSEMNRVLDFTTPLIPDNKPRYLMGVGTPDSLIDGVMRGIDMFDCVLPTRIARNGTCMTSQGRLVVKNAQYARDFRPLDEKCDCYTCKNYSRAYIRHLIKCDETFGIRLTSYHNLHFLLNVMKQVRQAIMDDNLLEFRQAFFEEYGFNKENAKNF

SEQ ID NO: 55028 - protein, 381 aa, Enterococcus termitis
  REGION 1..381: note = tr|A0A242LEX9|A0A242LEX9_9ENTE Queuine tRNA-ribosyltransferase OS=Enterococcus termitis OX=332950; GN = tgt PE=3 SV=1
MTEPAIRYRLIKKEKHTGARLGEIITPHGTFPTPMFMPVGTLATVKTMSPEDLKEMGAGVILSNTYHLWLRPGDDLIAEAGGLHKFMNWDQPILTDSGGFQVFSLSDMRKITEEGVHFRHHLNGSKLFLSPEKAINIQNNLGSDIMMSFDECPPFDESYDYVKKSIERTSRWAERGLKAHANPDRQGLFGIIQGAGYEDLRRQSAKDLISMDFPGYSIGGLSVGEPKAEMNRVLDFTTPLIPDNKPRYLMGVGTADSLIDGVIRGIDMFDCVLPTRIARNGTCMTSKGRLVVKNAQYARDFRPLDEKCDCYTCKNYTRAYIRHLIKADETFGIRLTSYHNLYFLLNLMKQVRQAIMDDNLLEFRQDFFEEYGFNKENAKSF

SEQ ID NO: 55029 - protein, 381 aa, Enterococcus termitis
  REGION 1..381: note = tr|A0A1E5GCI9|A0A1E5GCI9_9ENTE Queuine tRNA-ribosyltransferase OS=Enterococcus termitis OX=332950; GN = tgt PE=3 SV=1
MTEPAIRYRLIKKEKHTGARLGELITPHGTFPTPMFMPVGTLATVKTMSPEDLKEIGAGVILSNTYHLWLRPGDDLIAEAGGLHKFMNWDQPILTDSGGFQVFSLSDMRKITEEGVHFRHHLNGSKLFLSPEKAINIQNNLGSDIMMSFDECPPFDESYDYVKKSIERTSRWAERGLKAHANPDRQGLFGIIQGAGFEDLRRQSAKDLISMDFPGYSIGGLSVGEPKAEMNRVLDFTTPLIPDNKPRYLMGVGTADSLIDGVIRGIDMFDCVLPTRIARNGTCMTSKGRLVVKNAQYARDFRPLDEKCDCYTCKNYTRAYIRHLIKADETFGIRLTSYHNLYFLLNLMKQVRQAIMDDNLLEFREAFFEEYGFNKENAKSF

SEQ ID NO: 55030 - protein, 381 aa, Enterococcus thailandicus
  REGION 1..381: note = tr|A0A249SG16|A0A249SG16_ENTTH Queuine tRNA-ribosyltransferase OS=Enterococcus thailandicus; OX = 417368 GN=tgt PE=3 SV=1
MSQPAIRYRLIKKEKHTGARLGEIITPHGTFPTPMFMPVGTLATVKTMSPEELKEMGAGIILSNTYHLWLRPGEDLVAEAGGLHKFMNWDQPILTDSGGFQVFSLSDMRNIEEEGVHFKNHLNGSRMFLSPEKAIDIQNKLGSDIMMSFDECPPFDESYDYVKKSVERTSRWAERGLKAHANPATQGLFGIIQGAGFEDLRRQSVKDLVSMDFPGYSIGGLSVGEPKADMNRVLEFTTPLIPEDKPRYLMGVGAADSLIDGVIRGVDMFDCVLPTRIARNGTCMTSQGRLVVKNAKYAHDFRPIDEKCDCYTCKNYTRAYIRHLIKCDETFGIRLTSYHNLYFLLNLMKQVRQAIMDDNLLEFRAAFFEEYGFNKENAKSF

SEQ ID NO: 55031 - protein, 381 aa, Enterococcus thailandicus
  REGION 1..381: note = tr|A0A179ES40|A0A179ES40_ENTTH Queuine tRNA-ribosyltransferase OS=Enterococcus thailandicus; OX = 417368 GN=tgt PE=3 SV=1
MSQPAIRYRLIKKEKHTGARLGEIITPHGTFPTPMFMPVGTLATVKTMSPEELKEMGAGIILSNTYHLWLRPGEDLVAEAGGLHKFMNWDQPILTDSGGFQVFSLSDMRNIEEEGVHFKNHLNGSRMFLSPEKAIDIQNKLGSDIMMSFDECPPFDESYDYVKKSVERTSRWAERGLKAHANPATQGLFGIIQGAGFEDLRRQSAKDLVSMDFPGYSIGGLSVGEPKADMNRVLEFTTPLIPEDKPRYLMGVGAADSLIDGVIRGVDMFDCVLPTRIARNGTCMTSQGRLVVKNAKYAHDFRPIDEKCDCYTCKNYTRAYIRHLIKCDETFGIRLTSYHNLYFLLNLMKQVRQAIMDDNLLEFRAAFFEEYGFNKENAKSF

SEQ ID NO: 55032 - protein, 381 aa, Enterococcus ureasiticus
  REGION 1..381: note = tr|A0A1E5GFS5|A0A1E5GFS5_9ENTE Queuine tRNA-ribosyltransferase OS=Enterococcus ureasiticus; OX = 903984 GN=tgt PE=3 SV=1
MTEPAIRYRLIKKEKHTGARLGEIITPHGTFPTPMFMPVGTLATVKTMSPEDLKEMGAGVILSNTYHLWLRPGDDLIAEAGGLHKFMNWDQPILTDSGGFQVFSLSDMRKITEEGVHFRHHLNGSKLFLSPEKAINIQNNLGSDIMMSFDECPPFDESYDYVKKSIERTSRWAERGLKAHANPDRQGLFGIIQGAGYEDLRRQSAKDLISMDFPGYSIGGLSVGEPKAEMNRVLDFTTPLIPDNKPRYLMGVGTADSLIDGVIRGIDMFDCVLPTRIARNGTCMTSKGRLVVKNAQYARDFRPLDEKCDCYTCKNYTRAYIRHLIKADETFGIRLTSYHNLYFLLNLMKQVRQAIMDDNLLEFRQAFFEEYGFNKENAKSF

SEQ ID NO: 55033 - protein, 381 aa, unidentified
  source 1..381: note = Enterococcus ureilyticus
  REGION 1..381: note = tr|A0A1E5HFN7|A0A1E5HFN7_9ENTE Queuine tRNA-ribosyltransferase OS=Enterococcus ureilyticus; OX = 1131292 GN=tgt PE=3 SV=1
MTEPAIRYRLIKKEKHTGARLGEIITPHGTFPTPMFMPVGTLATVKTMSPEDLKEMGAGVILSNTYHLWLRPGDDLIAEAGGLHKFMNWDQPILTDSGGFQVFSLSDMRKITEEGVHFRHHLNGSKLFLSPEKAINIQNNLGSDIMMSFDECPPFDESYDYVKKSIERTSRWAERGLKAHANPDRQGLFGIIQGAGFEDLRRQSAKDLISMDFPGYSIGGLSVGEPKAEMNRVLDFTTPLIPDNKPRYLMGVGTADSLIDGVIRGIDMFDCVLPTRIARNGTCMTSKGRLVVKNAQYARDFRPLDEKCDCYTCKNYTRAYIRHLIKADETFGIRLTSYHNLYFLLNLMKQVRQAIMDDNLLEFREAFFEEYGFNKENAKSF

SEQ ID NO: 55034 - protein, 381 aa, Enterococcus villorum
  REGION 1..381: note = tr|A0A511J2K7|A0A511J2K7_9ENTE Queuine tRNA-ribosyltransferase OS=Enterococcus villorum OX=112904; GN = tgt PE=3 SV=1
MSQPAIRYRLIKKEKHTGARLGELITPHGTFPTPMFMPVGTLATVKTMSPEELKAMGAGVILSNTYHLWLRPGEDLVEEAGGLHKFMNWDQPILTDSGGFQVFSLSDMRNIEEEGVHFKNHLNGSRMFLSPEKAINIQNKLGSDIMMSFDECPPFDESYDYVKKSVERTSRWADRGLKAHANPDRQGLFGIIQGAGFEDLRRQSAHDLVAMDFPGYSIGGLSVGEPKAEMNRVLEFTTPLIPENKPRYLMGVGAADSLIDGVIRGVDMFDCVLPTRIARNGTCMTSKGRLVVKNAQYAHDFRPIDEKCDCYTCRNYTRAYIRHLIKCDETFGIRLTSYHNLHFLLNLMKQVRQAIMDDHLLEFRAAFFEEYGFNKENAKSF

SEQ ID NO: 55035 - protein, 381 aa, Enterococcus villorum
  REGION 1..381: note = tr|A0A1V8YX44|A0A1V8YX44_9ENTE Queuine tRNA-ribosyltransferase OS=Enterococcus villorum OX=112904; GN = tgt PE=3 SV=1
MSQPAIRYRLIKKEKHTGARLGELITPHGTFPTPMFMPVGTLATVKTMSPEELKAMGAGVILSNTYHLWLRPGEDLVEEAGGLHKFMNWDQPILTDSGGFQVFSLSDMRNIEEEGVHFKNHLNGSRMFLSPEKAINIQNKLGSDIMMSFDECPPFDESYDYVKKSVERTSRWADRGLKAHANPDRQGLFGIIQGAGFEDLRRQSAHDLVAMDFPGYSIGGLSVGEPKAEMNRVLEFTTPLIPENKPRYLMGVGAADSLIDGVIRGVDMFDCVLPTRIARNGTCMTSKGRLVVKNAQYAHDFRPIDEKCDCYTCKNYTRAYIRHLIKCDETFGIRLTSYHNLHFLLNLMKQVRQAIMDDHLLEFRAAFFEEYGFNKENAKSF

SEQ ID NO: 55036 - protein, 381 aa, Enterorhabdus caecimuris
  REGION 1..381: note = tr|A0A4S4G1X8|A0A4S4G1X8_9ACTN Queuine tRNA-ribosyltransferase OS=Enterorhabdus caecimuris; OX = 671266 GN=tgt PE=3 SV=1
MALFDCTCEATSGHARALSYETAHGTFRTPMFMPVGTSATVKGVTTDQLRELGAQVVLANTYHLAMRPGADLVEEAGGIHRFMNYDGPMLTDSGGFQVFSLADTVKLSDDGVTFKSIYDGSNIHWTPEENMVIQQKIGADIAMQLDQCAPYPAERAFVAKAVDYSSAWARRCLAAHTRPDQTLFGIVQGGMHLDLRLESIRRLREIEDESLAAGHRRFGGFGIGGYSVGEDHEVMFETLGAVARACPEDRPRYLMGVGNPTTLVRAVREGVDMFDCVLPTRTARMGTAFSSAGRMNMRNAKFARDFTPLDPACDCPTCRNYTRAYLRHLVKQNEMLGAMLLSVHNLHFLLDLMRRAREAVLADAYEDFYRAWMDSPAAADY

SEQ ID NO: 55037 - protein, 381 aa, Enterorhabdus caecimuris
  REGION 1..381: note = tr|R9L1V9|R9L1V9_9ACTN Queuine tRNA-ribosyltransferase OS=Enterorhabdus caecimuris B7; OX = 1235794 GN=tgt PE=3 SV=1
MALFDCTCEATSGHARALSYETAHGTFRTPMFMPVGTSATVKGVTTDQLRELGAQVVLANTYHLAMRPGADLVEEAGGIHRFMNYDGPMLTDSGGFQVFSLADTVKLSDDGVTFKSIYDGSNIHWTPEENMVIQQKIGADIAMQLDQCAPYPAERAFVAKAVDYSSAWARRCLAAHTRPDQTLFGIVQGGMHLDLRLESIRRLREIEDESLAAGHQRFGGFGIGGYSVGEDHEVMFETLGAVARACPEDRPRYLMGVGNPTTLVRAVREGVDMFDCVLPTRTARMGTAFSSTGRMNMRNAKFARDFTPLDPACTCPTCQNYTRAYLRHLVKQNEMLGAMLLSVHNLHFLLDLMRRAREAVLADAYEDFYRAWMASPAAADY

SEQ ID NO: 55038 - protein, 381 aa, Enterorhabdus sp.
  REGION 1..381: note = tr|A0A4S2FYH5|A0A4S2FYH5_9ACTN Queuine tRNA-ribosyltransferase OS=Enterorhabdus sp. NM05_H27; OX = 2516956 GN=tgt PE=3 SV=1
MALFDCTCEATSGHARALSYETAHGAFRTPMFMPVGTSATVKGVTTDQLRELGAQVVLANTYHLAMRPGADLVEEAGGIHRFMNYDGPMLTDSGGFQVFSLADTVKLSDDGVTFKSIYDGSNIHWTPEENMVIQQKIGADIAMQLDQCAPYPAERAFVAKAVDYSSAWARRCLAAHTRPDQTLFGIVQGGMHLDLRLESIRRLREIEDESLAAGHRRFGGFGIGGYSVGEDHEVMFETLGAVARACPEDRPRYLMGVGNPTTLVRAVREGVDMFDCVLPTRTARMGTAFSSTGRMNMRNAKFARDFTPLDPACTCPTCQNYTRAYLRHLVKQNEMLGAMLLSVHNLHFLLDLMRRAREAVLADAYEDFYRAWMDSPAAADY

SEQ ID NO: 55039 - protein, 381 aa, unidentified
  source 1..381: note = Enteroscipio rubneri
  REGION 1..381: note = tr|A0A2K2UF20|A0A2K2UF20_9ACTN Queuine tRNA-ribosyltransferase OS=Enteroscipio rubneri OX=2070686; GN = tgt PE=3 SV=1
MALFDCACEATSGHARALSYETAHGTFHTPMFMPVGTSATVKGVTAGQLRDLNSQVVLANTYHLSLRPGADVVAEAGGVHRFMNYDGPMLTDSGGFQVFSLADTLKLDDDGLTFRSIYDGSKIRWTPESNMAIQEQLGADIAMQLDQCTPYPAEHAFVAKAVDLSSNWARRCLAAHVRPDQTLFGIVQGGMELDLRLESIRRLREIEEESLAAGGRRFGGFGIGGYSVGEDHEVMFETLGPVARACPEDRPRYLMGVGNPTTLVRAVREGVDMFDCVLPTRTARMGTAFSSTGRMNMRNAKFTRDFGPLDAACTCPTCRNHSRAYIRHLVKQNEMLGGILLSIHNLHYLIDLMRRVREAVLADAYEEFYAAWMASPAASDY

SEQ ID NO: 55040 - protein, 375 aa, Enterovibrio nigricans
  REGION 1..375: note = tr|A0A1T4URH7|A0A1T4URH7_9GAMM Queuine tRNA-ribosyltransferase OS=Enterovibrio nigricans DSM 22720 OX=1121868 GN=tgt PE=3 SV=1
MKYELIKKEGRARRGRLTFERGTVETPAFMPVGTYGTVKGMTPEEVAETGAQILLGNTFHLWLRPGQDVMRAHGDLHDFMHWQGPILTDSGGFQVFSLGKMRKITEEGVHFRNPVNGDKIFMDAEKSMEIQYDLGSDIVMIFDECTPYPATHDEAKKSMEMSLRWAQRSRNHFDKMGNKNALFGIVQGSVYEDLRDVSVEGLTNIGFDGYAVGGLAVGEPKEDMHRVLEHTCPKLPEDKPRYLMGVGKPEDLVEGVRRGIDMFDCVMPTRNARNGHLFVTGGVIKIRNAKHKTDTTALDPECDCYTCRNYSKAYLHHLDRCNEILGARLNTIHNLRYYQRLMESLRNAIDEGRLETFVQEFYERRGRDVPPLKKD

SEQ ID NO: 55041 - protein, 375 aa, Enterovibrio norvegicus
  REGION 1..375: note = tr|A0A1I5V9T4|A0A1I5V9T4_9GAMM Queuine tRNA-ribosyltransferase OS=Enterovibrio norvegicus DSM 15893 OX=1121869 GN=tgt PE=3 SV=1
MKYELLKKEGRARRGRLTFERGTVETPAFMPVGTYGTVKGMTPEEVAETGAEILLGNTFHLWLRPGQEVMRAHGDLHDFMHWQGPILTDSGGFQVFSLGKMRKITEEGVHFRNPVNGDRIFMDAEKSMEIQYDLGSDIVMIFDECTPYPATHDEAKKSMEMSLRWAQRSRNHFDKMENKNALFGIVQGSVYEDLRDVSVEGLTSIGFDGYAVGGLAVGEPKEDMHRVLEHTCPKLPEDKPRYLMGVGKPEDLVEGVRRGIDMFDCVMPTRNARNGHLFVTGGVIKIRNATHKSDTTALDPQCDCYTCRNYSKAYLHHLDRCNEILGARLNTIHNLRYYQRLMESLRNAIDEGRLETFVTEFYARRGQDVPPLKED

SEQ ID NO: 55042 - protein, 375 aa, Enterovibrio norvegicus
  REGION 1..375: note = tr|A0A2N7LHP4|A0A2N7LHP4_9GAMM Queuine tRNA-ribosyltransferase OS=Enterovibrio norvegicus; OX = 188144 GN=tgt PE=3 SV=1
MKYELLKKEGRARRGRLTFERGTVETPAFMPVGTYGTVKGMTPEEVAETGAEILLGNTFHLWLRPGQEVMRAHGDLHDFMHWQGPILTDSGGFQVFSLGKTRKITEEGVHFRNPVNGDRVFMDAEKSMEIQYDLGSDIVMIFDECTPYPATHDEAKKSMEMSLRWAQRSRNHFDKMENKNALFGIIQGSVYEDLRDVSVEGLTNIGFDGYAVGGLAVGEPKEDMHRVLEHTCPKLPEDKPRYLMGVGKPEDLVEGVRRGIDMFDCVMPTRNARNGHLFVTGGVIKIRNATHKSDTTALDPQCDCYTCRNYSKAYLHHLDRCNEILGARLNTIHNLRYYQRLMESLRNAIDEGRLETFVTEFYARRGQDVPPLKED

SEQ ID NO: 55043 - protein, 375 aa, unidentified
  source 1..375: note = Enterovibrio pacificus
  REGION 1..375: note = tr|A0A1C3EGK3|A0A1C3EGK3_9GAMM Queuine tRNA-ribosyltransferase OS=Enterovibrio pacificus; OX = 1080227 GN=tgt PE=3 SV=1
MKYELIKKDGRARRGRLVFERGTVETPAFMPVGTYGTVKGMTPEEVKETGAQILLGNTFHLWLRPGQEVMKMHGDLHDFMNWQGPILTDSGGFQVFSLGDIRKITEEGVHFRNPVNGDKIFMDAEKSMEIQRDLGSDVVMIFDECTPYPATHDEAQKSMEMSLRWAKRSRVHHDKLENKNALFGIVQGSVYEDLRDVSVKGLTEIGFDGYAVGGLAVGEPKEDMHRVLEHTCPQLPEDKPRYLMGVGKPEDLVEGVRRGVDMFDCVMPTRNARNGHLFVSDGVIKIRNAKHKSDTSPLDSECDCYTCRNYSKAYLHHLDRCNEILGARLNTIHNLRHYQLLMEGLRKAIDEGKLDAFVEDFYARRGRDVPPLKED

SEQ ID NO: 55044 - protein, 378 aa, unidentified
  source 1..378: note = Enterovirga rhinocerotis
  REGION 1..378: note = tr|A0A4R7BIH4|A0A4R7BIH4_9RHIZ Queuine tRNA-ribosyltransferase OS=Enterovirga rhinocerotis; OX = 1339210 GN=tgt PE=3 SV=1
MSSFGFTVHARDGAARTGAITTPRGEIRTPAFMPVGTAGTVKAMYPEQVKALGADIVLGNTYHLMLRPGAERVARLGGLHRMMRWDGPILTDSGGFQVMSLAGLRKLSETGVVFQSHIDGSRHEMTPERSIEIQTLLGADIQMQLDECVRLPAPREEVEKAMRLSLRWAERCRTAFGSQPGRALFGIVQGGTDEALRVESAKDLVSLDLGGYAVGGLAVGEPQADMLRMIETVEPHLPTAKPRYLMGVGTPDDIAQAVRRGIDMFDCVMPTRAGRHGMAYTRHGRVNLKNARFAEDIRPLDEASSCAASRDYSRAYLHHLVRSGEILGMMLLTWSNLAYYQDLMAGLRAAIRDGRLEDHLAEIREGWARGEAGAPTRP

SEQ ID NO: 55045 - protein, 378 aa, unidentified
  source 1..378: note = Eoetvoesia caeni
  REGION 1..378: note = tr|A0A366HCN9|A0A366HCN9_9BURK Queuine tRNA-ribosyltransferase OS=Eoetvoesia caeni OX=645616; GN = tgt PE=3 SV=1
MTGLKFELLATDGAARRGRVTLNHGVVETPIFMPVGTYGSVKAMMPHELTEVGAQIILGNTFHLWLRPGTEVLDKHGGLHGFMQWNKPILTDSGGFQVFSLSGMRKITEEGVKFASPIDGSRLFLTPEESMRIQRALNSDIAMVFDECTPYEIDGRPATSEEAARSMRMSLRWAKRSREAFDQLGNPNALFGIVQGGMYEDLRDESLAGLVDIGFHGYAIGGLSVGEPKDEMMRVLAHVAPRLPADKPRYLMGVGTPEDLVEGVSRGVDMFDCVMPTRNARNGWLFTRHGDIKIRNARYRDDTRPLDSTCSCHTCAHFSRSYLHHLQRSNEITGSRLNTLHNLHYYLNLMGEMREAIASGTFEAWRARFHQDRARGIE

SEQ ID NO: 55046 - protein, 376 aa, unidentified
  source 1..376: note = Epibacterium mobile
  REGION 1..376: note = tr|A0A1B1A3B3|A0A1B1A3B3_9RHOB Queuine tRNA-ribosyltransferase OS=Epibacterium mobile F1926; OX = 1265309 GN=tgt PE=3 SV=1
MAELFNFEMTATDGKARTGVIHTPRGDIRTPAFMPVGTAATVKAMMPESVRATGADILLGNTYHLMLRPTAERIDRLGGLHKFMNWDRPILTDSGGFQVMSLAGLRKLTEKGVTFKSHIDGSRHELTPERSMEIQALLGSDIVMCFDECPALPADRDRIAESMRLSMRWAERSREAFGDRPGHALFGIQQGGLEQDFRAESAEALTKIGFDGYAVGGLAVGEGQEAMFGCLDYAPDMLPVDKPRYLMGVGKPDDIVGAVARGIDMMDCVLPSRSGRTGQAFTRHGVVNIKNARHQDDPRPLDENCSCPACSNYSRAYLHHVFRSNEMISGMLLTWHNLHYFQDIMAGMRESIAAGTFDAWQKNFHDMRAQGDIEQL

SEQ ID NO: 55047 - protein, 376 aa, unidentified
  source 1..376: note = Epibacterium mobile
  REGION 1..376: note = tr|A0A1H3FI64|A0A1H3FI64_9RHOB Queuine tRNA-ribosyltransferase OS=Epibacterium mobile OX=379347; GN = tgt PE=3 SV=1
MAELFNFEMTATDGKARTGVIHTPRGDIRTPAFMPVGTAATVKAMMPESVRATGADILLGNTYHLMLRPTAERIDRLGGLHKFMNWDRPILTDSGGFQVMSLAGLRKLTEKGVTFKSHIDGSRHELTPERSMEIQALLGSDIVMCFDECPALPADRDRIAESMRLSMRWAERSREAFGDRPGHALFGIQQGGLEKDFREESAEALTKIGFDGYAVGGLAVGEGQEAMFGCLDYAPDMLPVDKPRYLMGVGKPDDIVGAVARGIDMMDCVLPSRSGRTGQAFTRHGVVNIKNARHQDDPRPLDENCSCPACSNYSRAYLHHVFRSNEMISGMLLTWHNLHYFQDIMAGMRESIAAGTFDAWQKTFHDMRAQGDIEPL

SEQ ID NO: 55048 - protein, 376 aa, unidentified
  source 1..376: note = Epibacterium multivorans
  REGION 1..376: note = tr|A0A0N7M0I5|A0A0N7M0I5_9RHOB Queuine tRNA-ribosyltransferase OS=Epibacterium multivorans; OX = 928856 GN=tgt PE=3 SV=1
MAERFNFELKATDGKARTGVINTPRGEIRTPAFMPVGTAATVKAMMPESVRATGADILLGNTYHLMLRPTAERINNLGGLHKFMNWERPILTDSGGFQVMSLAGLRKLTEKGVTFKSHIDGSKHELTPERSMEIQRLLGSDIVMCFDECPALPADRDRIAESMRLSMRWAERSKDAFGDRPGHALFGIQQGGLEQDFREESAEALQKIGFDGYAVGGLAVGEGQEAMFGCLDYAPDMLPVDKPRYLMGVGKPDDIVGAVKRGIDMMDCVLPSRSGRTGQAFTRYGVVNIKNARHADDPRPLDETCTCPACTNYSRAYLHHVFRSNEMISGMLLTWHNLHYFQTIMQEMRDAIAAGTFDAWEKKFHEDRARGDIEPL

SEQ ID NO: 55049 - protein, 376 aa, unidentified
  source 1..376: note = Epibacterium scottomollicae
  REGION 1..376: note = tr|A0A2T1AIW8|A0A2T1AIW8_9RHOB Queuine tRNA-ribosyltransferase OS=Epibacterium scottomollicae; OX = 483013 GN=tgt PE=3 SV=1
MAELFNFEMTATDGKARTGVIHTPRGDIRTPAFMPVGTAATVKAMMPESVRATGADILLGNTYHLMLRPTAERIDRLGGLHKFMNWDRPILTDSGGFQVMSLAGLRKLTEKGVTFKSHIDGSRHELTPERSMEIQRLLGSDIVMCFDECPALPADRDRIAESMRLSMRWAERSREAFGDRPGYALFGIQQGGLERDFREESAEALTKVGFDGYAVGGLAVGEGQEAMFGCLDYAPDMLPQDKPRYLMGVGKPDDIVGAVARGIDMMDCVLPSRSGRTGQAFTRHGVVNIKNARHQDDPRPLDENCSCPACSNYSRAYLHHVFRSNEMISGMLLTWHNLHYFQDIMAGMRESIAAGTFEAWQKNFHDNRAQGDIEPL

SEQ ID NO: 55050 - protein, 376 aa, unidentified
  source 1..376: note = Epibacterium ulvae
  REGION 1..376: note = tr|A0A1G5QMZ2|A0A1G5QMZ2_9RHOB Queuine tRNA-ribosyltransferase OS=Epibacterium ulvae OX=1156985; GN = tgt PE=3 SV=1
MTQKFEFDLKATDGAARTGVISTPRGEIRTPAFMPVGTAATVKAMMPESVRATGADILLGNTYHLMLRPTAERIDRLGGLHKFMNWERPILTDSGGFQVMSLAGLRKLTEKGVTFKSHIDGSKHELTPERSMEIQRLLGSDIVMCFDECPALPADRDRIAESMRLSMRWADRSREAFGDRPGHALFGIMQGGLEQDLREESAQALTDIGFDGYAVGGLAVGEGQEAMFGCLDYAPGFLPKDKPRYLMGVGKPDDIVGAVARGIDMMDCVLPSRSGRTGQAFTRRGVVNIKNARHAEDPRPLDEGCTCPACSNYSRAYLHHVFRSNEMISGMLLTWHNLHYFQDIMQEMRDAIAAGTFEAWQANFHEMRAQGDIEPL

SEQ ID NO: 55051 - protein, 371 aa, unidentified
  source 1..371: note = Epsilonproteobacteria bacterium
  REGION 1..371: note = tr|A0A496XML8|A0A496XML8_9PROT Queuine tRNA-ribosyltransferase OS=Epsilonproteobacteria bacterium; OX = 2026809 GN=tgt PE=3 SV=1
MKFFTPISKSGKARTGLIKTHHGDIETPVFMPVGTRASVKGLWQEDLEELKSQIILGNTYHLYLRPGHELVERVGDGLHGFMSWDGPILTDSGGYQVFSLSKMNKLSEEGVVFKSHLDGSSHMITPEKSMEIQRALGADIVMAFDECPPLPSTKEELKKSMELTLRWAKRCQSVSLKGYQNLFGIIQGGLELDLRLECMQALEEMNFPGLALGGLSVGEKNEEMVEFLNNFVHLMPENKPRYLMGVGNPLDILNGVRAGLDMFDCVLPTRNARNGQFITSLGPLNIKKEKFKEDQRAPDPSCGCKVCARYSRAYIRHLYNVGEYLAGQLITFHNIHFYHQMMENTRQAIREDRFESFFQEFRKNYTSAEWK

SEQ ID NO: 55052 - protein, 374 aa, unidentified
  source 1..374: note = Epsilonproteobacteria bacterium
  REGION 1..374: note = tr|A0A426VV60|A0A426VV60_9PROT Queuine tRNA-ribosyltransferase OS=Epsilonproteobacteria bacterium (ex Lamellibrachia satsuma) OX=2496635 GN=tgt PE=3 SV=1
MQFQIDKTDGKARACTIKTAHSTIQTPVFMPVGTVGAVKALDATDLTTFIKPEIILGNTYHLYIRPGDEVIKTMGKLQKFTKYPKSFLTDSGGFQAFSLSDNVKIDEGGITFRSHLDGSKHYFTPKKVIDIQNNLGSDIMMILDDLVALPATQERIKASIERTTRWAEESIKYHRENQKKGIGIDQNIFAIIQGGTDKAFREKSAKELCALDYDGFAIGGLSVGEANQDMYDTVEWTTQFMPEDKPRYLMGVGTPEDLVENVSRGIDMFDCVMPTRNARNGTLFTSFGKVNIKKACYTVDESPIDPECGCMVCQTYSRSYLRHLFRAREITYFRLATIHNLYYYLDLMKQMREAIIENRFEEFKREFYRKRETK

SEQ ID NO: 55053 - protein, 376 aa, unidentified
  source 1..376: note = Epulopiscium sp.
  REGION 1..376: note = tr|A0A1V2YBN0|A0A1V2YBN0_9FIRM Queuine tRNA-ribosyltransferase OS=Epulopiscium sp. Nuni2H_MBin003; OX = 1884657 GN=tgt PE=3 SV=1
MYEILSMEGRAKSARLCTVHGIIETPCFMNVATVAAIKGGLSTVDLYDIKTQVALSNTYHLHLRPGDDVIKELGGLHKFMVWDKPILTDSGGFQVFSLAHRRKIKEEGVYFSSHIDGKKIFMGPEESMKIQSNLGSTIAMAFDECPPALSDREYILPSIARTTRWLKRCVDKMNELNQQDDTINKKQLLFGINQGGVLADIRISHAKEIAEFDLAGYAIGGLAVGETHQEMYYILDNVIPHLPQNKPTYLMGVGTPENILEAVERGVDFFDCVLPARNGRHGHVYTNAGKLNLFNKIHEKDLSPISDECSCSTCERYSRAYIRHLLKAKEMLGMRLCVIHNLHYYNNLMIEIRKNIRNNTFAKYKKSRLEGFKSTL

SEQ ID NO: 55054 - protein, 376 aa, unidentified
  source 1..376: note = Epulopiscium sp.
  REGION 1..376: note = tr|A0A1S9CJP6|A0A1S9CJP6_9FIRM Queuine tRNA-ribosyltransferase OS=Epulopiscium sp. AS2M-Bin002; OX = 1764959 GN=tgt PE=3 SV=1
MYDLLKTEERAKRGRFQTVHGTIETPVFMNVATVAAIKGAVSAQDLQQIETQVALANTYHLHLRPNDKLIKELGGLHKFMVWDKPILTDSGGFQVFSLAHRRKIKEEGVYFSSHIDGSKIFMGPEESMQIQSNLGSTIAMAFDECPPAMADKEYIIPSVERTTRWLKRCIEEINKLNSLETTINNKQMLFGINQGGVIPAIRIEHAKVIREFDLPGYSIGGLAVGETHEEMYNILEEVIPHLPKNKPTYLMGVGTPENILEAVDRGIDFFDCVLPARNGRHGHVYTNNGKLNLFNKKHEKDMDPISKECCCPTCQRYSKAYIRHLLKAKEMLGMRLCVIHNLYYFNNLMTEIRVALDNNEFKSYKKKRLKSYKNLN

SEQ ID NO: 55055 - protein, 378 aa, unidentified
  source 1..378: note = Ereboglobus luteus
  REGION 1..378: note = tr|A0A2U8E1N7|A0A2U8E1N7_9BACT Queuine tRNA-ribosyltransferase OS=Ereboglobus luteus OX=1796921; GN = tgt PE=3 SV=1
MPSVPHFELLKTDTATAARRARLTTRHGVVQTPIFMPVGTQGTVKAVTPVQLREIGAQIILGNTYHLNIRPTSELIRDMGGLHKFMGWDGPILTDSGGFQVFSLAKLRDIRPDGVAFQSHLDGAKLFLGPREVMTIQQNLGSDIAMVLDECPPFPCERDVCAHSVARTFEWAKQCKQIATDNGFLAAGHHVFAIAQGSTYDDIRREAAEALASLDFPGYAIGGVSVGEPEPEMLQQVSASVKYLPAHKPRYTMGLGTPPQMLKMIAMGVDMFDCVMPTRVARNGLVFTPDGPINLRNEKYRADPRPISDEVQNYTTNFSRAYLRHLTTSNEMLAGTLLSMHNLHFFLDLMAQARARIEAGDYATWHRAWITRYEAGSK

SEQ ID NO: 55056 - protein, 381 aa, Eremococcus coleocola
  REGION 1..381: note = tr|E4KM08|E4KM08_9LACT Queuine tRNA-ribosyltransferase OS=Eremococcus coleocola ACS-139-V-Col8 OX=908337 GN=tgt PE=3 SV=1
MTQVPVTYELIKEEKHTGARLGILHTPHGSFPTPMYMPVGTLATVKSLSPEELKEMGAGVILSNTYHLWLRPGEDIVQDAGGLHKFMNWDQGILTDSGGFQVFSLSDNRKLTEEGVHFRSHLDGSKLFLSPEKAIQIQTALGSDIMMSLDECPPFYESYDYVKNSINRTTRWAERGLKAQENTKDQVIFGIMQGAGYKDLRIQHAKDMAALDFPGYSVGGLSVGESKEEMNEVLDYLTPYMPANKPRYLMGVGSPDALIDGAIRGIDMFDCVLATRIARNGSCMTSHGRLVVKNAKYARDYTPIDDHCDCYTCRNYSRAYVRHLFHANESFGLRLASIHNTHFLLNLMKQVRQAIMDDNLLDFRQDFFERYGYNKPNARAF

SEQ ID NO: 55057 - protein, 376 aa, Erwinia amylovora
  REGION 1..376: note = tr|D4HXZ1|D4HXZ1_ERWAC Queuine tRNA-ribosyltransferase OS=Erwinia amylovora (strain CFBP1430) OX=665029 GN=tgt PE=3 SV=1
MKFELDTTDGRARRGRLVFERGVVETPAFMPVGTYGTVKGMTPEEVQDTGAQIILGNTFHLWLRPGQEIMKLHGDLHDFMQWKGPILTDSGGFQVFSLGDIRKITEKGVHFRNPINGDAIFLDPEKSMEIQYDLGSDIVMIFDECTPYPADWDYARRSMEMSLRWAQRSRDRFDSLGNKNALFGIIQGSVYEDLRDVSVKGLVEIGFDGYAVGGLAVGEPKEDMHRILEHVCPQLPQDKPRYLMGVGKPQDLVEGVRRGIDMFDCVMPTRNARNGHLFVTDGVVKIRNAKYKDDTSPLDAECDCYTCRNYSRAYLYHLDRCNEILGARLNTIHNLRYYQRLMAGLRQAIEEGKLEHFVSEFYQRTGTAVPPLTSDN

SEQ ID NO: 55058 - protein, 376 aa, Erwinia amylovora; identical to SEQ ID NO: 55057
  REGION 1..376: note = tr|E5B2U7|E5B2U7_ERWAM Queuine tRNA-ribosyltransferase OS=Erwinia amylovora ATCC BAA-2158; OX = 889211 GN=tgt PE=3 SV=1

SEQ ID NO: 55059 - protein, 376 aa, Erwinia aphidicola; identical to SEQ ID NO: 52189
  REGION 1..376: note = tr|A0A4R6PH04|A0A4R6PH04_ERWAP Queuine tRNA-ribosyltransferase OS=Erwinia aphidicola OX=68334; GN = tgt PE=3 SV=1

SEQ ID NO: 55060 - protein, 374 aa, Erwinia billingiae
  REGION 1..374: note = tr|D8MNV1|D8MNV1_ERWBE Queuine tRNA-ribosyltransferase OS=Erwinia billingiae (strain Eb661) OX=634500 GN=tgt PE=3 SV=1
MKFELDKTDGRARRGRLIFDRGVVETPAFMPVGTYGTVKGMTPEEVIDTGAQIILGNTFHLWLRPGQEVMKLHGDLHDFMNWKGPILTDSGGFQVFSLGDIRKITEAGVHFRNPINGDAIFLDPEKSMEIQYDLGSDIVMIFDECTPYPADWDYAKRSMEMSLRWAQRSRDRFDSLENKNALFGIIQGGVYEDLRDVSVKGLVEIGFDGYAVGGLAVGEPKEDMHRILEHVCPQIPEDKPRYLMGVGKPQDLVEGVRRGIDMFDCVMPTRNARNGHLFVTDGIVKIRNAKYKDDTATLDAECDCYTCRNYSRAYLHHLDRCNEILGARLNTIHNLRYYQRLMAGLRQAIEDGKLEHFVTEFYDRTGNTAPPLSV

SEQ ID NO: 55061 - protein, 374 aa, Erwinia billingiae; identical to SEQ ID NO: 55060
  REGION 1..374: note = tr|A0A5J6LYT0|A0A5J6LYT0_9GAMM tRNA guanosine(34) transglycosylase Tgt OS=Erwinia billingiae OX=182337; GN = D0N50_17385 PE=4 SV=1

SEQ ID NO: 55062 - protein, 374 aa, unidentified
  source 1..374: note = Erwinia citreus
  REGION 1..374: note = tr|A0A358L234|A0A358L234_ERWCI Queuine tRNA-ribosyltransferase OS=Erwinia citreus OX=558 GN=tgt; PE = 3 SV=1
MKFELDTTDGRARRGRLVFDRGVVETPAFMPVGTYGTVKGMTPEEVQDTGAQIILGNTFHLWLRPGQEIMKLHGDLHDFMQWKGPILTDSGGFQVFSLGDIRKITEAGVHFRNPINGDKIFLDPEKSMEIQYDLGSDIVMIFDECTPYPADWDYAKRSMEMSLRWAQRSRDRFDSLGNKNSLFGIIQGGVYEDLRDVSVKGLVEIGFDGYAVGGLAVGEPKEDMHRILEHVCPQIPEDKPRYLMGVGKPEDLVEGVRRGIDMFDCVMPTRNARNGHLFVTDGVVKIRNAKYKDDTAPLDAECDCYTCRNYSRAYLYHLDRCNEILGARLNTIHNLRYYQRLMAGLRKAIEEGKLEHFVSEFYARTGKAVPPLNV

SEQ ID NO: 55063 - protein, 374 aa, unidentified
  source 1..374: note = Erwinia gerundensis
  REGION 1..374: note = tr|A0A0U5E7L5|A0A0U5E7L5_9GAMM Queuine tRNA-ribosyltransferase OS=Erwinia gerundensis OX=1619313; GN = tgt PE=3 SV=1
MKFELDTTDGRARRGRLIFDRGVVETPAFMPVGTYGTVKGMTPEEVLETGAQIILGNTFHLWLRPGQEVMKLHGDLHDFMQWKGPILTDSGGFQVFSLGDIRKITEAGVHFRNPINGDQIFLDPEKSMEIQHDLGSDIVMIFDECTPYPADWDYAKRSMEMSLRWAQRSRDRFDSLGNKNALFGIIQGSVYEDLRDVSVKGLVEIGFDGYAVGGLAVGEPKEDMHRILEHVCPQIPTDKPRYLMGVGKPEDLVEGVRRGVDMFDCVMPTRNARNGHLFVTDGVVKIRNAKHKADTSPLDAECDCYTCRNYSRAYLHHLDRCNEILGARLNTIHNLRYYQRLMAGLRQAIEEGKLERFVTEFYERTGKAVPPLNV

SEQ ID NO: 55064 - protein, 374 aa, unidentified
  source 1..374: note = Erwinia iniecta
  REGION 1..374: note = tr|A0A0L7TGA7|A0A0L7TGA7_9GAMM Queuine tRNA-ribosyltransferase OS=Erwinia iniecta OX=1560201; GN = tgt PE=3 SV=1
MKFELDTTDGRARRGRLVFDRGVVETPAFMPVGTYGTVKGMTPEEVQETGAQIILGNTFHLWLRPGQEIMKLHGDLHDFMQWKGPILTDSGGFQVFSLGDIRKITEAGVHFRNPINGDPIFLDPEKSMEIQYDLGSDIVMIFDECTPYPADWDYAKSSMEMSLRWAQRSRDRFDSLGNKNALFGIIQGGVYEDLRDVSVKGLVDIGFDGYAVGGLAVGEPKEDMHRILEHVCPQIPEDKPRYLMGVGKPEDLVEGVRRGVDMFDCVMPTRNARNGHLFVTDGVVKIRNAKYKDDISPLDAECDCYTCRSYSRAYLHHLDRCNEILGARLNTIHNLRYYQRLMAGLRQAIEEGKLECFVTEFYERKGKAVPPLTV

SEQ ID NO: 55065 - protein, 374 aa, Erwinia mallotivora
  REGION 1..374: note = tr|A0A014MG14|A0A014MG14_9GAMM Queuine tRNA-ribosyltransferase OS=Erwinia mallotivora OX=69222; GN = tgt PE=3 SV=1
MKFELDTTDGRARRGRLVFDRGVVETPAFMPVGTYGTVKGMTPEEVQDTGAQIILGNTFHLWLRPGQEIMKLHGDLHDFMQWKGPILTDSGGFQVFSLGDIRKITEAGVHFRNPINGDAIFLDPEKSMEIQFDLGSDIVMIFDECTPYPADHDYARRSMEMSLRWAQRSRDRFDSLGNKNALFGIIQGGVYEDLRDVSVKGLVEIGFDGYAVGGLAVGEPKEDMHRILEHVCPQIPQDKPRYLMGVGKPEDLVEGVRRGIDMFDCVMPTRNARNGHLFVTDGVVKIRNAKYKDDTSPLDAECDCYTCRNYSRAYLHHLDRCNEILGARLNTIHNLRYYQRLMAGLRQAIEEGKLEHFVSEFYNRTGKAVPPLAV

SEQ ID NO: 55066 - protein, 376 aa, Erwinia persicina
  REGION 1..376: note = tr|A0A3Q8H7N7|A0A3Q8H7N7_9GAMM Queuine tRNA-ribosyltransferase OS=Erwinia persicina OX=55211; GN = tgt PE=3 SV=1
MKFELDTTDGRARRGRLVFERGVVETPAFMPVGTYGTVKGMTPEEVLDTGAQIILGNTFHLWLRPGQEIMKLHGDLHDFMQWKGPILTDSGGFQVFSLGDIRKITEKGVHFRNPINGDAIFLDPEKSMEIQFDLGSDIVMIFDECTPYPADWDYAKRSMEMSLRWAQRSRDRFDSLGNKNALFGIIQGGVYEDLRDVSVKGLVDIGFDGYAVGGLAVGEPKEDMHRILEHVCPQLPEDKPRYLMGVGKPQDLVEGVRRGIDMFDCVMPTRNARNGHLFVTDGVVKIRNAKYKDDTSPLDAECDCYTCRNYSRAYLYHLDRCNEILGARLNTIHNLRYYQRLMAGLRQAIEAGHLEQFVTEFYQRTGLAVPPLPSDN

SEQ ID NO: 55067 - protein, 376 aa, Erwinia piriflorinigrans
  REGION 1..376: note = tr|V5Z4X2|V5Z4X2_9GAMM Queuine tRNA-ribosyltransferase OS=Erwinia piriflorinigrans CFBP 5888 OX=1161919 GN=tgt PE=3 SV=1
MKFELDTTDGHARRGRLVFERGVVETPAFMPVGTYGTVKGMTPEEVQDTGAQIILGNTFHLWLRPGQEIMKLHGDLHDFMQWKGPILTDSGGFQVFSLGDIRKITEKGVHFRNPINGDAIFLDPEKSMEIQYDLGSDIVMIFDECTPYPADWDYAKRSMEMSLRWAQRSRDRFDSLGNKNALFGIIQGSVYEDLRDVSVKGLVDIGFDGYAVGGLAVGEPKEDMHRILEHVCPQLPQDKPRYLMGVGKPQDLVEGVRRGIDMFDCVMPTRNARNGHLFVSDGVVKIRNAKYKDDTSPLDAECDCYTCRNYSRAYLYHLDRCNEILGARLNTIHNLRYYQRLMAGLRQAIEEGRLEHFASEFYQRTGAAVPPLTSDN

SEQ ID NO: 55068 - protein, 374 aa, Erwinia psidii
  REGION 1..374: note = tr|A0A3N6TW00|A0A3N6TW00_9GAMM Queuine tRNA-ribosyltransferase OS=Erwinia psidii OX=69224 GN=tgt; PE = 3 SV=1
MKFELDTTDGRARRGRLVFERGVVETPAFMPVGTYGTVKGMTPEEVQETGAQIILGNTFHLWLRPGQEIMKLHGDLHDFMQWKGPILTDSGGFQVFSLGDIRKITEAGVHFRNPINGDAIFLDPEKSMEIQFDLGSDIVMIFDECTPYPADWDYAKRSMEMSLRWAQRSRDRFDALGNKNALFGIIQGGVYEDLRDVSVKGLVEIGFDGYAVGGLAVGEPKEDMHRILEHVCPQIPQDKPRYLMGVGKPEDLVEGVRRGIDMFDCVMPTRNARNGHLFVTDGVVKIRNARYKDDTSPLDADCDCYTCRHYSRAYLHHLDRCNEILGARLNTIHNLRYYQRLMAALRQAIEAGRLEHFVSEFYDRTGKAVPPLNV

SEQ ID NO: 55069 - protein, 376 aa, Erwinia pyrifoliae
  REGION 1..376: note = tr|D2T4N9|D2T4N9_ERWP6 Queuine tRNA-ribosyltransferase OS=Erwinia pyrifoliae (strain DSM 12163 / CIP 106111 / Ep16/96) OX=644651 GN=tgt PE=3 SV=1
MKFELDTTDGRARRGRLVFERGVVETPAFMPVGTYGTVKGMTPEEVQDTGAQIILGNTFHLWLRPGQEVMKLHGDLHDFMQWKGPILTDSGGFQVFSLGDIRKITEKGVHFRNPINGDAIFLDPEKSMEIQYDLGSDIVMIFDECTPYPADWDYAKRSMEMSLRWAQRSRDRFDSLGNKNALFGIIQGSVYEDLRDVSVKGLVEIGFDGYAVGGLAVGEPKEDMHRILEHVCPQLPQDKPRYLMGVGKPQDLVEGVRRGIDMFDCVMPTRNARNGHLFVTDGVVKIRNAKYKDDTSPLDAECDCYTCLNYSRAYLYHLDRCNEILGARLNTIHNLRYYQRLMAGLRQAIEEGKLEHFVSEFYQRTGTAVPPLTSDN

SEQ ID NO: 55070 - protein, 376 aa, Erwinia rhapontici
  REGION 1..376: note = tr|A0A4R7GIT9|A0A4R7GIT9_ERWRD Queuine tRNA-ribosyltransferase OS=Erwinia rhapontici OX=55212; GN = tgt PE=3 SV=1
MKFELDTTDGRARRGRLVFERGVVETPAFMPVGTYGTVKGMTPEEVIDTGAQIILGNTFHLWLRPGQEIMKLHGDLHDFMQWKGPILTDSGGFQVFSLGDIRKITEKGVHFRNPINGDAIFLDPEKSMEIQYDLGSDIVMIFDECTPYPADWDYAKRSMEMSLRWAQRSRDRFDSLGNKNALFGIIQGGVYEDLRDVSVKGLVDIGFDGYAVGGLAVGEPKEDMHRILEHVCPQLPEDKPRYLMGVGKPQDLVEGVRRGIDMFDCVMPTRNARNGHLFVTDGVVKIRNAKYKDDTSPLDAECDCYTCRNYSRAYLYHLDRCNEILGARLNTIHNLRYYQRLMAGLRQAIEEGKLALFVTEFYQRTGLAVPPLPSDN

SEQ ID NO: 55071 - protein, 374 aa, Erwinia sp.
  REGION 1..374: note = tr|A0A427K9N1|A0A427K9N1_9GAMM Queuine tRNA-ribosyltransferase OS=Erwinia sp. 198 OX=2022746; GN = tgt PE=3 SV=1
MKFELDTTDGRARRGRLVFDRGVVETPAFMPVGTYGTVKGMTPEEVQDTGAQIILGNTFHLWLRPGQEIMKLHGDLHDFMQWKGPILTDSGGFQVFSLGDIRKITEAGVHFRNPINGDKIFLDPEKSMEIQYDLGSDIVMIFDECTPYPADWDYAKRSMEMSLRWAQRSRDRFDSLENKNALFGIIQGGVYEDLRDVSVKGLVEIGFDGYAVGGLAVGEPKEDMHRILEHVCPQIPEDKPRYLMGVGKPEDLVEGVRRGIDMFDCVMPTRNARNGHLFVTDGVVKIRNAKYKDDTAPLDAECDCYTCRNYSRAYLYHLDRCNEILGARLNTIHNLRYYQRLMAGLRKAIEEGKLEHFVTEFYARTGKAVPPLNV

SEQ ID NO: 55072 - protein, 376 aa, Erwinia sp.
  REGION 1..376: note = tr|A0A3N1VVX5|A0A3N1VVX5_9GAMM Queuine tRNA-ribosyltransferase OS=Erwinia sp. JUb26 OX=2485126; GN = tgt PE=3 SV=1
MKFELDTTDGRARRGRLVFDRGVVETPAFMPVGTYGTVKGMTPEEVQDTGAQIILGNTFHLWLRPGQEIMKLHGDLHDFMQWKGPILTDSGGFQVFSLGDIRKITEKGVHFRNPINGDAIFLDPEKSMEIQYDLGSDIVMIFDECTPYPADWDYAKRSMEMSLRWAQRSRDRFDSLGNKNALFGIIQGSVYEDLRDVSVKGLVEIGFDGYAVGGLAVGEPKDDMHRILEHVCPQLPEDKPRYLMGVGKPQDLVEGVRRGIDMFDCVMPTRNARNGHLFVTDGVVKIRNAKYKDDTSPLDAECDCYTCRNYSRAYLYHLDRCNEILGARLNTIHNLRYYQRLMAGLRKAIEEGKLEHFVTEFYQRTGTAVPPLTSDN

SEQ ID NO: 55073 - protein, 376 aa, Erwinia tasmaniensis
  REGION 1..376: note = sp|B2VHQ1|TGT_ERWT9 Queuine tRNA-ribosyltransferase; OS = Erwinia tasmaniensis (strain DSM 17950 / CIP 109463 / Et1/99) OX=465817 GN=tgt PE=3 SV=1
MKFELDTTDGRARRGRLVFERGVVETPAFMPVGTYGTVKGMTPEEVQDTGAQIILGNTFHLWLRPGQEIMKLHGDLHDFMQWKGPILTDSGGFQVFSLGDIRKITEKGVHFRNPINGDAIFLDPEKSMEIQYDLGSDIVMIFDECTPYPADWDYAKRSMEMSLRWAQRSRDRFDSLGNKNALFGIIQGSVYEDLRDVSVKGLVDIGFDGYAVGGLAVGEPKEDMHRILEHVCPQLPQDKPRYLMGVGKPQDLVEGVRRGVDMFDCVMPTRNARNGHLFVSDGVVKIRNAKYKDDISPLDAECDCYTCRNYSRAYLYHLDRCNEILGARLNTIHNLRYYQRLMAGLRQAIEEGKLEHFVSEFYQRTGAAVPPITSDN

SEQ ID NO: 55074 - protein, 374 aa, Erwinia tracheiphila
  REGION 1..374: note = tr|A0A0M2KHD0|A0A0M2KHD0_9GAMM Queuine tRNA-ribosyltransferase OS=Erwinia tracheiphila OX=65700; GN = tgt PE=3 SV=1
MKFELDTTDGQARRGRLIFERGVVETPAFMPVGTYGTVKCMTPEEVQDTGAQIILGNTFHLWLRPGQQVMRLHGDLHDFMQWKGPILTDSGGFQVFSLGDIRKITEAGVHFRNPINGDAIFLDPEKSMEIQFDLGSDIVMIFDECTPYPADWDYAKRSMEMSLRWAQRSRDHFDALGNKNALFGIIQGGVYEDLRDVSVKGLVEIGFDGYAVGGLAVGEPKEDMHRILEHVCRQIPRDKPRYLMGVGKPEDLVEGVRRGIDMFDCVMPTRNARNGHLFVTDGVVKIRNAKYKDDTSPLDAECDCYTCRHYSRAYLHHLDRCNEILGARLNTIHNLRYYQRLMAALRLAIEEGRLEHFVSEFYERTGKAVPSLNV

SEQ ID NO: 55075 - protein, 374 aa, Erwinia tracheiphila
  REGION 1..374: note = tr|A0A345CN77|A0A345CN77_9GAMM Queuine tRNA-ribosyltransferase OS=Erwinia tracheiphila OX=65700; GN = tgt PE=3 SV=1
MKFELDTTDGQARRGRLIFERGVVETPAFMPVGTYGTVKCMTPEEVQDTGAQIILGNTFHLWLRPGQQVMRLHGDLHDFMQWKGPILTDSGGFQVFSLGDIRKITEAGVHFRNPINGDAIFLDPEKSMEIQFDLGSDIVMIFDECTPYPADWDYAKRSMEMSLRWAQRSRDHFDALGNKNALFGIIQGGVYEDLRDVSVKRLVEIGFDGYAVGGLAVGEPKEDMHRILEHVCRQIPRDKPRYLMGVGKPEDLVEGVRRGIDMFDCVMPTRNARNGHLFVTDGVVKIRNAKYKDDTSPLDAECDCYTCRHYSRAYLHHLDRCNEILGARLNTIHNLRYYQRLMAALRLAIEEGRLEHFVSEFYERTGKAVPSLNV

SEQ ID NO: 55076 - protein, 374 aa, Erwinia typographi
  REGION 1..374: note = tr|A0A0A3ZB65|A0A0A3ZB65_9GAMM Queuine tRNA-ribosyltransferase OS=Erwinia typographi OX=371042; GN = tgt PE=3 SV=1
MKFELDTTDGRARRGRLVFDRGVVETPAFMPVGTYGTVKGMTPEEVTDTGAQIILGNTFHLWLRPGQEIMKLHGDLHDFMNWKGPILTDSGGFQVFSLGDIRKITEAGVHFRNPINGDAIFLDPEKSMEIQYDLGSDIVMIFDECTPYPADWDYAKRSMEMSLRWARRSRDRFDSLGNKNALFGIIQGGVYEDLRDVSVKGLVEIGFDGYAVGGLAVGEPKEDMHRILEHVCPQIPEDKPRYLMGVGKPQDLVEGVRRGIDMFDCVMPTRNARNGHLFVTDGVVKIRNAKYKDDTATLDAECDCYTCRNYSRAYLHHLDRCNEILGARLNTIHNLRYYQRLMAGLRKAIEEGKLEHFVTEFYNRTGSAVPSLAV

SEQ ID NO: 55077 - protein, 374 aa, unidentified
  source 1..374: note = Erwiniaceae bacterium
  REGION 1..374: note = tr|A0A3D5MB88|A0A3D5MB88_9GAMM Queuine tRNA-ribosyltransferase OS=Erwiniaceae bacterium; OX = 2053552 GN=tgt PE=3 SV=1
MKFELDTKDGRARRGRLVFDRGVVETPAFMPVGTYGTVKGMTPEEVKETGAQILLGNTFHLWLRPGQEIMKLHGDLHDFMQWHGPILTDSGGFQVFSLGDIRKITEAGVHFRNPINGDAIFLDPEKSMEIQYDLGSDIVMIFDECTPYPADWDYAKRSMEMSLRWAKRSRDHFDKLGNKNALFGIIQGSVYEDLRDVSVKGLVEIGFDGYAVGGLAVGEPKADMHRILEHVCPQIPEDKPRYLMGVGKPEDLVEGVRRGIDMFDCVMPTRNARNGHLFVTDGVVKIRNAKHKDDTSPLDAECDCYTCRNYSRAYLHHLDRCNEILGARLNTIHNLRYYQRVMAGLRKAIEEGKLERFVSDFYTRKGKAVPPLNV

SEQ ID NO: 55078 - protein, 378 aa, unidentified
  source 1..378: note = Erysipelatoclostridium ramosum
  REGION 1..378: note = tr|A0A3E3EEL9|A0A3E3EEL9_9FIRM Queuine tRNA-ribosyltransferase OS=Erysipelatoclostridium ramosum; OX = 1547 GN=tgt PE=3 SV=1
MAAITYELKHVCKQSGARYGILHTPHGDVETPMFMPVGTLATVKGISPEMLKEMHSQVVLANTYHLWLRPGEDVVEKAGGLHKFMNYNGPMLTDSGGFQVFSLGKTRKIEEEGVKFKSIIDGSSLFLSPEKAIEIQNKLGADMIMSFDECAPYPCTYEYMKNSMERTLRWAKRGKEAHKNTEKQALFGIVQGGEFPDLREQCAKELVAMDFPGYSIGGTSVGEPKDVMYKMVDDTIKWLPEDKPRYLMGVGNPIDLIECAIRGIDMYDCVLPTRVARHGAIMTSRGRLNINNEKFKYDFTPLDPECDCYACKNYTRAYIRHLHKCDEIFGKTLLSIHNVNFLLKLASDIREAIKEDRLLDFKEEFLDKYGHDVYKRAF

SEQ ID NO: 55079 - protein, 386 aa, unidentified
  source 1..386: note = Erysipelatoclostridium ramosum
  REGION 1..386: note = tr|B0N4F8|B0N4F8_9FIRM Queuine tRNA-ribosyltransferase OS=Erysipelatoclostridium ramosum DSM 1402 OX=445974 GN=tgt PE=3 SV=1
MLALRRMIMAAITYELKHVCKQSGARYGILHTPHGDVETPMFMPVGTLATVKGISPEMLKEMHSQVVLANTYHLWLRPGEDVVEKAGGLHKFMNYNGPMLTDSGGFQVFSLGKTRKIEEEGVKFKSIIDGSSLFLSPEKAIEIQNKLGADMIMSFDECAPYPCTYEYMKNSMERTLRWAKRGKEAHKNTEKQALFGIVQGGEFPDLREQCAKELVAMDFPGYSIGGTSVGEPKDVMYKMVDDTIKWLPEDKPRYLMGVGNPIDLIECAIRGIDMYDCVLPTRVARHGAIMTSRGRLNINNEKFKYDFTPLDPECDCYACKNYTRAYIRHLHKCDEIFGKTLLSIHNVNFLLKLASDIREAIKEDRLLDFKEEFLDKYGHDVYKRAF

SEQ ID NO: 55080 - protein, 378 aa, unidentified
  source 1..378: note = Erysipelatoclostridium sp.
  REGION 1..378: note = tr|A0A417C8A8|A0A417C8A8_9FIRM Queuine tRNA-ribosyltransferase OS=Erysipelatoclostridium sp. AM42-17 OX=2293102 GN=tgt PE=3 SV=1
MAAISFELKHVCKQSGARYGILHTPHGDVETPMFMPVGTLATVKGIAPEMLKEMGSQVVLSNTYHLWLRPGEDIVEKAGGLHRFMNYDGPMLTDSGGFQVFSLGKTRKIEEEGVKFKSIIDGRALFLSPEKAIEIQNKLGADIIMSFDECAPYPCTYDYMKKSMERTLRWAKRGKDAHKNTDKQALFGIVQGGEYPDLRKRCAQELVKMDFPGYSIGGTSVGEPKDVMYKMVEDTIQWLPEDKPRYLMGVGNPIDLIEAAIRGIDMYDCVLPTRVARHGAVMTSEGRLNINNEKFKEDFGPLDPHCDCYTCKNYSRAYLRHLHKSDEIFGKTLLSIHNVRFLLKLSEDIRQAIKEDRLLDFKEEFLDQYGRDVYKRAF

SEQ ID NO: 55081 - protein, 378 aa, unidentified
  source 1..378: note = Erysipelatoclostridium sp.
  REGION 1..378: note = tr|A0A1Y4QND6|A0A1Y4QND6_9FIRM Queuine tRNA-ribosyltransferase OS=Erysipelatoclostridium sp. An15; OX = 1965566 GN=tgt PE=3 SV=1
MAAISYELKHVCKQSNARYGILHTPHGDVETPMFMPVGTLATVKGIAPEMLKDMGSQVILANTYHLWLRPGEDVVEKAGGLHKFMNYDGPILTDSGGFQVFSLGKTRKIEEKGVTFKSIIDGSSLFLSPEKSIEIQNKLGADIIMSFDECAPYPCDYEYMKNSVERTIRWAKRGKAVHHNTEKQALFGIVQGGAFPELREQCAKELVAMDFPGYSIGGTSVGEPKDVMYKMVEDAIQWLPEDKPRYLMGVGNPIDLIECAIRGIDMYDCVLPTRVARHGAVMTSMGRLNINNEKFKYDFTPLDPNCDCYTCRNYTRAYVRHLHKCDEIFGKTLLSIHNVNFLLNLSKDIREAIKNDRLLDFKEEFLKQYGHDVYKRAF

SEQ ID NO: 55082 - protein, 379 aa, unidentified
  source 1..379: note = Erysipelothrix larvae
  REGION 1..379: note = tr|A0A0X8H1X3|A0A0X8H1X3_9FIRM Queuine tRNA-ribosyltransferase OS=Erysipelothrix larvae; OX = 1514105 GN=tgt PE=3 SV=1
MKKPLDYTLIKKDIRSKARRGAITTPHGTVQTPMFMPVGTLATVKFLSPEDLYKIGSQVILSNTYHLWLRPGEHIVKQAGGLHKFMNYDGPILTDSGGFQVFSLSQIRKIEEEGVAFRNHLNGDKLFLSPEKAIQIQNDLGADIIMSFDECPPYPATYEYMKDSVERTLRWAKRGQLAHQRPDDQALFGIVQGGSFTELRHHSAKSLVEMDFPGYSIGGTSVGEPKEVMYKMIDDAIEFLPEDKPRYLMGVGSVDAIFEGVLRGVDMFDCVLPTRIARHGAAMTTQGRVNIKNNKFAEDFTPLDPACDCEACQNYTKAYLRHLIRCNEGLGMRLLSIHNLRFLLKLMEDIRLAIEEDRLLELRDQVYEAYELHETKSGF

SEQ ID NO: 55083 - protein, 383 aa, Erysipelothrix rhusiopathiae
  REGION 1..383: note = tr|E7FYA5|E7FYA5_ERYRH Queuine tRNA-ribosyltransferase OS=Erysipelothrix rhusiopathiae ATCC 19414 OX=525280 GN=tgt PE=3 SV=1
MSLGNKPLKLTLIKKSNESKARLTTIETHHGTVETPMFMPVGTLASVKFLSPEDLRKIGSQVILSNTYHLWLRPGEDVVRQAGGLHKFMNYNGPILTDSGGFQVFSLGKIRTISEEGVEFRSHLSGEKLFLTPEKAIQVQNALGPDIMMSFDECPPYPATYEYMKNSVERTIRWAARGKAAHQNPETQALFGIVQGGKYADLREHCAKELVAMDFPGYSIGGTSVGEPKDVMWQMIDHTIDFLPEDKPRYLMGVGSVDAIFEGVLRGVDMFDCVLPTRIARHGTAMTSTGRVNIKNRKWEYDFSPLDENCDCECCQNYTKSYLRHLIRCNEGFGMRLLSIHNLRFLLKLMEDIREAIKEDRLLQLRDEVYESYGITGDDHPGW

SEQ ID NO: 55084 - protein, 383 aa, Erysipelothrix sp.
  REGION 1..383: note = tr|A0A3S5HK03|A0A3S5HK03_9FIRM Queuine tRNA-ribosyltransferase OS=Erysipelothrix sp. 15TAL0474; OX = 2485784 GN=tgt PE=3 SV=1
MSLGNKPLKLTLIKKSNESKARLTTIETHHGTVETPMFMPVGTLASVKFLSPEDLRSIGSQVILSNTYHLWLRPGEEVVRQAGGLHKFMNYNGPILTDSGGFQVFSLGKIRTISEEGVEFRSHLSGEKLFLTPEKAIQVQNALGPDIMMSFDECPPYPATYEYMKNSVERTIRWAARGKAAHQNPETQALFGIVQGGKYADLREHCAKELVAMDFPGYSIGGTSVGEPKDVMWQMIDHTIDFLPEDKPRYLMGVGSVDAIFEGVLRGVDMFDCVLPKRIARHGTAMTSTGRVNIKNKKWEYDFSPLDENCDCECCQNYTKSYLRHLIRCNEGFGMRLLSIHNLRFLLKLMEDIREAIKEDRLLELRDQVYESYGITGDDHPGW

SEQ ID NO: 55085 - protein, 375 aa, unidentified
  source 1..375: note = Erysipelotrichaceae bacterium
  REGION 1..375: note = tr|A0A3P1S9N3|A0A3P1S9N3_9FIRM Queuine tRNA-ribosyltransferase OS=Erysipelotrichaceae bacterium OH741_COT-311 OX=2491058 GN=tgt PE=3 SV=1
MKNFKFELLHTCKKSKARYGRLHTPHGIVETPMFMPVGTLATVKFLSPEEIETIGSGVILANTYHLWLRPGQEIIAKAGGVHNFMNYKGPMLTDSGGFQVFSLADTRKINEEGVTFKSHLDGSKLFMSPEISIEVQNKIGADIIMSFDECIPYPADYNYVKQSVERTLRWAKRGKDAHKRTDQALFGIVQGGDYPDLRKHCALKLVDMDFDGYSIGGTSVGEDKETMYRMIDYSIEHLPQDKPRYLMGVGAVNDILEAIERGVDMMDCVLPTRIARHGTCMTSHGRINIKKATYKEDFTPLDSNCDCYCCKNFTKAYLNHLFKCNEGLGNRLMSIHNLRFLIKLAEDAREAIKEDRFPEFKEQYLKNSNFDHRGF

SEQ ID NO: 55086 - protein, 379 aa, unidentified
  source 1..379: note = Erysipelotrichaceae bacterium
  REGION 1..379: note = tr|A0A357R111|A0A357R111_9FIRM Queuine tRNA-ribosyltransferase OS=Erysipelotrichaceae bacterium; OX = 2049044 GN=tgt PE=3 SV=1
MEKFKLEITHVCKQSGARLGILHTPHGSVETPMFMPVGTLATVKFVSPEELTDMQAGVILSNTYHLWLRPGEDIVKQAGGLHKFMNVQRPILTDSGGFQVFSLSDSRKISEEGVTFKNHLNGDTLFLTPEKSIQIQNDLGADIIMSFDECPPYPASYDYMKASVERTLRWAKRGKEAHQRSEDQALFGIVQGGEFEDLRKFSAESLVEMDFPGYSIGGTSVGETKETMYKMIDYSIKYLPEDKPRYLMGVGSVDAILEGILRGVDMFDCVLPTRIARHGTAMTSLGRVNIRNAQYERDFSTLDPECDCVTCKNYTRAYLRHLIKCNEGLGQRLLSIHNLRHLIRLTEMARVAIKEDRFLDFKNEYFERLGLNDKNARGF

SEQ ID NO: 55087 - protein, 379 aa, unidentified
  source 1..379: note = Erysipelotrichales bacterium
  REGION 1..379: note = tr|A0A524KAT7|A0A524KAT7_9FIRM Queuine tRNA-ribosyltransferase OS=Erysipelotrichales bacterium; OX = 2478483 GN=tgt PE=3 SV=1
MEKFWLEITHECKQSGARTGILHTPHGDVLTPMFMPVGTLATVKFLSPEEITEIKSGVILANTYHLWLRPGDDVVREAGGLHRFMNVKNPILTDSGGFQVFSLSDTRKINEEGVTFKNHMNGDTLMLSPEKSIQIQHNLGADIIMSFDECPPFPATHEYMLASVERTLRWAQRGKDAHQRPDDQALFGIVQGGEFADLRELSAKKLVEMDFPGYSIGGTSVGETKETLYKMVDYAIKWLPKDKPRYLMGVGSTDAILEGVLRGIDMFDCVLPTRIARHGTLMTSEGRLNIRNAKFERDFGPLDPECDCYTCKNFSRAYLRHLIRCTEGLGQRLLSIHNLRFLTKLTEDIREAINDDRFLDFKAEYFKRYDLNSIDSRGF

SEQ ID NO: 55088 - protein, 378 aa, unidentified
  source 1..378: note = Erythrobacter aquimixticola
  REGION 1..378: note = tr|A0A419RRL9|A0A419RRL9_9SPHN Queuine tRNA-ribosyltransferase OS=Erythrobacter aquimixticola; OX = 1958945 GN=tgt PE=3 SV=1
MASDRPRFAFSLKARDGRARTGEIAMRRGTIRTPAFMPVGTAATVKAMKPESVRATGADIILGNTYHLMLRPGAERMARLGGLHEFMRWDRPILTDSGGYQVMSLSDLRKLTEKGVEFRSHIDGSKHMLTPERSIEIQRLLGSDIVMAFDECPRADRPMAEIEASMELSMRWAQRSRDAFDAGGEHAANAALFGIQQGALDRGLRARSAEALRAIDFDGYAVGGLAVGEGQEAMFGVLDYAPDMLPEEAPRYLMGVGKPDDLVGAVERGIDMFDCVLPTRSGRNGQGFTWNGPINLRNARHAEDTGPLDPRCTCPTCGNYSRAYLHHLHKSGEILGAMLLTEHNLSFYQQLMQTMRDAIGAGTFAAFAATFRADYLEA

SEQ ID NO: 55089 - protein, 368 aa, unidentified
  source 1..368: note = Erythrobacter atlanticus
  REGION 1..368: note = tr|A0A0H4VCG0|A0A0H4VCG0_9SPHN Queuine tRNA-ribosyltransferase OS=Erythrobacter atlanticus; OX = 1648404 GN=tgt PE=3 SV=2
MDATDGRARTGRIEMRRGTIRTPAFMPVGTAGTVKAMKPEDVRAGGADIILGNTYHLMLRPGAERMARLGGLHSFMRWNRPILTDSGGYQVMSLSDLRKLTEEGVEFRSHIDGSKHMLTPERSMEIQRLLGSDIVMAFDECPRADRPMAEIEASMELSMRWAQRSRDAFDSGGDHAASSALFGIQQGALDEGLRARSAEALRAIGFDGFAIGGLAVGEGQEAMFGVLDYAPAMLPEDAPRYLMGVGKPDDLVGAVERGVDMFDCVLPTRSGRNGQAFTWNGTVNLRNAGHAEDTGPLDPRCICPTCASYSRAYLHHLHKSGEILGAMLLTEHNLSFYQQLMQAMRDAIAEGRFAIFAEDFRRDYLSRK

SEQ ID NO: 55090 - protein, 374 aa, Erythrobacter citreus
  REGION 1..374: note = tr|A0A0L1KDE6|A0A0L1KDE6_9SPHN Queuine tRNA-ribosyltransferase OS=Erythrobacter citreus LAMA 915; OX = 1306953 GN=tgt PE=3 SV=1
MSERFAFTIDATDGAARTGRIAMQRGTIRTPAFMPVGTAATVKAMKPETVRKTGADIILGNTYHLMLRPGAERMARLGGLHKFMNWQRPILTDSGGYQVMSLSELRKLTEKGVEFRSHIDGSKHMLTPERSMEIQRMLGSDIVMAFDECPRADRPRDEIAASMEMSMRWARRSRDGFDAGGEHAQRSALFGIQQGALDEELRRISADKLTDIGFDGYAIGGLAVGEGQEAMFATLDFAPGQLPADRPRYLMGVGKPDDLVGAVERGVDMFDCVLPSRSGRNGQAFTWNGPVNLRNARFAEDEEPLDSRCTCDTCGTYSRAYLHHLVKSQEILGAMLMTEHNIAFYQQLMQAMRDAIAEARFAQFARDFRRDYLQ

SEQ ID NO: 55091 - protein, 374 aa, Erythrobacter flavus
  REGION 1..374: note = tr|A0A3T1CIH9|A0A3T1CIH9_9SPHN Queuine tRNA-ribosyltransferase OS=Erythrobacter flavus OX=192812; GN = tgt PE=3 SV=1
MSERFAFTIDATDGATRTGSIAMRRGTIRTPAFMPVGTAATVKAMKPETVRKTGADIILGNTYHLMLRPGAERVARLGGLHQFMNWDRPILTDSGGYQVMSLSDLRKLTEKGVEFRSHIDGSKHMLTPERSMEIQRLLGSDIVMAFDECPRADRPRDEIAASMEMSMRWAKRSRDGFDSGGDHAERAALFGIQQGALDEDLRQISAEKLTEIGFDGYAIGGLAVGEGQEAMFATLDFAPRQLPQDRPRYLMGVGKPDDLVGAVERGVDMFDCVLPSRSGRNGQAFTWNGPINLRNARFAEDQEPLDSRCACDTCGTYTRAYLHHLIKSQEILGAMLMTEHNIAFYQQLMQAMRDAIAEGRFAAFAAQFRSDYLG

SEQ ID NO: 55092 - protein, 374 aa, Erythrobacter flavus
  REGION 1..374: note = tr|A0A222EVX6|A0A222EVX6_9SPHN Queuine tRNA-ribosyltransferase OS=Erythrobacter flavus OX=192812; GN = tgt PE=3 SV=1
MSERFAFTIDATDGAARTGSIAMRRGTIRTPAFMPVGTAATVKAMKPETVRKTGADIILGNTYHLMLRPGAERVARLGGLHQFMNWDRPILTDSGGYQVMSLSDLRKLTEKGVEFRSHIDGSKHMLTPERSMEIQRLLGSDIVMAFDECPRADRPRDEIAASMEMSMRWAKRSRDGFDSGGDHAERSALFGIQQGALDEDLRQISAEKLTEIGFDGYAIGGLAVGEGQEAMFATLDFAPRQLPHDRPRYLMGVGKPDDLVGAVERGVDMFDCVLPSRSGRNGQAFTWNGPINLRNARFAEDQEPLDSRCACDTCGTYTRAYLHHLIKSQEILGAMLMTEHNIAFYQQLMQAMRDAIAEGRFAAFAAQFRSDYLG

SEQ ID NO: 55093 - protein, 377 aa, Erythrobacter gangjinensis
  REGION 1..377: note = tr|A0A0G9MQ12|A0A0G9MQ12_9SPHN Queuine tRNA-ribosyltransferase OS=Erythrobacter gangjinensis; OX = 502682 GN=tgt PE=3 SV=1
MTNPRFQFTVSATDGKARTGQIAMRRGTIRTPAFMPVGTAATVKAMKPEAVRATGADIILGNTYHLMLRPGAERVARLGGLHEFMRWKRPILTDSGGFQVMSLSDLRKLTEKGVEFRSHIDGSKHMLTPERSMEIQRLLGSDIVMAFDECPRADRPMKEIEASMELSMRWAQRSRDAFDAGEDHAAGAALFGIQQGALDEGLRARSAEALRAIGFDGYAIGGLAVGEGQEAMFATLDFAPSQLPEDAPRYLMGVGKPDDLVGAVERGVDMFDCVLPTRSGRNGQAFTWNGPVNLRNARHAEDTGPLDPRCPCPTCTSYSRAYLHHLQKSGEILGAMLVTEHNLSFYQQLMQAMRDAIGERRFAAFAQQFRHDYLPKS

SEQ ID NO: 55094 - protein, 380 aa, Erythrobacter litoralis
  REGION 1..380: note = tr|Q2NAS8|Q2NAS8_ERYLH Queuine tRNA-ribosyltransferase OS=Erythrobacter litoralis (strain HTCC2594) OX=314225 GN=tgt PE=3 SV=1
MTKPRFDFTIHATDGKARTGTIAMQRGEIRTPAFMPVGTAGTVKAMKPESVRAAGADIILGNTYHLMLRPGAERVARLGGLHTFMNWQRPILTDSGGYQVMSLSDLRKLTEQGVEFRSHIDGSKHMLTPERSMEIQRLLGSDIVMAFDECPRADQPRDVIAESMEMSMRWAKRSRDGFDGGAEHAARSALFGIQQGALDEQLRKISAERLTDIGFDGYAIGGLAVGEGQEAMFATLDFAPDQLPEDRPRYLMGVGKPDDLVGAVERGVDMFDCVLPSRSGRNGQAFTWNGPINLRNARFAEDQEPLDSRCACPTCGTYSRAYIHHLIKSQEILGAMLMTEHNIGFYQQLMQAMRDAIGEGRFAAFAADFRRDYLGGGDTA

SEQ ID NO: 55095 - protein, 376 aa, Erythrobacter litoralis
  REGION 1..376: note = tr|A0A074N1S3|A0A074N1S3_9SPHN Queuine tRNA-ribosyltransferase OS=Erythrobacter litoralis; OX = 39960 GN=tgt PE=3 SV=1
MTAPRFKFTLHATDGKARTGTIAMQRGEIRTPAFMPVGTAATVKAMKPETVRSTGADIILGNTYHLMLRPGAERVARLGGLHHFMNWERPILTDSGGYQVMSLSDLRKLSEEGVEFRSHLDGSKHMLTPERSMEIQRLLGSDIVMAFDECPRADRPRDEIAESMELSMRWAKRSREGFDSGEDHAARAALFGIQQGALDEDLRRVSAQKLTDIGFDGYAVGGLAVGEGQEAMFGVLDYAPGQLPHDRPRYLMGVGKPDDLVGAVERGIDMFDCVLPTRSGRNGQAFTWDGPLNLRNARHAEDTGPLDERCTCPTCANYSRAYLHHLHKSGEILGAMLVTEHNLAFYQQLMQAMRAAIEEARFAAFASDFRRDYCKA

SEQ ID NO: 55096 - protein, 374 aa, Erythrobacter longus
  REGION 1..374: note = tr|A0A074MHH3|A0A074MHH3_ERYLO Queuine tRNA-ribosyltransferase OS=Erythrobacter longus OX=1044; GN = tgt PE=3 SV=1
MTRFSFDLHATDGRARTGKITMQRGEIRTPAFMPVGTAATVKAMKPESVREIGADIILGNTYHLMLRPGAERVARLGGLHNFMKWDRPILTDSGGYQVMSLSDLRKLTEKGVEFRSHIDGSKHMLTPERSMEIQRLLGSDIVMCFDECPRADRPRDEIAASMELSMRWAKRSRDGFDSGEGHASRSALFGIQQGALDEDLRRVSAQKLIDIGFDGYAVGGLAVGEGQEAMFGVLDYAPEMLPKDRPRYLMGVGKPDDLVGAVERGIDMFDCVLPTRSGRNGQAFTWNGPINLRNAKFAEDQEPLDPASDCSASRDYSKAYLHHLHKSHEILGAMLLTEHNLAFYQALMQKMRDAIAQGTFTAFAAEFRHNYLSK

SEQ ID NO: 55097 - protein, 385 aa, unidentified
  source 1..385: note = Erythrobacter luteus
  REGION 1..385: note = tr|A0A0G9MY05|A0A0G9MY05_9SPHN Queuine tRNA-ribosyltransferase OS=Erythrobacter luteus OX=1581420; GN = tgt PE=3 SV=1
MASELPAGRPRFRFTVSATDGKARTGSIAMRRGTIRTPAFMPVGTAATVKAMKPEAVRATGADIILGNTYHLMLRPGAERMARLGGLHRFMHWDRPILTDSGGYQVMSLSDLRKLTEAGVEFRSHIDGSKHMLSPERSMEIQRLLGSDIVMAFDECPRADRPLAEIEASMELSMRWAQRSRDAFDAGGDHAAGSALFGIQQGALDEGLRARSAEALRAIGFDGYAIGGLAVGEGQEAMFATLDFAPAMLPEDAPRYLMGVGKPDDLVGAVERGVDMFDCVLPTRSGRNGQAFTWGGPVNLRNARHAEDLSPLDPRCTCPTCATYSRAYLHHLTKSGEMLGAMLLTEHNLSFYQQLMQAMRDAIAAGSFTQFAATFRSDYGLAGTA

SEQ ID NO: 55098 - protein, 376 aa, unidentified
  source 1..376: note = Erythrobacter lutimaris
  REGION 1..376: note = tr|A0A395LTV0|A0A395LTV0_9SPHN Queuine tRNA-ribosyltransferase OS=Erythrobacter lutimaris; OX = 1538146 GN=tgt PE=3 SV=1
MSTRFDFQISATGGAARTGTIRMMRGEIRTPAFMPVGTAATVKGMKPEAVRAAGADIILGNTYHLMLRPGAERMAKLGGLHTFMNWDRPILTDSGGYQVMSLSDLNKLTEEGVEFRSHLDGSKHMLTPERSMEIQRLLGSDIVMAFDECPRADRPLSEIEASMEMSMRWAKRSRDAFDAGGEHAERAALFGIQQGALDEGLRQRSADALREIGFDGYAIGGLAVGEGQEAMFATLDFAPAQLPEDAPRYLMGVGKPDDLVGAVERGVDMFDCVLPTRSGRNGQAFTWNGPMNLRNARFAEDTGPLDDRCACPTCATYSRAYLHHLIKSGEMLGAMLLTEHNIGFYQQLMAAMRAAIADDRFAAFAREFRSTYLKQA

SEQ ID NO: 55099 - protein, 380 aa, unidentified
  source 1..380: note = Erythrobacter marinus
  REGION 1..380: note = tr|A0A0H0XPH6|A0A0H0XPH6_9SPHN Queuine tRNA-ribosyltransferase OS=Erythrobacter marinus OX=874156; GN = tgt PE=3 SV=1
MASEKPRFAFTLKATDGRARTGQIAMRRGTIRTPAFMPVGTAATVKAMKPEDVRATGADIILGNTYHLMLRPGAERMARLGGLHKFMRWNRPILTDSGGYQVMSLCDLRKLTEKGVEFRSHIDGSKHMLSPERSMEIQRLLGSDIVMAFDECPRADRPMAEIEASMELSMRWAKRSRDAFDAGGEHAAGAALFGIQQGCLDEGLRKRSADALREIGFDGYAVGGLAVGEGQEAMFGVLDFAPAMLPEDAPRYLMGVGKPDDLVGAVERGIDMFDCVLPTRSGRNGQAFTWNGPVNLRNARHAEDTGPLDPRCPCPTCTQYSRAYLHHLQKSGEILGAMLTTEHNLSFYQNLMQAMRTAIAEQRFAAFAADFRRDYLERRE

SEQ ID NO: 55100 - protein, 378 aa, Erythrobacter nanhaisediminis
  REGION 1..378: note = tr|A0A1I5MXY7|A0A1I5MXY7_9SPHN Queuine tRNA-ribosyltransferase OS=Erythrobacter nanhaisediminis; OX = 604088 GN=tgt PE=3 SV=1
MANRFDFTIDATDGAARTGRISMLRGDIRTPAFMPVGTAATVKAMKPETVRATGADIILGNTYHLMLRPGAERVARLGGLHKFMNWDRPILTDSGGYQVMSLSDLRKLTEKGVEFRSHIDGSKHMLTPERSMEIQRLLGSDIVMAFDECPRADRPRDEIAASMEMSMRWAQRSRDGFDAGGEHAERSALFGIQQGALDEELRKISAEKLTDIGFDGYAIGGLAVGEGQEAMFATLDFAPGQLPNDRPRYLMGVGKPDDLVGAVERGVDMFDCVLPSRSGRNGQAFTWHGPLNLRNARFAEDTGPLDEKCTCSVCATYSRAYLHHLQKSGEILGAMLMTEHNIAFYQQLMQAMRDAIGGGTFAAFAADFRRDYLGDAKQ

SEQ ID NO: 55101 - protein, 376 aa, Erythrobacter sp.
  REGION 1..376: note = tr|A0A1E4B0E7|A0A1E4B0E7_9SPHN Queuine tRNA-ribosyltransferase OS=Erythrobacter sp. SCN 62-14; OX = 1660099 GN=tgt PE=3 SV=1
MSTRFSFTLHATDGKARTGVIQMQRGEIRTPAFMPVGTAATVKAMKPEDVRASGADIILGNTYHLMLRPTAERMARLGGLHKFMNWDRPILTDSGGYQVMSLSELRKLTEQGVEFKSHLDGSRHMITPERSMEIQRLLGSDIVMAFDECPRADRPRDEIAASMELSMRWARRSRDGFDSGEQHAMRAALFGIQQGALHEDLRRVSAEKLIDIGFDGYAVGGLAVGEGQEAMFGVLDYAPAMLPANKPRYLMGVGKPDDLVGAVERGIDMFDCVLPTRSGRNGQAFTWNGPVNLRNAKHAEDTGPLDERCTCPVCANYSRAYLHHLHKSGEILGAMLVTEHNLYFYQALMQAMRDAIARGRFAAFAADFRRDYLGSS

SEQ ID NO: 55102 - protein, 375 aa, Erythrobacter sp.
  REGION 1..375: note = tr|A0A2Z4K0I0|A0A2Z4K0I0_9SPHN Queuine tRNA-ribosyltransferase OS=Erythrobacter sp. KY5; OX = 2011159 GN=tgt PE=3 SV=1
MSQRFSFELKATDGRARTGKIQMLRGEIRTPAFMPVGTAATVKAMKPEAVRALGADIILGNTYHLMLRPGAERVARLGGLHNFMRWDRPILTDSGGYQVMSLSDLRKLTEKGVEFRSHIDGSKHMLTPERSMEIQRLLGSDIVMAFDECPRADRPRDEIAASMELSMRWAKRSRDAFDSGEEHAARSALFGIQQGALDEDLRRISADKLTDIGFDGYAVGGLAVGEGQEAMFGVLDYAPGMLPADRPRYLMGVGKPDDLVGAVERGIDMFDCVLPTRSGRNGQAFTWNGPLNLRNARFAEDQEPLDETSTCSASRDYSKAYLHHLIKSGEMLGAMLLTEHNLAFYQSLMQAMRTAISEQRFDSFAAEFRRNYLRN

SEQ ID NO: 55103 - protein, 377 aa, unidentified
  source 1..377: note = Erythrobacter xanthus
  REGION 1..377: note = tr|A0A3A1P4I4|A0A3A1P4I4_9SPHN Queuine tRNA-ribosyltransferase OS=Erythrobacter xanthus; OX = 1784712 GN=tgt PE=3 SV=1
MTAPRFQFSIHSTDGKARTGTIAMRRGEIRTPAFMPVGTAATVKAMKPETVRAIGADIILGNTYHLMLRPGAERVARLGGLHRFMRWDRPILTDSGGYQVMSLASLRKLTEEGVTFQSHIDGSRHMLSPERSMEIQRLLGSDIVMCFDECPRADRPLKEIEASMELSMRWARRSRNAFDAGGDHAASAALFGIQQGALDEGLRQRSAEALREIGFDGYAIGGLAVGEGQEAMFATLDFAPGQLPEDAPRYLMGVGKPDDLVGAVERGVDMFDCVLPTRSGRNGQGFTWNGPVNLRNARHAEDTAPLDERCSCDTCANYSRAYLHHLHKSGEILGAMLLTEHNLAFYQQLMQAMRDAITEGRLAAFAADFRRDYLAKI

SEQ ID NO: 55104 - protein, 379 aa, unidentified
  source 1..379: note = Erythrobacter zhengii
  REGION 1..379: note = tr|A0A418NWD5|A0A418NWD5_9SPHN Queuine tRNA-ribosyltransferase OS=Erythrobacter zhengii; OX = 2307003 GN=tgt PE=3 SV=1
MASDRPRFAFTVHATDGKARTGEIAMRRGTIRTPAFMPVGTAATVKAMKPEDVRGTGADIILGNTYHLMLRPGAERVARLGGLHKFMRWDRPILTDSGGYQVMSLSDLRKLTEEGVEFRSHIDGSKHMLSPERSMEIQRLLGSDIVMCFDECPRADRPMQEIEASMELSMRWARRSREAFDAGGEHAANSALFGIQQGALDETLRARSAGALREIGFDGYAIGGLAVGEGQEAMFGVLDYAPGQLPEDAPRYLMGVGKPDDLVGAVERGVDMFDCVLPTRSGRNGQAFTWNGPLNLRNARHAEDTGPLDERCSCPTCGSYSRAYLHHLHKSGEILGAMLVTEHNLSFYQQLMQAMRDAIAKGGFAEFARTFRQDYSGPA

SEQ ID NO: 55105 - protein, 375 aa, unidentified
  source 1..375: note = Erythrobacteraceae bacterium
  REGION 1..375: note = tr|A0A4R0NV67|A0A4R0NV67_9SPHN Queuine tRNA-ribosyltransferase OS=Erythrobacteraceae bacterium CFH 75059 OX=2528174 GN=tgt PE=3 SV=1
MTRFQFDLLATDGAARAGRIAMRRGVIDTPAFMPVGTAASVKAMKPGTVRALGAQIILGNTYHLMLRPGAERVARLGGLHRFMGWELPILTDSGGYQVMSLAELRSLSEEGVTFRSHLDGSRHILTPERSMEIQRLLGSDIVMAFDECPRPDQDRDALGRSMELSMRWAARSRTAFDAGADHVQRAALFGIQQGGLDEDLRRHSAEALTAIGFDGYAVGGLAVGEGQEAMFATLDFAPGQLPADRPRYLMGVGKPDDLVGAVERGIDMFDCVLPTRSGRNGQAFTWSGPLNLRNSRFAEDESPLDDRCTCDVCRGYSRAYLHHLVRSKEILGAMLMTEHNLAFYQQLMARMRAAIARGEFAAFAASFRASYGAER

SEQ ID NO: 55106 - protein, 376 aa, unidentified
  source 1..376: note = Erythrobacteraceae bacterium
  REGION 1..376: note = tr|A0A0P8AG61|A0A0P8AG61_9SPHN Queuine tRNA-ribosyltransferase OS=Erythrobacteraceae bacterium HL-111 OX=1666908 GN=tgt PE=3 SV=1
MTGPRFEFTLHQTDGKARTGVIRMQRGEIRTPAFMPVGTAATVKAMKPEAVRALGADIILGNTYHLMLRPGAERVARLGGLHRFMNWPRPILTDSGGYQVMSLSELRKLTEEGVEFRSHLDGSKHMLTPERSMEIQRLLGSDIVMAFDECPRADRPRDEIAASMELSMRWAKRSREGFDSDAAHAGRAALFGIQQGALDEDLRRVSAQALIDIGFDGYAVGGLAVGEGQEAMFGVLDYAPAMLPEQAPRYLMGVGKPDDLVGAVERGIDMFDCVLPTRSGRNGQAFTWNGPLNLRNARFAEDSEPLDPHSDCAASRDYSKAYLHHLVKSNEILGAMLVTEHNLAFYQQLMAAMRAAIAKGTFAAFARGFRRDYLGQ

SEQ ID NO: 55107 - protein, 375 aa, Escherichia albertii
  REGION 1..375: note = tr|A0A1X3JTZ3|A0A1X3JTZ3_9ESCH Queuine tRNA-ribosyltransferase OS=Escherichia albertii B156; OX = 550693 GN=tgt PE=3 SV=1
MKFELDTTDGRARRGRLVFDRGVVETPCFMPVGTYGTVKGMTPEEVEATGAQIILGNTFHLWLRPGQEIMKLHGDLHDFMQWKGPILTDSGGFQVFSLGDIRKITEQGVHFRNPINGDPIFLDPEKSMEIQYDLGSDIVMIFDECTPYPADWDYAKRSMEMSLRWAKRSRDHFDRLGNKNALFGIIQGSVYEDLRDISVKGLVDIGFDGYAVGGLAVGEPKADMHRILEHVCPQIPADKPRYLMGVGKPEDLVEGVRRGIDMFDCVMPTRNARNGHLFVTDGVVKIRNAKYKSDTGPLDPECDCYTCRNYSRAYLHHLDRCNEILGARLNTIHNLRYYQRLMAGLRKAIEEGKLESFVTDFYQRQGREVPPLNVD

SEQ ID NO: 55108 - protein, 375 aa, Escherichia albertii; identical to SEQ ID NO: 55107
  REGION 1..375: note = tr|A0A2S6PFW4|A0A2S6PFW4_9ESCH Queuine tRNA-ribosyltransferase OS=Escherichia albertii OX=208962; GN = tgt PE=3 SV=1

SEQ ID NO: 55109 - protein, 375 aa, Escherichia fergusonii; identical to SEQ ID NO: 50999
  REGION 1..375: note = tr|F0JMX0|F0JMX0_ESCFE Queuine tRNA-ribosyltransferase OS=Escherichia fergusonii ECD227; OX = 981367 GN=tgt PE=3 SV=1

SEQ ID NO: 55110 - protein, 375 aa, unidentified
  source 1..375: note = Escherichia marmotae
  REGION 1..375: note = tr|A0A2B7MK18|A0A2B7MK18_9ESCH Queuine tRNA-ribosyltransferase OS=Escherichia marmotae OX=1499973; GN = tgt PE=3 SV=1
MKFELDTTDGRARRGRLVFDRGVVETPCFMPVGTYGTVKGMTPEEVEATGAQIILGNTFHLWLRPGQEIMKLHGDLHDFMQWKGPILTDSGGFQVFSLGDIRKITEQGVHFRNPINGDPIFLDPEKSMEIQYDLGSDIVMIFDECTPYPADWDYAKRSMEMSLRWAKRSRERFDSLGNKNALFGIIQGSVYEDLRDISVKGLVDIGFDGYAVGGLAVGEPKADMHRILEHVCPQIPADKPRYLMGVGKPEDLVEGVRRGIDMFDCVMPTRNARNGHLFVTDGVVKIRNAKYKSDTGPLDPECDCYTCRNYSRAYLHHLDRCNEILGARLNTIHNLRYYQRLMAGLRKAIEEGKLESFVADFYQRQGREVPPLNVD

SEQ ID NO: 55111 - protein, 375 aa, Escherichia sp.; identical to SEQ ID NO: 55110
  REGION 1..375: note = tr|A0A4U6CME4|A0A4U6CME4_9ESCH Queuine tRNA-ribosyltransferase OS=Escherichia sp. MR OX=2575922; GN = tgt PE=3 SV=1

SEQ ID NO: 55112 - protein, 375 aa, Escherichia sp.; identical to SEQ ID NO: 55110
  REGION 1..375: note = tr|A0A4Q9JRP9|A0A4Q9JRP9_9ESCH Queuine tRNA-ribosyltransferase OS=Escherichia sp. E10V4; OX = 2478971 GN=tgt PE=3 SV=1

SEQ ID NO: 55113 - protein, 371 aa, unidentified
  source 1..371: note = Estrella lausannensis
  REGION 1..371: note = tr|A0A0H5DP28|A0A0H5DP28_9BACT Queuine tRNA-ribosyltransferase OS=Estrella lausannensis OX=483423; GN = tgt PE=3 SV=1
MKLKFNIHKKDGKSRARAGEIETAHGTIQTPVFMPVGTKASVKTVTNTQLEEMACRIILGNTYHLMLRPGMDIIRKAGGLHAFMGWNQSILTDSGGFQVFSLSSLRKITDEGVYFQSHIDGSRHFLGPKESMEVQKALNSDIVMCFDECVSYPSELKEVEKAMERTHLWASICRDYPLGADQNLFGIVQGGVDPSLRAASAQFLRTLDFEGYAIGGLSVGEPGEIMYRVIDAVEPHLPEEKPRYLMGVGTPRNLIEAVMRGVDMFDCVMPTRNARNGTAFTWQGKVTIKAARYSEDFTPLDPETKSEASRHTKAYIRHLLNVDEVTGLTLVTLQNLAFYLDFMKKIRHAILEGTLDELYAKVKAIYPESGD

SEQ ID NO: 55114 - protein, 376 aa, Ethanoligenens harbinense
  REGION 1..376: note = tr|E6U6Z2|E6U6Z2_ETHHY Queuine tRNA-ribosyltransferase OS=Ethanoligenens harbinense (strain DSM 18485 / JCM 12961 / CGMCC 1.5033 / YUAN-3); OX = 663278 GN=tgt PE=3 SV=1
MFELLQTEGKARRGRFTTVHGKVETPAFMNVATSAAIKGGISSYDLVDLHCQVELCNTYHLHLRPGDDVVSDMGGLRAFMGWQGPVLTDSGGFQVFSLAPLRRITEDGVYFSSHIDGSHIFMGPEESMRIQSNLGSTIAMAFDECVANPAEYEYAVQSCARTTRWLERCKKEMACLNAAPGTINPHQMLFGINQGATFDDLRVAHMRQIAEMDLDGYAIGGLAVGEPAEDMYRIISCVEPHMPVGKPRYLMGVGTPLNLLEAVERGIDLFDCVMPSRNARHAHVFTRAGKRNLMNAKYTRDSAPIDETCDCPVCKKHSRAYLHHLFKAEELLAMRLSVMHNLYFYNRLMEDIRAAIEEGRFAAFKRELSRTIDRRI

SEQ ID NO: 55115 - protein, 376 aa, Ethanoligenens harbinense; identical to SEQ ID NO: 55114
  REGION 1..376: note = tr|A0A386XKL7|A0A386XKL7_9FIRM Queuine tRNA-ribosyltransferase OS=Ethanoligenens harbinense; OX = 253239 GN=tgt PE=3 SV=1

SEQ ID NO: 55116 - protein, 380 aa, unidentified
  source 1..380: note = Eubacteriaceae bacterium
  REGION 1..380: note = tr|A0A143Y2E6|A0A143Y2E6_9FIRM Queuine tRNA-ribosyltransferase OS=Eubacteriaceae bacterium CHKCI004 OX=1780380 GN=tgt PE=3 SV=1
MYTLLTRDGLAKRGRLETVHGTIETPVFMNVGTVGAIKGAVSTDDLKTIETQVELSNTYHLHVRTGDELIKKFGGLHKFMAWDRPILTDSGGFQVFSLSGLRRIKEEGVYFQSHIDGHHIFMGPEESMQIQSNLGSTIAMAFDECPPSKADESYIRNSVARTTRWLARCKAKMAELNSLPDTVNPHQLLFGINQGGILADVRKEHARIISEMDLDGYAIGGLAVGETHEEMYHILDETVPCLPADKPTYLMGVGTPANIVEAVDRGVDFFDCVYPSRNGRHGHVYTAHGKLNLFNKKYELDPRPIEEGCGCPACRTYSRAYIRHLLKAKEMLGMRLCVLHNLYFYNHLMERIRAAIEEHRYKEFKKETLEGFLTPEEELR

SEQ ID NO: 55117 - protein, 376 aa, unidentified
  source 1..376: note = Eubacteriaceae bacterium
  REGION 1..376: note = tr|A0A143ZTS9|A0A143ZTS9_9FIRM Queuine tRNA-ribosyltransferase OS=Eubacteriaceae bacterium CHKCI005 OX=1780381 GN=tgt PE=3 SV=1
MYQLLKKEGAARRGQFDTPHGSVQTPAFMNVATAGAIKGAVSAHDLADLKCQVMLCNTYHLHLRPGDKLVHDFGGLHSFTGWQGPILTDSGGFQVFSLSKLRKIKEEGVHFSSHIDGRKIFMGPEESMQIQSHLGSTIAMAFDECIENPSPYDYVADSCARTVRWLKRCRQEMTRLNGLPDTLNPQQMLFGINQGGTFDDLRVAHMQEIAELDLDGYAIGGLAVGEPAEDMYRIISAVETFMPVNKPRYLMGVGTPVNILEAVHRGVDLFDCVMPTRNGRHAHVFTWEGIRNLLNEKYQLDHAPIDEHCDCPTCRRYSRAYLRHLFKSGEMLAMRLCVMHNLYFYNTLLERIRAALDEGQFEAFYQTHRLVLDKRI

SEQ ID NO: 55118 - protein, 371 aa, Eubacterium aggregans
  REGION 1..371: note = tr|A0A1H4BSI5|A0A1H4BSI5_9FIRM Queuine tRNA-ribosyltransferase OS=Eubacterium aggregans OX=81409; GN = tgt PE=3 SV=1
MFKYELIKEEKDTGARLGRITTDHGVIETPIFMPVGTQATVKSMDVHDLETMGAQIILGNTYHLYLRPGQEIMEKAGGLHSFMNWQHPILTDSGGFQVFSLGDLRKITEEGVHFVSHLDGSRHFMSPEKSIEMQNSIGADIIMCFDECAPADADYDYTKKSLEMTSRWAARCKAAHKRPDEQALFGIVQGGMFKDLRAQSAREITAMDFPGYSIGGLSVGESKEIMYEMLSHTVPLLPEDKPHYLMGVGSVDALFEGVIRGIDMFDCVLQTRIARNGTAMTSQGKVVVRNATYAEDFSPLDPECDCYVCRNHTRAYLRHLIKCNEILGARLLTYHNLYFTLRIMEKIREAIKNDTLLALKEEVFQKYGITS

SEQ ID NO: 55119 - protein, 371 aa, Eubacterium barkeri
  REGION 1..371: note = tr|A0A1H3CAC0|A0A1H3CAC0_EUBBA Queuine tRNA-ribosyltransferase OS=Eubacterium barkeri OX=1528; GN = tgt PE=3 SV=1
MFKYELIKEEKDTGARLGRITTDHGVIETPIFMPVGTQATVKSMDVHDLETMGAQIILGNTYHLYLRPGQEIMEKAGGLHSFMNWQHPILTDSGGFQVFSLGDLRKITEEGVHFVSHLDGSRHFMSPEKSIEMQNSIGADIIMCFDECAPADADYDYTKKSLEMTSRWAARCKAAHKRPDEQALFGIVQGGMFKDLRAQSAREITAIDFPGYSIGGLSVGESKSVMYEMLSHTVPLLPKDKPHYLMGVGSVDALFEGVIRGIDMFDCVLQTRIARNGTAMTSQGKVVVRNATYAEDFSPLDPECDCYVCRNHTRAYLRHLIKCNEILGARLLTYHNLYFTLRIMEKIREAIKNDRLLALKEEIFQKYGITS

SEQ ID NO: 55120 - protein, 377 aa, Eubacterium brachy
  REGION 1..377: note = tr|V1CQ67|V1CQ67_9FIRM Queuine tRNA-ribosyltransferase OS=Eubacterium brachy ATCC 33089; OX = 1321814 GN=tgt PE=3 SV=1
MRGSMSALKFILEKKDKSDKARAGKIILPHGEVETPVFMPVGTAATVKSMKPEDVERLGAEIILSNTYHLYLRPGSKIIRDAGGLHKFMNWNRPILTDSGGFQVFSLGEMRKITEQGVEFRSFIDGSKHTLTPEKSIEVQCDLGSDIMMAFDECTPYPADRDYVKNSLERTTRWLKRCIKAQQDTEKQALFGIMQGGMYRDLREESARQIVDLDLPGYAIGGLSVGEPKELMCEVLDYAVDFLPENKPRYLMGVGTPDYIFEGIQRGIDMFDCVLPTRIARNGTAMTSIGRVNIKNAKYERDFEPLDRECDCYTCRNYSKSYLRHLFKANEILSSILLSTHNLHFLVKMTKNIRKAILEDRFFEYKTEFYSKYGYDE

SEQ ID NO: 55121 - protein, 369 aa, Eubacterium callanderi; identical to SEQ ID NO: 52981
  REGION 1..369: note = tr|E3GG70|E3GG70_9FIRM Queuine tRNA-ribosyltransferase OS=Eubacterium callanderi OX=53442; GN = tgt PE=3 SV=1

SEQ ID NO: 55122 - protein, 399 aa, unidentified
  source 1..399: note = [Eubacterium] cellulosolvens
  REGION 1..399: note = tr|I5ARC8|I5ARC8_EUBCE Queuine tRNA-ribosyltransferase OS=[Eubacterium] cellulosolvens 6; OX = 633697 GN=tgt PE=3 SV=1
MAEYKLMKVCGRAKRAEFTTVHGTVQTPVFMNVGTVAAIKGGVSTEDLEKIGTQIELSNTYHLHVRTGDETIKKLGGLHKFMSWNKPILTDSGGFQVFSLADMRKIKEEGVTFRSHIDGHYIFMGPEESMQIQSNLGSTIAMAFDECPSSVATQQYVKKSIERTTRWLDRCKKKMQELNMREDTVNPHQLLFGINQGAVYNDLRIEHAKMITERELDGYAVGGLAVGETHQQMYDVLDHVVPYLPQDKPTYLMGVGTPANIIEAVDRGIDFFDCVYPSRNGRHGHVYTHHGHLNLMNAQYELDDNPIEEGCGCPVCQRYSRAYIRHLLKAKEMLGLRFCTLHNLYFYNHLMEEIREAIDSDNWDSWKKKTLDDLNEEKQNHKVMNQPKFYQKVINEELK

SEQ ID NO: 55123 - protein, 377 aa, Eubacterium coprostanoligenes
  REGION 1..377: note = tr|A0A1T4LTI0|A0A1T4LTI0_9FIRM Queuine tRNA-ribosyltransferase OS=Eubacterium coprostanoligenes; OX = 290054 GN=tgt PE=3 SV=1
MGYKLLKTENKARRGEFSTVHGTVQTPCFMNVATVAAIKGGLSTVDLKEVGAQVMLCNTYHLHVRPGDDKVKTLGGLHKFTNWDRPILTDSGGFQVFSLAKLNKITEDGVTFNSHVDGRKIFMGPEESMQIQSNLGSTIAMAFDECVANPAKYEYSKEACARTLRWLERCKVEMDRLNSLPDTINKNQMLFGINQGCTFDDLRVEHMKEIAKMDLDGYAIGGLAVGEPKEDMYRIISAVEPFAPVDKPRYLMGVGTPGNILEGVSRGVDLFDCVMPARNARHGQLFTKKGIININNAKYILDDHPIDEECQCPTCRNYSRAYVRHLLKAGEMLGMRLAVMHNLYFYNNLMTEIRENIDNNSFEDYKNEYVDRLDTRI

SEQ ID NO: 55124 - protein, 405 aa, Eubacterium dolichum; identical to SEQ ID NO: 50910
  REGION 1..405: note = tr|R7G8W1|R7G8W1_9FIRM Queuine tRNA-ribosyltransferase OS=Eubacterium dolichum CAG:375; OX = 1263076 GN=BN631_00242 PE=3 SV=1

SEQ ID NO: 55125 - protein, 378 aa, unidentified
  source 1..378: note = [Eubacterium] eligens
  REGION 1..378: note = tr|A0A415MFP4|A0A415MFP4_9FIRM Queuine tRNA-ribosyltransferase OS=[Eubacterium] eligens OX=39485; GN = tgt PE=3 SV=1
MYKILKTDGRAKRAEFTTVHGTVQTPVFMNVGTVAAIKGAVATTDLQQIGTQIELSNTYHLHVRPGDKIIKQLGGLHKFMNWDKPILTDSGGFQVFSLAGLRKIKEEGVTFQSHIDGHKIFMGPEESMQIQSNLGSTIAMAFDECAPAKADRKYIQNSVDRTYRWLERCKKEMARLNSLPDTVNPDQMLFGIDQGGVCNDIRIDHAKRISELDLDGYAVGGLAVGETHEEMYDVLDNVVPYLPKDKPTYLMGVGTPANILEAVDRGIDFFDCVYPSRNGRHGHVYTKFGKINLFNAKYETDTAPIEEGCGCPCCQNYSRAYVRHLLKAKEMLGMRLCVLHNLYYYNHLMTDIRAAIEEGRYAGFKEEALYQMKTYNKQ

SEQ ID NO: 55126 - protein, 378 aa, unidentified
  source 1..378: note = [Eubacterium] eligens
  REGION 1..378: note = tr|A0A174ZAW4|A0A174ZAW4_9FIRM Queuine tRNA-ribosyltransferase OS=[Eubacterium] eligens OX=39485; GN = tgt PE=3 SV=1
MYKILKTDGRAKRAEFTTVHGTVQTPVFMNVGTVAAIKGAVATTDLQQIGTQIELSNTYHLHVRPGDKIIKQLGGLHKFMNWNKPILTDSGGFQVFSLAGLRKIKEEGVTFQSHIDGHKIFMGPEESMQIQSNLGSTIAMAFDECAPAKADRKYIQNSVDRTYRWLERCKKEMARLNSLPDTVNPDQMLFGIDQGGVFNDIRIDHAKRISELDLDGYAVGGLAVGETHEEMYDVLDNVVPYLPKDKPTYLMGVGTPANILEAVDRGIDFFDCVYPSRNGRHGHVYTKFGKINLFNAKYETDTAPIEEGCGCPCCQNYSRAYVRHLLKAKEMLGMRLCVLHNLYYYNHLMTDIRAAIEEGRYAGFKEEALYQMKTYDKQ

SEQ ID NO: 55127 - protein, 378 aa, Eubacterium eligens
  REGION 1..378: note = sp|C4Z563|TGT_EUBE2 Queuine tRNA-ribosyltransferase; OS = Eubacterium eligens (strain ATCC 27750 / VPI C15-48); OX = 515620 GN=tgt PE=3 SV=1
MYKILKTDGRAKRAEFTTVHGTVQTPVFMNVGTVAAIKGAVATTDLQQIGTQIELSNTYHLHVRPGDKIIKQLGGLHKFMNWDKPILTDSGGFQVFSLAGLRKIKEEGVTFQSHIDGHKIFMGPEESMQIQSNLGSTIAMAFDECAPAKADRKYIQNSVDRTYRWLERCKKEMARLNSLPDTVNPDQMLFGIDQGGVFNDIRIDHAKRISELDLDGYAVGGLAVGETHEEMYDVLDNVVPYLPQDKPTYLMGVGTPANILESVDRGIDFFDCVYPSRNGRHGHVYTKFGKINLFNAKYETDTAPIEEGCGCPCCQNYSRAYVRHLLKAKEMLGMRLCVLHNLYYYNHLMTDIRAAIEEGRYAGFKEEALYQMKTYDKQ

SEQ ID NO: 55128 - protein, 378 aa, Eubacterium eligens
  REGION 1..378: note = tr|R6A5C6|R6A5C6_9FIRM Queuine tRNA-ribosyltransferase OS=Eubacterium eligens CAG:72; OX = 1263077 GN=tgt PE=3 SV=1
MYKILKTDGRAKRAEFTTVHGTVQTPVFMNVGTVAAIKGAVATTDLQQIGTQIELSNTYHLHVRPGDKIIKQLGGLHKFMNWNKPILTDSGGFQVFSLAGLRKIKEEGVTFQSHIDGHKIFMGPEESMQIQSNLGSTIAMAFDECAPAKADRKYIQNSVDRTYRWLERCKKEMARLNSLPDTVNPEQMLFGIDQGGVFNDIRIDHAKRISELDLDGYAVGGLAVGETHEEMYDVLDNVVPYLPKDKPTYLMGVGTPANILEAVDRGIDFFDCVYPSRNGRHGHVYTKFGKINLFNAKYETDTAPIEEGCGCPCCQNYSRAYVRHLLKAKEMLGMRLCVLHNLYYYNHLMTDIRAAIEEGRYAGFKEEALYQMKTYDKQ

SEQ ID NO: 55129 - protein, 380 aa, Eubacterium hallii
  REGION 1..380: note = tr|R6G0T6|R6G0T6_9FIRM Queuine tRNA-ribosyltransferase OS=Eubacterium hallii CAG:12; OX = 1263078 GN=tgt PE=3 SV=1
MYKLLTKDGMAKRGEFETVHGTIQTPVFMNVGTVGAIKGAVSTDDLRTIGTQVELSNTYHLHVRTGDKLIKQFGGLHKFMGWDKPILTDSGGFQVFSLSGLRKIKEEGVYFQSHIDGHHIFMGPEESMQIQSNLGSTIAMAFDECPSSRADRTYIQNSVDRTTRWLERCKKKMQELNSLPDTVNPHQMLFGINQGGVFADIRIEHAKRISELDLDGYAVGGLAVGETHDEMYYILDEVVPYLPENKPTYLMGVGTPANIIEAVDRGIDFFDCVYPSRNGRHGHVYTHHGKLNLFNKKFELDPRPIEEGCQCPSCRTYSRAYIRHLLKAKEMLGMRLCVLHNLYFYNHLMEEIRGAIDEHRYKEFKKTTLEGFLTPEEEYR

SEQ ID NO: 55130 - protein, 373 aa, unidentified
  source 1..373: note = [Eubacterium] infirmum
  REGION 1..373: note = tr|A0A377FN19|A0A377FN19_9FIRM Queuine tRNA-ribosyltransferase OS=[Eubacterium] infirmum OX=56774; GN = tgt PE=3 SV=1
MKHAVSYELKRKDKNSGARRGVLHTPHGDIQTPVFMPVGTQATVKAMTPEQVEATGAKLILGNTYHLFLRPGHEIVREAGGLHKFMNWNHAILTDSGGFQVFSLGKLRKISEEGVTFRSHIDGSKKFISPEIAIEIQNSLGADIIMAFDECAPYPADRRYVEDSLKRTTRWLKRCKDAHKDVERQSLFGIMQGGMYSDLRKMSADQIVELNLPGYAIGGLSVGEPKELMLEVLDNCVDYLPSEKARYLMGVGTVDYIFEGVERGIDMFDCVQPTRIARHGMATTANGKLNIKNVKFERDFSSLDEECDCYTCRNFSKAYLRHLFKANEMLCSTLLSIHNIYFLEKMMEGIQKAIEEDRFLEFKKEFYDKYGEF

SEQ ID NO: 55131 - protein, 373 aa, Eubacterium infirmum
  REGION 1..373: note = tr|H1PM16|H1PM16_9FIRM Queuine tRNA-ribosyltransferase OS=Eubacterium infirmum F0142; OX = 883109 GN=tgt PE=3 SV=1
MKHAVSYELKRKDKNSEARRGVLHTPHGDIQTPVFMPVGTQATVKAMTPEQVEATGAKLILGNTYHLFLRPGHEIVREAGGLHKFMNWNHAILTDSGGFQVFSLGKLRKISEEGVTFRSHIDGSKKFISPEIAIEIQNALGADIIMAFDECAPYPADRRYVEDSLKRTTRWLKRCKDAHKDVERQSLFGIMQGGMYSDLRKMSADQIVEMNLPGYAIGGLSVGEPKELMLEVLDNCVDYLPSEKARYLMGVGTVDYIFEGVERGIDMFDCVQPTRIARHGMATTANGKLNIKNVKFERDFSSLDEECDCYTCRNFSKAYLRHLFKANEMLCSTLLSIHNIHFLEKMMEGIQKAIEEDRFLEFKKEFYDKYGEF

SEQ ID NO: 55132 - protein, 369 aa, Eubacterium limosum
  REGION 1..369: note = tr|A0A317RWB9|A0A317RWB9_EUBLI Queuine tRNA-ribosyltransferase OS=Eubacterium limosum OX=1736; GN = tgt PE=3 SV=1
MFRYELIKEDKHTGARLGKIHTSHGVINTPIFMPVGTQATVKSMTSEDLEEMDANIILGNTYHLYLRPGQEIMEKAGGLHNFMNWDRPILTDSGGFQVFSLNDLRKITEEGVEFCSHLDGSRHFMSPEKSIDMQNTIGADIIMCFDECAPADADYEYTKKSMEMTTRWAKRCKDAHKRPDDQALFGIVQGGMYEDLRAESVRGLTEIDFPGYSIGGLSVGESKDTMYRILDATVPLLPKDKPRYLMGVGSVDALLEGVIRGVDMFDCVLQTRIARNGTAMTSQGKVVVRNATYKEDFTPLDPECDCFVCRNYTRAYLRHLVKCNEILGARLLTYHNLYFTLKLMEKVRNAIMEDNLLAFKESFFQKYGI

SEQ ID NO: 55133 - protein, 369 aa, Eubacterium limosum
  REGION 1..369: note = tr|A0A0U2MHP0|A0A0U2MHP0_EUBLI Queuine tRNA-ribosyltransferase OS=Eubacterium limosum OX=1736; GN = tgt PE=3 SV=1
MFRYELIKEDKHTGARLGKIHTNHGVINTPIFMPVGTQATVKSMTSEDLKEMDANIILGNTYHLYLRPGQEIMEKAGGLHKFMNWDRPILTDSGGFQVFSLNDLRKITEEGVEFCSHLDGSRHFMSPEKSIDMQNTIGADIIMCFDECAPADADYEYTKKSMEMTTRWAKRCKDAHKRPDDQALFGIVQGGMYEDLRAESVRGLTEIDFPGYSIGGLSVGESKDTMYRILDATVPLLPKDKPRYLMGVGSVDALLEGVIRGVDMFDCVLQTRIARNGTAMTSQGKVVVRNATYKEDFTPLDPECDCFVCRNYTRAYLRHLVKCNEILGARLLTYHNLYFTLKLMEKVRNAIMEDSLLAFKESFFQKYGI

SEQ ID NO: 55134 - protein, 369 aa, unidentified; identical to SEQ ID NO: 55133
  source 1..369: note = Eubacterium maltosivorans
  REGION 1..369: note = tr|A0A4P9CC77|A0A4P9CC77_9FIRM Queuine tRNA-ribosyltransferase OS=Eubacterium maltosivorans; OX = 2041044 GN=tgt PE=3 SV=1

SEQ ID NO: 55135 - protein, 373 aa, Eubacterium minutum
  REGION 1..373: note = tr|A0A223B3W3|A0A223B3W3_9FIRM Queuine tRNA-ribosyltransferase OS=Eubacterium minutum ATCC 700079; OX = 888721 GN=tgt PE=3 SV=1
MTYRLLHRDSKTGARRGVIHTPHGDIQTPVFMPVGTQAAVKAMRPEQIDDMGAEIILANTYHLYLRPGDNLIADAGGLHKFMNWKKPILTDSGGFQVFSLGKLRKITEEGVKFQSHIDGAKHILTPEKAVEIQQNLGSDIMMAFDECAPYPADRAYIKESMNRTIRWLRRCREAQLEGFHGNTDKQALFGIVQGGMYKDLRHECVKTMVDMDLPGYALGGLSVGEPKERMIDILDECVDDLPAGKPRYLMGVGTPDYLFEAVEHGIDMCDCVEPTRIARHGLATTSRGRINIKNAKFERDFMPLDPECDCYTCRNYSKSYIRHVFKAGEMMAAMLLSNHNLHFLIKLMQNMRTAIEEDRFLEFKEEFYARYYG

SEQ ID NO: 55136 - protein, 372 aa, Eubacterium nodatum
  REGION 1..372: note = tr|W2BZ79|W2BZ79_9FIRM Queuine tRNA-ribosyltransferase OS=Eubacterium nodatum ATCC 33099; OX = 1161902 GN=tgt PE=3 SV=1
MDHAVTYELLHKDKETGARRGVIHTPHGDIQTPVFMPVGTQAAVKSMRPEQVKDMGAEVILSNTYHLYLRPGHEIIREAGGLHKFMNWDRAILTDSGGFQVFSLGKLRKITEEGVRFQSHIDGSRHILTPEKAVEIQNALGSDIIMAFDECAPYPSDRTYIKDSMNRTIRWLERCKKAHKNIEHQSLFAIVQGGMYKDLRHECAKIMVDMEFPGYAFGGLSVGEPKEEMIDILDDCVEDLPVDKPRYLMGVGTPDYLFEAVEHGIDMCDCVEPTRIARHGLATTSQGRLNIKNKKFEKDFTPLDSECDCYTCRNYSRAYIRHTFKAGEMMAAMLISNHNLHFLVRLMANMRKAIEEDRFLEFKEEFYEKYYE

SEQ ID NO: 55137 - protein, 376 aa, Eubacterium oxidoreducens
  REGION 1..376: note = tr|A0A1G6AXW6|A0A1G6AXW6_EUBOX Queuine tRNA-ribosyltransferase OS=Eubacterium oxidoreducens; OX = 1732 GN=tgt PE=3 SV=1
MYELLKTEGRAKRGVLHTVHGDIQTPVFMNVGTAAAIKGAVSTEDLEQIKTQVQLSNTYHLHVRPGDEIVKKMGGLHKFMSWDKPILTDSGGFQVFSLAGLRKIKEEGVTFHSHVDGRKIFMGPEESMQIQSNLGSTIAMAFDECPPALAERDYVMRSVERTTRWLKRCKLEMARLNQLEDTVNPHQLLFGINQGAIYADIRIEHAKQIADMELPGYAVGGLAVGESHEQMYYILEEVVPYLPKNKPTYLMGVGTPANILEAVERGVDFFDCVYPSRNGRHGHVYTNNGKLNLFNKKFELDARPIEEGCGCPACRRYSRAYIRHLLKAKEMLGMRLCVLHNLYFYNTMMEEIRAALDEGRFAEYKKQKLDQMQSDV

SEQ ID NO: 55138 - protein, 378 aa, Eubacterium plexicaudatum
  REGION 1..378: note = tr|N2AB22|N2AB22_9FIRM Queuine tRNA-ribosyltransferase OS=Eubacterium plexicaudatum ASF492 OX=1235802 GN=tgt PE=3 SV=1
MYELLKQEGRAKRGIFHTVHGDIQTPVFMNVGTCGAIKGAVSTDDLKGIKTQVELSNTYHLHVRPGDFLIKKMGGLHRFIAWDKPILTDSGGFQVFSLAGLRKIKEEGVYFHSHVDGRKIFMGPEQSMQIQSNLASTIAMAFDECPSSRADRTYVQNSVDRTTRWLKRCQDEMKRLNRLEDTINKNQLLFAINQGAVFDDIRIEHAKRIAEMETDGYALGGLAVGETHEEMYHILDVTVPHLPVNKPTYLMGVGTPENILEGVERGVDFFDCVYPTRNGRHGHVYTNNGKLNLFNRQFEMDERPIEEGCQCPACRTYSRAYIRHLLKAKEMLGMRLCVLHNLYFYNTMMEEIRGALDEGNFAAYKAKKLEGFRCGART

SEQ ID NO: 55139 - protein, 375 aa, Eubacterium pyruvativorans
  REGION 1..375: note = tr|A0A1I7HMH2|A0A1I7HMH2_9FIRM Queuine tRNA-ribosyltransferase OS=Eubacterium pyruvativorans; OX = 155865 GN=tgt PE=3 SV=1
MSNLAVTYELLHRDKKTGARRGVVHTPHGDIQTPVFMPVGTQAAVKAMRPEQVRDMGAEIILSNTYHLYLRPGHELIREAGGLHKFMNWNRAILTDSGGFQVFSLGKLRKITEEGVRFQSHIDGSRHILTPEKAIEIQEALGSDIMMAFDECAPYPADHSYIEDSMLRTCRWLKRCQDAQTSPEKQALFGIMQGGMYEDLRRESAARIVDMDLQGYSIGGLSVGEPKAKMLEVLDYCVDLLPVEKPRYLMGVGTPDYIFEGVERGLDMFDCVEPTRIARHGVAMTSHGRINLKNAKFARDFTPLDEECDCYACRHYTKAYIRHTLKAGELMSAMLLSEHNLHFLIHMMQEMRKAIEEDRFLEYKQEFYEKYGIND

SEQ ID NO: 55140 - protein, 376 aa, Eubacterium ramulus
  REGION 1..376: note = tr|A0A2V1JT18|A0A2V1JT18_EUBRA Queuine tRNA-ribosyltransferase OS=Eubacterium ramulus OX=39490; GN = tgt PE=3 SV=1
MYKLLKKDGRAKRAEVTTVHGTIQTPVFMNVGTAAAIKGAVSTDDLQQIKTQVQLSNTYHLHVRPGDKLIKDLGGLHRFMVWDKPILTDSGGFQVFSLAGLRKIKEEGVHFHSHVDGRKIFMGPEESMQIQSNLGSTIAMAFDECPPALADRSYVQPSVDRTTRWLERCKKEMQRLNSLEDTINKNQMLFGINQGAIYDDIRIDHAKRISEMDLDGYAVGGLAVGESHEEMYHILDVTVPHLPEDKPTYLMGVGTPANILEAVDRGVDFFDCVYPSRNGRHGHVYTNFGKLNLFNQKFERDMRPIEEGCQCPACRTYSRAYIRHLLKAKEMLGMRLCVLHNLYFYNTMMEEIRDAIDAGNYQNYKAEKLYRMEHGE

SEQ ID NO: 55141 - protein, 376 aa, Eubacterium ramulus
  REGION 1..376: note = tr|U2PSD7|U2PSD7_EUBRA Queuine tRNA-ribosyltransferase OS=Eubacterium ramulus ATCC 29099; OX = 1256908 GN=tgt PE=3 SV=1
MYKLLKKDGRAKRAEVTTVHGTIQTPVFMNVGTAAAIKGAVSTDDLQQIKTQVELSNTYHLHVRPGDKLIKELGGLHKFMVWDKPILTDSGGFQVFSLAGLRKIKEEGVQFHSHVDGRKIFMGPEESMQIQSNLGSTIAMAFDECPPALADRNYVQPSVDRTTRWLERCKKEMQRLNSLEDTINKNQMLFGINQGAIFDDIRIDHAKRISEMDLDGYAVGGLAVGESHEEMYHILDVTVPHLPEDKPTYLMGVGTPANILEAVDRGVDFFDCVYPSRNGRHGHVYTNFCKLNLFNQKFERDMRPIEVGCQCPACRTYSRAYIRHLLKAKEMLGMRLCVLHNLYFYNTMMEEIRDAIDMGNYQNYKAEKLYRMEHGE

SEQ ID NO: 55142 - protein, 380 aa, unidentified; identical to SEQ ID NO: 51324
  source 1..380: note = [Eubacterium] rectale
  REGION 1..380: note = tr|D6E576|D6E576_9FIRM Queuine tRNA-ribosyltransferase OS=[Eubacterium] rectale DSM 17629; OX = 657318 GN=tgt PE=3 SV=1

SEQ ID NO: 55143 - protein, 380 aa, unidentified
  source 1..380: note = [Eubacterium] rectale
  REGION 1..380: note = tr|A0A414I123|A0A414I123_9FIRM Queuine tRNA-ribosyltransferase OS=[Eubacterium] rectale OX=39491; GN = tgt PE=3 SV=1
MAKYELLKQEGRAKRGTFHTVHGDIQTPVFMNVGTVGAIKGAVSTDDLKEIKCQVELSNTYHLHVRTGDKIIKELGGLHKFMVWDRPILTDSGGFQVFSLAGLRKIKEEGVYFNSHIDGAKIFMGPEESMQIQSNLGSTIAMAFDECPSSVADRQYVTNSVNRTARWLERCKKEMARLNSLPDTINKEQLLFGINQGAIYDDIRIDHAKRISELELDGYAVGGLAVGESHEEMYHILDETVPHLPVNKPTYLMGVGTPANILEGVERGIDFFDCVYPSRNGRHGHVYTNHGKLNLFNQKYQKDMRPIEEGCNCPACRTYSRAYIRHLLKAKEMLGMRLCVLHNLYFYNNMMEEIRDSLDAGCFASYKAEKLYGMTQGEQS

SEQ ID NO: 55144 - protein, 380 aa, Eubacterium rectale; identical to SEQ ID NO: 51324
  REGION 1..380: note = tr|R6U3B2|R6U3B2_9FIRM Queuine tRNA-ribosyltransferase OS=Eubacterium rectale CAG:36; OX = 1263079 GN=tgt PE=3 SV=1

SEQ ID NO: 55145 - protein, 393 aa, Eubacterium ruminantium
  REGION 1..393: note = tr|A0A1H5WQS2|A0A1H5WQS2_9FIRM Queuine tRNA-ribosyltransferase OS=Eubacterium ruminantium; OX = 42322 GN=tgt PE=3 SV=1
MNWVTLFPTDQADEKMYKLITTDKRAKRGVFSTPHGDIQTPVFMNVGTAAAIKGAVATSDLEDIDTQVMLCNTYHLHVRPGDEIVKKLGGLHKFTDWHRPILTDSGGFQVYSLAKLRNIKEEGVTFNSHVDGRKIFMGPEESMTIQSNLASTIAMAFDECPPAKAERNYIINSVERTYRWLIRCRDKMNELNSREDTINKAQMLFGINQGGVFDDIRIDHAKRISELDLPGYAVGGLAVGETHEEMYHILDVTVPFLPQDKPTYLMGVGTPANILEAVERGVDFFDCVYPTRNGRHGQLYTNRGKMNIKNKKYELDESPIAEDCDCPVCRRYSRAYIRHLLKADEMLGMRFCVLHNLHFYNNLLKEIREAIEEHRFESYKAERLQGFKEYEGK

SEQ ID NO: 55146 - protein, 377 aa, Eubacterium ruminantium
  REGION 1..377: note = tr|A0A1T4PJG0|A0A1T4PJG0_9FIRM Queuine tRNA-ribosyltransferase OS=Eubacterium ruminantium; OX = 42322 GN=tgt PE=3 SV=1
MYKLITKDGKAKRGVFSTPHGDIQTPVFMNVGTAAAIKGAVATSDLEDIDTQVMLCNTYHLHVRPGDEIVKQLGGLHEFTNWKRPILTDSGGFQVYSLAKLRNIKEEGVTFNSHVDGRKIFMGPEESMTIQSNLASTIAMAFDECPPAKAERSYIEKSVARTYRWLIRCRDKMNELNSMEGTINKEQMLFGINQGGVLDDIRIDHAKMITELDLPGYAIGGLAVGESHEEMYHVLDVTVPYLPEDKPTYLMGVGTPANILEAVERGVDFFDCVYPTRNGRHGQLYTNQGKINIKNKKYELDTRPIAEDCDCPVCKKYTRAYIRHLLKADEMLGMRFCVLHNLHFYNKLMKEIRIAIEEHRFKAFKSAKLRGFEEGDR

SEQ ID NO: 55147 - protein, 377 aa, Eubacterium saphenum
  REGION 1..377: note = tr|C7GZ12|C7GZ12_9FIRM Queuine tRNA-ribosyltransferase OS=Eubacterium saphenum ATCC 49989; OX = 592031 GN=tgt PE=3 SV=1
MKIGGNMLDFKLLITDSKSNARRGVIKTKSSTIQTPVFMPVGTQASIKSVPADMVYDAGAKIILSNTYHLYLRPGEDIVKEAGGIRQFMNFNGSVLTDSGGFQVFSLAKMRNITEEGVEFKSHIDGSTHFFSPEKSMQIQRDLGSDIVMAFDECIPYPSDYDYVKKSTERTTRWLGRCASFKLQPHQSLFGIMQGGMDRDLRKLSADGITEYDLDGYAIGGLSVGESIEMMQSILEVCTNYLPKDKPRYLMGVGSPIELLNGVKNGIDMFDCVLPTRYGRHGIAMTDNGNISIKKKMYERDFTPLDHTCDCPACRNYSKAYIRHLYRAGEGLAATLLSIHNIRFLLRLMERIRDSIEREEFQKFYDEYSSNYKGRTV

SEQ ID NO: 55148 - protein, 377 aa, unidentified
  source 1..377: note = [Eubacterium] siraeum
  REGION 1..377: note = tr|A0A174ZSM7|A0A174ZSM7_9FIRM Queuine tRNA-ribosyltransferase OS=[Eubacterium] siraeum OX=39492; GN = tgt PE=3 SV=1
MFKVLKTDGVARRGEFHTPHGVIQSPFFMNVGTSAAIKGGISSLDLKDLKCQVELCNTYHLHVRPGDDIIYKMGGLHKFMNWDRPILTDSGGFQVFSLAKLRKIKEEGVYFNSHVDGRRIFMGPEESMRIQSHLASTIAMAFDECIENPSPYDYVKKSVDRTTRWLQRCIDEMARLNSLPETINRQQMLFAINQGGTYDDIRAEHMKTIANMNVDGVAIGGLAVGEPTDVMYRIIETVIPHAPTDKPRYLMGVGTPSNIIEAVYRGVDMFDCVMPSRNARHATVFTWNGITHVTNQCFETDSLPIDPECDCPTCRNFSRAYIRHLFKSGEMLGGRLAVQHNLYFYNTLMEKIRAAIEEGTFEEFRNHYSPLLASKLV

SEQ ID NO: 55149 - protein, 377 aa, unidentified
  source 1..377: note = [Eubacterium] siraeum
  REGION 1..377: note = tr|D4MMF4|D4MMF4_9FIRM Queuine tRNA-ribosyltransferase OS=[Eubacterium] siraeum V10Sc8a; OX = 717961 GN=tgt PE=3 SV=1
MFKVLKTDGVARRGEFHTPHGVIQSPFFMNVGTSAAIKGGISSLDLKDLKCQVELCNTYHLHVRLGDDIIYKMGGLHKFMNWDRPILTDSGGFQVFSLAKLRKIKEEGVYFNSHVDGRRIFMGPEESMRIQSHLASTIAMAFDECIENPSPYDYVKKSVDRTTRWLQRCIDEMARLNSLPETINRQQMLFAINQGGTYDDIRAEHMKTIANMNVDGVAIGGLAVGEPTDVMYRIIETVIPHAPTDKPRYLMGVGTPSNIIEAVYRGVDMFDCVMPSRNARHATVFTWNGITHVTNQCFETDSLPIDPECDCPTCRNFSRAYIRHLFKSGEMLGGRLAVQHNLYFYNTLMEKIRAAIDEGTFEEFRNHYSPLLASKLV

SEQ ID NO: 55150 - protein, 377 aa, Eubacterium siraeum; identical to SEQ ID NO: 55148
  REGION 1..377: note = tr|R6SQT7|R6SQT7_9FIRM Queuine tRNA-ribosyltransferase OS=Eubacterium siraeum CAG:80; OX = 1263080 GN=tgt PE=3 SV=1

SEQ ID NO: 55151 - protein, 378 aa, Eubacterium sp.
  REGION 1..378: note = tr|A0A416WC93|A0A416WC93_9FIRM Queuine tRNA-ribosyltransferase OS=Eubacterium sp. AF15-50; OX = 2293103 GN=tgt PE=3 SV=1
MFKVLAKDGAAKYGRFETVHGTIETPVFMNVGTAGAIKGAVAAEDLKEIKTQVELSNTYHLHVRPGDKIVKQLGGLHRFMNWDKPILTDSGGFQVFSLAGLRKIKEEGVYFNSHVDGRKIFMGPEESMQIQSNLASTIAMAFDECPSSVASRDYIENSVARTARWLKRCRKEMNRLNGLEDTINKNQMLFGINQGGIYDDVRIEHAKAISDIDLDGYAIGGLAVGESHAEMYRIIEKVVPYLPGDKPVYLMGVGTPANILEAVERGVDFFDCVYPSRNGRHGHVYTNAGKLNLFNAKYETDDRPIEEGCQCPACKYHTRAYIRHLLKAKEMLGMRLCVLHNLYFYNTMMEEIREAIKAGRYSEYKNNKLEGFKENDKN

SEQ ID NO: 55152 - protein, 326 aa, Eubacterium sp.
  REGION 1..326: note = tr|R5KUY7|R5KUY7_9FIRM Queuine tRNA-ribosyltransferase OS=Eubacterium sp. CAG:161; OX = 1262881 GN=BN508_01171 PE=3 SV=1
MELSNTYHLHVRPGDKIVKQLGGLHRFMNWDKPILTDSGGFQVFSLAGLRKIKEEGVYFNSHVDGRKIFMGPEESMQIQSNLASTIAMAFDECPSSVASRDYIENSVARTARWLKRCRKEMNRLNGLEDTINKNQMLFGINQGGIYDDVRIEHAKAISDIDLDGYAIGGLAVGESHAEMYRIIEKVVPYLPGDKPVYLMGVGTPANILEAVERGVDFFDCVYPSRNGRHGHVYTNAGKLNLFNAKYETDDRPIEEGCQCPACKYHTRAYIRHLLKAKEMLGMRLCVLHNLYFYNTMMEEIREAIKAGRYSEYKNNKLEGFKENDKN

SEQ ID NO: 55153 - protein, 373 aa, Eubacterium sulci
  REGION 1..373: note = tr|X8K2W3|X8K2W3_9FIRM Queuine tRNA-ribosyltransferase OS=Eubacterium sulci ATCC 35585; OX = 888727 GN=tgt PE=3 SV=1
MKHAVSYELKKKDKNSGARRGVLHTPHGDIQTPVFMPVGTQATVKAMTPEQVEATGARLILGNTYHLFLRPGHEIVREAGGLHKFMNWNHAILTDSGGFQVFSLGKLRKISEEGVTFRSHIDGSKKFISPEIAIEIQNALGADIIMAFDECAPYPADRRYVEASLNRTTRWLKRCKDAHKDIEKQSLFGIMQGGMYSDLRKMSAEQIVELDLPGYAIGGLSVGEPKELMIEVLDSCVDYLPKEKARYLMGVGTVDYIFEGVERGIDMFDCVQPTRIARHGMATTANGKVNIKNAKYERDFSPLDNECDCYTCRNFSKAYLRHLFKANEMLCSTLLSIHNIHFLEKMMEGIQKAIEEDRFLEYKKEFYDKYGEF

SEQ ID NO: 55154 - protein, 380 aa, Eubacterium uniforme
  REGION 1..380: note = tr|A0A1T4V3Q0|A0A1T4V3Q0_9FIRM Queuine tRNA-ribosyltransferase OS=Eubacterium uniforme OX=39495; GN = tgt PE=3 SV=1
MYKIIETDGNAKSAEFTTVHGVVQTPVFMNVGTAAAIKGAVATTDLQNIKTQIELSNTYHLHVRPGDKIVKQLGGLHKFMNWDKPILTDSGGFQVFSLAGLRKIKEEGVYFNSHVDGRKIFMGPEESMQIQSNLASTIAMAFDECPSSRADEKYIRDSVDRTTRWLQRCKDEMARLNSLPDTINKQQMLFAINQGGVFNDIRVEHAKVISEMNLDGYAIGGLAVGESHEEMYDVLEHVVPFLPKDKPTYLMGVGTPANILEAVERGVDFFDCVYPSRNGRHGHVYTNKGKLNLFNAKYELDSKPIEEGCGCPACQNYSRAYIRHLLKAKEMLGMRLCVLHNLYFYNTMMEEIREAIRNKSFSAYKKSKLEGFKENDLKSK

SEQ ID NO: 55155 - protein, 378 aa, Eubacterium ventriosum
  REGION 1..378: note = tr|A0A413RC08|A0A413RC08_9FIRM Queuine tRNA-ribosyltransferase OS=Eubacterium ventriosum OX=39496; GN = tgt PE=3 SV=1
MFKVLAKDGNAKRGEFTTVHGKIQTPVFMNVGTAAAIKGAVAAEDLKTIKTQVELSNTYHLHVRPGDKVVKKLGGLHKFMNWDRPILTDSGGFQVFSLAGLRKIKEEGVYFNSHVDGRKIFMGPEESMQIQSNLASTIAMAFDECPSSVASRQYIENSVARTTRWLERCKKEMNRLNGLEDTINKNQLLFGINQGGIYDDIRVEQAKAIADMDLDGYAVGGLAVGESHEEMYRIIEKVEPHLPKDKPIYLMGVGTPANILEAVERGVDFFDCVYPSRNGRHGHVYTNAGKLNLFNAKYETDSRPIEEGCECPACKYHSRAYIRHLLKAKEMLGMRLCVLHNLYFYNTMMEEIRDAIEAGNYAEYKAKKLEGFKENDKK

SEQ ID NO: 55156 - protein, 378 aa, Eubacterium ventriosum
  REGION 1..378: note = tr|A0A415LD19|A0A415LD19_9FIRM Queuine tRNA-ribosyltransferase OS=Eubacterium ventriosum OX=39496; GN = tgt PE=3 SV=1
MFKVLAKDGNAKRGEFTTVHGKIQTPVFMNVGTAAAIKGAVAAEDLKTIKTQVELSNTYHLHVRPGDKVVKKLGGLHKFMNWDRPILTDSGGFQVFSLAGLRKIKEEGVYFNSHVDGRKIFMGPEESMQIQSNLASTIAMAFDECPSSVASRQYIENSVARTTRWLERCKKEMNRLNGLEDTINKNQLLFGINQGGIYDDIRVEQAKAIADMDLDGYAIGGLAVGESHEEMYRIIEKVEPHLPKDKPIYLMGVGTPANILEAVERGVDFFDCVYPSRNGRHGHVYTNAGKLNLFNAKYETDSRPIEEGCECPACKYHSRAYIRHLLKAKEMLGMRLCVLHNLYFYNTMMEEIRDAIEAGNYAEYKAKKLEGFKENDKK

SEQ ID NO: 55157 - protein, 373 aa, unidentified
  source 1..373: note = [Eubacterium] yurii
  REGION 1..373: note = tr|E0QGN9|E0QGN9_9FIRM Queuine tRNA-ribosyltransferase OS=[Eubacterium] yurii subsp. margaretiae ATCC 43715 OX=864565 GN=tgt PE=3 SV=1
MNKPLKFEVIKKCNQSKARLGKIKTLHNEFETPVFMPVGTNATVKSMNEKELKEIGANIILSNTYHLHLRPGDEIVKKAGGLHEFMHWDRSILTDSGGFQVFSLGDLRKIKEEGVYFSSHLDGSKHFMGPEESIAVQNNLGSDIMMSFDECAPYPASYEYIRDSYKRTSRWAKRGKDANRNPKTQALFGIIQGGMFEDLRYESANELVEMDFDGYSIGGLSVGEPKELMYEVLDYTVDIIPSEKPRYLMGVGSPDDLFEGVIRGVDMFDCVLPTRIARNGTAMTSNGKVVVRNATYAEDFTPLDHECDCYVCKNYSRAYIRHLVKANEILGARLITYHNLYFLLRMMEKIRQSIRDGRLLEYKKEFFTKYYGV

SEQ ID NO: 55158 - protein, 373 aa, unidentified
  source 1..373: note = [Eubacterium] yurii
  REGION 1..373: note = tr|A0A1T5J2G7|A0A1T5J2G7_9FIRM Queuine tRNA-ribosyltransferase OS=[Eubacterium] yurii OX=39498; GN = tgt PE=3 SV=1
MNKPLKFEVIKKCSQTKSRLGKIKTLHNEFETPVFMPVGTNATVKSMNEKELKEIGANIILSNTYHLHLRPGDEIVKKAGGLHEFMHWDRSILTDSGGFQVFSLGDLRKIKEEGVYFSSHLDGSKHFMGPEESISVQNNLGSDIMMSFDECAPYPASYEYIRDSYKRTSRWAKRGKDANKNPETQALFGIIQGGMFEDLRYESANELVEMDFDGYSIGGLSVGEPKELMYEVLDYTVDIIPSEKPRYLMGVGSPDDLFEGVIRGVDMFDCVLPTRIARNGTAMTSNGKVVVRNATYAEDFTPLDHECDCYVCKNYSRAYIRHLVKANEILGARLITYHNLYFLLRMMEKIRQSIRDGRLLEYKKEFFTKYYGV

SEQ ID NO: 55159 - protein, 373 aa, unidentified
  source 1..373: note = Euhalothece natronophila
  REGION 1..373: note = tr|A0A5B8NM54|A0A5B8NM54_9CHRO Queuine tRNA-ribosyltransferase OS=Euhalothece natronophila Z-M001; OX = 522448 GN=tgt PE=3 SV=1
MTNISFKFSCDHHCPDSKARAGTFITPHGKVETPRFMPVGTAATVKGLTPAQLESAQAQMILANTYHLHLQPGEEIIAKAGGLHSFMGWKQPILTDSGGFQVFSLSDLRKINEDGVTFRSPRDGRIIDFTPERAIQVQNDLGADVIMAFDECPPYPADYETVLLATERTERWLERCIAAHSRPETQALFGIVQGGVYRDLRQYAAKRLVEFDLPGYAIGGVSVGEPGELIHEIVATTAPLLPPEKPRYLMGVGTYQEMVSAIAQGVDLFDCVIPTRLGRHGTALVQGERWNLKNARFREDFTPLDKTCPCYCCQNFSRAYLGHLIRSREMLGYLLLSLHNVTELIRFTQRIRTAILEDRFLNDFGQWLQPNPT

SEQ ID NO: 55160 - protein, 366 aa, unidentified
  source 1..366: note = Euhalothece sp.
  REGION 1..366: note = tr|A0A2K2ZUM7|A0A2K2ZUM7_9CHRO Queuine tRNA-ribosyltransferase OS=Euhalothece sp. KZN 001; OX = 1884791 GN=tgt PE=3 SV=1
MSFKFYCERNCRQTQARAGIFETPHGKVETPRFMPVGTIATVKGLTPAQLEAAQAQMILANTYHLHLQPGEEIIKQAGGLHEFMGWKQPILTDSGGFQVFSLSELRKISEEGVTFRSPRDGRIIDFTPEKAIQVQNALGADVIMAFDECPPYPADYDAVLLATERTERWLERCIQAHDRSESQALFGIVQGGVYEDLRRQAAKRLVEFDLPGYAIGGVSVGEPGTLINQIVAVTAPLLPQEKPRYLMGVGTYSEMVNAIAQGVDLFDCVIPTRLGRHGSALVQGERWNLKNARFREDFTPLDDRCPCYCCKTFSRAYLSHLIRSREMLGYLLISLHNVTELIRFTERIRTAILHDRFLAEFGHWLR

SEQ ID NO: 55161 - protein, 376 aa, unidentified
  source 1..376: note = Euzebyella marina
  REGION 1..376: note = tr|A0A3G2LBY5|A0A3G2LBY5_9FLAO Queuine tRNA-ribosyltransferase OS=Euzebyella marina OX=1761453; GN = tgt PE=3 SV=1
MKFTLHHKDPQSKARAGTMVTDHGAIETPIFMPVGTVASVKSVHQRELKDDINPDIILGNTYHLFLRPKIDILKKAGGLHKFMGWDRNILTDSGGYQVYSLSGNRKIKEEGVKFKSHIDGSVHLFTPERVMEIQRVIGADIIMAFDECTPYPCDYKYAERSMHMTHRWLERCITHLKKTPFEYDYAQTFFPIVQGSTYLDLRKRSAEYIAGIEAEGNAIGGLSVGEPAEEMYAMTDVVCSILPEDKPRYLMGVGTPINILENIALGVDMFDCVMPTRNARNGMLFTAYGTINIKNKKWEDDFSPIDEMGITFVDKEYTKAYLRHLFAANEYLGKQIATIHNLGFYMWLVREARKHILEGDFLDWKNRMVKQMDNRL

SEQ ID NO: 55162 - protein, 376 aa, unidentified
  source 1..376: note = Evtepia gabavorous
  REGION 1..376: note = tr|A0A3E2B6R9|A0A3E2B6R9_9FIRM Queuine tRNA-ribosyltransferase OS=Evtepia gabavorous OX=2211183; GN = tgt PE=3 SV=1
MFTLLKTEGRARRGQLTCAHGTAQTPVFMNVGTQGAIKGAVSAQDLREIGCQIELSNTYHLHLRPGDELVKEMGGLHRFMRWDGPILTDSGGFQVFSLSGRRKIQEEGVTFASHIDGRRIFMGPEESIQIQWNLGSDIAMAFDECVENPAPYAYVKQSCERTFRWLERCKTEHARLKQLADGVNPQQMLFGINQGGILPDLRVWHMQQIASLDCDGYAIGGLAVGEPAETMYEIIEAVEPYMPAEKPRYLMGVGTPVNILEGVARGVDMFDCVLPARNARHGKLYTWNGAMNIKNEKYKRDEQPIDPACRCPVCRSFSRAYLRHLFAAGEMLAMRLAVLHNLYFYNALMDRIRLALEEGTFEAFYREYREKLGARM

SEQ ID NO: 55163 - protein, 374 aa, Ewingella americana
  REGION 1..374: note = tr|A0A085G7B9|A0A085G7B9_9GAMM Queuine tRNA-ribosyltransferase OS=Ewingella americana ATCC 33852; OX = 910964 GN=tgt PE=3 SV=1
MKYELSTTDGRARRGRLVFERGVVETPAFMPVGTYGTVKGMTPEEVKDTGAQILLGNTFHLWLRPGQEIMKLHGDLHDFMNWHGPILTDSGGFQVFSLGAMRKIKEEGVHFRNPINGDPVFLSPEKSMEIQNDLGSDIVMIFDECTPYPADWDYAKRSMEMSLRWAKRSRDRHNELNNKNALFGIIQGSVYEDLRDVSLKGLVEIGFDGYAVGGLAVGEPKEDMHRILEHVCPQIPEDKPRYLMGVGKPEDLVEGVRRGVDMFDCVMPTRNARNGHLFVTDGIVKIRNAKHKDDTSTLDEHCDCYTCRNYSRAYLHHLDRCNEILGARLNTIHNLRYYQRLMAGLRQAIEEGKLELFVKDFYERKGKEVPPLNF

SEQ ID NO: 55164 - protein, 374 aa, Ewingella americana
  REGION 1..374: note = tr|A0A502GQ00|A0A502GQ00_9GAMM Queuine tRNA-ribosyltransferase OS=Ewingella americana OX=41202; GN = tgt PE=3 SV=1
MKYELSTTDGRARRGRLVFERGVVETPAFMPVGTYGTVKGMTPEEVKETGAQILLGNTFHLWLRPGQEIMKLHGDLHDFMNWHGPILTDSGGFQVFSLGAMRKIKEEGVHFRNPINGDPVFLSPEKSMEIQNDLGSDIVMIFDECTPYPADWDYAKRSMEMSLRWAKRSRDRHNELNNKNALFGIIQGSVYEDLRDVSLKGLVDIGFDGYAVGGLAVGEPKEDMHRILEHVCPQIPEDKPRYLMGVGKPEDLVEGVRRGVDMFDCVMPTRNARNGHLFVTDGIVKIRNARYKDDTTTLDEHCDCYTCRNYSRAYLHHLDRCNEILGARLNTIHNLRYYQRLMAGLRQAIEEGKLELFVKDFYEGKGKEVPPLNF

SEQ ID NO: 55165 - protein, 381 aa, Exiguobacterium antarcticum
  REGION 1..381: note = tr|K0ADW4|K0ADW4_EXIAB Queuine tRNA-ribosyltransferase OS=Exiguobacterium antarcticum (strain B7) OX=1087448 GN=tgt PE=3 SV=1
MTKHAVTYEHIKTCKQSGARLGIVHTPHGSFETPVFMPVGTQATVKTMAPEQIKDMNANIILSNTYHLWVRPGHDVIKEAGGLHKFMNWDGAILTDSGGFQVFSLADLRNITEEGVHFRNHLNGDKLFLSPEKAMEIQNALGSDIMMAFDECPPFPASHEYMKASVERTSRWAERCLAAHERPQDQALFGIIQGGEYEDLRRQSARDLASLDFPGYAVGGLSVGEPKDVMYRALDFTTPLMPEDKPRYLMGVGSPDALIEGAIRGIDMFDCVLPTRIARNGTLMTSSGRLVVRNAKYARDFRPLDEKCDCYACKNYSRAYIHHLIRAQETFGLHLCSTHNLHFLVKLMEGVRQAIREDRLLDFKDEFFEEYGYNLPNAKNF

SEQ ID NO: 55166 - protein, 381 aa, Exiguobacterium aurantiacum
  REGION 1..381: note = tr|A0A377FV76|A0A377FV76_9BACL Queuine tRNA-ribosyltransferase OS=Exiguobacterium aurantiacum; OX = 33987 GN=tgt PE=3 SV=1
MTKHAVTYEHIHTCKQTGARHGIVHTPHGSFETPVFMPVGTQASVKTMAPEQVRAMGANIILSNTYHLWIRPGHEVVKQAGGLHKFMNWDGAILTDSGGFQVFSLADLRNIQEEGVHFRNHLNGDKLFLSPEKAMEIQNALGSDIMMAFDECPPFPATHEYMKKSVERTSRWAERCLEAHTRPEDQALFGIIQGGEYEDLRRQSAADLVSLDFPGYAVGGLSVGEPKDVMYRALEFTTPFMPEDKPRYLMGVGSPDALIEGSIRGIDMFDCVLPTRIARNGTLMTSKGRVTIKHAKHKTDFGPIDEKCDCYTCKNYSRAYVHHLIRADEMFGLHLCSTHNLHFLVKLMEQVRQAIREDRLRDFKEEFFEEYGYNKPNAKNF

SEQ ID NO: 55167 - protein, 381 aa, unidentified
  source 1..381: note = Exiguobacterium chiriqhucha
  REGION 1..381: note = tr|U1MWL0|U1MWL0_9BACL Queuine tRNA-ribosyltransferase OS=Exiguobacterium chiriqhucha RW-2 OX=1345023 GN=tgt PE=3 SV=1
MTKHAVTYEHIHTCKQTGARHGIVHTPHGSFETPVFMPVGTQATVKTMAPEQVKAMGANIILSNTYHLWIRPGHEVVKQAGGLHKFMNWDGAILTDSGGFQVFSLADLRNIQEEGVHFRNHLNGDKLFLSPEKAMEIQNALGSDIMMAFDECPPFPATHEYMKKSVERTSRWAERCLAAHERPEDQALFGIIQGGEYEDLRRQSAADLVSLDFPGYAVGGLSVGEPKDVMYRALEFTTPFMPENKPRYLMGVGSPDALIEGSIRGIDMFDCVLPTRIARNGTLMTSKGRVTIKHAKHKTDFGPIDEKCDCYTCKNYSRAYVHHLIRADEMFGLHLCSTHNLHFLVNLMSQVRQAIREDRLLDFKEEFFEEYGYNKPNAKNF

SEQ ID NO: 55168 - protein, 381 aa, unidentified
  source 1..381: note = Exiguobacterium enclense
  REGION 1..381: note = tr|A0A0V8GJX5|A0A0V8GJX5_9BACL Queuine tRNA-ribosyltransferase OS=Exiguobacterium enclense; OX = 1017277 GN=tgt PE=3 SV=1
MTKHAVTYEHIKTCKQSGARLGIVHTPHGSFETPVFMPVGTQATVKTMAPEQIKDMNANIILANTYHLWVRPGHDVIKEAGGLHKFMNWDGAILTDSGGFQVFSLADLRNISEEGVHFRNHLNGDKLFLSPEKAMEIQNALGSDIMMAFDECPPYPASHEYMKASVERTSRWAERCLAAHERPHDQALFGIIQGGEYEDLRRQSAKDLVALDFPGYAVGGLSVGEPKDVMYRALEFTTPLMPEDKPRYLMGVGSPDALIEGAIRGIDMFDCVLPTRIARNGTLMTSQGRLVVRNAKYARDFRPLDEKCDCYACKNYSRSYIHHLIRAQETFGLHLCSTHNLHFLVKMMEGVRQAIREDRLLDFKEEFFEEYGYNLPNAKNF

SEQ ID NO: 55169 - protein, 381 aa, Exiguobacterium mexicanum; identical to SEQ ID NO: 55167
  REGION 1..381: note = tr|A0A099DGH8|A0A099DGH8_9BACL Queuine tRNA-ribosyltransferase OS=Exiguobacterium mexicanum; OX = 340146 GN=tgt PE=3 SV=1

SEQ ID NO: 55170 - protein, 381 aa, Exiguobacterium sibiricum
  REGION 1..381: note = tr|B1YJQ9|B1YJQ9_EXIS2 Queuine tRNA-ribosyltransferase OS=Exiguobacterium sibiricum (strain DSM 17290 / JCM 13490 / 255-15) OX=262543 GN=tgt; PE = 3 SV=1
MTKHAVTYEHIKTCKQSGARLGIVHTPHGSFETPVFMPVGTQATVKTMAPEQIKNMNANIILSNTYHLWVRPGHDVIKEAGGLHKFMNWDGAILTDSGGFQVFSLADLRNITEEGVNFRNHLNGDKLFLSPEKAMEIQNALGSDIMMAFDECPPFPASHEYMKASVERTSRWAERCLEAHERPQDQALFGIIQGGEYEDLRRQSARDLASLDFPGYAVGGLSVGEPKDVMYRALDFTTPLMPEDKPRYLMGVGSPDALIEGAIRGIDMFDCVLPTRIARNGTLMTSSGRLVVRNAKYARDFRPLDEKCDCYACKNYSRAYIHHLIRAQETFGLHLCSTHNLHFLVKLMEGVRQAIREDRLLDFKDEFFEEYGYNLPNAKNF

SEQ ID NO: 55171 - protein, 381 aa, Exiguobacterium sp.
  REGION 1..381: note = tr|A0A248L8J7|A0A248L8J7_9BACL Queuine tRNA-ribosyltransferase OS=Exiguobacterium sp. N4-1P; OX = 2051906 GN=tgt PE=3 SV=1
MTKHAVTYEHIKTCKQSGARLGIVHTPHGSFETPVFMPVGTQATVKTMAPEQIKDMNANIILSNTYHLWVRPGHDVIKEAGGLHKFMNWDGAILTDSGGFQVFSLADLRNITEEGVHFRNHLNGDKLFLSPEKAMEIQNALGSDIMMAFDECPPFPASHEYMKASVERTSRWAERCLTAHERPQDQALFGIIQGGEYEDLRRQSARDLASLDFPGYAVGGLSVGEPKDVMYRALEFTTPLMPEDKPRYLMGVGSPDALIEGAIRGIDMFDCVLPTRIARNGTLMTSSGRLVVRNAKYARDFRPLDEKCDCYACKNYSRAYIHHLIRAQETFGLHLCSTHNLHFLVKLMEGVRQAIREDRLLDFKDEFFEEYGYNLPNAKNF

SEQ ID NO: 55172 - protein, 381 aa, Exiguobacterium sp.
  REGION 1..381: note = tr|A0A069EUT9|A0A069EUT9_9BACL Queuine tRNA-ribosyltransferase OS=Exiguobacterium sp. AB2; OX = 1484479 GN=tgt PE=3 SV=1
MTKHAVTYEHIHTCKQTGARHGIVHTPHGSFETPVFMPVGTQASVKTMAPEQVKAMGANIILSNTYHLWIRPGHEVVKQAGGLHKFMNWDGAILTDSGGFQVFSLADLRNIQEEGVHFRNHLNGDKLFLSPEKAMEIQNALGSDIMMAFDECPPFPATHEYMKKSVERTSRWAERCLEAHERPQDQALFGIIQGGEYEDLRRQSAADLVSLDFPGYAVGGLSVGEPKDVMYRALEFTTPFMPEDKPRYLMGVGSPDALIEGSIRGIDMFDCVLPTRIARNGTLMTSEGRVTIKHAKHKTDFGPIDEKCDCYTCKNYSRAYVHHLIRADEMFGLHLCSTHNLHFLVKLMEQVRQAIREDRLLDFKEEFFEEYGYNKPNAKNF

SEQ ID NO: 55173 - protein, 416 aa, unidentified
  source 1..416: note = Extensimonas vulgaris
  REGION 1..416: note = tr|A0A369AJ63|A0A369AJ63_9BURK Queuine tRNA-ribosyltransferase OS=Extensimonas vulgaris; OX = 1031594 GN=tgt PE=3 SV=1
MLSECADRGSVAAGRGTPAALGQCAPMLQFDLLATDPASHARRARLTLHHGVVETPIFMPVGTYGTVKGVLPQSLHAMGAQIILGNTFHLWMRPGLDVLRNFGGLHAFENWHKPILTDSGGFQVWSLGEMRKITEQGVHFASPVNGDKLFLSPEISMQIQTVLDSDIVMQFDECTPYETKGHITTEHEARASMELSLRWARRSQEEFARLQNRNALFGIVQGGMFEHLREESLAALVALDLPGYAVGGVSVGEPKEDMLRIMAHTPHRLPAHKPRYLMGVGTPEDLVEGVAQGVDMFDCVMPTRNARNGTLFTRYGDLKIRNARHKSDPRPLDTSCRCEACAGPSGVPWDEGGRTGFSRAYLHHLDRCGEMLAPMLCTIHNLHYYLQLMQEMRSALEAGEFSAFRARFREERARGV

SEQ ID NO: 55174 - protein, 377 aa, unidentified
  source 1..377: note = Extibacter muris
  REGION 1..377: note = tr|A0A4R4FHD1|A0A4R4FHD1_9FIRM Queuine tRNA-ribosyltransferase OS=Extibacter muris OX=1796622; GN = tgt PE=3 SV=1
MYKVLARDGLAKRGRLQTVHGVIETPVFMNVGTAAAIKGAVSTDDLQGIKTQVELSNTYHLHVRPGDDVVKKLGGLHKFMVWDKPILTDSGGFQVFSLAGLRRIKEEGVYFNSHIDGRKIFMGPEESMQIQSNLASTIAMAFDECPSSVADRPYMEKSVERTTRWLGRCKEEMRRLNGLKDTINPRQMLFGINQGGIYEDIRIRHAKEIAAMDLDGYAIGGLAVGESHEDMYRILDAVVPHLPADRPTYLMGVGTPANILEAVDRGVDFFDCVYPSRNGRHGHVYTNHGKLNLFNARYELDGRPIEEGCGCPACRTYTRAYIRHLLKAKEMLGMRLCVLHNLYFYNTMMEEIREAVERGCYMEYKAEKLARMTGCEV

SEQ ID NO: 55175 - protein, 376 aa, unidentified
  source 1..376: note = Fabibacter misakiensis
  REGION 1..376: note = tr|A0A1E5T0Z6|A0A1E5T0Z6_9BACT Queuine tRNA-ribosyltransferase OS=Fabibacter misakiensis; OX = 1563681 GN=tgt PE=3 SV=1
MDFKLVAEDSGSKARSGVISTDHGEIKTPIFMPVGTAGTVKAVHQRELKEDVAAQIILGNTYHLYLRPGLDVIEGAGGLHKFNGWDRPMLTDSGGYQVYSLANTRKIKEEGVTFKSHIDGSKHTFTPEYAIDIQRTIGADIIMAFDECTPYPCEYGYARESMEMTHRWLKRCCDRFDATSSKYGYSQTLFPIVQGSTYKDLREKSAETIASFGREGNAIGGLSVGEPAEMMYEHTEIVCNILPKDKPRYLMGVGTPENILECIALGVDMFDCVMPTRNARHGLLFTSEGIINIKNEKWKKDYSPIDEALGGYVDTFYSKAYLRHLTHSKEYLGAQIASIHNLAFYLWLVDEARKHIEQGTFIDWKNVMVKKLTTRL

SEQ ID NO: 55176 - protein, 376 aa, unidentified
  source 1..376: note = Fabibacter pacificus
  REGION 1..376: note = tr|A0A1I0R4V7|A0A1I0R4V7_9BACT Queuine tRNA-ribosyltransferase OS=Fabibacter pacificus OX=1267423; GN = tgt PE=3 SV=1
MDFKLTANDKGTKARAGEVTTDHGTIETPIFMPVGTAGTVKAVHQRELKEDVNAQIILGNTYHLYLRPGLDIIEKAGGLHKFNGWDRPILTDSGGYQVYSLSGTRKIKEEGVTFKSHIDGSKHVFTPENVMDIQRTIGADIIMAFDECTPYPCDYGYARESMEMTHRWLKRCCDRFDATEGKYGYSQTLFPIVQGSTYKDLRVKSAETIASFEREGNAIGGLSVGEPAEMMYEHTEIVCDILPKDKPRYLMGVGTPENILECIALGVDMFDCVMPTRNARNGMLFTSEGILNMRNEKWKDDFSPIDPNLGGYVSSFYSKAYLRHLITSKEILGAQIASIHNLSFYLWLVKEARKHIIDGTFVDWKNEMVKKVTTRL

SEQ ID NO: 55177 - protein, 376 aa, unidentified
  source 1..376: note = Fabibacter pacificus
  REGION 1..376: note = tr|A0A4D7JGP9|A0A4D7JGP9_9BACT Queuine tRNA-ribosyltransferase OS=Fabibacter pacificus OX=1267423; GN = tgt PE=3 SV=1
MEFKITGKDSNSSARAGVLKTDHGEIPTPIFMPVGTAGTVKAVHQRELEDDIQAKIILGNTYHLYLRPGLDVLENAGGIHKFNGWEKPILTDSGGYQVYSLSNTRKIKEEGVEFRSHIDGSKHFFTAENVMDIQRTIGADIIMAFDECTPYPCDYDYAKKSMHMTHRWLKRCIKRVDETEGKYGYSQSLFPIVQGSVYEDLRKQSAEEIASHEREGNAIGGLSVGEPHEMMYDMTELVCEILPEDKPRYLMGVGTPANILEGIARGVDMFDCVMPTRNARHGILFTSEGVINIKNKKWQKDFTPIDPEIGGYASTFYTKAYLRHLIHTNEILGAQIASVHNLTFYLWLVNQARDHIMAGDFNSWKNEMALKLSERL

SEQ ID NO: 55178 - protein, 376 aa, Fabibacter sp.
  REGION 1..376: note = tr|A0A1E5SQQ6|A0A1E5SQQ6_9BACT Queuine tRNA-ribosyltransferase OS=Fabibacter sp. 4D4 OX=1889784; GN = tgt PE=3 SV=1
MDFKLETEDKGSKARAGTITTDHGKIETPIFMPVGTAGTVKAVHQRELKEDVKAEIILGNTYHLYLRPGLEIIEKAGGLHKFNGWDRPLLTDSGGYQVYSLANTRKIKEEGVTFKSHIDGSKHTFSPEYAIDIQRTIGADIIMAFDECTPYPCEYGYARTSMEMTHRWLKRCCDRFDQTEGKYGYNQTLFPIVQGSTYKDLRQKSAETIASFEREGNAIGGLSVGEPHEILYEQTEVVCDILPKDKPRYLMGVGTPENILECIALGVDMFDCVMPTRNARHGLLFTSEGIINIRNEKWKDDFSPVDPNLDGYVDSFYTKAYLRHLTHSKEILAAQIASIHNLTFYLWLVKEARKHIQAGTFIDWKNVMVKKLVTRL

SEQ ID NO: 55179 - protein, 379 aa, Facklamia hominis
  REGION 1..379: note = tr|K1LID8|K1LID8_9LACT Queuine tRNA-ribosyltransferase OS=Facklamia hominis CCUG 36813; OX = 883111 GN=tgt PE=3 SV=1
MPAVTYELIKEEKHTGARLGILHTPHGSFETPMYMPVGTLATVKSLSPEELKAMGAGVILSNTYHLWLRPGEDIVEDAGGLHTFMNWDQGLLTDSGGFQVFSLSDMRHIEEEGVHFRNHLSGEKLFLTPEKAIHIQNALGSDIMMSFDECPEFHQPYDYVKKSIDRTTRWAERGLEAHQNPDRQALFGICQGAGYKDLRLQHAKDMVSLDFPGYSIGGLSVGETKEEMNTVLDYLMPVLPTNKPRYLMGVGSPDALIDGAIRGVDMFDCVLATRIARNGTCMTSKGRLVVKNACYARDYTPIDPKCDCYTCKHYTRAYVRHLIKCDETFGLRLTSIHNTYFLLNLMRQVRQAIREDQLLEFRQAFREEYGYNKPGAPAF

SEQ ID NO: 55180 - protein, 381 aa, Facklamia ignava
  REGION 1..381: note = tr|K1LR04|K1LR04_9LACT Queuine tRNA-ribosyltransferase OS=Facklamia ignava CCUG 37419; OX = 883112 GN=tgt PE=3 SV=1
MSKPAVTYELIKEEKYTGARLGILHTPHGSYETPMYMPVGTLATVKGLSPEELIDAGAGVILSNTYHLWLTPGEDIVERAGGLHSFMNWPQGVLTDSGGFQVFSLSANRKIVEEGVHFRHHLNGSKLFLTPERSIEIQNALGADMIMSFDECPPFDQTHDYVEKSINRTTRWAERGLKAHQKPDQQALFGIIQGAGYKDLRLQHAKDLVSLDFPGYSIGGLSVGETKEEMNEVLDYITPVIPKNKPRYLMGVGTPDSLIDGVIRGIDMFDCVLATRIGRNGTCMTHDGRLVVKNAKYKDDFTPIDPDCDCYACRHYTRAYIRHLIHTNEMFGLRLASLHNTHFLLNHMANIRQAIRDDQLLDYREYFFERYGYNKPNAKDF

SEQ ID NO: 55181 - protein, 381 aa, Facklamia ignava
  REGION 1..381: note = tr|A0A2I1K3R4|A0A2I1K3R4_9LACT Queuine tRNA-ribosyltransferase OS=Facklamia ignava OX=137730; GN = tgt PE=3 SV=1
MSKPAVTYELIKEEKYTGARLGILHTPHGSYETPMYMPVGTLATVKGLSPEELIDAGAGVILSNTYHLWLTPGEDIVERAGGLHSFMNWPQGVLTDSGGFQVFSLSANRKIVEEGVHFRHHLNGSKLFLTPERSIEIQNALGADMIMSFDECPPFDQTHDYVEKSINRTTRWAERGLKAHQKPDQQALFGIIQGAGYKDLRLQHAKDLVSLDFPGYSIGGLSVGETKEEMNEVLDYITPVIPKNKPRYLMGVGTPDSLIDGVIRGIDMFDCVLATRIGRNGTCMTHDGRLVVKNAKYKDDFTPIDSDCDCYACRHYTRAYIRHLIHTNEMFGLRLASLHNTHFLLNHMANIRQAIRDDQLLDYREYFFERYGYNKPNAKDF

SEQ ID NO: 55182 - protein, 379 aa, Facklamia languida
  REGION 1..379: note = tr|H3NKB6|H3NKB6_9LACT Queuine tRNA-ribosyltransferase OS=Facklamia languida CCUG 37842; OX = 883113 GN=tgt PE=3 SV=1
MAAITYELIKEEKHTGARLGILHTPHGSFPTPMYMPVGTLATVKALSPEELKEMGAGVILSNTYHLWLRPGEDIVQEAGGLHSFMNWDQGILTDSGGFQVFSLSEMRQIEEEGVHFRNHLSGEKLFLTPEKAIAIQNALGADLIMSFDECPDYHQSYDYVKNSIARTTRWAERGLKAHQHPDRQALFGICQGAGYKDLRLQHARDMAALDFPGYSIGGLSVGETKEEMNAVLDYLTPELPKDKPRYLMGVGSPDALIDGAIRGVDMFDCVLATRIARNGTCMTSQGRLVVKNAQYARDYTPIDPKCDCYTCRHYTRAYIRHLIKCDETFGLRLTSIHNTHFLLNLMVQVRQAIQDDQLLEFRQAFREEYGYNRPNAPEF

SEQ ID NO: 55183 - protein, 379 aa, Facklamia miroungae
  REGION 1..379: note = tr|A0A1G7R2T0|A0A1G7R2T0_9LACT Queuine tRNA-ribosyltransferase OS=Facklamia miroungae OX=120956; GN = tgt PE=3 SV=1
MAAVSYELIKEEKHTGARLGILHTPHGSFETPMYMPVGTLATVKSLSPEELKAMGAGVILSNTYHLWLRPGEDIVEEAGGLHQFMNWDQGILTDSGGFQVFSLSEIRDIEEEGVHFRNHISGEKLFLSPEKAIQIQNALGSDIMMSFDECPDYHQPYDYVKKSIARTTRWAERGLKAHQNPDKQALFGICQGAGYKDLRLEHAKDMIALDFPGYSIGGLSVGETKEEMNEVLDYLMPVFPKNKPRYLMGVGSPDALIDGAIRGVDMFDCVLATRIARNGTCMTSQGRLVVKNAKYARDYSPIDLKCDCYTCRNYSRAYVRHLMKSQETFGLRLTSIHNTHFLLQLMRDVRQAIREDNLLDFRQAFREEYGYNKPNAPEF

SEQ ID NO: 55184 - protein, 381 aa, unidentified
  source 1..381: note = Faecalibacterium cf.
  REGION 1..381: note = tr|E2ZIS2|E2ZIS2_9FIRM Queuine tRNA-ribosyltransferase OS=Faecalibacterium cf. prausnitzii KLE1255 OX=748224 GN=tgt PE=3 SV=1
MPSLTTYKLLKQEHDARRGEFKTVHGTVQTPAFQNVATAGAIKGGLSAQDLKDIGAQVMLCNTYHLHLRPGDKLVADMGGLHKFTRWNGPILTDSGGFQVFSLAKLRKITEEGVTFASHLDGHRIFMGPEESMQIQANLGSTIAMAFDECVENPAQHDYSKASCERTTRWLKRCKIEMARLKHEGISVNPDQLLFGINQGCTFADLRVEHMKQIADLDLDGYAIGGLAVGEPTEVMYEMISQVEPHMPKDKIRYLMGVGTPGNIIEAVSRGVDLFDCVMPSRNARHGHLNTWGGIINIKNAKYERDERPIDPACGCPVCRSYSRAYIRHLFKAEEILGMRLAVMHNLWFYNHLMERIRDELDAGTFTAFHDKYVKLLDTRI

SEQ ID NO: 55185 - protein, 409 aa, Faecalibacterium prausnitzii
  REGION 1..409: note = tr|A8SFA1|A8SFA1_9FIRM Queuine tRNA-ribosyltransferase OS=Faecalibacterium prausnitzii M21/2 OX=411485 GN=tgt PE=3 SV=1
MIILITCRLVACIEAARLFSVRRKERIIMPSLTTYTLLKQEHSARRGEFKTVHGTVQTPAFQNVATAGAIKGGLSAQDLKDIGAQVMLCNTYHLHLRPGDKLVADMGGLHKFTRWNGPILTDSGGFQVFSLAKLRKITEEGVTFASHLDGHRIFMGPEESMQIQANLGSTIAMAFDECVENPAQHDYSKDSCERTTRWLKRCKAEMARLKHEGISVNPDQLLFGINQGCTYADLRVEHMKQIAELELDGYAIGGLAVGEPTEVMYEMISQVEPHMPKDKIRYLMGVGTPGNIIEAVARGVDLFDCVMPSRNARHGHLNTWSGIINIKNAKYERDERPIDPACGCPVCRNYSRAYIRHLLKADEMLGMRLTVMHNLWFYNHLMERIRDELDAGTFTAFHDRYVKLLDTRI

SEQ ID NO: 55186 - protein, 381 aa, Faecalibacterium prausnitzii
  REGION 1..381: note = tr|A0A173QYG6|A0A173QYG6_9FIRM Queuine tRNA-ribosyltransferase OS=Faecalibacterium prausnitzii; OX = 853 GN=tgt PE=3 SV=1
MPSLTTYTLLKQEHNARRGEFKTVHGTVQTPAFQNVATAGAIKGGLSAQDLKDIGAQVMLCNTYHLHLRPGDKLVADMGGLHKFTRWNGPILTDSGGFQVFSLAKLRKITEEGVTFASHLDGHRIFMGPEESMQIQANLGSTIAMAFDECVENPAQHDYSKDSCERTTRWLKRCKAEMARLKHEGISVNPDQLLFGINQGCTYADLRVEHMKQIAELELDGYAIGGLAVGEPTEVMYEMISQVEPHMPKDKIRYLMGVGTPGNIIEAVARGVDLFDCVMPSRNARHGHLNTWSGIINIKNAKYERDERPIDPACGCPVCRNYSRAYIRHLLKADEMLGMRLTVMHNLWFYNHLMERIRDELDAGTFTAFHDRYVKLLDTRI

SEQ ID NO: 55187 - protein, 381 aa, Faecalibacterium sp.
  REGION 1..381: note = tr|A0A416KK51|A0A416KK51_9FIRM Queuine tRNA-ribosyltransferase OS=Faecalibacterium sp. AF28-13AC; OX = 2292234 GN=tgt PE=3 SV=1
MPSLTTYKLLKKEHDARRGEFKTVHGTVQTPAFQNVATAGAIKGGLSAQDLKDIGAQVMLCNTYHLHLRPGDKLVADMGGLHKFTRWNGPILTDSGGFQVFSLSKLRKITEEGVTFASHLDGHRIFMGPEESMQIQANLGSTIAMAFDECVENPAQHDYSKASCDRTVRWLARCKAEMARLKHEGRAVNPDQLLFGINQGCTFADLRVEHMKQIAEMDLDGYAIGGLAVGEPTDVMYEMISQVEPHMPKDKIRYLMGVGTPGNIIEAVSRGVDLFDCVMPSRNARHGHLNTWGGIINIKNAKYERDERPIDPTCGCPACRNYSRAYIRHLFKAEELLGMRLAVMHNLWFYNHLMERIRDELDAGTFTAFHDRYVKLLDTRI

SEQ ID NO: 55188 - protein, 371 aa, Faecalibacterium sp.
  REGION 1..371: note = tr|R5FLU9|R5FLU9_9FIRM Queuine tRNA-ribosyltransferase OS=Faecalibacterium sp. CAG:1138; OX = 1262896 GN=tgt PE=3 SV=1
MFKYEILHECKQSGARIGRLTTPHGVIETPVFMPVGTMATVKSLSPEEVEGLGSQIILSNTYHLYLRPGHEIIRQAGGLHKFMNWHKPILTDSGGFQIFSLSSMRKITEEGATFSSFIDGSKHFIGPEESMEIQKALGSDIVMAFDQCTSADTDYNGAKKAMELTLRWLDRCSKVDFEGKQMLFPIVQGNMYEDLRLESLRRTIPYAKCGLAIGGLSVGEPKEVMYRMLDVMKPYYPREMPRYLMGVGSADCFVEGIARGIDMMDCVLPTRIARNGTAMTMKGEITIRNAKYKDDFTPVEEGCDCYCCKNYTRAYVRHLINTDEIFGGRLLSVHNIRFLHRLTDRIKDAIRNDRLLDFRDEFMAEYSPKIK

SEQ ID NO: 55189 - protein, 419 aa, unidentified
  source 1..419: note = Faecalibaculum rodentium
  REGION 1..419: note = tr|A0A1Q9YMU9|A0A1Q9YMU9_9FIRM Queuine tRNA-ribosyltransferase OS=Faecalibaculum rodentium; OX = 1702221 GN=BO223_01580 PE=3 SV=1
METSDNSFSFEIEKRLNGLGRAGIIHTPHGDIHTPAFMCVGTRGEVPFVSMEDLHEIGAQAMLSNGYHLRNASEDIAAQGGLAQWSGWSGPTLTDSGGFQVMSLGSGMGKVVAMENQENLTNTPHRERLAHVTEDGIRFWDPVIEREDFIGPRESMEIQCRIGADIHMAFDELTSLADDYDYNKEALARTERWAQTSLEVHRQHRDDLGYRQSLYGVLQGGRWEDLRRATARKLGAMDFDGYGLGGAFLKDDLGEILRWCSEELPEDKPRHLLGLSHPDDILVGISMGADTFDCVAPTREARHGRVYSLDGPVNLGPWKDSDRLIDDECDCATCRAGWTRGQLRELWKSRQDKEKLYQYFHLASVHNLRFILRLMEQARVAILDGTFEEFKESFLQRYYGKTKAAGHEAAGKHRRTTAK

SEQ ID NO: 55190 - protein, 425 aa, unidentified
  source 1..425: note = Faecalibaculum rodentium
  REGION 1..425: note = tr|A0A140DRB4|A0A140DRB4_9FIRM Queuine tRNA-ribosyltransferase OS=Faecalibaculum rodentium; OX = 1702221 GN=AALO17_00570 PE=3 SV=1
MTTPEVSELPEIKESEPVLETSDNSFSFEIEKRLNGLGRAGIIHTPHGDIHTPAFMCVGTRGEVPFVSMEDLHEIGAQAMLSNGYHLRNASEDIAAQGGLAQWSGWSGPTLTDSGGFQVMSLGSGMGKVVAMENQENLTNTPHRERLAHVTEDGIRFWDPVIEREDFIGPRESMEIQCRIGADIHMAFDELTSLADDYDYNKEALARTERWAQTSLEVHRQHRDDLGYRQSLYGVLQGGRWEDLRRATARKLGAMDFDGYGLGGAFLKDDLGEILRWCSEELPEDKPRHLLGLSHPDDILVGISMGADTFDCVAPTREARHGRVYSLDGPVNLGPWKDSDRLIDDECDCATCRAGWTRGQLRELWKSRQDKEKLYQYFHLASVHNLRFILRLMEQARVAILDGTFEEFKESFLQRYYGKTGSSGT

SEQ ID NO: 55191 - protein, 375 aa, unidentified
  source 1..375: note = Faecalicatena contorta
  REGION 1..375: note = tr|A0A316A4M9|A0A316A4M9_9FIRM Queuine tRNA-ribosyltransferase OS=Faecalicatena contorta OX=39482; GN = tgt PE=3 SV=1
MYELLKRDGLAKRGRLHTVHGVIETPVFMNVGTAAAIKGAVSTDDLNTIKTQVELSNTYHLHVRPGDGVVKKLGGLHKFMKWDKPILTDSGGFQVFSLSDLRKIKEEGVHFHSHVDGRKIFMGPEESMQIQSNLASTIAMAFDECPSSVADREYMRDSVARTTRWLKRCQTEMERLNALPDTINKEQMLFGINQGGVYEDIRVEHAKQIAELDMEGYAIGGLAVGESHEEMYRILDAVVPHLPVEKPTYLMGVGTPANILEGVDRGVDFFDCVYPTRNGRHGHVYTNHGKLNLFNARYELDGQPIEEGCQCPACRSYSRAYIRHLLKAKEMLGMRLCVLHNLYFYNTMMEEIRAAIEAGEYKSYKKRKLDGMAGL

SEQ ID NO: 55192 - protein, 378 aa, unidentified
  source 1..378: note = Faecalicatena contorta
  REGION 1..378: note = tr|A0A174G5Y7|A0A174G5Y7_9FIRM Queuine tRNA-ribosyltransferase OS=Faecalicatena contorta OX=39482; GN = tgt PE=3 SV=1
MYELLKRDGLAKRGRFHTVHGAIETPVFMNVGTAAAIKGAVSTDDLQTIKTQVELSNTYHLHVRPGDEVVKKLGGLHRFMKWDKPILTDSGGFQVFSLADLRKIREEGVHFHSHIDGRKIFMGPEESMQIQSNLASTIAMAFDECPSSVADREYMTDSVARTTRWLRRCKTEMARLNSLPDTINPQQMLFGINQGGIYEDIRIEHAKQITELELDGYAVGGLAVGESHEDMYRILDAVVPYLPLEKPTYLMGVGTPANILEGVDRGVDFFDCVYPTRNGRHGHVYTNHGKLNLFNAKFELDDSPIEEGCQCPACRSYSRAYIRHLLKAKEMLGMRLCVLHNLYFYNTMMEEIRAAIEAGEYKAYKKKKLDGMEGMKEA

SEQ ID NO: 55193 - protein, 378 aa, unidentified
  source 1..378: note = Faecalicatena orotica
  REGION 1..378: note = tr|A0A2Y9BBU9|A0A2Y9BBU9_9FIRM Queuine tRNA-ribosyltransferase OS=Faecalicatena orotica OX=1544; GN = tgt PE=3 SV=1
MYELIKRDGLAKRGRFHTVHGVIETPVFMNVGTAAAIKGAVSTDDLRGIKTQVELSNTYHLHVRPGDEVVKKMGGLHKFMNWDKPILTDSGGFQVFSLSDLRKIREEGVHFHSHVDGRKIFMGPEESMQIQSNLASTIAMAFDECPSSIADREYMRDSVARTTRWLARCRTEMDRLNSLPDTINQKQMLFGINQGGIYEDIRVEHAKQITEMELDGYAIGGLAVGESHEEMYRILEAVVPYLPVEKPTYLMGVGTPANILEGVERGVDFFDCVYPTRNGRHGHVYTNHGKLNLFNAKFELDDSPIEEGCQCPACRSYSRGYIRHLLKAKEMLGMRLCVLHNLYFYNTMMEEIRAAIEAGEYKSYKEKKLEGMKNGKDI

SEQ ID NO: 55194 - protein, 405 aa, unidentified
  source 1..405: note = Faecalicoccus pleomorphus
  REGION 1..405: note = tr|A0A380LM62|A0A380LM62_9FIRM Queuine tRNA-ribosyltransferase OS=Faecalicoccus pleomorphus; OX = 1323 GN=tgt PE=3 SV=1
MTDYQNNNTFSFEIEKRLEGKLGRAGIIHTPHGDIKTPAFMCVGTRGSVNFLSMEDLKAIQAQAMLSNGYHLRNASFEIAQNGGLAAWSKWNGPTLTDSGGFQVMSLGSGSGKVVSMKVGHDLKNTEPEHRFAKVTEDGVAFTDPNSGQDDFIGPEESMQIQCRIGADIHMAFDELTSLADDYDYNVEALARTERWALRSIEEHRKHQYDLGYYQALYGVIQGGRWEDLRRSTSKKFAKMDFDGYGLGGAFLKENLGDILRWCCEELPENKPRHLLGLSHPDDILIGIEMGADTFDCVAPTREARHGKIYTRYGNINLANSRFKDSLEPLDDDCDCPVCKAGWTKGQLRELLKSQDKEKRHLYFNLSSQHNLRFILRLTEEARQALIDDTFYEYRSQFLKDYYHK

SEQ ID NO: 55195 - protein, 405 aa, unidentified
  source 1..405: note = Faecalicoccus pleomorphus
  REGION 1..405: note = tr|A0A3E3E700|A0A3E3E700_9FIRM Queuine tRNA-ribosyltransferase OS=Faecalicoccus pleomorphus; OX = 1323 GN=tgt PE=3 SV=1
MTDYQNDNTFSFEIEKRLEGKLGRAGIIHTPHGDIKTPAFMCVGTRGSVNFLSMDDLKAIQAQAMLSNGYHLRNASYEIAQNGGLAAWSKWNGPTLTDSGGFQVMSLGSGSGKVVSMKVGHDLKNTEPEHRFAKVTEDGVAFTDPNSGQDDFIGPEESMQIQCRIGADIHMAFDELTSLADDYDYNVEALARTERWALRSIEEHRKHQYDLGYYQALYGVIQGGRWEDLRRSTSKKFAKMDFDGYGLGGAFLKENLGDILRWCCEELPENKPRHLLGLSHPDDILIGIEMGADTFDCVAPTREARHGKIYTRYGNINLANSRFKDSMEPLDDDCDCPVCKAGWTKGQLRELLKSQDKEKRHLYFNLASQHNLRFILRLTEEARQALIDDTFYEYRSQFLKDYYHK

SEQ ID NO: 55196 - protein, 377 aa, unidentified; identical to SEQ ID NO: 54159
  source 1..377: note = Faecalimonas umbilicata
  REGION 1..377: note = tr|A0A4R3JNB4|A0A4R3JNB4_9FIRM Queuine tRNA-ribosyltransferase OS=Faecalimonas umbilicata; OX = 1912855 GN=tgt PE=3 SV=1

SEQ ID NO: 55197 - protein, 404 aa, unidentified
  source 1..404: note = Faecalitalea cylindroides
  REGION 1..404: note = tr|A0A1Y4LIE6|A0A1Y4LIE6_9FIRM Queuine tRNA-ribosyltransferase OS=Faecalitalea cylindroides; OX = 39483 GN=B5F14_09715 PE=3 SV=1
MNHNYQNNNTFSFEITKRIPGQLGRAGIIHTPHGDIKTPAFMCVGTYGEVRFMSMEDLHAINAQAMLSNGYHLRNISPEIAQKGGLAAWSGWNGPTLTDSGGFQVMSLGSGMGKVVSMDREKEVTNTDPKERLAHVSEDGVEFFDPFTNQKDFIGPEESMQIQCRIGADIHMAYDELTSLADSYEYNVEALARTERWALRSLEEHKKCHMDLGYYQALYGVIQGGRWEDLRRSTCKKFAKMDFDGYGLGGAFLKESLGEILKWCNEELPEHKPRHLLGLSRPDDILIGAQNGADTFDCVAPSREARHGRIYTRHGNISIKKFTDSEEPLDIGCDCPTCQAGWTKKRLRELLKSENKEDKYLYFNLATAHNLRFIIRLTEEIHQAILEERFEEYKNKFLKDFYGN

SEQ ID NO: 55198 - protein, 404 aa, unidentified
  source 1..404: note = Faecalitalea cylindroides
  REGION 1..404: note = tr|U2R4F4|U2R4F4_9FIRM Queuine tRNA-ribosyltransferase OS=Faecalitalea cylindroides ATCC 27803 OX=649755 GN=HMPREF0367_00892 PE=3 SV=1
MNHNYQNNNTFSFEITKRIPGQLGRAGIIHTPHGDIKTPAFMCVGTYGEVRFMSMEDLHAINAQAMLSNGYHLRNISPEIAQKGGLAAWSGWNGPTLTDSGGFQVMSLGSGMGKVVSMDREKEVTNTDPKERLAHVSEDGVEFFDPFTNQKDFIGPEESMQIQCRIGADIHMAYDELTSLADSYEYNVEALARTERWALRSLEEHKKRHMDLGYYQALYGVIQGGRWEDLRRSACKKFAKMDFDGYGLGGAFLKESLGEILKWCNEELPEHKPRHLLGLSRPDDILIGAQNGADTFDCVAPSREARHGRIYTRHGNISIKKFTDSEEPLDIGCDCPTCQAGWTKKRLRELLKSENKEDKYLYFNLATAHNLRFIIRLTEEIHQAILEERFEEYKNKFLKDFYGN

SEQ ID NO: 55199 - protein, 379 aa, Falsibacillus pallidus
  REGION 1..379: note = tr|A0A370GK17|A0A370GK17_9BACI Queuine tRNA-ribosyltransferase OS=Falsibacillus pallidus; OX = 493781 GN=tgt PE=3 SV=1
MTAIRYELIKTCKQTGARLGIIHTPHGSFETPMFMPVGTLATVKTMAPEELKAMGAGIILSNTYHLWLRPGHEIIKEAGGLHKFMNWDQPILTDSGGFQVFSLSEFRNIEEEGVHFRNHLNGDKLFLSPEKAMEIQNALGSDIMMAFDECPPFPATFDYMKKSVERTSRWAERCLQAHQRPEDQGLFGIVQGGEYEELRKMSARDLVSMDFPGYAVGGLSVGEPKDIMNRVLEFTTPLLPDNKPRYLMGVGSPDSLIDGAMRGIDMFDCVLPSRIARNGTLMTSSGRLVVKNAKFARDFGPLDENCDCYTCRNYSRAYIRHLIKCDETFGIRLTTYHNLYFLLNLMKQVREAIREDRLGDFREEFFEQYGFNKPGAKNF

SEQ ID NO: 55200 - protein, 379 aa, Falsibacillus sp.
  REGION 1..379: note = tr|A0A3L7K4X4|A0A3L7K4X4_9BACI Queuine tRNA-ribosyltransferase OS=Falsibacillus sp. GY 10110; OX = 2478915 GN=tgt PE=3 SV=1
MTAIRYELIKTCKQTGARLGIIHTPHGSFETPMFMPVGTLATVKTMSPEELKQMGAGIILSNTYHLWLRPGHEIVKEAGGLHKFMNWDQPILTDSGGFQVFSLSEFRNIEEEGVHFRNHLNGDKLFLSPEKAMEIQNALGSDIMMAFDECPPYPASFEYMKKSVERTSRWAERCLTAHQRPADQGLFGIVQGGEYEELRQMSAKDLVSMDFPGYAVGGLSVGEPKDVMNRVLEFTTPLLPDNKPRYLMGVGSPDSLIDGAMRGIDMFDCVLPSRIARNGTLMTSSGRLVVKNAKFARDFGPLDENCDCYTCRNYSRAYIRHLIKCDETFGIRLTTYHNLYFLLNLMKQVRQAIREDRLGDFREEFFEKYGFNQPGAKNF

SEQ ID NO: 55201 - protein, 377 aa, unidentified
  source 1..377: note = Falsochrobactrum ovis
  REGION 1..377: note = tr|A0A364JY70|A0A364JY70_9RHIZ Queuine tRNA-ribosyltransferase OS=Falsochrobactrum ovis; OX = 1293442 GN=tgt PE=3 SV=1
MSSEEFEFKVLATDGSARRGEISMPRGIVRTPAFMPVGTGGTVKAMYMSQVKELGADIILGNTYHLMLRPGAERIARLGGLHKFGGWEGPILTDSGGFQVMSLAQLRKINEQGVTFRSHIDGRAYEMSPERSIEIQGLLDADIQMQLDECVALPSSEANTERAMELSLRWAERCKVAFGDQPGKAMFGIVQGGDSPRLRERSALALKAMDLKGYSVGGLAVGEPQEVMMDMLEVVCPILPTEKPRYLMGVGTPDDILKSVARGIDMFDCVMPTRAGRHGLAFTRFGKVNLRNARHADDPRPLDPESDCPAARDYSRAYLHHLVKSGEALASMLLTWNNLAYYQYLMQSIRSAISQGRFTDFAAETSEGWARGDLPVL

SEQ ID NO: 55202 - protein, 377 aa, unidentified
  source 1..377: note = Falsochrobactrum sp.
  REGION 1..377: note = tr|A0A316J8F1|A0A316J8F1_9RHIZ Queuine tRNA-ribosyltransferase OS=Falsochrobactrum sp. HN4; OX = 2201899 GN=tgt PE=3 SV=1
MSSEKFEFQVLARDGAARQGEISMPRGVVRTPAFMPVGTAGTVKAMYMDQVKELGADIILGNTYHLMLRPGAERVARLGGLHEFGGWKGPILTDSGGFQVMSLAQLRKLNENGVTFQSHIDGKPYEMTPERSIEIQGLLDSDIQMQLDECVALPSPEANTERAMELSLRWAERCKIAFGDQPGKAMFGIVQGGDNARLRERSAQALKAMDLKGYSVGGLAVGEPQQVMLDMLEVVCPILPAEKPRYLMGVGTPDDILKSVARGIDMFDCVMPTRAGRHGLAFTRFGKVNLRNARHAEDPRPLDPESDCPAARDYSRAYLHHLVKSGETLASMLLTWNNLAYYQYLMKGIRAAIAQGDFAGFSAETSARWARGDMPAL

SEQ ID NO: 55203 - protein, 393 aa, Fastidiosipila sanguinis
  REGION 1..393: note = tr|A0A2S0KQ07|A0A2S0KQ07_9FIRM Queuine tRNA-ribosyltransferase OS=Fastidiosipila sanguinis; OX = 236753 GN=tgt PE=3 SV=1
MNKSKFPVWHEILHIDKKTGARLGVLHTPNGSFKTPMFMPVGTAASVKGISPRELEEMGAGVVLSNTYHLWLRPGEDVVKEAGGLHEFMQWPKGILTDSGGFQVFSLTKAKDITEEGVHFRSHIDGRKLFLTPEKSMQIQNDLGADIIMAFDECIPYPADRDYAARSSERTTRWLERCIKAHKRPDEQALFGIVQGGMYPDLRRKSIEEICSFDLPGFGIGGLSVGEPKEKFFEMLEATIPYMPEDKPRYLMGVGTADYMLEAVKHGVDMFDCVNPTRIGRNGTVMTRFGRLIIRDKSSEKAFIPIDENCKCYVCQNFTRAYIRHLLKANEMFGLRLASYHNLYFLIDLMKQAQDAIAEDRYLEFIEEFELDYGDGKYSQDRVDASKARKNLL

SEQ ID NO: 55204 - protein, 376 aa, unidentified
  source 1..376: note = Fermentimonas caenicola
  REGION 1..376: note = tr|A0A098C2X3|A0A098C2X3_9PORP Queuine tRNA-ribosyltransferase OS=Fermentimonas caenicola; OX = 1562970 GN=tgt PE=3 SV=1
MDFQLIHTDTKSNARAGLIKTDHGEIETPVFMPVGTVGSVKAVHINELKSDIGAEIILGNTYHLYLRPGLEILKGAGGLHKFNSWNKPMLTDSGGFQVFSLTENRKLTEEGAEFRSHIDGSKHFFTPEKVMDIQRTIGADIIMAFDECTPGDADYAYAKESLELTERWLERCIKRFNETECPYGHKQSLFPIVQGCVYPDLRRRAAENIAALEADGNAIGGLAVGEPTEKMYEMVELVNDILPKDKPRYLMGVGKPENLLEAIERGVDMFDCIMPTRNGRNGQIFTKQGVMNMRNEKWKNDFSPIEEDGASYVDTLYSKAYLRHLINSNEILGLQIASIHNLAFYIWLMKEARKHIIDGTFSQWKPMMIENVTRRL

SEQ ID NO: 55205 - protein, 374 aa, Ferrimicrobium acidiphilum
  REGION 1..374: note = tr|A0A0D8FYV2|A0A0D8FYV2_9ACTN Queuine tRNA-ribosyltransferase OS=Ferrimicrobium acidiphilum DSM 19497 OX=1121877 GN=tgt PE=3 SV=1
MTRLCVTDNAGSARRGSLKLRSASVDTPFFMPVATRGIVRYVPTELIADLGYQVLLSNTYHLMLRPGVEVIQQMGGLNAFTGFQGSSLTDSGGFQIMSLEASITTEGARFRNVYDGSWVTLTPEQAMVNQQRIGADIAMALDVCTQLPSSRDQLEANLRLTSEWAERSRLAHTDSTQALFGIIQGGIDLELRRQSTEAITALDFDGYAVGGLAVGESHESTLEAVRTVVDGLPADKPRYLMGVGDPYLLAHATALGIDMFDCVSPTRIARHGTALTDQGPVRVKGLPNRGLDEPLESGCGCRVCQRVSRGLLHHLSHVDTESAGALLSLHNLAFQFRLISRLRQAIVENTVEEVLADVDSVWSRPAIRTGVSSD

SEQ ID NO: 55206 - protein, 374 aa, Ferrimonas balearica
  REGION 1..374: note = tr|E1SRQ8|E1SRQ8_FERBD Queuine tRNA-ribosyltransferase OS=Ferrimonas balearica (strain DSM 9799 / CCM 4581 / PAT) OX=550540 GN=tgt PE=3 SV=1
MKFELITTDGRARRGRLTFERGTVETPAFMPVGTYGTVKGMTPEEVEATGAEICLGNTFHLWLRPGNEIMQKHGDLHGFMNWHKPILTDSGGFQVFSLGHMRKITEQGVHFRHPINGDKIFLDPEGSMEIQYYLGSDIVMIFDECTPYPATEEEAATSMRMSLRWAQRSRDAFDKLGNKNALFGIIQGGVYEYLRDESLDGLMNIGFDGYAIGGLAVGEPKEDMHRILEHICPKIPEDKPRYLMGVGKPEDLVEGVRRGVDMFDCVMPTRNARNGHLFTGEGVVKIRNAKHRDDTSPLDADCDCYTCKNYTRAYLYHLDRCNEILGARLNTIHNLRYYQRVMEGLRGAIERGTLDDFVAEFYARQGREVPPLND

SEQ ID NO: 55207 - protein, 374 aa, Ferrimonas marina
  REGION 1..374: note = tr|A0A1M5S6V4|A0A1M5S6V4_9GAMM Queuine tRNA-ribosyltransferase OS=Ferrimonas marina OX=299255; GN = tgt PE=3 SV=1
MKFELKATDGRARRGTLTFERGTVETPAFMPVGTYGTVKGMTPEEVEATGAEICLGNTFHLWLRPGTEIMEKHGDLHDFMNWHKPILTDSGGFQVFSLGHIRKITEAGVHFRHPINGDKIFLDPEKSMQIQYSLGSDVVMIFDECTPYPATEKEAADSMRMSLRWAQRSRDEFDRLGNPNNLFGIIQGGVYEHLRDESLEGLLNIGFDGYAVGGLAVGEPKEDMHRILEHICPKIPEEKPRYLMGVGKPEDLVEGVRRGIDMFDCVMPTRNARNGHLFTTTGVVKIRNAKHRDDTSPLDAECDCYTCKNYSRAYLYHLDKCNEILGARLNTIHNLRFYQRVMEGLRGAIEKGNLDDFVAEFYAKQGRDVPPLND

SEQ ID NO: 55208 - protein, 374 aa, unidentified
  source 1..374: note = Ferrimonas sediminum
  REGION 1..374: note = tr|A0A1G8QFK3|A0A1G8QFK3_9GAMM Queuine tRNA-ribosyltransferase OS=Ferrimonas sediminum OX=718193; GN = tgt PE=3 SV=1
MKFDLITTQGRARRGRLTFERGTVETPAFMPVGTYGTVKGMTPEEVEATGAEICLGNTFHLWLRPGTEIMQKHGDLHDFMNWHKPILTDSGGFQVFSLGHIRKITEEGVHFRHPINGDKIFLDPEKSMEIQYHLGSDIVMIFDECTPYPATEEEAGKSMRMSMRWAQRSRDAFDKLENPNSLFGIIQGGVYEHLRDESLEGLMNIGFDGYAVGGLAVGEPKEDMHRILEHICPKIPEDKPRYLMGVGKPEDLVEGVRRGIDMFDCVMPTRNARNGHLFTAEGVVKIRNAKHRDDTSPLDSECDCYTCKNYSRSYLHHLDRCNEILGARLNTIHNLRYYQKVMEGLRGAIEQGKLDDFVETFYSKQGRPVPPVID

SEQ ID NO: 55209 - protein, 374 aa, Ferrimonas sp.
  REGION 1..374: note = tr|A0A4U1BFH0|A0A4U1BFH0_9GAMM Queuine tRNA-ribosyltransferase OS=Ferrimonas sp. IMCC35001; OX = 2569538 GN=tgt PE=3 SV=1
MKFDLITTDGRARRGRLTFERGTVETPAFMPVGTYGTVKGMTPEEVEATGAEICLGNTFHLWLRPGTEIMQKHGDLHDFMNWQKPILTDSGGFQVFSLGDIRKITEEGVHFRHPINGDKIFLDPEKSMEIQYHLGSDIVMIFDECTPYPATEEEAGKSMRMSLRWAQRSRDAFDKLGNPNNLFGIIQGGVYEHLRDESLEGLMNIGFDGYAVGGLAVGEPKEDMHRILEHICPKIPEDKPRYLMGVGKPEDLVEGVRRGIDMFDCVMPTRNARNGHLFTSEGVVKIRNAKHRDDTRPLDQECDCYTCKNYSRSYLHHLDRCNEILGARLNTIHNLRYYQKVMEGLRGAIEQGKLEHFVQEFYSKQGRPVPPLND

SEQ ID NO: 55210 - protein, 374 aa, Ferrimonas sp.
  REGION 1..374: note = tr|A0A4U1BPV9|A0A4U1BPV9_9GAMM Queuine tRNA-ribosyltransferase OS=Ferrimonas sp. IMCC35002; OX = 2569539 GN=tgt PE=3 SV=1
MKFDLITTDGRARRGRLTFDRGVVETPAFMPVGTYGTVKGMTPEEVEATGAQICLGNTFHLWLRPGTEIMQKHGDLHDFMNWQKPILTDSGGFQVFSLGHIRKITEEGVHFRHPINGDKIFLDPEKSMDIQYHLGSDIVMIFDECTPYPATEQEAGASMRMSLRWAQRSRDEFDRLGNKNSLFGIIQGGVYEHLRDESLEGLVNIGFDGYAVGGLAVGEPKEDMHRILEHTCPKIPEDKPRYLMGVGKPEDLVEGVRRGIDMFDCVMPTRNARNGHLFTSEGVVKIRNAKHRDDTSPLDPECDCYTCKNYTRSYLYHLDKCNEILGARLNTIHNLHYYQTVMKGLRGAIEQGKLDDFVAEFYTKQGRPVPPAID

SEQ ID NO: 55211 - protein, 368 aa, unidentified
  source 1..368: note = Ferriphaselus amnicola
  REGION 1..368: note = tr|A0A2Z6GA41|A0A2Z6GA41_9PROT Queuine tRNA-ribosyltransferase OS=Ferriphaselus amnicola; OX = 1188319 GN=tgt PE=3 SV=1
MEFKLHTTSDAARRGTLTLAHGKLETPAFMPVGTYGTVKAMSPVELKDIGAQIVLGNTFHLWLRPGLHVIEQFGGLHKFMGWDGPILTDSGGFQVFSLGDLRKITGGGVEFRSPINGDKCFLSPEESMRIQKVLNSDIVMIFDECTPYPADEQVAGVSMRLSLGWAERSKKAHEGNPNALFGIVQGGMHEHLRDESLAGLTNIGFDGYAIGGLSVGEPKGDMMRILRHTAPQLPADKPRYLMGVGTPEDLVDAVEQGIDMFDCVMPTRNARNGHLFTRFGDVRIKNAVHKADTRPLDEQCECYCCRNFSRAYLHHLQRAGEILGARLNTIHNLHYYQELMRDIRAAIERGQFAEFAASFRVQRGSLSK

SEQ ID NO: 55212 - protein, 367 aa, Ferrithrix thermotolerans
  REGION 1..367: note = tr|A0A1M4SHX5|A0A1M4SHX5_9ACTN Queuine tRNA-ribosyltransferase OS=Ferrithrix thermotolerans DSM 19514 OX=1121881 GN=tgt PE=3 SV=1
MTTLSGRFEILKESGSYRNGRFLGERHSFLTPVFMPVGTRGSVRLFPHDLLDQIGFEVVLANTYHMMLRPGADVVAKLGGLHRFSGWPNAILTDSGGFQVMSLDANFDLDGVSFRSVYDGAKAYLTPENAVRMQELLGSDIAMVLDVCTMLPASTDQLKEALYLTISWAKRSKAAHNRSDQSLFGIVQGGTDATLRKISIEATCEIGFDGYAIGGLAVGEERSLTLETVQLCCDSLPQDAPRYLMGVGDPYSIVHAVELGVDMFDCVAPSRVARHGVGWTSNGKVSVKQARYVASEEPLDPNCECDTCVRYPMALLNHLFKVDPVTLGVLLTRHNLTFMKTLISWCRKAVEEGNFNDPKRFVETYYS

SEQ ID NO: 55213 - protein, 374 aa, unidentified
  source 1..374: note = Ferrovibrio sp.
  REGION 1..374: note = tr|A0A516H431|A0A516H431_9PROT Queuine tRNA-ribosyltransferase OS=Ferrovibrio sp. K5 OX=2594003; GN = tgt PE=3 SV=1
MTLRFTVSATDGAARRGRLETAHGAIDTPAFMPVGTAATVKAMTPEAVVETGAQIILGNTYHLMLRPSAERVAKLGGLHRFMNWPGPILTDSGGFQVMSLSQLNKVSEAGVSFQSHIDGAKYDLTPERSIEIQHLLDATITMQLDECVKLPADDKRVSEAMQLSLRWAERCKTAFKLRDGYGLFGIVQGGTNGALREQSAKGLIKTGFDGYAVGGLAVGETQAEMFATLDVTTPHLPQDRPRYLMGVGKPSDLVGAVQRGIDMFDCVMPTRSGRNGQAFTRRGTINIRNARHAEDPRPIDEHCRCPACRNYSRAYVHHLVRSDEILGSMLMTAHNLTYYQDVMQGLRAAIAEGRLEAFAAGFHAGEASGDIPPL

SEQ ID NO: 55214 - protein, 374 aa, unidentified
  source 1..374: note = Ferrovibrio sp.
  REGION 1..374: note = tr|A0A2M8U077|A0A2M8U077_9PROT Queuine tRNA-ribosyltransferase OS=Ferrovibrio sp. OX=1917215; GN = tgt PE=3 SV=1
MTLKFTVSATDGAARRGRLETAHGAIDTPAFMPVGTAATVKAMTPEGVRETGAQIILGNTYHLMLRPSAERVAKLGGLHTFMNWPGPILTDSGGFQVMSLSQLNKVTEQGVSFQSHIDGAKYDLTPERSIEIQHLLDATITMQLDECVKLPADDKRVSEAMQLSLRWAERCKAAFQQRDGYGLFGIVQGGTNGGLREESAKGLIRTGFDGYAVGGLAVGETQAEMFATLDVTMPHLPQDRPRYLMGVGKPSDLVGAVQRGIDMFDCVMPTRSGRNGQAFTRRGTINIRNARHAEDPRPIDEHCRCPACRSYSRAYVHHLVRSDEILGSMLMTAHNLTYYQDVMQGMRAAIAEGRLNAFAADFHAGEASGDIDPL

SEQ ID NO: 55215 - protein, 369 aa, unidentified
  source 1..369: note = Ferrovum sp.
  REGION 1..369: note = tr|A0A0R0LG95|A0A0R0LG95_9PROT Queuine tRNA-ribosyltransferase OS=Ferrovum sp. JA12 OX=1356299; GN = tgt PE=3 SV=1
MKFTLLSEEGLARRGRLELVHGVVETPVFMPVGTYGSVKGLSPHELVDLGAQIILGNTFHLWLRPGLEVFEEVGGLHGLMAWHKPILTDSGGFQVFSLGALRKISEEGVTFRSPINGDRLLLTPEESMRIQRILNSDIVMAFDECTPYPATHEQAKQSMELSLRWAERSLRAHEGNHNALFGIVQGGMYEDLREVSVRAMIAMDFPGYAMGGLSVGEPQADRERILAHTPTLLPKHKPRYLMGMGTPEDLVLAVESGIDMLDCVMPTRNARNGWLFTRFGNIKIRNARYKHDHRPLDETCGCYTCQHFSRSYLHHLQQAKEILGARLNTIHNLFYYQQIMAQMRDAIADQRFQSFKEEFHGNRQLHGKI

SEQ ID NO: 55216 - protein, 368 aa, unidentified
  source 1..368: note = Ferrovum sp.
  REGION 1..368: note = tr|A0A149VY45|A0A149VY45_9PROT Queuine tRNA-ribosyltransferase OS=Ferrovum sp. Z-31 OX=1789004; GN = tgt PE=3 SV=1
MKFEVLAQDGKARRARLSLPHGVVETPVFMPVGTYGAVKGVTPDELTALGAQIILGNTFHLWLRPGLEVFRAQGGLHGFMNWQAPILTDSGGFQVFSLGALRKISEEGVIFRSPLNGDRLFLTPEISMEIQRVLNSDIVMAFDECTPYPATEPEARNSMELSLRWADRSLRGHEGNPNALFGIIQGGMYESLREISAQEMVALDFPGYAIGGLSVGEPPADRARILAHTPTLLPAHKPRYLMGMGTPEDIVNAVSAGIDMMDCVMPTRNARNGWLFTRFGNVKIRNAGYKNDGRPLDPTCLCYTCQHFSRSYLHHLQQAKEMLGARLNTLHNLHYYQTLMSELRTAIETGTLTKFTQQFQADRAHGVK

SEQ ID NO: 55217 - protein, 379 aa, Ferruginibacter sp.
  REGION 1..379: note = tr|A0A3M9N7S7|A0A3M9N7S7_9BACT Queuine tRNA-ribosyltransferase OS=Ferruginibacter sp. BO-59; OX = 2294116 GN=tgt PE=3 SV=1
MADLQFTLQHADTSTKARAGKIRTDHGEILTPIFMPVGTVGSVKALTQQQLKDDVHAQIILGNTYHLYMRPGLDVLEAAGGLHKFMNWEKPILTDSGGYQVFSLSGTRKISEEGVVFQSHIDGSKHLFSPEKVIDIQRIIGADIIMAFDECPPGASEYSYAKKSLELTNRWLDRCFQRFHETENKYGYSQNLFPIVQGGVHHELRKISCEYVSSKEATGNAIGGLSVGEPTEKMYEICGLCCENLPVNKPRYLMGVGTPWNILECISLGVDMFDCVMPTRNGRNAMLFTNRGIINIDNKKWEKDFSPIDEELENEVSNYYSKAYLRHLIKSKEILGLQIASIHNLAFYLHIVRQARVQIQNGNFASWKKEMAVQWQHRL

SEQ ID NO: 55218 - protein, 378 aa, Fervidicella metallireducens
  REGION 1..378: note = tr|A0A017RY91|A0A017RY91_9CLOT Queuine tRNA-ribosyltransferase OS=Fervidicella metallireducens AeB OX=1403537 GN=tgt PE=3 SV=1
MGAVRYELIKQCKQSGARLGRLHTPHGVIETPIFMPVGTQATVKTMTPEELKNIGSQIILSNTYHLYLRPGHKLVEKAGGLHKFMNWDKPILTDSGGFQVFSLSDLRDITEEGVTFKSHLDGSKHFLSPERAIEIENSLGADIIMAFDECLPYPCDYDYAKNSLHRTIRWAERCLNAHKNTEKQALFGIIQGGMYRDLREESVREMVKLDFPGYAIGGLSIGEPKPIMYEVLDWTAHLLPENKARYLMGIGSPDALIEGAIRGIDMFDCVLPTRIARNGTAFTSRGRVVIKNAKYAEDFGPLDAECDCYTCRNYSRAYLRHLFKAEEILGPRLVTIHNLRFLLRLMENVRQAILEDRLLDFRDEFFEKYGYNESSRNF

SEQ ID NO: 55219 - protein, 368 aa, Fervidicola ferrireducens
  REGION 1..368: note = tr|A0A140LCE3|A0A140LCE3_9THEO Queuine tRNA-ribosyltransferase OS=Fervidicola ferrireducens; OX = 520764 GN=tgt PE=3 SV=1
MRFEVLNRAEKCSARTGLLETYHGIVKTPVFMPVGTQATVKTMTSEELEQIGAKIILSNTYHLYLRPGHKLIEEAGGLHKFMNWKGSILTDSGGYQVFSLGELREIKEEGVTFRSHIDGSLHFISPEMSIEIQNSIGADIIMAFDECIPYPATYEYAKNSVERTTRWAERCKKHHKRNDQALFGIVQGGLYRDLREKSAKDLVAMDFEGYAVGGLSVGEPKECMYEVLDYVVPLLPEEKPRYLMGVGSPDSIFEGIQRGIDMFDCVLPTRIARHGTVFTARGKLVVRNATYARDFSPLDPECDCYVCKNYTRAYIRHLLNAGEILGLRLTTYHNLYFLLRLVEKIREAIEGDYFLDLKEEFFSKYGYR

SEQ ID NO: 55220 - protein, 372 aa, Fervidobacterium changbaicum
  REGION 1..372: note = tr|A0A1G7ZP00|A0A1G7ZP00_9BACT Queuine tRNA-ribosyltransferase OS=Fervidobacterium changbaicum; OX = 310769 GN=tgt PE=3 SV=1
MGSLRFEVLKTVGNARRGRIHLPHGVVETPTFMPVGTNANVKLVTPHILKENNVQIILSNAFHLYLKPGLDVIREFGGLHNFMNWDRPILTDSGGFQVFSLKKGQKITDDGVWIMSPTDGSKHYITPELSMEIQATLGSDIVMAFDYCADPKDGYEEAKRSVKLTTKWAKRSLEHLRRISHQAIFGIIQGAVYEDLREMSLREITELDFDGFAIGGLSVGEPREVTLKMVEFVGPKMPENKPRYFMGGGSPDLLVDLVANGVDMFDSVFPTRVARHGLAVTWNGKFNIRSARYKYDKTPIDENCTCYTCRNFSKGYIRHLFDREEVLGQILLTIHDVHFMMEFGEKMRESIENGTFFEFREKVKKAYEKQSS

SEQ ID NO: 55221 - protein, 375 aa, Fervidobacterium gondwanense
  REGION 1..375: note = tr|A0A1M7T8Z5|A0A1M7T8Z5_FERGO Queuine tRNA-ribosyltransferase OS=Fervidobacterium gondwanense DSM 13020 OX=1121883 GN=tgt PE=3 SV=1
MGLLKFELLKTVGQARRGRMHLPHGVVETPTFMPVGTNANVKLVTPHILKENDVQIILSNAFHLYLKPGLDVIRDFGGLHNFMNWDRPILTDSGGFQVFSLKKGQKITDDGVWIMSPLDGSKHFITPELSMEIQATLGSDIVMAFDYCADPKDGYEESKKSVKLTTKWAKRSLEHLRRISHQALFGIIQGAIYEDLREQSLSDITQYDFDGFAIGGLSVGEPREVTMKIVEFTAPKMPYDKPRYFMGGGSPDLLVDLVANGVDIFDSVFPTRVARHGLAVTWNGKFNIRSARYKYDKTPIDENCTCYTCRNFSKGYLRHLFDREEVLGQILLTIHDVHFMMEFGKKMRESIENGTFEVFRERVKKAYEKKDNTNN

SEQ ID NO: 55222 - protein, 372 aa, Fervidobacterium islandicum
  REGION 1..372: note = tr|A0A1B0VK60|A0A1B0VK60_FERIS Queuine tRNA-ribosyltransferase OS=Fervidobacterium islandicum; OX = 2423 GN=tgt PE=3 SV=1
MGSLRFEVLKTVGNARRGRIHLPHGVVETPTFMPVGTNANVKLVTPHILKENNVQIILSNAFHLYLKPGLDVIREFGGLHNFMNWDRPILTDSGGFQVFSLKKGQKITDDGVWIMSPIDGSKHYITPELSMEIQATLGSDIVMAFDYCADPKDGYEEAKRSVKLTTKWAKRSLEHLRRISHQAIFGIIQGAVYEDLREMSLREITELDFDGFAIGGLSVGEPREVTLKMVEFVGPKMPENKPRYFMGGGSPDLLVDLVANGVDMFDSVFPTRVARHGLAVTWNGKFNIRSARYKYDKTPIDENCTCYTCRNFSKGYIRHLFDREEVLGQILLTIHDVHFMMEFGEKMRESIENGTFFEFREKVKKAYEKQSS

SEQ ID NO: 55223 - protein, 373 aa, Fervidobacterium nodosum
  REGION 1..373: note = tr|A7HLH0|A7HLH0_FERNB Queuine tRNA-ribosyltransferase OS=Fervidobacterium nodosum (strain ATCC 35602 / DSM 5306 / Rt17-B1) OX=381764 GN=tgt; PE = 3 SV=1
MGSLRFEIINTQGHARRGRIHLPHGVVETPTFMPVGTNANVKLVTPHILEENNVQIILSNAFHLYLKPGLDVIREFGGLHNFMRWNKPILTDSGGFQVFSLKKGQKITDDGVWIMSPIDGSKHYITPELSMEIQATLGSDIVMAFDYCADPKDGYDEAKRAVKLTTKWAKRSLEHLRRISNQATFGIIQGATYEDLRELSLHEITQFDFDGFAIGGLSVGEPREVTIKMVEFIGPKMPQDKPRYFMGGGSPDLLVDLVANGVDMFDSVFPTRVARHGLAVTWNGKFNIRSARYKYDKTPIDENCTCYTCRNFSKGYIRHLFDRQEVLGQILLTIHDIHFMMEFGEKMRESLENGTFEEFRKGIKKAYEKTAND

SEQ ID NO: 55224 - protein, 374 aa, Fervidobacterium pennivorans
  REGION 1..374: note = tr|A0A172T136|A0A172T136_FERPE Queuine tRNA-ribosyltransferase OS=Fervidobacterium pennivorans; OX = 93466 GN=tgt PE=3 SV=1
MGSLRFEVLKTVGNARRGRMHLPHGIVETPTFMPVGTNANVKLVTPHILKENNVQIILSNAFHLYLKPGLDVIREFGGLHNFMNWDRPILTDSGGFQVFSLKKGQKITDDGVWIMSPIDGSRHYITPELSMEIQATLGSDIVMAFDYCADPKDGYDEAKRSVKLTTKWAKRSLEHLRRISHQAIFGIIQGAIYEDLREMSLKEITEFDFDGFAIGGLSVGEPHEVTLKMVEFIGPRMPSDKPRYFMGGGSPDLLVDLVANGVDIFDSVFPTRVARHGLAVTWNGKFNIRSARYKYDKTPIDENCTCYTCRNFSKGYIRHLFDREEVLGQILLTIHDIHFMMEFGEKMRESIENGTFYEFREKVKKAYEKQASEG

SEQ ID NO: 55225 - protein, 374 aa, Fervidobacterium pennivorans
  REGION 1..374: note = tr|H9UDC0|H9UDC0_FERPD Queuine tRNA-ribosyltransferase OS=Fervidobacterium pennivorans (strain DSM 9078 / Ven5) OX=771875 GN=tgt PE=3 SV=1
MGSLRFEVLKTVGNARRGRMHLPHGIVETPTFMPVGTNANVKLVTPHILKENNVQIILSNAFHLYLKPGLDVIREFGGLHNFMNWDRPILTDSGGFQVFSLKKGQKITDDGVWIMSPIDGSKHYITPELSMEIQATLGSDIVMAFDYCADPKDGYDEAKRSVKLTTKWAKRSLEHLRRISHQAIFGIIQGAIYEDLREMSLKEITEFDFDGFAIGGLSVGEPHEVTLKMVEFIGPKMPPDKPRYFMGGGSPDLLVDLVASGVDIFDSVFPTRVARHGLAVTWNGKFNIRSARYKYDKTPIDENCTCYTCRNFSKGYIRHLFDREEVLGQILLTIHDIHFMMEFGEKMRESIENGTFYEFREKVKKAYEKQASEG

SEQ ID NO: 55226 - protein, 373 aa, Fervidobacterium sp.
  REGION 1..373: note = tr|A0A3D2GD39|A0A3D2GD39_9BACT Queuine tRNA-ribosyltransferase OS=Fervidobacterium sp. OX=1871331; GN = tgt PE=3 SV=1
MDSLGFEVLRKEGHARRGRIHLTHGVVETPTFMPVGTNANVKLVTPHVLKENNVQIILSNAFHLYLKPGLDVIRQFNGLHEFMRWDRPILTDSGGFQVFSLKRGQKITDDGVWIMSPIDGSKHFITPELSMEIQATLGSDIVMAFDYCADPKDGYEESKKSVKLTTKWAKRSLEHLRDISNQAIFGIIQGAIYEDLREMSLNEIAQMEFNGFAMGGLSVGEPRKETIKMVEFLGPKMPEDKPRYFMGGGSPDLLVDLVANGVDMFDSVFPTRVARHGLAVTWNGKFNIRSARYKYDKTPIDENCNCYTCQNFSRGYIRHLFDRQEVLGQILLTIHDIHFLMEFGEKLRESLENSTFEMFRGGIKKVYEKNFDC

SEQ ID NO: 55227 - protein, 373 aa, unidentified
  source 1..373: note = Fervidobacterium thailandense
  REGION 1..373: note = tr|A0A1E3G330|A0A1E3G330_9BACT Queuine tRNA-ribosyltransferase OS=Fervidobacterium thailandense; OX = 1008305 GN=tgt PE=3 SV=1
MGSLRFEVLTTDGSARRGRIHLPHGVVETPTFMPVGTNANVKLVTPDILKENNVQIILSNAFHLYLKPGLDVIREFGGLHNFMNWDRPILTDSGGFQVFSLKKGQKITDDGVWIVSPIDGSKHYITPELSMEIQATLGSDIVMAFDYCADPKDGYDEAKRAVKLTTKWARRSLEHLRRISHQAIFGIIQGAVYEDLRELSLQEITEMDFDGFAIGGLSVGEPREVTVKMVEFVAPKMPAEKPRYFMGGGSPDLLVDLVASGVDMFDSVFPTRVARHGLAVTWNGKFNIRAARYKYDKRPIDEHCNCYTCRNFSRGYIRHLFDREEVLGQILLTIHDIHFMMEFGQRMRESIEKGQFQKFREGIKDAYAKPFID

SEQ ID NO: 55228 - protein, 376 aa, Fibrella aestuarina
  REGION 1..376: note = tr|I0KE81|I0KE81_9BACT Queuine tRNA-ribosyltransferase OS=Fibrella aestuarina BUZ 2; OX = 1166018 GN=tgt PE=3 SV=1
MTFTIEQTDPQSQARTGTLTTDHGAIQTPIFMPVGTAGTVKAVHQRELETDINAHIILGNTYHLYLRPGLDVLRQAGGLHGFNGWQRPILTDSGGYQVYSLSNTRKIKEEGVTFKSHIDGSKHTFTPEGVMDIQRTIGADIMMAFDECTPYPCDYAYAKASMDMTHRWLDRCIRRFDETEGHYGYQQYLFPIVQGSTYPDLRRQSAETIASKERTGNAIGGLAVGEPAEDMYKTIDLVNEILPRDKPRYLMGVGTPANILEAIALGVDMFDCVMPTRNARHGLLFTTAGIINIKNEKWSRDFSPIDATLGGYASTFYSKAYLRHLFKADELLGGQIASLQNLTFYLWLVRQARAHIAAGDFVAWKNEMTTRLMVRM

SEQ ID NO: 55229 - protein, 376 aa, Fibrella sp.
  REGION 1..376: note = tr|A0A1W6E8I3|A0A1W6E8I3_9BACT Queuine tRNA-ribosyltransferase OS=Fibrella sp. ES10-3-2-2; OX = 1834519 GN=tgt PE=3 SV=1
MTFTIQHNDPASQARTGTLTTDHGTIQTPIFMPVGTAGTVKAVHQRELETDINADIILGNTYHLYLRPGLDVLQQAGGLHGFNGWKRPILTDSGGYQVYSLSGTRKIKEEGVTFKSHIDGSKHTFTPEGVMDIQRTIGADIIMAFDECTPYPCDYAYAKQSMDMTHRWLDRCIRRFDDTEGHYGYNQYLFPIVQGSTYPDLRRESAAVIAGKERAGNAIGGLAVGEPAEEMYKTIDLVNEILPRHKPRYLMGVGTPANILEAIGLGVDMFDCVMPTRNGRHGLLFTTEGMINMKNEKWSRDFSPIDAGLGGYASTFYTKAYVRHLYKADELLAGQIGSLQNLTFYLWLVRQARAHIEAGDFVSWKNDMVKRLMVRL

SEQ ID NO: 55230 - protein, 376 aa, Fibrisoma limi
  REGION 1..376: note = tr|I2GCI0|I2GCI0_9BACT Queuine tRNA-ribosyltransferase OS=Fibrisoma limi BUZ 3 OX=1185876; GN = tgt PE=3 SV=1
MTFSISAQDQQSKARTGTLTTDHGPIHTPIFMPVGTAGTVKAVHQRELETDVQAEIILGNTYHLYLRPGLDVLSQAGGLHKFNGWSHPILTDSGGYQVYSLSNTRKIKEEGVTFKSHIDGSTHRFTPEGVMDIQRTIGADIIMAFDECTPYPCEYGYARQSMEMTHRWLDRCIGRFDATEGYYGYQQTLFPIVQGSTYPDLRRQSAEFIASKEREGNAIGGLAVGEPAEEMYKTIELVNEILPVDKPRYLMGVGTPANILEAIALGVDMFDCVMPTRNARHGILFTTEGIMNLKNEKWSRDFSPIDAGLGGYASTFYTKAYLRHLFKAEEILAAQIASLHNLTFYLWLVRQARVHIDAGDYVTWKNEMVERLMRRL

SEQ ID NO: 55231 - protein, 376 aa, Fibrisoma sp.
  REGION 1..376: note = tr|A0A418M1A4|A0A418M1A4_9BACT Queuine tRNA-ribosyltransferase OS=Fibrisoma sp. HYT19 OX=2305895; GN = tgt PE=3 SV=1
MTFEILARDPQSKARTGTLTTDHGLIQTPIFMPVGTAGTVKAVHQRELETDVQAEIILGNTYHLYLRPGLEVLSQAGGLHRFNGWSHPILTDSGGYQVYSLSNTRKIKEEGVTFKSHIDGSTHRFSPEGVMDIQRTIGADIIMAFDECTPYPCDYGYARQSMEMTHRWLDRCIGRFDATEGHYGYQQTLFPIVQGSTYPDLRRQSAEFIASKGREGNAIGGLAVGEPAEEMYKSIELVNEILPINKPRYLMGVGTPANILEAIALGVDMFDCVMPTRNARHGILFTTEGIMNLKNEKWSRDFSPIDANLGGYASTFYSKAYLRHLFKAEEILAAQIASLHNLTFYLWLVRQARAHIEAGDYVTWKNQMVERLMRRL

SEQ ID NO: 55232 - protein, 380 aa, Fibrobacter intestinalis
  REGION 1..380: note = tr|A0A1T4M9I9|A0A1T4M9I9_9BACT Queuine tRNA-ribosyltransferase OS=Fibrobacter intestinalis; OX = 28122 GN=tgt PE=3 SV=1
MNPPFFELLQVSENSKARLGKIRTAHGDVSTPVFMPVGTNATVKGLAVRDLREMQAEIILANTYHLYLRPETQTICAAGGVQRFMGWNAPMLTDSGGFQVWSLKRFRKIHPEGVAFRSYLDGSSHFFSPESVMLAEREIGADIIMAFDECTPYPCSQEEAEKSLAYTTDWTQKAKAWLDLHPPLFGYPQYFFGIVQGGMFLDLRKKAIEDLVKIDPDGYAMGGLSVGEPAEMMYRVADFCTDYLPKDKPRYVMGVGTPWNLLELIRRGVDMFDCILPAKHAQDGLVYTSRGILRYKSARYAKSFDAPLDPECDCACCRHYSRGYLRHLFKTKEPLGWTLSAIHNLHFYVRLMQQARAHISAKTFEEWSRDECQKLQQICL

SEQ ID NO: 55233 - protein, 380 aa, Fibrobacter intestinalis
  REGION 1..380: note = tr|A0A1T4L2K9|A0A1T4L2K9_9BACT Queuine tRNA-ribosyltransferase OS=Fibrobacter intestinalis; OX = 28122 GN=tgt PE=3 SV=1
MQKNCFELLKTSAKSKARLGKIKTGHGEITTPIFMPVGTQASVKGLTPRDLDEAQAEIILGNTYHLYLRPGTELIKNAGGLHRFMHWHGPILTDSGGFQVWSLKDLRKIKKDGIEFRSNLDGSKHFFSPESVMKAEREIGADIIMALDECTPYPSTEQEALKSLNYTLHWTRLAKEYLEKNPPLFGYDQSFFGIIQGGMHKELRAKAIAEIQKINPDGYALGGLSVGEPTETLYEIADFCTNLMPEDKPRYVMGVGTPWNLLELIFRGVDMCDCVMPTRNARNGMLFTSEGVLHYKAGRYAKSLDLAPDPNCDCYCCKNFSRAYLRHLFHSGEILAMTLASIHNVHFYLKLMRDAKAHIQSDTFEEWGKEQIIKLQHVCD

SEQ ID NO: 55234 - protein, 378 aa, Fibrobacter sp.
  REGION 1..378: note = tr|A0A1M5DWW5|A0A1M5DWW5_9BACT Queuine tRNA-ribosyltransferase OS=Fibrobacter sp. UWB8 OX=1896207; GN = tgt PE=3 SV=1
MNRFELLKISQKSKARLGVVHTDHGDVTTPIFMPVGTEATVKAVTPAQLKDIKAEIILANTYHLYLRPTTPRIAKAGGIHKFMAWDGPVLTDSGGFQVWSLKDLRKITPEGVEFRSILDGSKHFFSPASVMNAQREIGADIIMALDECTPFPSTAKEAEHSLKFTLKWTAEAMQWLKEHPPIHGYDQQFFGIIQGGMHKDLRKQAIERIAELGPDGYAMGGLSVGEPTETMYEIADFCTDILPKDHARYVMGVGTPWNLLELIERGVDMCDCVMPTRNARNGMLFTSEGVLRYKAARHAEEFDKPVDPNCDCYCCRNFSRAYLRHLHHAGESLGFTLASIHNLHFYLHLMREAKQHIADDTFEEWKREKCEILQRDLQ

SEQ ID NO: 55235 - protein, 378 aa, Fibrobacter sp.
  REGION 1..378: note = tr|A0A254SRH9|A0A254SRH9_9BACT Queuine tRNA-ribosyltransferase OS=Fibrobacter sp. UWB1 OX=1964355; GN = tgt PE=3 SV=1
MNRFELLKTSKKSKARLGVVHTDHGDVTTPIFMPVGTEATVKAVTPAQLKDIKAEIILANTYHLYLRPTTPRIAKAGGIHKFMGWDGPVLTDSGGFQVWSLKDLRKITPEGVEFRSILDGSKHFFSPASVMNAQREIGADIIMALDECTPFPSTAKEAEHSLKFTLKWTAEAMQWLKEHPPIHGYDQQFFGIIQGGMHKDLRRQAIERIAELGPDGYAMGGLSVGEPTETMYEIADFCTDILPKDHARYVMGVGTPWNLLELIERGVDMCDCVMPTRNARNGMLFTSEGVLRYKAARHAEEFDKPVDPNCDCYCCRNFSRAYLRHLHHAGESLGFTLASIHNLHFYLHLMREAKQHIADDTFEEWKKEKCEILQRDLQ

SEQ ID NO: 55236 - protein, 382 aa, Fibrobacter succinogenes
  REGION 1..382: note = tr|A0A380RX39|A0A380RX39_FIBSU Queuine tRNA-ribosyltransferase OS=Fibrobacter succinogenes OX=833; GN = tgt PE=3 SV=1
MKLNENPFELLKKSAKSKARLGVIHTAHGDVTTPVFMPVGTAATVKGLTSRDIREIDAEIILANTYHLYLRPGTKLIAEAGGVQKFMSWNKPMLTDSGGFQVWSLKQFRKITEEGVQFKSLLDGSRHLFTPASVMNAQREIGADIIMAFDECTPYPSTVEEAEKSLALTLKWTREAKEWLLANPPIHGYPQFFFGIVQGGMHKELRQKSIEALKEIEPDGYAMGGLSVGEPVETMYEIADFCTNLLPEDRARYVMGVGTPWNLLELVKRGVDMCDCILPAKNAQDGLVYTSRGVLRYKGAKFAHQHDLPLDPNCDCYCCRNYSRAYLRHLFKEKEPLGWTLAAIHNLHFYIHLMKSVKAHIADDTFEDWADEQIKILQQSAE

SEQ ID NO: 55237 - protein, 382 aa, Fibrobacter succinogenes
  REGION 1..382: note = tr|C9RPU1|C9RPU1_FIBSS Queuine tRNA-ribosyltransferase OS=Fibrobacter succinogenes (strain ATCC 19169 / S85) OX=59374 GN=tgt_1 PE=3 SV=1
MKLNENPFELLKKSAKSKARLGVIHTAHGDVTTPVFMPVGTAATVKGLTSRDIREIDAEIILANTYHLYLRPGTKLIAEAGGVQKFMSWNKPMLTDSGGFQVWSLKQFRKITEEGVQFKSLLDGSRHLFTPASVMNAQREIGADIIMAFDECTPYPSTVEEAEKSLALTLKWTREAKEWLLANPPIHGYPQFFFGIVQGGMHKELRQKSIEALKEIEPDGYAMGGLSVGEPVETMYEIADFCTNLLPEDRARYVMGVGTPWNLLELVKRGVDMCDCILPAKNAQDGLVYTSRGVLRYKGAKFAHQHDLPLDPNCDCYCCRNYSRAYLRHLFKEKEPLGWTLAAIHNLHFYIHLMKDVKSNIADDTFEEWADEQVKMLQENAG

SEQ ID NO: 55238 - protein, 356 aa, unidentified
  source 1..356: note = Fibrobacteres bacterium
  REGION 1..356: note = tr|A0A3C0PIP2|A0A3C0PIP2_9BACT Queuine tRNA-ribosyltransferase (Fragment) OS=Fibrobacteres bacterium OX=2052160 GN=DCO75_12370 PE=3 SV=1
IINTPIFMPVGTQATVKALSPLELEECGCPIILANTYHLRLRPGDELVAKAGGLHKFENWKRAILTDSGGFQVFSLRDISKITEDGVMFQSYIDGSKHFFSPERVMEIEHNLGADIIMMFDECPPATADAEHVGNAVDRTLRWAGRCMSHHEKTPFIHGYPQALFGIVQGATYKALREKCARELVAMDCPGYAIGGMAVGESTELLYSMTEFTCDILPENKPRYCMGVGMPENIIECIKRGADMFDCVLPTRNARNGSVFTWSGTVNIRNAKHTADFNHGLDAACSCYTCKNFSRAYLRHLFISGEILATRLLTLHNVFFYMQLTRTAREHIINGTFTEWSEKFLAGIENGKSGEI

SEQ ID NO: 55239 - protein, 378 aa, unidentified
  source 1..378: note = Fibrobacteres bacterium
  REGION 1..378: note = tr|A0A3C1WJT2|A0A3C1WJT2_9BACT Queuine tRNA-ribosyltransferase OS=Fibrobacteres bacterium; OX = 2052160 GN=tgt PE=3 SV=1
MTFFTLEKKSSASKARAGTLRTAHAEIQTPVFMPVGTAGAVKAVSPREVESTGARIILGNTYHLYLRPGCDLIAQAGGLHRFINWPHAMLTDSGGFQVWSLETLRKVSENGVEFRSHLDGSKHLFTPESVMEAQRKLGADIFMAFDECTPYPATKEEAAKSLALTKLWHERAVRWLTDHPELHGYPQYFFGIAQGGMHEELRAEAIEHIAGLELPGYALGGLSVGEPAEEMYRIADYATNLMPAGKPRYVMGVGTPANLLELISRGVDMFDCVLPTRAARHGTVFTWNGPLHYKAARHAQELDTPIDPDCGCYACRNFSRAYIRHLFVSNEILALELATLHCLHFYQEMMQVARQQILDGTFEVWKKALLEKWKTSEE

SEQ ID NO: 55240 - protein, 380 aa, unidentified
  source 1..380: note = Fictibacillus aquaticus
  REGION 1..380: note = tr|A0A235FAJ7|A0A235FAJ7_9BACI Queuine tRNA-ribosyltransferase OS=Fictibacillus aquaticus; OX = 2021314 GN=tgt PE=3 SV=1
MKPAVTYELIKTCKQSGARLGKVHTPHGTFETPVFMPVGTLATVKTLSPEELKEMDAGIILSNTYHLWLRPGHEIIKEAGGLHKFMNWDRAILTDSGGFQVFSLSDLRKITEEGVHFRNHLNGEKLFLSPEGAMEIQNALGSDIMMAFDECPPYPAEYDYMKASVERTSRWAERCLAGHKRPEDQALFGIVQGGEYEELRKQSAKDLVSLDFPGYAIGGLSVGEPKDVMNRVLDFTTPWLPADKPRYLMGVGSPDSLIDGAIRGVDMFDCVLPTRIARNGTCMTSEGRLVVRNAKYARDFRPLDENCDCHVCKTYSRAYIRHLVKVNETFGFRLTSYHNLYFLANLMKQVRQAIMDDRLLDFKEEFFEKYGFNKEGAKNF

SEQ ID NO: 55241 - protein, 380 aa, unidentified
  source 1..380: note = Fictibacillus arsenicus
  REGION 1..380: note = tr|A0A1B1Z6F3|A0A1B1Z6F3_9BACI Queuine tRNA-ribosyltransferase OS=Fictibacillus arsenicus; OX = 255247 GN=tgt PE=3 SV=1
MKPAVTYELIKTCKQSGARLGKVHTPHGSFETPIFMPVGTLATVKTMSPEELKELGAEIILSNTYHLWLRPGHDIVKEAGGLHTFMNWDRPILTDSGGFQVFSLSDLREIKEEGVHFRNHLSGEKLFLSPEGAMEIQNALGSDIMMAFDECPPYPAEFEYMKASVERTSRWAERCLKGHARPQDQALFGIVQGGEYEELRKQSARDLVSLDFPGYAVGGLSVGEPKDVMNRVLDFTTPHLPENKPRYLMGVGSPDSLIDGAIRGIDMFDCVLPTRIARNGTCMTSEGRLVVRNAKYARDFRPIDENCDCHVCRTYSRAYIRHLVKANETFGFRLTSYHNLYFLVNLMKQVRQAIMEDRLLDFRNEFFEKYGFNKPNARNF

SEQ ID NO: 55242 - protein, 380 aa, unidentified
  source 1..380: note = Fictibacillus arsenicus
  REGION 1..380: note = tr|A0A1V3GAB4|A0A1V3GAB4_9BACI Queuine tRNA-ribosyltransferase OS=Fictibacillus arsenicus; OX = 255247 GN=tgt PE=3 SV=1
MKPAVTYELIKTCKQSGARLGKVHTPHGSFETPIFMPVGTLATVKTMSPEELKELGAEIILSNTYHLWLRPGHDIVKEAGGLHTFMNWDRPILTDSGGFQVFSLSDLREIKEEGVHFRNHLSGEKLFLSPEGAMEIQNALGSDIMMAFDECPPYPAEYEYMKASVERTSRWAERCLKGHARPQDQALFGIVQGGEYEELRKQSARDLVSLDFPGYAVGGLSVGEPKDVMNRVLDFTTPHLPENKPRYLMGVGSPDSLIDGAIRGIDMFDCVLPTRIARNGTCMTSEGRLVVRNAKYARDFRPIDENCDCHVCRTYSRAYIRHLVKANETFGFRLTSYHNLYFLVNLMKQVRQAIMEDRLLDFRNEFFEMYGFNKPNARNF

SEQ ID NO: 55243 - protein, 380 aa, unidentified
  source 1..380: note = Fictibacillus enclensis
  REGION 1..380: note = tr|A0A0V8J9E3|A0A0V8J9E3_9BACI Queuine tRNA-ribosyltransferase OS=Fictibacillus enclensis; OX = 1017270 GN=tgt PE=3 SV=1
MTAAVRYELIKTCKQSGARLGKVHTPHGVFETPVFMPVGTLATVKTMSPEELKDLGANIILSNTYHLWLRPGHEIVREAGGLHKFMNWDRSILTDSGGFQVFSLSDLRKITEEGVHFRNHLNGEKLFLSPEGAMEIQNALGSDIMMAFDECPPYPAEYEYMKSSVERTSRWAERCLNAHERPHDQGLFGIVQGGEYEDLRRQSAEDLVSLDFPGYAVGGLSVGEPKDVMNRVLEFTTPYLPGNKPRYLMGVGSPDSLIDGAIRGIDMFDCVLPTRIARNGTLMTSEGRLVVRNAKYAKDFRPLDENCDCYTCRNYSRAYIRHLVKSNETFGFRLTSYHNLYFLVNLMEQVKQAIREDRLLDFREEFFEQYGFNKPDAKNF

SEQ ID NO: 55244 - protein, 380 aa, unidentified
  source 1..380: note = Fictibacillus macauensis
  REGION 1..380: note = tr|I8AHV9|I8AHV9_9BACI Queuine tRNA-ribosyltransferase OS=Fictibacillus macauensis ZFHKF-1 OX=1196324 GN=tgt PE=3 SV=1
MTAAVRYELIKTCKQSGARLGKVHTPHGVFETPVFMPVGTLATVKTMSPEEVKDLGANIILSNTYHLWLRPGHEIIREAGGLHKFMNWDRSILTDSGGFQVFSLSDLRKITEEGVHFRNHLSGEKLFLSPEGAMDIQNALGSDIMMAFDECPPYPASHEYMKASVERTSRWAERCLEAHQRPQDQGLFGIVQGGEYEDLRRKSAEDLVSLDFPGYAVGGLSVGEPKDVMNRVLEFTTPHLPSNKPRYLMGVGSPDSLIDGAIRGIDMFDCVLPTRIARNGTLMTSEGRLVVRNAKYARDFRPLDEKCDCYTCKNYSRAYIRHLVKSNETFGFRLTSYHNLYFLVNLMEQVKQAIREDRLLDFREEFFEAYGFNKPNARNF

SEQ ID NO: 55245 - protein, 380 aa, unidentified
  source 1..380: note = Fictibacillus phosphorivorans
  REGION 1..380: note = tr|A0A163RRT7|A0A163RRT7_9BACI Queuine tRNA-ribosyltransferase OS=Fictibacillus phosphorivorans; OX = 1221500 GN=tgt PE=3 SV=1
MKPAVTYELIKTCKQSGARLGKVHTPHGSFETPIFMPVGTLATVKTMSPEELKELGAEIILSNTYHLWLRPGHDIVKEAGGLHKFMNWDRPILTDSGGFQVFSLSDLREIKEEGVHFRNHLSGEKLFLSPEGAMEIQNALGSDIMMAFDECPPYPAEYEYMKASVERTSRWAERCLKGHARPQDQALFGIVQGGEYEELRKQSAKDLVSLDFPGYAVGGLSVGEPKDVMNRVLDFTTPHLPENKPRYLMGVGSPDSLIDGAIRGIDMFDCVLPTRIARNGTCMTSEGRLVVRNAKYARDFRPIDEKCDCHVCRTYSRAYIRHLVKANETFGFRLTSYHNLYFLVNLMKQVRQAIMEDRLLDFRNEFFEMYGFNKPNARNF

SEQ ID NO: 55246 - protein, 380 aa, unidentified
  source 1..380: note = Fictibacillus phosphorivorans
  REGION 1..380: note = tr|A0A160INR6|A0A160INR6_9BACI Queuine tRNA-ribosyltransferase OS=Fictibacillus phosphorivorans; OX = 1221500 GN=tgt PE=3 SV=1
MKPAVTYELIKTCKQSGARLGKVHTPHGTFETPIFMPVGTLATVKTMSPEELKELGAEIILSNTYHLWLRPGHDIVKEAGGLHKFMNWDRPILTDSGGFQVFSLSDLREIKEEGVHFRNHLSGEKLFLSPEGAMEIQNALGSDIMMAFDECPPYPAEYDYMKASVERTSRWAERCLKGHGRPQDQALFGIVQGGEYEELRKQSARDLVSLDFPGYAVGGLSVGEPKDVMNRVLDFTTPHLPENKPRYLMGVGSPDSLIDGAIRGIDMFDCVLPTRIARNGTCMTSEGRLVVRNAKYARDFRPIDEKCDCHVCRTYSRAYIRHLVKANETFGFRLTSYHNLYFLVNLMKQVRQAIMEDRLLDFRNEFFEMYGFNKPNARNF

SEQ ID NO: 55247 - protein, 380 aa, unidentified
  source 1..380: note = Fictibacillus solisalsi
  REGION 1..380: note = tr|A0A1G9WQY0|A0A1G9WQY0_9BACI Queuine tRNA-ribosyltransferase OS=Fictibacillus solisalsi; OX = 459525 GN=tgt PE=3 SV=1
MTAAVRYELIKTCKQSGARLGKVHTPHGVFETPVFMPVGTLATVKTMSPEELKDLGANIILSNTYHLWLRPGHEIVREAGGLHKFMNWDRSILTDSGGFQVFSLSDLRKITEEGVHFRNHLNGEKLFLSPEGAMEIQNALGSDIMMAFDECPPYPAEYEYMKSSVERTSRWAERCLNAHERPHDQGLFGIVQGGEYEDLRRQSAEDLVSLDFPGYAVGGLSVGEPKDVMNRVLEFTTPYLPDNKPRYLMGVGSPDSLIDGAIRGIDMFDCVLPTRIARNGTLMTSEGRLVVRNAKYAKDFRPLDENCDCYTCRNYSRAYIRHLVKSNETFGFRLTSYHNLYFLVNLMEQVKQAIREDRLLDFREEFFEQYGFNKPDAKNF

SEQ ID NO: 55248 - protein, 380 aa, unidentified
  source 1..380: note = Fictibacillus sp.
  REGION 1..380: note = tr|A0A4Q2HS88|A0A4Q2HS88_9BACI Queuine tRNA-ribosyltransferase OS=Fictibacillus sp. S7 OX=2212476; GN = tgt PE=3 SV=1
MTAAVRYELIKTCKQSGARLGKVHTPHGVFETPVFMPVGTLATVKTMSPEELKDLGANIILSNTYHLWLRPGHEIVREAGGLHKFMNWDRSILTDSGGFQVFSLSDLRKITEEGVHFRNHLNGEKLFLSPEGAMEIQNALGSDIMMAFDECPPYPAEYEYMKSSVERTSRWAERCLNAHERPHDQGLFGIVQGGEYEDLRRQSAEDLVSLDFPGYAVGGLSVGEPKDVMNRVLEFTTPYLPRNKPRYLMGVGSPDSLIDGAIRGIDMFDCVLPTRIARNGTLMTSEGRLVVRNAKYAKDFRPLDENCDCYTCRNYSRAYIRHLVKSNETFGFRLTSYHNLYFLVNLMEQVKQAIREDRLLDFREEFFEQYGFNKPDAKNF

SEQ ID NO: 55249 - protein, 380 aa, unidentified
  source 1..380: note = Fictibacillus sp.
  REGION 1..380: note = tr|A0A4Q7QQB9|A0A4Q7QQB9_9BACI Queuine tRNA-ribosyltransferase OS=Fictibacillus sp. BK138; OX = 2512121 GN=tgt PE=3 SV=1
MKPAVTYELIKTCKQSGARLGKVHTPHGSFETPIFMPVGTLATVKTMSPEELKELGAEIILSNTYHLWLRPGHDIVKEAGGLHKFMNWDRPILTDSGGFQVFSLSDLREIKEEGVHFRNHLSGEKLFLSPEGAMEIQNALGSDIMMAFDECPPYPAEYEYMKSSVERTSRWAERCLKGHARPQDQALFGIVQGGEYEELRKQSARDLVSLDFPGYAVGGLSVGEPKEVMNRVLDFTTPHLPENKPRYLMGVGSPDSLIDGAIRGIDMFDCVLPTRIARNGTCMTSEGRLVVRNAKYARDFRPIDENCDCHVCRTYSRAYIRHLVKANETFGFRLTSYHNLYFLVNLMKQVRQAIMEDRLLDFRNEFFEMYGFNKPNARNF

SEQ ID NO: 55250 - protein, 375 aa, unidentified
  source 1..375: note = Unknown
  REGION 1..375: note = tr|A0A2T1FYL9|A0A2T1FYL9_9CYAN Queuine tRNA-ribosyltransferase OS=filamentous cyanobacterium Phorm 6 OX=2107706 GN=tgt PE=3 SV=1
MTEDAKFSFKCQANCSHTQARAGVFATPHGIVETPKFMPVGTLANVKTLTPAHLEDAGAQMVLANTYHLHLQPGEAIVAGAGGLHKFMAWPGPILTDSGGFQVFSLSQARTISEDGVIFRSPRDGRMINLTPEKSIEIQNELGADVIMAFDECPPYPATRDEVEAATDRTYRWLKRCMQAHSRPDQVLFGIVQGGVFPDLRSRAANQLVDLDLPGYAIGGVSVGESGDLIAEIVKVTAPLLPANKPRYLMGIGTYREMALAVASGVDMFDCVIPTRLGRHGTAFVRGERWNLKNARFREDFAPLDESCPCYTCQKFSRAYLAHLARANEALGYTLLALHNVTELIRFTGRMREAILADRFTEEFAHWLTPTVDRT

SEQ ID NO: 55251 - protein, 380 aa, unidentified
  source 1..380: note = Unknown
  REGION 1..380: note = tr|A0A2P8W8I3|A0A2P8W8I3_9CYAN Queuine tRNA-ribosyltransferase OS=filamentous cyanobacterium CCT1; OX = 2107702 GN=tgt PE=3 SV=1
MTQAFSFHCDARCSHTQARAGTFNTPHGPVHTPRFMPVGTLANVKTVTPAQLATTGAQMVLSNTYHLHLQPGEDIVAEAGGLHRFMGWDGPMLTDSGGFQVFSLSQMRTITEDGVTFKSPKDGRIINIRPETSIQIQNDLGADVIMAFDECPPYPCSRETIKASTDRTWRWLQRCVEAHKRPDQALFGIVQGGVYPDLRTEAAQQLATLDLPGYAIGGVSVGEPPELIETIVKATAPCLPEHKPRYLMGVGTYKEMAQAIAAGVDLFDCVIPTRLARHGAALVDGERWNLKNQRFRRDYTPLDATCPCYTCQHFTRAYLCHLIHAKEMLAFTLISIHNITELVRFTQRIREAIVGDRFAQEFAPWLEPNSGVTAIDAPHP

SEQ ID NO: 55252 - protein, 379 aa, Filibacter sp.
  REGION 1..379: note = tr|A0A3P5XD07|A0A3P5XD07_9BACL Queuine tRNA-ribosyltransferase OS=Filibacter sp. TB-66 OX=2483811; GN = tgt PE=3 SV=1
MAAITYEHIKTCKQTGARLGIVHTPHGSFETPTFMPVGTQATVKTMSPEELKEIGSGIILSNTYHLWLRPGHDIIKEAGGLHKFMNWDRPILTDSGGFQVFSLSKFRKIEEEGVHFRHHLNGSKLFLSPEKCMDIQNALGSDIMMAFDECPPFPATYEYMKSSVERTSRWAERCLKAHARPEDQGLFGIIQGGEFEELRTQSAKDLVSLDFPGYAIGGLSVGEPKDIMNRMLEHTTPLMPANKPRYLMGVGSPDSLIDGAIRGVDMFDCVLPTRIARNGTLMTSEGRLNIKNAKFERDFGPLDEKCSCHVCKTYSRAYIRHLIRADETFGIRLTSYHNLHFLLNLMEQVRDAIRHDCLGDFREEFFESYGFNKPNAKNF

SEQ ID NO: 55253 - protein, 373 aa, Filifactor alocis
  REGION 1..373: note = tr|D6GTP4|D6GTP4_FILAD Queuine tRNA-ribosyltransferase OS=Filifactor alocis (strain ATCC 35896 / D40 B5) OX=546269 GN=tgt PE=3 SV=1
MNAIKYELIKVCKQSGARLGKLHTPHGTIDTPVFMPVGTQATIKSMTPEELKQMDAKIILSNTYHLYLRPGHHLVEKAGGLHKFMNWDRAILTDSGGFQVFSLGDLRKITEEGVTFRSHLDGSKHFLSPEKVMEIENALGADIIMSFDECTPYPADYNYTKNSMERTLRWAERGKNAHKKTDVQALFGIVQGGMYKDLRYESAMRTQEIDFPGYSIGGLSVGESKEMMRDILEHTAPLLPTDKPRYLMGVGSPDDLIDGVIRGIDMFDCVLPTRIARNGTAMTSQGKVVVRNANYAESFEPLDSHCNCYTCQNYSRAYIRHLVKTNEILGARLITTHNLHFLINLMKQIREAIAEDRLLDFRKEFFESYGYQL

SEQ ID NO: 55254 - protein, 379 aa, unidentified
  source 1..379: note = Filimonas endophytica
  REGION 1..379: note = tr|A0A561J4G4|A0A561J4G4_9BACT Queuine tRNA-ribosyltransferase OS=Filimonas endophytica; OX = 1500311 GN=tgt PE=3 SV=1
MAALSFELQGVDNNSKARAGVITTDHGTIQTPIFMPVGTAGSVKAVTQQQLYNEINAQIILGNTYHLYLRPGTEVLEAAGGLHRFNGWHRPILTDSGGYQVFSLAENRKITEQGVLFQSHIDGSRHLFTPESVMDIQRSIGADIIMAFDECPPYPSEYKYAKNSMELTHRWLDRCFARLAETPDKYGYSQNLFPIVQGSTYPDLRRASSEYIASKNAAGNAIGGLSVGEPEEMMYEYTALCCEYLPESKPRYLMGVGTPWNILEGISLGVDMFDCVMPTRNGRNGMLFTTEGVVNIRNKKWATDFSVIDPSLECETSRYYSKAYLRHLFVANEILALQIASIHNLAFYLWLVKEARAHILAGDFNNWKQNIIPVLKQRL

SEQ ID NO: 55255 - protein, 379 aa, Filimonas lacunae
  REGION 1..379: note = tr|A0A1N7R737|A0A1N7R737_9BACT Queuine tRNA-ribosyltransferase OS=Filimonas lacunae OX=477680; GN = tgt PE=3 SV=1
MAALSFELAGVDSNSKARAGVITTDHGVIQTPIFMPVGTVGSVKAVTQQQLYSEINAQIILGNTYHLYLRPGVDVLEAAGGLHHFNGWHRPILTDSGGYQVFSLAENRKITEQGVLFQSHIDGSRHLFTPESVMDIQRSIGADIIMAFDECPPYPSEYTYARKSMELTHRWLDRCFARLAETPDKYGYTQNLFPIIQGSTFPDLRRASSEYIASCNATGNAIGGLSVGEPEEMMYEYTALCCDILPADKPRYLMGVGTPWNILEGISLGVDMFDCVMPTRNGRNGMLFTTQGVVNIRNKKWATDFSVIDPSLDCETSRYYTKAYLRHLFVANEILALQIASIHNLAFYLWLVKEARLRILAGDFDSWKKNIIPVLKQRL

SEQ ID NO: 55256 - protein, 379 aa, Filimonas sp.
  REGION 1..379: note = tr|A0A2U0Z9A3|A0A2U0Z9A3_9BACT Queuine tRNA-ribosyltransferase OS=Filimonas sp. YR581 OX=2135469; GN = tgt PE=3 SV=1
MAALSFQLQGVDSNSRARAGVITTDHGTIQTPIFMPVGTVGSVKAVTQQQLYSEINAQIILGNTYHLYLRPGMEVLEAAGGLHCFNGWHRPILTDSGGYQVFSLAENRKITEQGVLFQSHIDGSRHLFTPESVMDIQRTIGADIIMAFDECPPYPSEYKYAKQSMELTHRWLDRCFTRLGETPDKYGYSQNLFPIVQGSTYPDLRRASSEYIASCNAAGNAIGGLSVGEPEEMMYEYTALCCEYLPEDKPRYLMGVGTPWNILEGISLGVDMFDCVMPTRNGRNGMLFTTQGVINIRNKKWAADFSVIDPSLDCETSRYYSKAYLRHLFVANEILALQIASIHNLAFYLWLVKEARTQIVSGNFNSWKQNIIPVLKQRL

SEQ ID NO: 55257 - protein, 379 aa, Filimonas sp.
  REGION 1..379: note = tr|A0A4Q1DCT8|A0A4Q1DCT8_9BACT Queuine tRNA-ribosyltransferase OS=Filimonas sp. TTM-71 OX=2508721; GN = tgt PE=3 SV=1
MAALSFRLETTDPHSAARAGTITTDHGVIQTPIFMPVGTVGSVKAVTQQQLKHEVQAQIILGNTYHLYLRPGTEVLEAAGGLHRFNGWDRPILTDSGGYQVFSLAEKRKLTEEGALFQSHIDGSRHMFTPENVMDIQRSIGADIIMAFDECPPYPSEYAYARKSMELTHRWLDRCIKRLSETPDKYGYTQNLFPIVQGSTYKDLRKASSEYIASRNAAGNAIGGLSVGEPEEMMYEFTALCCENLPADKPRYLMGVGTPWNILEGIALGVDMFDCVMPTRNGRNGMLFTTQGVINIRNKKWASDFSAIDEGLSNETSRFYTKAYLRHLFVANEILALQIASMHNLNFYLWLVTEARKHIMAGDFNSWKNEMVPHLKQRL

SEQ ID NO: 55258 - protein, 379 aa, Filobacillus milosensis
  REGION 1..379: note = tr|A0A4Y8ISS2|A0A4Y8ISS2_9BACI Queuine tRNA-ribosyltransferase OS=Filobacillus milosensis; OX = 94137 GN=tgt PE=3 SV=1
MTAVSYELIKTCKQTGARLGRVTTPHGSFETPVFMPVGTLATVKTMAPEELESMGANIILSNTYHLWLRPGEDIVEEAGGLHSFMNWGGSILTDSGGFQVFSLSERRKIEEDGVHFRHHLSGEKLFLSPEGAMRIQNSLGSDIMMAFDECPPYPATHEYMKASVERTSRWAERCLEAHQKPDQQGLFGIVQGGEYEELRKQSAKDLISMDFPGYAIGGLSVGEPKDVMNRVLDFTTPLLPEDKPRYLMGVGSPDSLVDGAIRGVDMFDCVLPTRIARNGTCMTSNGRLVVRNAKFAKDFTPLDENCDCYTCRNYTKAYIRHLIKTNETLGIRLTTYHNLYFLIKLMENVREAIREDRLGDFRDQFFDQYGFNKPNAKNF

SEQ ID NO: 55259 - protein, 383 aa, Filomicrobium sp.
  REGION 1..383: note = tr|A0A2D7FCX3|A0A2D7FCX3_9RHIZ Queuine tRNA-ribosyltransferase OS=Filomicrobium sp. OX=2024831; GN = tgt PE=3 SV=1
  VARIANT 7: note = Xaa can be any naturally occurring amino acid
  VARIANT 12: note = Xaa can be any naturally occurring amino acid
  VARIANT 33: note = Xaa can be any naturally occurring amino acid
  VARIANT 48: note = Xaa can be any naturally occurring amino acid
  VARIANT 177..178: note = Xaa can be any naturally occurring amino acid
MTEAFSXEVSHXDGEARTGAISTPRGKIRTPAXMPVGTAATVKAVYVXQVKDAGADILLGNTYHLMLRPGAERVARLGGLHDFMRWDKPILTDSGGFQVMSLSKLRKLTEQGVEFQSHLDGSRHMLTPERSIEIQCLLGADIQMQLDECIELPSSFENAERAMELSVRWAERSKNAXXQQRRHGGAGPGQALFGIVQGGTDAGLRRRSAEALVGLDLPGYAIGGLAVGEGHDLMVATISETVPHLPTTKPRYLMGVGTPADLMEAVARGIDMFDCVMPTRSGRHGQAFTWHGRVNLRNARHGDDPSPLDPNSQCPAARDYSRAYLHHLHRSGEYLGAMLTSWSNTWFYQELMQAMRDAIAEGRLAAFIAEHKERLSSPEIPAD

SEQ ID NO: 55260 - protein, 369 aa, unidentified
  source 1..369: note = Fimbriiglobus ruber
  REGION 1..369: note = tr|A0A225DV69|A0A225DV69_9BACT Queuine tRNA-ribosyltransferase OS=Fimbriiglobus ruber OX=1908690; GN = tgt PE=3 SV=1
MSITFQVHRRDGAARTGSLATPHGVVETPMFMPVGTQATVKGLTPDQIAATGATIILGNTYHLTLRPGDELIAEMGGLHRFMCWDKPILTDSGGFQVFSLTSQRKITDAGAKFRSHIDGSPLELTPEKAVEIQQNLGSDIAMVLDECPPGDAPPDAMRDAVRRTILWAERCKRHHTRPDQSLFAIVQGGTDLDLRAECARELVAMDFPGYALGGFSVGEAPAAMHVALPTCAALLPDHKPRYLMGVGRPEDLLEGVAAGIDLFDCVMPTRSGRNALAFTYDGPLRLRNARHRRDPAPLESGCPCYTCGHFSRAYLHHLFAADEMLGPTLLSLHNVAFYLRLMADARAAIVDGRFGLFRDRCLARWHPAP

SEQ ID NO: 55261 - protein, 332 aa, unidentified
  source 1..332: note = Fimbriimonas ginsengisoli
  REGION 1..332: note = tr|A0A068NS89|A0A068NS89_9BACT Queuine tRNA-ribosyltransferase OS=Fimbriimonas ginsengisoli Gsoil 348 OX=661478 GN=tgt PE=3 SV=1
MPVGTQGTVKTVGSEDIEGLGFEQVLSNTYHLSLRPGADLVEQLGGLHRFMSWNGAILTDSGGYQVMSLSNTRKIDDQGVTFRSHLDGSLHYLPPERSIEIQGQLGVDISMCLDECPPYPCTRDEAANAMRRTHLWAPRNLAVRRETQAVFGIVQGGVHEDLRRESAEFISSLPFDGVAIGGVSVGEPTEMQYPVVEFTAPLLPADKARYLMGVGHPKDILHGVASGIDMFDCVLPTRMARHHALYTLDGRVNIRAKRWADHNGPVDEGSVFPQTERYSAAYMRHLFVAGEALGARLATLHNLAFYARLMREIREAIEQGTWPELAARYAQA

SEQ ID NO: 55262 - protein, 379 aa, Finegoldia magna
  REGION 1..379: note = tr|B0S1J1|B0S1J1_FINM2 Queuine tRNA-ribosyltransferase OS=Finegoldia magna (strain ATCC 29328) OX=334413 GN=tgt PE=3 SV=1
MFKFTLEKKSSQCKARTGTIETNHGVIKTPVFMPVGTRATVKAMNNDELKSIGSQIILSNTYHLYLKPGQEIIRKADGLHKFMNWDRPILTDSGGFQVFSLSKTRKITEEGVQFRSHIDGSKHFISPEKSMEIQNDLGSDIMMAFDECVPYPASYEYTEDSMKRTLRWLKRCKDYHKNIDRQNLFGIIQGGMYKDLREYSAKNTIDFDLPGYAIGGLSVGEPRDLMIELLDFTTDFMPENKPRYLMGVGTPDYLFEAVEHGVDMCDCVLPTRIARNGTALTSKGKLVVKNAKYKDDFAPLDENCDCYACKNHTRAYIRHLLNVDEILGARLLSIHNLRFLIKMMENIRKSIEEDRYLEFKDEFYRNYGYDYHQKCDNIK

SEQ ID NO: 55263 - protein, 379 aa, Finegoldia magna
  REGION 1..379: note = tr|A0A233VIZ2|A0A233VIZ2_FINMA Queuine tRNA-ribosyltransferase OS=Finegoldia magna OX=1260 GN=tgt; PE = 3 SV=1
MFKFTLEKKSSQCKARTGTIETNHGVIKTPVFMPVGTRATVKAMNNDELKSIGSQIILSNTYHLYLKPGQEIIRKADGLHKFMNWDRPILTDSGGFQVFSLSKTRKITEEGVQFRSHIDGSKHFISPEKSMEIQNDLGSDIMMAFDECVPYPASYEYTEDSMKRTLRWLKRCKDYHKNTDKQNLFGIIQGGMYKDLREYSAKNTIDFDLPGYAIGGLSVGEPRDLMIDLLDFTTDFMPENKPRYLMGVGTPDYLFEAVEHGVDMCDCVLPTRIARNGTALTSKGKLVVKNAKYKDDFSALDDNCDCYACKNHTRAYIRHLLNVDEILGARLLSIHNLRFLIKLMENIRKSIEEDRYLEFKDEFYRNYGYDYHQKCDNIK

SEQ ID NO: 55264 - protein, 373 aa, unidentified
  source 1..373: note = Firmicutes bacterium
  REGION 1..373: note = tr|R6ERJ7|R6ERJ7_9FIRM Queuine tRNA-ribosyltransferase OS=Firmicutes bacterium CAG:145; OX = 1263005 GN=tgt PE=3 SV=1
MKHAVTYELIKKDKKTGARRGVLHTPHGDIQTPVFMPVGTQATVKAMKPEEVKAMGADIILSNTYHLYLRPGHELVKEAGGLHKFMNWDRAILTDSGGFQVFSLGPLRKITEEGVSFRSHIDGSAHFITPEKSIEIQNALGSDIMMAFDECAPYPADRSYVKNSLERTTRWLRRCRDFHKDWERQSLFGIMQGGMYKDLRRQSAEEIVDLDLPGYAIGGLSVGEPKELMLEVLDDCVEYLPGHKARYLMGVGTPDYLFEGVQRGVDMFDCVLPTRIARHGLAMTSRGKVNIKNAKYEKDFEPLDSECDCYTCRNYSKAYLRHLFKSGEMLSAMLLSNHNLHFLIKMMENIRKSIEEDRFGEYKEEFYGKYGEF

SEQ ID NO: 55265 - protein, 377 aa, unidentified
  source 1..377: note = Firmicutes bacterium
  REGION 1..377: note = tr|A0A416P070|A0A416P070_9FIRM Queuine tRNA-ribosyltransferase OS=Firmicutes bacterium AF22-6AC; OX = 2292887 GN=tgt PE=3 SV=1
MYRLIKQEGRAKRGEFTTVHGVIQTPVFMNVGTVAAIKGAVSTADLEQIGTQVELSNTYHLHVRPGDRIIKQMGGLHKFMSWNKPILTDSGGFQVFSLAGLRKIKEEGVTFRSHIDGHKIFMGPEESMQIQSNLGSTIAMAFDECAPSKADRMYVQNSVERTTRWLQRCQVEMKRLNSLEDTVNPHQLLFGINQGAIYEDIRIEHAKRIAEMDLDGYAVGGLAVGETHEEMYHILDEVVPYLPVNKPTYLMGVGTPANILEGVERGVDFFDCVYPTRNGRHGHLYTNHGKINLFNAKYELDSRPIEEGCGCPACQRYSRAYIRHLLKAKEMLGMRLCVLHNLYFYNTMMTEIRDALDAGRFAEYKRHKLDSMATPLE

SEQ ID NO: 55266 - protein, 371 aa, Fischerella major
  REGION 1..371: note = tr|A0A1U7H555|A0A1U7H555_9CYAN Queuine tRNA-ribosyltransferase OS=Fischerella major NIES-592; OX = 210994 GN=tgt PE=3 SV=1
MSANFSFQCLASCSHTKARAGLFYTPHGVVETPRFMPVGTLATVKTLTPAQLKETGAQMVLSNTYHLHLQPGEAIVAGGGGLHKFMGWSGPMLTDSGGFQVFSLSEMRKISEEGVTFRSPHDGQIIKFTPEKSIEIQNTLGADVIMAFDECPPATASRQEVEAATERTYRWLLRCIEAHQRPQEQALFGIVQGGVHLDLRAQAAEALMKLDLPGYAIGGVSVGEEPELIHQVVQVTAPLLPYHKPRYLMGVGTYQEMVVAIASGVDLFDCVIPTRWARHGTAMVQGDRWNLKNAKFREDFTPLDETCPCYTCQNFTRAYISHLVRSQEILAYTLLSIHNITELIRFTQKIREAILNDTFVAEFGEWLTPRE

SEQ ID NO: 55267 - protein, 369 aa, unidentified
  source 1..369: note = Fischerella muscicola
  REGION 1..369: note = tr|A0A2N6K3V7|A0A2N6K3V7_FISMU Queuine tRNA-ribosyltransferase OS=Fischerella muscicola CCMEE 5323 OX=2019572 GN=tgt PE=3 SV=1
MSSTFSFQCLACCSQTKARAGVFYTPHGVVETPRFMPVGTLATVKTLTPAQLKETGAQMVLSNTYHLHLQPGEAIVAGGGGLHKFMGWSGPMLTDSGGFQVFSLSEMRKISEEGVTFRSPHDGQIIKFTPEKSIEIQNTLGADVIMAFDECPPATASRQEVEAATERTYRWLLRCIEAHQRSQDQALFGIVQGGVYLDLRCQAAEALTKLDLPGYAIGGVSVGEEPELIHQVVQATAPLLPHHKPRYLMGVGTYQEMVVAIASGVDLFDCVIPTRWARHGTAMVGGDRWNLKNAKFREDFTPLDETCPCYTCQNFTRAYISHLVRSQEILAYTLLSIHNITELIRFTQKIREAILNDTFVAEFGKWLGN

SEQ ID NO: 55268 - protein, 378 aa, Fischerella sp.
  REGION 1..378: note = tr|A0A1Z4TTL5|A0A1Z4TTL5_9CYAN Queuine tRNA-ribosyltransferase OS=Fischerella sp. NIES-4106; OX = 2005456 GN=tgt PE=3 SV=1
MTNDQQNTLLTTNFSFQCLAQCSQSKARAGVFYTPHGVVETPRFMPVGTLATVKTLTPAQLKETGAQMVLSNTYHLHLQPGEAIVSGGGGLHKFMGWNGPMLTDSGGFQVFSLSEMRKISEEGVTFRSPHDGQIIKFTPEKSIEIQNTLGADVIMAFDECPPATANRQEVEAATERTYRWLLRCIEAHQGHKEQALFGIVQGGVYLDLRAQAAEALHKLDLPGYAIGGVSVGEEPELIHQVVQVTAPLLPYHKPRYLMGVGTYQEMVIAIASGIDLFDCVIPTRWARHGTAMVQGDRWNLKNAKFREDFTPLDETCPCYTCQNFTRAYISHLVRSQEILAYTLLSIHNITELIHFTQKIRKAILNNTFAIEFGKWLKN

SEQ ID NO: 55269 - protein, 336 aa, Fischerella sp.
  REGION 1..336: note = tr|A0A0S3TTA1|A0A0S3TTA1_9CYAN Queuine tRNA-ribosyltransferase OS=Fischerella sp. NIES-3754; OX = 1752063 GN=tgt PE=3 SV=1
MPVGTLATVKTLTPAQLKETGAQMVLSNTYHLHLQPGEAIVAGGGGLHKFMGWSGPMLTDSGGFQVFSLSEMRKISEEGVTFRSPHDGQIIKFTPEKSIEIQNTLGADVIMAFDECPPATASRQEVEAATERTYRWLLRCIEAHQRPQEQALFGIVQGGVHLDLRAQAAEALMKLDLPGYAIGGVSVGEEPELIHQVVQVTAPLLPYHKPRYLMGVGTYQEMVVAIASGVDLFDCVIPTRWARHGTAMVQGDRWNLKNAKFREDFTPLDETCPCYTCQNFTRAYISHLVRSQEILAYTLLSIHNITELIRFTQKIREAILNDTFVAEFGEWLTPRE

SEQ ID NO: 55270 - protein, 285 aa, Fischerella thermalis
  REGION 1..285: note = tr|A0A2N6LTQ1|A0A2N6LTQ1_9CYAN Queuine tRNA-ribosyltransferase (Fragment) OS=Fischerella thermalis CCMEE 5319 OX=2019665 GN=tgt PE=3 SV=1
DSGGYQVFSLAENRKITEEGARFKSHIDGSYHMFTPEGVMDIQRSIGADVVMAFDECPPWPCDERYVEESMHLTHRWLERCISRFDETPSLYGYEQSLFGIVQGGTVSRLRKESAEFVASKNLSGNAIGGLSVGEPAELMYEMTDLVTDILPADRPRYLMGVGTPENILNSIALGVDMFDCVMPTRNGRNGMLFTTEGIINIKNRRWADDFSPIDPAGISRVDFQYSKAYLRHLFVADEFLGRQIASVHNLAFYLWLVREARRHIVQGDFVEWKNEILPVISRRL

SEQ ID NO: 55271 - protein, 371 aa, Fischerella thermalis
  REGION 1..371: note = tr|A0A2N6M463|A0A2N6M463_9CYAN Queuine tRNA-ribosyltransferase OS=Fischerella thermalis CCMEE 5205 OX=2019671 GN=tgt PE=3 SV=1
MSANFSFQCLASCSHTKARAGVFYTPHGVVETPRFMPVGTLATVKTLTPAQLKETGAQMVLSNTYHLHLQPGEAIVAGGGGLHKFMGWSGPMLTDSGGFQVFSLSEMRKISEEGVTFRSPHDGQIIKFTPEKSIEIQNTLGADVIMAFDECPPATASRQEVEAATERTHRWLLRCIEAHQRPQEQALFGIVQGGVHLDLRAQAAEALKKLDLPGYAIGGVSVGEEPELIHQVVQVTAPLLPYHKPRYLMGVGTYQEMVVAIASGVDLFDCVIPTRWARHGTAMVQGDRWNLKSAKFREDFTPLDETCPCYTCQNFTRAYISHLVRSQEILAYTLLSIHNITELIRFTQKIREAILNDTFVAEFGKWLTLRE

SEQ ID NO: 55272 - protein, 376 aa, unidentified
  source 1..376: note = Flagellimonas aquimarina
  REGION 1..376: note = tr|A0A316KUH0|A0A316KUH0_9FLAO Queuine tRNA-ribosyltransferase OS=Flagellimonas aquimarina; OX = 2201895 GN=tgt PE=3 SV=1
MKFTLEKKDNLSKARAGKMTTDHGTIQTPIFMPVGTVASVKGVHQRELKDEINPDIILGNTYHLYLRPGTKILEQAGGLHKFMGWDRNILTDSGGYQVYSLSANRKINEEGVNFKSHIDGSNHFFTPENVMEIQRTIGADIIMAFDECTPYPCDYNYAKRSMHMTHRWLERCISHLEKLPYKYGYSQTFFPIVQGSTYKDLRKQSAEYIASVGAEGNAIGGLSVGEPAEEMYEMSEIVCDILPEDKPRYLMGVGTPINILENIALGVDMFDCVMPTRNARNGMLFTAHGTINIKNKKWEDDFSPIDDMGITFVDTEYSKAYLRHLFAANEYLGKQIATIHNLGFYLWLVRTARERILAGDFLEWKTKMVQQMDKRL

SEQ ID NO: 55273 - protein, 376 aa, Flagellimonas eckloniae
  REGION 1..376: note = tr|A0A0Q1DKV0|A0A0Q1DKV0_9FLAO Queuine tRNA-ribosyltransferase OS=Flagellimonas eckloniae; OX = 346185 GN=tgt PE=3 SV=1
MEFTLKQKDSKSKARAGELSTDHGTIQTPIFMPVGTVASVKGVHQRELKDEINPDVILGNTYHLYLRPGIEILEQAGGLHKFMGWDRNILTDSGGYQVYSLSGNRKIKEEGVNFKSHIDGSSHFFTPENVMEIQRVIGADIIMAFDECTPYPCEYNYAKRSMHMTHRWLDRCISHLEKLPFKYGYSQSFFPIVQGSTYKDLRKQSAEYIASVGAEGNAIGGLSVGEPAEEMYEMAEIVCDILPEDKPRYLMGVGTPINILENIALGVDMFDCVMPTRNARNGMLFTAHGTINIKNKKWEADFSPIDEMGITFVDTEYSKAYLRHLFAANEYLGKQIATIHNLGFYLWLVRTARERILAGDFQEWKTNMVQQMDKRL

SEQ ID NO: 55274 - protein, 376 aa, unidentified
  source 1..376: note = Flagellimonas flava
  REGION 1..376: note = tr|A0A1M5PRE5|A0A1M5PRE5_9FLAO Queuine tRNA-ribosyltransferase OS=Flagellimonas flava OX=570519; GN = tgt PE=3 SV=1
MKFTLEHKDNQSKARAGTLTLDHSTIQTPIFMPVGTVASVKGVHQRELREEINPDIILGNTYHLYLRPKTAILEEAGGLHKFMGWDRNILTDSGGYQVYSLSNNRKIKEEGVKFKSHIDGSNHFFTPENVMEIQRTIGADIIMAFDECTPYPCDYNYAKRSMHMTHRWLDRCINHLEKLPFKYGYSQSFFPIVQGSTYKDLRQQSAEYIASVGAEGNAIGGLSVGEPAEEMYAMAELVCDILPEDKPRYLMGVGTPINILENIALGVDMFDCVMPTRNARNGMLFTAHGTINIKNKKWEADFSPIDEMGITFVDTEYSKAYLRHLFAANEYLGKQIATIHNLGFYLWLVRTARERILVGDFQEWKTKMVQQMDKRL

SEQ ID NO: 55275 - protein, 376 aa, unidentified
  source 1..376: note = Flagellimonas maritima
  REGION 1..376: note = tr|A0A2Z4LV38|A0A2Z4LV38_9FLAO Queuine tRNA-ribosyltransferase OS=Flagellimonas maritima; OX = 1383885 GN=tgt PE=3 SV=1
MKFTLKQTDTKSKARAGELSTDHGTIKTPIFMPVGTVASVKGVHQRELKDDIDPDIILGNTYHLYLRPGAKILEKAGGLHKFMGWDRNILTDSGGYQVYSLSANRKINEEGVNFKSHIDGSSHFFTPENVMEIQRTIGADIIMAFDECTPYPCEYNYAKRSMHMTHRWLDRCITHLEKLPYKYGYSQSFFPIVQGSTYKDLRAQSAEYIASVGAEGNAIGGLSVGEPAEEMYEMAEIVCGILPEDKPRYLMGVGTPINILENIALGVDMFDCVMPTRNARNGMLFTAHGTINIKNKKWEDDFSPIDEMGITFVDTEYSKAYLRHLFAANEYLGKQIATIHNLGFYLWLVRSARERILAGDFQEWKIKMVKQMDKRL

SEQ ID NO: 55276 - protein, 376 aa, unidentified
  source 1..376: note = Flagellimonas pacifica
  REGION 1..376: note = tr|A0A285MZB7|A0A285MZB7_9FLAO Queuine tRNA-ribosyltransferase OS=Flagellimonas pacifica; OX = 1247520 GN=tgt PE=3 SV=1
MKFTLLQKDDKSKARAGELMTDHGKIETPIFMPVGTVASVKGVHQRELKDEINPDVILGNTYHLYLRPGTGILEHAGGLHKFMGWDRNILTDSGGYQVYSLSNNRKIKEEGVNFKSHIDGSRHFFTPENVMEIQRTIGADIIMAFDECTPYPCDYNYAKRSMHMTHRWLDRCMAHLDKLPFKYGYSQSFFPIVQGSTYKDLRKQSAEYIASVGAEGNAIGGLSVGEPAEEMYEMAEIVCDILPEEKPRYLMGVGTPINILENIALGVDMFDCVMPTRNARNGMLFTSHGTINIKNKKWEDDFSPIDEMGITFVDTEYSKAYLRHLFAANEYLGKQIATIHNLGFYLWLVRTARERILAGDFQEWKTKMVQQMDKRL

SEQ ID NO: 55277 - protein, 376 aa, Flagellimonas sp.
  REGION 1..376: note = tr|A0A5C8V0I1|A0A5C8V0I1_9FLAO Queuine tRNA-ribosyltransferase OS=Flagellimonas sp. 176CP5-101; OX = 2603628 GN=tgt PE=3 SV=1
MEFTLAHKDTQSKARAGELSTDHGVIQTPIFMPVGTVASVKSVHQRELKDDINPDVILGNTYHLYLRPGTGILEQAGGLHKFMGWDRNILTDSGGYQVYSLSGNRKINEEGVNFKSHIDGSSHFFTPENVMEIQRTIGADIIMAFDECTPYPCDYDYAKRSMHMTHRWLDRCITHLEKLPFKYDYAQSFFPIVQGSTYKDLRKQSAEYIASVGAEGNAIGGLSVGEPAEEMYEMAEIVCDILPEDKPRYLMGVGTPINILENIALGVDMFDCVMPTRNARNGMLFTAHGTINIKNKKWEADFSPIDEMGITFVDTEYSKAYLRHLFVAKEYLGKQIATIHNLGFYLWLVRTARERILAGDFQEWKTKMVKQMDKRL

SEQ ID NO: 55278 - protein, 378 aa, Flammeovirga kamogawensis
  REGION 1..378: note = tr|A0A553GHR9|A0A553GHR9_9BACT Queuine tRNA-ribosyltransferase OS=Flammeovirga kamogawensis; OX = 373891 GN=tgt PE=3 SV=1
MGLKFEVKHKDPQTKARAGKITTDHGEIQTPIFMPVGTAGTVKAVHQRELKEDINADIILGNTYHLYLRPGTEILEKAGGLHKFNGWDRPILTDSGGYQVFSLAQTRKIKEEGVTFRSHIDGSKHLFTPERVMDIQRSIGADIIMAFDECPPYPSDYTYAKNSMHLTHRWLQRCVDRLDETVPLYGHHQALFPIVQGSTYKDLRTQSAEKIASFEREGNAIGGLSVGEPAEMMYEFTELCCDILPEDKPRYLMGVGTPANILENIALGVDMLDCVMPTRQARHGHVFTTQGIMNLKNKKWEDDFTPIDQELGGYVSTFYSKGYLRHMFKANEALAGMVASVHNLTFYLWLVREARQHIIDGDFREWKNAIIPTLMQRL

SEQ ID NO: 55279 - protein, 378 aa, Flammeovirga pacifica
  REGION 1..378: note = tr|A0A1S1Z4Y7|A0A1S1Z4Y7_9BACT Queuine tRNA-ribosyltransferase OS=Flammeovirga pacifica OX=915059; GN = tgt PE=3 SV=1
MGLTFELSHKDPQTKARAGKITTEHGEIKTPIFMPVGTAGTVKAVHQRELKEDINAEIILGNTYHLYLRPGVEILEKAGGLHKFNGWDRPILTDSGGYQVFSLANNRKIKEEGVTFRSHIDGSKHLFTPEKVMDIERTIGADIIMAFDECPPYPSDYTYAKNSMHLTHRWLQRCVDRLDETEPKYGYHQALFPIVQGSTYRDLRTQSAEKIASFECEGNAIGGLSVGEPAEMMYEHTELVCSILPEDKPRYLMGVGTPANILENIALGVDMFDCVMPTRQARHGMVFTTQGIMNLKNKKWEDDYTPLDAQLGGYASTFYSKAYLRHLFKAGEALGGMIASVHNLTFYLWLVREARQHIIDGDFREWKNAIIPTLMQRL

SEQ ID NO: 55280 - protein, 378 aa, Flammeovirga sp.
  REGION 1..378: note = tr|A0A1B1FNM7|A0A1B1FNM7_9BACT Queuine tRNA-ribosyltransferase OS=Flammeovirga sp. MY04; OX = 1191459 GN=tgt PE=3 SV=1
MGLTFELSHKDPQTKARAGKITTEHGEIKTPIFMPVGTAGTVKAVHQRELKEDINAEIILGNTYHLYLRPGMEILEKAGGLHKFNGWDRPILTDSGGYQVFSLANNRKIKEEGVTFRSHIDGSKHLFTPEKVMDIERTIGADIIMAFDECPPYPSDYTYAKNSMHLTHRWLQRCVDRLDETEPKYGYHQALFPIVQGSTYRDLRTQSAETIASFECEGNAIGGLSVGEPAEMMYEHTELVCSILPEDKPRYLMGVGTPANILENIALGVDMFDCVMPTRQARHGMVFTTQGIMNLKNKKWEDDYSPLDAQLGGYASTFYTKAYMRHLFKAGEALGGMIASVHNLTFYLWLVREARQHIIDGDFREWKNAIIPTLMQRL

SEQ ID NO: 55281 - protein, 378 aa, Flammeovirga sp.
  REGION 1..378: note = tr|A0A150AKB5|A0A150AKB5_9BACT Queuine tRNA-ribosyltransferase OS=Flammeovirga sp. SJP92; OX = 1775430 GN=tgt PE=3 SV=1
MALTFEIKQKDPQTKARAGKITTAHGEILTPIFMPVGTAGTVKAVHQRELKEDINAEIILGNTYHLYLRPGTEILEKAGGLHKFNGWDRPILTDSGGYQVFSLANNRKIKEEGVTFRSHIDGSKHLFTPEKVMDIERSIGADIIMAFDECPPYPSDYTYAKNSMHMTHRWLQRCVDRLAETEPLYGYHQSLFPIVQGSTYKDLRTQSAETIASFEREGNAIGGLSVGEPAEMMYEFTELCCDILPEDKPRYLMGVGTPANILENIALGVDMFDCVMPTRQARHGHVFTTQGIMNLKNKKWEDDFTPLDAELGGYVSTFYSKGYLRHMFKANEALAGMVASVHNLTFYLWLVREARQHILDGDFREWKNAITPKLMQRL

SEQ ID NO: 55282 - protein, 381 aa, unidentified
  source 1..381: note = Flammeovirgaceae bacterium
  REGION 1..381: note = tr|A0A1Z9SDW5|A0A1Z9SDW5_9BACT Queuine tRNA-ribosyltransferase OS=Flammeovirgaceae bacterium TMED262 OX=1986699 GN=tgt PE=3 SV=1
  VARIANT 74..75: note = Xaa can be any naturally occurring amino acid
  VARIANT 219: note = Xaa can be any naturally occurring amino acid
  VARIANT 237: note = Xaa can be any naturally occurring amino acid
  VARIANT 281: note = Xaa can be any naturally occurring amino acid
  VARIANT 307: note = Xaa can be any naturally occurring amino acid
  VARIANT 327: note = Xaa can be any naturally occurring amino acid
  VARIANT 357: note = Xaa can be any naturally occurring amino acid
  VARIANT 376: note = Xaa can be any naturally occurring amino acid
MFFKLLNTSSKTNARCGKIFTDRGTISTPIFMPVGTLGSVKGVHQHELKNEIKSQIILSNTYHLYLRPGTEVLXXAGGLHKFINWDKPILTDSGGYQVFSLSNNVKIFEKGVNFNSHIDGSKHLFTPESVIHTQREIGSDICMVLDECIKYPCEYSYAKESLELTHRWLDRSIEEFKISNSLYNRNQFLFPIVQGSTFKDLRIKSAEYVSKKNLPGNAXGGLSVGEPKEVIYENVDXVCNILPSDKPRYLMGVGTPENILECISLGVDMFDCVMPTRNGRXGMLFTQNGTINIKNKKWEKDFSPIDXELGLLSSLYSKSYLRHLIIXKEMLGSQIASIHNLSFYIWLVKEARKHIIXDDFHIWKTKILNKVSNRLXSEDFK

SEQ ID NO: 55283 - protein, 375 aa, unidentified
  source 1..375: note = Flammeovirgaceae bacterium
  REGION 1..375: note = tr|A0A3R7V542|A0A3R7V542_9BACT Queuine tRNA-ribosyltransferase OS=Flammeovirgaceae bacterium TMED290 OX=1986700 GN=tgt PE=3 SV=1
MFFKLTHRSSKTNARSGKIFTDRGTISTPIFMPVGTLGTVKGVHQHELENDIQAEIILSNTYHLYLRPGLDVINSAGGLHKFINWNKPILTDSGGYQVFSLSKNVKIMDEGVQFYSHIDGSKHLFTPESVIKTQRKIGSDICMVLDECLKYPCDYSYASQSLDLTHIWLERSIEEFNRTENLYEKKQFLFPIVQGSTFKDLRTKSAEFIGNKNMVGNAIGGLSVGEPKDIIYENVDLVCNILPKDKPRYLMGVGTPENILECISMGVDMFDCVMPSRNGRNGMIFTKNGIINIKNKKWEKDFSSIDEDLGIISSNYSKSYLRHLIINKEMLGAQIATIHNLSFYIWLVKKARERIISDDFHIWKERIIKRLIKRL

SEQ ID NO: 55284 - protein, 379 aa, unidentified
  source 1..379: note = Flaviaesturariibacter sp.
  REGION 1..379: note = tr|A0A4R1BKC7|A0A4R1BKC7_9BACT Queuine tRNA-ribosyltransferase OS=Flaviaesturariibacter sp. 17J68-12 OX=2502780 GN=tgt PE=3 SV=1
MAALSFQLHKTDDQSSARAGSITTDHGVIETPIFMPVGTVGSVKALSQQQLKTEVDPHIILGNTYHLYLRPGMETMEAAGGLHQFINWERPILTDSGGYQVFSLAANRKITEEGVTFRSHIDGSKHLFSPERVMDIERTIGADIMMAFDECPPANSEYRYALDSMKLTHRWLDRCWTRFNDTPDKYGHTQNLFPIVQGAVFHDLRKASCEYIASKGATGNAIGGLSVGEPEPVMYEIAALCCEHLPKDKPRYLMGVGTPWNILENIALGVDMFDCVMPTRNGRNAMLFTTQGVINIDNKKWERDFSPIDPGLNCETSQYYSKAYLRHLFKAGEYLSLSIASIQNLAFYLWLVREARKHILAGDFKSWKDEMVPRLKTRL

SEQ ID NO: 55285 - protein, 379 aa, unidentified
  source 1..379: note = Flaviaesturariibacter sp.
  REGION 1..379: note = tr|A0A4R4DU64|A0A4R4DU64_9BACT Queuine tRNA-ribosyltransferase OS=Flaviaesturariibacter sp. 17J68-15 OX=2545761 GN=tgt PE=3 SV=1
MAALSFQLHQTDAQSAARAGTITTDHGVIETPIFMPVGTVGSVKALSQQQLKTEVDPRIILGNTYHLYLRPGMETMEAAGGLHQFINWDRPMLTDSGGYQVFSLAANRKITEEGVTFRSHIDGSKHLFTPESVMDVERTIGADIMMAFDECPPANCEYRYALDSMNRTHRWLDRCFARFNDTPDKYGHTQNLFPIVQGAVFHDLRNASCDYIAAKGATGNAIGGLSVGEPEAVMYEIAALCCERLPKDKPRYLMGVGTPWNILENIALGVDMFDCVMPTRNGRNAMLFTTRGVINIDNKKWERDFSPIDPGLDCETSQYYTKAYLRHLFKAGEYLALTIASIQNLAFYLWLVREARKHILAGDFLSWKNELVPVLKTRL

SEQ ID NO: 55286 - protein, 422 aa, unidentified
  source 1..422: note = Flaviflexus salsibiostraticola
  REGION 1..422: note = tr|A0A3Q8WUP5|A0A3Q8WUP5_9ACTO Queuine tRNA-ribosyltransferase OS=Flaviflexus salsibiostraticola; OX = 1282737 GN=tgt PE=3 SV=1
MTFTVGARLDGLGRTGTMTTPHGTVETPAFIPVGTKATVKAVLPETVKDLGAQAVLANAYHLFLQPGSDIVDAAGGLGRFMNWPGPTFTDSGGFQVMSLGTGYQKVLSEQFAGTGQKGRDGSDLEVAENKIRRAHVDDDGVTFRSHLDGTKHRFTAEVSMRIQHELGADIIFAFDELTTLLNSRAYQVEALERTRLWAERCLIAHRQLTEERADKPYQQLFGVIQGAQYEDLRRQAARDLGSMEIDGQSFDGFGIGGALEKENLGTIVGWVSEELPENRARHLLGISEPDDLFAAVEAGADTFDCVNPSRVARNAAIYSPDGRFNITRSEFRRNFTPLVEGCGCYTCTHYTKAYLHHTFKAKEMISSTLATIHNEYYTVQLVDSIRRSIIDGSFDELKEETLGRFYARTATRGVRSVAGTPR

SEQ ID NO: 55287 - protein, 414 aa, unidentified
  source 1..414: note = Flaviflexus sp.
  REGION 1..414: note = tr|A0A3S9PZ79|A0A3S9PZ79_9ACTO Queuine tRNA-ribosyltransferase OS=Flaviflexus sp. H23T48; OX = 2496867 GN=tgt PE=3 SV=1
MTFTVSSRLDGVQGRTGTIHTPHGDVRTPAFIPVGTKATVKAVLPESIKDIGAQAVLANAYHLFLQPGSDIVDEAGGLGKFMNWDGPTYTDSGGFQVMSLGTGYKKVLSEQFAGTGKKGRDGSDLEVAENKIRRAHIDDDGVTFRSHLDGTKLRFTSEVSMRIQHELGADIIFAFDELTTLLNSREYQEEALERTRLWAERCLVAHKQLTIDRADKPYQQLFGVIQGAQYEDLRRKAARDVGSMEVDGQSFDGFGIGGALEKENLGTIVEWVSEELPENKARHLLGISEPDDLFAAIEAGADTFDCVNPSRVARNAAIYSPDGRFNITRAEFKRNFSPLVEGCDCYTCTHYTKAYLHHTFKAKEMIANTLATIHNEHYTVKLVDSIRDSIDNGTFAELKEETLGRFYAKKANGS

SEQ ID NO: 55288 - protein, 379 aa, Flavihumibacter petaseus
  REGION 1..379: note = tr|A0A0E9MUV6|A0A0E9MUV6_9BACT Queuine tRNA-ribosyltransferase OS=Flavihumibacter petaseus NBRC 106054 OX=1220578 GN=tgt PE=3 SV=1
MPVLKFEMTHRDPGSSARRGTIYTDHGIVETPIFMPVGTVGSVKAVSQQQLQHDVQAEIILGNTYHLYLRPGTEVLEAAGGLHRFMGWNKPILTDSGGYQVFSLAANRKLTEEGALFQSHIDGSKHLFTAENVMDIQRSIGADIIMAFDECPPYPSDYGYAKKSMELTHRWVDRCIARLDDTPDLYGYTQNLFPIVQGSTFPDLRKASCDYISSRGAAGNAIGGLSVGEPESMMYELTALCCENLPVEKPRYLMGVGTPWNILENIALGIDMFDCVMPTRNGRNGMLFTSQGVINIDNKKWEKDFSPIDEGIGSGISAYYSKAYLRHLVKSKEILGLTIASVHNLAFYLWLVREARAHIVAGDYFSWKNEMIPLLKTRL

SEQ ID NO: 55289 - protein, 379 aa, unidentified
  source 1..379: note = Flavihumibacter solisilvae
  REGION 1..379: note = tr|A0A0C1IMX8|A0A0C1IMX8_9BACT Queuine tRNA-ribosyltransferase OS=Flavihumibacter solisilvae; OX = 1349421 GN=tgt PE=3 SV=1
MAALSFTLSAQDPNSKARAGEFVTDHGTVQTPIFMPVGTVGSVKAVSQQQLKEEVKAEIILGNTYHLYLRPGLEVLEAAGGLHKFNGWDGPILTDSGGYQVFSLAGNRKLTEDGALFQSHIDGSKHLFSPESVMDIQRIIGGDIIMAFDECPPYPSDYAYARKSLDLTHRWLDRCFKRLDETPDKYGYSQNLFPIVQGSTFGDLRKESCAYISSKNAVGNAIGGLSVGEPEEMMYELAGLCCENLPENKPRYLMGVGTPWNILENISLGVDMFDCVMPTRNGRNAMLFTSRGVINIDNKKWEKDFSPIDDGIDCTFSHYYSKAYLRHLVKAKEILGLTIASVHNLAFYLWLVKEARKHILAGDFNSWKNEMIPIIKTRL

SEQ ID NO: 55290 - protein, 379 aa, Flavihumibacter sp.
  REGION 1..379: note = tr|A0A162NE02|A0A162NE02_9BACT Queuine tRNA-ribosyltransferase OS=Flavihumibacter sp. CACIAM 22H1; OX = 1812911 GN=tgt PE=3 SV=1
MAALSFQLCGKDAGSNARAGLVSTDHGTIETPIFMPVGTVGSVKAVSQQQLQTEVNAQIILGNTYHLYLRPGQQVLEAAGGLHRFMGWDRPILTDSGGYQVFSLAGNRKLTEEGALFQSHIDGSKHLFTPESVMDIQRSIGADIIMAFDECPPYPSDYSYAQKSMELTHRWLNRCFKRLEETPDKYGYTQNLFPIVQGSTYKDLRRASAEFVASKGAAGNAIGGLSVGEPEEMMYEHAAHCCEFLPADKPRYLMGVGTPWNILENISLGIDMFDCVMPTRNGRNAMLFTSKGVINIDNKKWEKDFSPIDDGIDNAFSQYYSKAYLRHLVKSKEILALTIASVHNLAFYLWLVKEARRHILAGDFTSWKNEQILLLKTRL

SEQ ID NO: 55291 - protein, 379 aa, Flavihumibacter sp.
  REGION 1..379: note = tr|A0A0C1KRW6|A0A0C1KRW6_9BACT Queuine tRNA-ribosyltransferase OS=Flavihumibacter sp. ZG627; OX = 1463156 GN=tgt PE=3 SV=1
MSALSFCLQHQDPSSKARAGIINTDHGSIQTPIFMPVGTVGSVKAVSQQQLQDEVKATIILGNTYHLYLRPGTEVLQAAGGLHRFNGWNHPILTDSGGYQVFSLAGNRKLTEDGALFQSHIDGSKHMFTPESVMDIQRVIGADIIMAFDECPPYPSNYEYARKSMDLTHRWLSRCVNRLAETPDLYGYSQNLFPIVQGSTFADLRKASCEYISSKGAVGNAIGGLSVGEPEEMMYELTALCCENLPEDKPRYLMGVGTPWNILENISLGVDMFDCVMPTRNGRNAMLFTSKGVINIDNKKWEKDFSPIDEGIDCNFSNYYSKAYLRHLVKAKEILGLTIASIHNLGFYLWLVKQAREHIIVGDFQRWKNEMIPVLKTRC

SEQ ID NO: 55292 - protein, 376 aa, unidentified
  source 1..376: note = Flavimaricola marinus
  REGION 1..376: note = tr|A0A238LDT1|A0A238LDT1_9RHOB Queuine tRNA-ribosyltransferase OS=Flavimaricola marinus; OX = 1819565 GN=tgt PE=3 SV=1
MPEKFSFALAATDGAARTGTISTPRGDIRTPAFMPVGTAATVKAMMPESVAATGADILLGNTYHLMLRPTAERIARLGGLHDFMNWQRPILTDSGGFQVMSLADLRKLTERGVTFRSHIDGSKHELTPERSMEIQRLLGSDIVMAFDECPALPADRDRIAESMALSMRWAARSRDAFGDRPGHALFGIQQGGLERDLREQSAEALRDIEFDGYAVGGLAVGEGQEAMFGVLDFAPAMLPQDKPRYLMGVGKPDDIVGAVKRGIDMMDCVLPSRSGRTGQAWTRRGQVNIKNARHQDDPRPLDEACTCPTCRGYSRAYLHHVFRAGEMISGMLLTWHNLHYYQELMSEMRAAISEARFAAWEASFHDLRAEGDIAQL

SEQ ID NO: 55293 - protein, 376 aa, unidentified
  source 1..376: note = Flavipsychrobacter stenotrophus
  REGION 1..376: note = tr|A0A2S7T0D4|A0A2S7T0D4_9BACT Queuine tRNA-ribosyltransferase OS=Flavipsychrobacter stenotrophus; OX = 2077091 GN=tgt PE=3 SV=1
MEFELQAQDSASSARAGKMTTAHGEIETPIFMPVGTVGSVKAVTHEQLIKEVKAEIILGNTYHLYLRPGTEVLKAAGGLHKFAGWPRPILTDSGGYQVFSLAANRKIKEEGVVFQSHIDGSRHLFTPENVVDTQRAIGADIIMAFDECPPYPSEYTYAKNSMELTHRWLARCVKHMSDTEPLYGYDQALFPIVQGSTYRDLRKISAEFIASMGADGNAIGGLSVGEPEEMMYELCALTCEYLPQDKPRYLMGVGTPWNILENISLGVDMFDCVMPTRNGRNGMLFTSKGVVNIRNKKWATDFSVIDDGIDCYTSNYYSKGYLRHLFIAGEILAMQIASIHNLAFYLHLVKQAREHIIAGDFTSWKNEMIPLLKTRL

SEQ ID NO: 55294 - protein, 384 aa, Flaviramulus basaltis
  REGION 1..384: note = tr|A0A1K2ITN3|A0A1K2ITN3_9FLAO Queuine tRNA-ribosyltransferase OS=Flaviramulus basaltis OX=369401; GN = tgt PE=3 SV=1
MPIEVMIYMKFELKAKDTQSKARAGKITTDHGVIETPIFMPVGTVATVKGVHQRELKEEINPDIILGNTYHLYLRPQTQVLEKAGGLHKFMNWDRNILTDSGGYQVYSLSANRKIKEEGVKFKSHIDGSYHTFTPENVMEIQRTIGADIIMAFDECTPYPCDYNYAKRSMHMTHRWLDRCINHLEKTPLKYGYNQAFFPIVQGSTYKDLRMQSAEYIANSGAVGNAIGGLSVGEPAEEMYAMTDVVCSILPEDKPRYLMGVGTPINILENIALGVDMFDCVMPTRNARNGMLFTAFGSINIKNLKWAEDFSPIDDMGITFVDTEYSKAYLRHLFTVNELLGKQIATIHNLGFYLWLVREARKHILAGDFKTWKDKMVKQMDNRL

SEQ ID NO: 55295 - protein, 387 aa, Flavisolibacter ginsengisoli
  REGION 1..387: note = tr|A0A1M5CW77|A0A1M5CW77_9BACT Queuine tRNA-ribosyltransferase OS=Flavisolibacter ginsengisoli DSM 18119 OX=1121884 GN=tgt PE=3 SV=1
MQPNFLDLMPALAFDLLKTDDRSAARAGKITTDHGLIETPIFMPVGTIGSVKAVSQQQLKSEVDPHIILGNTYHLYLRPGMQTLEAAGGLHNFMNWDRPILTDSGGFQVFSLSGNRKINEEGVMFQSHIDGSRHLFTPEKVMDIERIIGADIMMAFDECPPANSEYKYALDSMNLTHRWLDRCFTHFNGTQDRYGHTQNLFPIVQGAVFHDLRKASCEYVSSKNATGNAIGGLSVGEPEPVMYEICQLCCESLPTEKPRYLMGVGTPWNILECIALGIDMFDCVMPTRNGRNAMLFTTKGVINIDNKKWEQDFSPIDDGLDSEFSHYYSKAYVRHLFKAGELLGLTIASVQNLAFYLWLVKEARKHILAGDFLSWKEEMIPILKTRL

SEQ ID NO: 55296 - protein, 379 aa, unidentified
  source 1..379: note = Flavisolibacter ginsenosidimutans
  REGION 1..379: note = tr|A0A5B8UG51|A0A5B8UG51_9BACT Queuine tRNA-ribosyltransferase OS=Flavisolibacter ginsenosidimutans OX=661481 GN=tgt PE=3 SV=1
MPALSFSLEKTDNLSVARAGTITTDHGQIQTPIFMPVGTIGSVKAVPQQLLKEQVKAQIILGNTYHLYLRPGMETIEAAGGLHRFMNWDKPILTDSGGFQVFSLAAARKIKEEGVTFQSHIDGSKHLFTPEKVMDIERTIGADIMMAFDECPPANSIYKYALDSMNLTHRWLDRCFKHFNNTPDKWGHTQNLFPIVQGAVYHDLRKASCDYISSKNATGNAIGGLSVGEPEPVMYEICQLCCENLPQNKPRYLMGVGTPWNILECIALGVDMFDCVMPTRNGRNAMLFTTKGVINIDNKKWEKDFSPIDEGLDCEWSHYYNKAYVRHLFKSSELLGLTIASVQNLAFYLWLVTEARRHILLGDFLSWKNEMVPVLKTRL

SEQ ID NO: 55297 - protein, 379 aa, unidentified
  source 1..379: note = Flavisolibacter tropicus
  REGION 1..379: note = tr|A0A172U231|A0A172U231_9BACT Queuine tRNA-ribosyltransferase OS=Flavisolibacter tropicus; OX = 1492898 GN=tgt PE=3 SV=1
MPALQFQLEITDAKSAARAGTITTDHGTIQTPIFMPVGTIGSVKAVTQQQLADPIKAQIILGNTYHLYLRPGMQVMEKAGGLHQFMNWNKPILTDSGGFQVFSLAGNRKINEEGVMFQSHIDGSKHLFTPEKVMDIERTIGADIMMAFDECPPANAEYKYALNSMNLTHRWLDRCFKHFNATPDKYGHTQNLFPIVQGAVHHDLRKASCEYIASKEATGNAIGGLSVGEPEPVMYEICQLCCENLPTQKPRYLMGVGTPWNILECIALGIDMFDCVMPTRNGRNAMLFTSKGIINIDNKKWEYDFSPIDDGIDCEWSHYYSKSYVRHLFKASEILGLTIASVQNLAFYLWLVKEARKHIQQGDFLAWKNEMVPVLKTRL

SEQ ID NO: 55298 - protein, 376 aa, unidentified
  source 1..376: note = Flavivirga eckloniae
  REGION 1..376: note = tr|A0A2K9PMS7|A0A2K9PMS7_9FLAO Queuine tRNA-ribosyltransferase OS=Flavivirga eckloniae OX=1803846; GN = tgt PE=3 SV=1
MKFELKAKDAQSKARAGKITTDHGVIETPIFMPVGTVATVKGVHQRELKDDINPDIILGNTYHLYLRPQTDIIEKAGGLHKFMNWDRNILTDSGGYQVYSLSANRKIKEEGVKFKSHIDGSYHIFTPENVMEIQRSIGADIIMAFDECTPYPCDYNYAKRSMHMTHRWLDRCINHLEKTPLKYDYNQAFFPIVQGSTYKDLRMQSAEYIANSGAVGNAIGGLSVGEPAEEMYAMTDVVCAILPEDKPRYLMGVGTPINILENIALGVDMFDCVMPTRNARNGMLFTAYGTINIKNLKWAEDFSPIDEMGITFVDTEYSKAYLRHLFSVNELLGKQIATIHNLGFYLWLVREARKHILAGDFKTWKDKMVKQMDNRL

SEQ ID NO: 55299 - protein, 376 aa, Flavivirga sp.
  REGION 1..376: note = tr|A0A4S1DZC4|A0A4S1DZC4_9FLAO Queuine tRNA-ribosyltransferase OS=Flavivirga sp. RZ03 OX=2559571; GN = tgt PE=3 SV=1
MKFELKAKDAQSKARAGKITTDHGVIETPIFMPVGTVATVKGVHQRELKEDINPDIILGNTYHLYLRPQTPILEKAGGLHKFMNWDRNILTDSGGYQVYSLSANRKIKEEGVKFKSHIDGSYHTFTPENVMEIQRTIGADIIMAFDECTPYPCDYNYAKRSMHMTHRWLDRCINHLEKAPLKYGYNQAFFPIVQGSTYKDLRKQSAEYIANSGAVGNAIGGLSVGEPAEEMYAMTDVVCAILPEDKPRYLMGVGTPINILENIALGVDMFDCVMPTRNARNGMLFTAHGTINIKNLKWADDFSPIDDMGITFVDTEYSKAYLRHLFTVNELLGKQIATIHNLGFYLWLVREARKHILAGDFKTWKAKMVKQMDNRL

SEQ ID NO: 55300 - protein, 376 aa, unidentified
  source 1..376: note = Flavobacteria bacterium
  REGION 1..376: note = tr|Q26DG7|Q26DG7_FLABB Queuine tRNA-ribosyltransferase OS=Flavobacteria bacterium (strain BBFL7) OX=156586 GN=tgt PE=3 SV=1
MKFDLLQTDSQSQARAGVVHTDHGAIETPIFMPVGTVGTVKGVHQRELEEEVNPDIILANTYHLYLRPGIDVLEKAGGLHKFMNWDRPILTDSGGYQVYSLSANRKIKEEGVKFKSHIDGSYHFFTPERAMDIQRSIGADIIMAFDECTPYPCEYNYARRSMHMTHRWLKRCIEHFNNTPNKYGFNQTLFPIIQGSTYKDLREQSAEFIANCDMPANAIGGLSVGEPAEEMYAMTDVVTAVLPKDKPRYLMGVGTPINLLENVALGVDMFDCVMPTRNGRNGMIFTAHGTMNMKNKKWETDFSPLDPADYAWVDTAYSKAYVRHLFTVNEMLGRQICTIHNLSFYLWLMREARKHILAGDFRTWKDKMVKQMDNRL

SEQ ID NO: 55301 - protein, 376 aa, unidentified
  source 1..376: note = Flavobacteria bacterium
  REGION 1..376: note = tr|A3J5C1|A3J5C1_9FLAO Queuine tRNA-ribosyltransferase OS=Flavobacteria bacterium BAL38; OX = 391598 GN=tgt PE=3 SV=1
MKFDLITKDPKSKARAGKITTDHGVIETPIFMPVGTVASVKGVHQRELREDINPDIILGNTYHLYLRPQTKILEAAGGLHKFMNWDRNILTDSGGYQVYSLSGRRKIKEEGVKFKSHIDGSYHFFSPENVMEIQRTIGADIIMAFDECTPYPCDYRYAKRSMHMTHRWLDRCINHLEKLPFKYGYEQTFFPIVQGSTYKDLREQSAEYIANAGAQGNAIGGLSVGEPAEEMYAMTEIVTAILPEDKPRYLMGVGTPINILENIALGIDMFDCVMPTRNARNGMLFTAYGSINIKNKKWEDDFSPIDEMGHTWVDTEYSKAYLRHLFAANEFLGKQIATIHNLGFYMWLVREARRQIIAGTFREWKDKMVIQMSQRL

SEQ ID NO: 55302 - protein, 376 aa, unidentified
  source 1..376: note = Flavobacteriaceae bacterium
  REGION 1..376: note = tr|A0A504JCK5|A0A504JCK5_9FLAO Queuine tRNA-ribosyltransferase OS=Flavobacteriaceae bacterium M625 OX=2589995 GN=tgt PE=3 SV=1
MKFDLLGKDALSKARVGNITTDHGVIETPIFMPVGTVATVKGVHQRELKNDINPDIILGNTYHLYLRPQTSILEKAGGLHKFMNWDRNILTDSGGYQVYSLSANRKIKEEGVKFKSHIDGSYHVFTPENVMEIQRTIGADIIMAFDECTPYPCDYNYAKRSMHMTHRWLDRCMQHLNKIPVKYGYDQAFFPIVQGSTYKDLRIQSAEYIANAGAVGNAIGGLSVGEPAEEMYAMTEVVTDILPEDKPRYLMGVGTPINILENIALGVDMFDCVMPTRNGRNGMLFTAHGTINIKNKKWEDDFSPIDEMGITYVDTEYTKAYLRHLFSVNEMLGRQIATIHNLGFYLWLVREARKHILAGDFYSWKNMMVKQMDKRL

SEQ ID NO: 55303 - protein, 376 aa, unidentified
  source 1..376: note = Flavobacteriaceae bacterium
  REGION 1..376: note = tr|A0A2M7NNB2|A0A2M7NNB2_9FLAO Queuine tRNA-ribosyltransferase OS=Flavobacteriaceae bacterium CG_4_10_14_3_um_filter_31_253 OX=1973987 GN=tgt PE=3 SV=1
MKFDLKFTDPKSKARAGVITTDHGEIQTPIFMPVGTVGTVKGVHQTELKNEINPDIILGNTYHLFLRPKTDILEQAGGLHKFMNWDRNILTDSGGYQVYSLSSNRKINEEGVKFKSHIDGSTHVFTPENVMEIQRSIGADIIMAFDECTPYPCEYNYAKRSMHMTHRWLDRCINHLDKLPYKYGYEQTFFPIVQGSTYKDLRKQSAEYIANAGAQGNAIGGLSVGEPAEEMYAMTEIVTAILPEDKPRYLMGVGTPINILENIALGIDMFDCVMPTRNARNGMLFTANGTINMKNKKWENDFSEIDEMGITFVDTLYSKAYLRHLFAANEMLGKQIATIHNLGFYMWLVREARKHILAGDFREWKDKMVIQMDKRL

SEQ ID NO: 55304 - protein, 376 aa, unidentified
  source 1..376: note = Flavobacteriales bacterium
  REGION 1..376: note = tr|A0A2H0G8R6|A0A2H0G8R6_9FLAO Queuine tRNA-ribosyltransferase OS=Flavobacteriales bacterium CG18_big_fil_WC_8_21_14_2_50_32_9 OX=1974008 GN=tgt PE=3; SV = 1
MKFKLEKKDLQSKARAGEIITEHGVIKTPIFMPVGTAGTVKGVHQHELNSDTKAQIILGNTYHLYLRPKLEIIQQAGGLHQFMNWDKPILTDSGGYQVYSLSARRKIKEEGATFASHIDGSKHLFTPENVMDIQRTIGADIIMAFDECTPYPCDYKYAKNSMHLTHRWLKRCCERFDETEPHYGYNQALFPIVQGSVYKDLRKQSAEKIASFEREGNAIGGLSVGEPDDEMYEMCDIVTAILPEDKPRYLMGVGTPINLLENIALGIDMFDCVMPTRNARNGMLFTKNGFINIKNKKWEADFSPLDAEGTSHVDSFYSKAYLRHLIISKEILGAQIATLHNLSFYLWLVNEAREHILLGDFTTWKNKMVKQLAARL

SEQ ID NO: 55305 - protein, 376 aa, unidentified
  source 1..376: note = Flavobacteriales bacterium
  REGION 1..376: note = tr|A0A2E7TMZ6|A0A2E7TMZ6_9FLAO Queuine tRNA-ribosyltransferase OS=Flavobacteriales bacterium; OX = 2021391 GN=tgt PE=3 SV=1
MKFILEKTNPETKARAGTIKTDHGEIKTPIFMPVGTAATVKAVHQREVEEDIKAQIILGNTYHLYLRPNTDTLNKAGGLHKFMNWEKPILTDSGGFQVYSLSGTRKIKEEGVKFQSHIDGSYHMFSPEKVMDIQREIGADIIMAFDECTPYPCDYNYAKNSMHMTHRWLKRCCDRFDNTDSLYGYNQTLFPIVQGSTYKDLRVESAETIASFERDGNAIGGLSVGEPAEEMYAMTDLVCSILPENKPRYLMGVGTPENILENIALGIDMFDCVMPTRNARNGMLFTREGIINIKNKKWEQDFSPLDPHGTSYVDQFYSKSYVRHLIQSKEILGKQICSIHNLAFYLWLVTEARKHIIEGDFYNWKNQMVKKVTNRL

SEQ ID NO: 55306 - protein, 376 aa, unidentified
  source 1..376: note = Flavobacteriia bacterium
  REGION 1..376: note = tr|A0A432IQ26|A0A432IQ26_9BACT Queuine tRNA-ribosyltransferase OS=Flavobacteriia bacterium; OX = 2044941 GN=tgt PE=3 SV=1
MKFEIKGKDQHSKARAATITTEHGKIQTPIFMPVGTAASVKGVHQTELKDEINAEIILGNTYHLYLRPKTDILEQAGGLHKFMNWDRPILTDSGGYQVYSLSNTRKIKEEGVKFKSHIDGSAHFFSPEFSMEIQRSIGADIIMAFDECTPYPCDYNYARNSMHMTHRWLDRCVDYLAENPEKYGFKQTLFPIVQGSTYKDLRKQSAEYIAGVGAEGNAIGGLSVGEPAEEMYEMTELVCNILPEDKPRYLMGVGTPINILENIALGVDMFDCVMPTRNARNGMLFTAHGTINIKNKKWENDFSPIDDTAITFVDTMYSKAYLRHLFAANEYLGKQIASIHNLGFYLWLVREARNHILAGDFLQWKNIMVKQMDKRL

SEQ ID NO: 55307 - protein, 376 aa, unidentified
  source 1..376: note = Flavobacteriia bacterium
  REGION 1..376: note = tr|A0A1Q3ZJM6|A0A1Q3ZJM6_9BACT Queuine tRNA-ribosyltransferase OS=Flavobacteriia bacterium 40-80; OX = 1895763 GN=tgt PE=3 SV=1
MHFELQHRDTKSNARTGKLVTDHGEIQTPIFMPVGTVGTVKGVHQHELEQTINAQIILGNTYHLYLRPGIDVLESAGGLHNFINWKKPILTDSGGFQVYSLSKSRKITEEGVRFQSVYDGAYHFFTPEYAMDVQRAIGGDIIMAFDECTPYPCDYRYAKNSMNMTHRWLDRCISHFKNTPPKYDYEQALFPIVQGSVYEDLRKASAEYVASKDMLGNAIGGLSVGEPEEEMYAMTELVTAILPEEKPRYLMGVGTPWNILESIARGIDMFDCVMPSRNARHGLLFTWEGTINIKNQKWEKDFSPLDSSGKTYVDNTYSKAYLRHLIKVNEYLGVQIATIHNLGFYLDLVKEARKRILDGTFSTWKDQVIPKLKQRL

SEQ ID NO: 55308 - protein, 383 aa, unidentified
  source 1..383: note = Flavobacterium aciduliphilum
  REGION 1..383: note = tr|A0A328YDK9|A0A328YDK9_9FLAO Queuine tRNA-ribosyltransferase OS=Flavobacterium aciduliphilum; OX = 1101402 GN=tgt PE=3 SV=1
MPVENAFMKFELIQKDTNSKARAGKITTDHGVIETPIFMPVGTVASVKGVHQRELKEEINPDIILGNTYHLYLRPQTEILEKAGGLHKFMNWDRNILTDSGGYQVYSLSANRKIKEEGVKFKSHIDGSYHFFSPENVMDIQRTIGADIIMAFDECTPYPCDYRYAKRSMHMTHRWLDRCVNHLNSTPPKYGYEQTLFPIVQGSTYKDLRQQSAEYIANVGAQGNAIGGLSVGEPAEEMYAMTEVVCDILPEDKPRYLMGVGTPINILENIALGVDMFDCVMPTRNARNGMLFTAHGVINIKNKKWEDDFSPIDEMGHTFVDLEYTKAYLRHLFAANEYLGKQIATIHNLGFYLWLVREARKHILAGDFRVWKERMVTQMNQRL

SEQ ID NO: 55309 - protein, 376 aa, unidentified
  source 1..376: note = Flavobacterium akiainvivens
  REGION 1..376: note = tr|A0A0M8MFV4|A0A0M8MFV4_9FLAO Queuine tRNA-ribosyltransferase OS=Flavobacterium akiainvivens; OX = 1202724 GN=tgt PE=3 SV=1
MKFDLVTKDPASKARAGVVTTDHGAIQTPIFMPVGTVGTVKGVHQRELKQEINPDIILGNTYHLYLRPQLDVLEQAGGLHKFMNWDRPILTDSGGYQVYSLSANRKIKEEGVKFKSHIDGSYHFFSPESVMEIQRTIGADIIMAFDECTPYPCDYRYAKRSMHMTHRWLDRCISHLDKLPYKYGYSQAFFPIVQGSTYTDLRKESAEYIANAGAVGNAIGGLSVGEPAEEMYAMTDVVCSILPEDKPRYLMGVGTPINILENIALGVDMFDCVMPTRNARNGMLFTANGTINIKNKKWEADFSPIDEMGITFVDTEYSKAYLRHLFAANEFLGKQIATIHNLGFYMWLVRQAREHIIAGDFYAWKEKMVKQMSQRL

SEQ ID NO: 55310 - protein, 376 aa, unidentified
  source 1..376: note = Flavobacterium album
  REGION 1..376: note = tr|A0A2S1QYI9|A0A2S1QYI9_9FLAO Queuine tRNA-ribosyltransferase OS=Flavobacterium album OX=2175091; GN = tgt PE=3 SV=1
MKFDLLTKDPQSKARAGSITTDHGTIETPIFMPVGTVASVKGVHQRELKDDINPDIILGNTYHLYLRPQTEILEKAGGLHKFMNWDRNILTDSGGYQVYSLSANRKIKEEGVKFKSHIDGSYHFFSPESVMEIQRTIGADIIMAFDECTPYPCDYRYAKRSMHMTHRWLDRCITHLEKVPFKYGYSQAFFPIVQGSTYTDLRQQSAEYIANAGAVGNAIGGLSVGEPAEEMYAMTDVVCSILPEDKPRYLMGVGTPINILENIALGVDMFDCVMPTRNARNGMLFTANGTINIKNKKWEADFSPLDEMGITFVDTEYTKAYLRHLFAANEYLGKQIATIHNLGFYMWLVREARKHILAGDFREWKDKMVKQMSNRL

SEQ ID NO: 55311 - protein, 376 aa, unidentified
  source 1..376: note = Flavobacterium alvei
  REGION 1..376: note = tr|A0A2S5AF89|A0A2S5AF89_9FLAO Queuine tRNA-ribosyltransferase OS=Flavobacterium alvei OX=2080416; GN = tgt PE=3 SV=1
MKFDLLQKDPHTKARAGSITTDHGVIETPIFMPVGTVASVKGVHQRELKEEINPDIILGNTYHLYLRPQTEILEKAGGLHKFMNWDRNILTDSGGYQVYSLSSNRKIKEEGVKFKSHIDGSYHVFTPENVMEIQRTIGADIIMAFDECTPYPCDYRYAQRSMHMTHRWLDRCINHLEKVPFKYGYEQTFFPIVQGSTYKDLRRQSAEYIANSGQQGNAIGGLSVGEPAEEMYAMTEVVCEILPEDKPRYLMGVGTPINILENIALGIDMFDCVMPTRNARNGMLFTANGTINIKNKKWEDDFSVIDEMGHTFVDTEYSKAYLRHLFAANEYLGKQIATIHNLGFYMWLVREARKHILAGDFRTWKEMMVRNMSQRL

SEQ ID NO: 55312 - protein, 376 aa, Flavobacterium anhuiense
  REGION 1..376: note = tr|A0A444VVQ6|A0A444VVQ6_9FLAO Queuine tRNA-ribosyltransferase OS=Flavobacterium anhuiense; OX = 459526 GN=tgt PE=3 SV=1
MKFDLLQKDPQSKARAGSITTDHGVIETPIFMPVGTVASVKGVHQRELKEEINPDIILGNTYHLYLRPQTEILEKAGGLHKFMNWDRNILTDSGGYQVYSLSSNRKIKEEGVKFKSHIDGSYHFFTPENVMEIQRTIGADIIMAFDECTPYPCDYRYAQRSMHMTHRWLDRCINHLDKVPYKYGYEQTFFPIVQGSTYKDLRRQSAEYIANAGQQGNAIGGLSVGEPAEEMYAMTEVVCEILPEDKPRYLMGVGTPINILENIALGIDMFDCVMPTRNARNGMLFTANGTINIKNKKWEADFSPIDEMGHTFVDTEYTKAYLRHLFAANEYLGKQIATIHNLGFYMWLVREARKHILAGDFRPWKEMMVKNMSQRL

SEQ ID NO: 55313 - protein, 376 aa, Flavobacterium anhuiense
  REGION 1..376: note = tr|A0A1G5JJI4|A0A1G5JJI4_9FLAO Queuine tRNA-ribosyltransferase OS=Flavobacterium anhuiense; OX = 459526 GN=tgt PE=3 SV=1
MKFDLLQKDPQSKARAGSITTDHGVIETPIFMPVGTVASVKGVHQRELKEEINPDIILGNTYHLYLRPQTEILEKAGGLHKFMNWDRNILTDSGGYQVYSLSSNRKIKEEGVKFKSHIDGSYHFFTPENVMEIQRTIGADIIMAFDECTPYPCDYRYAQRSMHMTHRWLDRCIAHLEKVPYKYGYEQTFFPIVQGSTYKDLRRQSAEYIANAGQQGNAIGGLSVGEPAEEMYAMTEVVCEILPEDKPRYLMGVGTPINILENIALGIDMFDCVMPTRNARNGMLFTANGTINIKNKKWEADFSPIDEMGHTFVDTEYTKAYLRHLFAANEYLGKQIATIHNLGFYMWLVREARKHILAGDFRPWKEMMVKNMSQRL

SEQ ID NO: 55314 - protein, 376 aa, unidentified
  source 1..376: note = Flavobacterium aquaticum
  REGION 1..376: note = tr|A0A327YFF1|A0A327YFF1_9FLAO Queuine tRNA-ribosyltransferase OS=Flavobacterium aquaticum; OX = 1236486 GN=tgt PE=3 SV=1
MKFDLITKDPKSKARAGKITTDHGVIETPIFMPVGTVASVKGVHQRELRDDINPDIILGNTYHLYLRPQTKILEAAGGLHKFMNWDRNILTDSGGYQVYSLSSNRKIKEEGVKFKSHIDGSYHFFSPENVMEIQRTIGADIIMAFDECTPYPCDYRYAKRSMHMTHRWLDRCITHLDKLPFKYGYEQTFFPIVQGSTYKDLREQSAEYIANAGAQGNAIGGLSVGEPAEEMYAMTEIVTAILPEDKPRYLMGVGTPINILENIALGIDMFDCVMPTRNARNGMLFTAHGTMNMKNKKWAEDFSPIDEMGHTWVDTEYSKAYLRHLFAADEFLAKQIATIHNLGFYMWLVREARRQIIAGTFREWKDKMVVQMSQRL

SEQ ID NO: 55315 - protein, 376 aa, Flavobacterium aquatile
  REGION 1..376: note = tr|A0A095SYD9|A0A095SYD9_9FLAO Queuine tRNA-ribosyltransferase OS=Flavobacterium aquatile LMG 4008 = ATCC 11947 OX=1453498 GN=tgt PE=3 SV=1
MKFDLLQKDPNSNARAGTITTDHGVIETPIFMPVGTVASVKGVHQRELKDDINPDIILGNTYHLYLRPQTEILEKAGGLHKFMNWDRNILTDSGGYQVYSLSANRKIKEEGVKFKSHIDGSYHFFTPENVMEIQRTIGADIIMAFDECTPYPCDYRYAQRSMKMTHRWLDRCINHLDKLPFKYGYEQTFFPIVQGSTYKDLRQQSAEYIANSNQQGNAIGGLSVGEPAEEMYAMTEVVCEILPEDKPRYLMGVGTPINILENIALGIDMFDCVMPTRNARNGMLFTANGTINIKNKKWEADFSPVDEMGITFVDTEYTKAYLRHLFAANEYLGKQIATIHNLGFYMWLVREARKHILAGDFRTWKDMMVKNMSQRL

SEQ ID NO: 55316 - protein, 376 aa, unidentified
  source 1..376: note = Flavobacterium aquicola
  REGION 1..376: note = tr|A0A3E0E940|A0A3E0E940_9FLAO Queuine tRNA-ribosyltransferase OS=Flavobacterium aquicola; OX = 1682742 GN=tgt PE=3 SV=1
MKFDLLKTDPQSKARAGSITTDHGVIETPIFMPVGTVASVKGVHQRELKEEINPDIILGNTYHLYLRPQTEILEKAGGLHKFMNWDRNILTDSGGYQVYSLSNNRKIKEEGVKFKSHIDGSYHFFTPENVMEIQRSIGADIIMAFDECTPYPCDYRYAQRSMHMTHRWLDRCISHLDKVPFKYGYEQTFFPIVQGSTYKDLRRQSAEYIANSGQQGNAIGGLSVGEPAEEMYAMTEVVCEVLPEDKPRYLMGVGTPINILENIALGIDMFDCVMPTRNARNGMLFTANGTINIKNKKWEADFSVIDEMGHTFVDLEYSKAYLRHLFAANEYLGKQIATIHNLGFYMWLVREARKHILAGDFRPWKEMMVKNMSQRL

SEQ ID NO: 55317 - protein, 376 aa, Flavobacterium aquidurense
  REGION 1..376: note = tr|A0A0Q0RZL5|A0A0Q0RZL5_9FLAO Queuine tRNA-ribosyltransferase OS=Flavobacterium aquidurense; OX = 362413 GN=tgt PE=3 SV=1
MKFDLLKKDPQSKARAGSITTDHGVIETPIFMPVGTVASVKGVHQRELKEDINPDIILGNTYHLYLRPQTEILEKAGGLHKFMNWDRNILTDSGGYQVYSLSNNRKIKEEGVKFKSHIDGSYHFFSPESVMEIQRTIGADIIMAFDECTPYPCDYRYAQRSMHMTHRWLDRCINHLDKVPYKYGYEQTFFPIVQGSTYKDLRQQSAEYIANSGQQGNAIGGLSVGEPAEEMYAMTEVVCEILPEDKPRYLMGVGTPINILENIALGIDMFDCVMPTRNARNGMLFTANGTINIKNKKWEADFSPIDEMGHTFVDTEYTKAYLRHLFAANEYLGKQIATIHNLGFYMWLVREARKHILAGDFRPWKEMMVKNMSQRL

SEQ ID NO: 55318 - protein, 376 aa, Flavobacterium aquidurense
  REGION 1..376: note = tr|A0A1H3QF85|A0A1H3QF85_9FLAO Queuine tRNA-ribosyltransferase OS=Flavobacterium aquidurense; OX = 362413 GN=tgt PE=3 SV=1
MKFDLLQKDPQSKARAGSITTDHGVIETPIFMPVGTVASVKGVHQRELKEDINPDIILGNTYHLYLRPQTEILEKAGGLHKFMNWDRNILTDSGGYQVYSLSNNRKIKEEGVKFKSHIDGSYHFFTPENVMEIQRTIGADIIMAFDECTPYPCDYRYAQRSMHMTHRWLDRCISHLDKVPYKYGYEQTFFPIVQGSTYKDLRRQSAEYIANSGQQGNAIGGLSVGEPAEEMYAMTEVVCEILPEDKPRYLMGVGTPINILENIALGIDMFDCVMPTRNARNGMLFTANGTINIKNKKWEADFSPIDEMGHTFVDTEYTKAYLRHLFAANEYLGKQIATIHNLGFYMWLVREARKHILAGDFRPWKEMMVKNMSQRL

SEQ ID NO: 55319 - protein, 376 aa, Flavobacterium araucananum
  REGION 1..376: note = tr|A0A227P4R1|A0A227P4R1_9FLAO Queuine tRNA-ribosyltransferase OS=Flavobacterium araucananum; OX = 946678 GN=tgt PE=3 SV=1
MKFDLLQKDPQSKARAGSITTDHGVIETPIFMPVGTVASVKGVHQRELKEDINPDIILGNTYHLYLRPQTEILEKAGGLHKFMNWDRNILTDSGGYQVYSLSNNRKIKEEGVKFKSHIDGSYHFFSPESVMEIQRTIGADIIMAFDECTPYPCDYRYAQRSMHMTHRWLDRCISHLDKVPFKYGYEQTFFPIVQGSTYKDLRQQSAEYIANSGQQGNAIGGLSVGEPAEEMYAMTEVVCEILPEDKPRYLMGVGTPINILENIALGIDMFDCVMPTRNARNGMLFTANGTINIKNKKWEADFSPIDEMGHTFVDTEYTKAYLRHLFAANEYLGKQIATIHNLGFYMWLVREARKHILAGDFRPWKEMMVKNMDQRL

SEQ ID NO: 55320 - protein, 376 aa, unidentified
  source 1..376: note = Flavobacterium arcticum
  REGION 1..376: note = tr|A0A345H910|A0A345H910_9FLAO Queuine tRNA-ribosyltransferase OS=Flavobacterium arcticum; OX = 1784713 GN=tgt PE=3 SV=1
MKFDLFTKDPQSKARAGAITTDHGVIETPIFMPVGTVASVKGVHQRELRDDINPDIILGNTYHLYLRPQTEILEKAGGLHKFMNWDRPILTDSGGYQVYSLSASRKIKEEGVKFKSHIDGSYHFFSPENVMEIQRTIGADIIMAFDECTPYPCDYRYAKRSMHMTHRWLDRCITHLDKLPYKYGYSQAFFPIVQGSTYTDLRQQSAEYIANAGAVGNAIGGLSVGEPAEEMYAMTDVVCSILPEDKPRYLMGVGTPINILENIALGVDMFDCVMPTRNARNGMLFTANGTINIKNKKWEDDFSPIDEMGITFVDTEYSKAYLRHLFAANEYLGKQIATIHNLGFYMWLVREARKHILAGDFREWKDMMVKNMNQRL

SEQ ID NO: 55321 - protein, 376 aa, unidentified
  source 1..376: note = Flavobacterium aurantiibacter
  REGION 1..376: note = tr|A0A255ZDT0|A0A255ZDT0_9FLAO Queuine tRNA-ribosyltransferase OS=Flavobacterium aurantiibacter; OX = 2023067 GN=tgt PE=3 SV=1
MEFNLLHTDPHSRARAGKITTDHGIIETPIFMPVGTVASVKGVHQRELREEINPDIILGNTYHLYLRPQLDILERAGGLHKFMNWDRNILTDSGGYQVYSLSANRKIKEEGVKFKSHIDGSYHFFTPENVMEIQRTIGADIIMAFDECTPYPCDYRYAQRSMHMTHRWLDRCIAHLEKVPYKYGYSQAFFPIVQGSTYKDLRRQSAEYIANSNQVGNAIGGLSVGEPAEEMYAMTEVVTEILPQDKPRYLMGVGTPINILENIALGIDMFDCVMPTRNARNGMLFTANGTINIKNKKWEADFSPLDENGTTFVDHEYSKAYLRHLFAANEYLGKQIATIHNLGFYMWLVREARKQILAGTFAEWKNKMVKQMNQRL

SEQ ID NO: 55322 - protein, 376 aa, Flavobacterium beibuense
  REGION 1..376: note = tr|A0A444W4A8|A0A444W4A8_9FLAO Queuine tRNA-ribosyltransferase OS=Flavobacterium beibuense; OX = 657326 GN=tgt PE=3 SV=1
MKFDLITKDPQSKARAGLITTDHGPIETPIFMPVGTVATVKGVHQRELKNDINPDIILGNTYHLYLRPQTPIIEKAGGLHKFMNWDRNILTDSGGYQVYSLSGNRKIKEEGVKFKSHIDGSYHFFSPESVMEIQRTIGADIIMAFDECTPYPCDYRYAKRSMHMTHRWLDRCIAHLEKVPVKYGYDQAFFPIVQGSTYTDLRAQSAEYIANAGAVGNAIGGLSVGEPAEEMYAMSEVVCNILPEDKPRYLMGVGTPINILENIALGIDMFDCVMPTRNARNGMLFTANGTINIKNKKWEDDFSPIDEMGITFVDTEYTKAYLRHLFAANEFLGKQIATIHNLGFYMWLVREARKHILAGDFREWKDKMVKQMSQRL

SEQ ID NO: 55323 - protein, 376 aa, Flavobacterium beibuense
  REGION 1..376: note = tr|A0A0A2LSD4|A0A0A2LSD4_9FLAO Queuine tRNA-ribosyltransferase OS=Flavobacterium beibuense F44-8; OX = 1406840 GN=tgt PE=3 SV=1
MKFDLITKDPQSKARAGLITTDHGPIETPIFMPVGTVATVKGVHQRELKNDINPDIILGNTYHLYLRPQTPILEKAGGLHKFMNWDRNILTDSGGYQVYSLSGNRKIKEEGVKFKSHIDGSYHFFSPESVMEIQRTIGADIIMAFDECTPYPCDYRYAKRSMHMTHRWLDRCIAHLEKVPVKYGYDQAFFPIVQGSTYKDLRAQSAEYIANAGAVGNAIGGLSVGEPAEEMYAMSEVVCNILPEDKPRYLMGVGTPINILENIALGIDMFDCVMPTRNARNGMLFTANGSINIKNKKWEDDFSPIDEMGITFVDTEYSKAYLRHLFAANEFLGKQIATIHNLGFYMWLVREARKHILAGDFREWKEKMVKQMSQRL

SEQ ID NO: 55324 - protein, 376 aa, Flavobacterium branchiophilum
  REGION 1..376: note = tr|A0A2H3KTK6|A0A2H3KTK6_9FLAO Queuine tRNA-ribosyltransferase OS=Flavobacterium branchiophilum; OX = 55197 GN=tgt PE=3 SV=1
MKFDLLKTDPQSKARAGSITTDHGVIETPIFMPVGTVASVKGVHQRELKEEINPDIILGNTYHLYLRPQTAILEKAGGLHKFMNWDRNILTDSGGYQVYSLSANRKIKEEGVKFKSHIDGSYHFFTPENVMEIQRTIGADIIMAFDECTPYPCDYRYAQRSMHMTHRWLDRCIQHLEKLPFKYGYEQTFFPIVQGSTYKDLRKQSAEYIANSNQQGNAIGGLSVGEPAEEMYAMTEVVCNILPEDKPRYLMGVGTPINILENIALGIDMFDCVMPTRNARNGMLFTAYGTINIKNKKWEADFSPIDPMGITFVDTEYTKAYLRHLFAANEYLGKQIATIHNLGFYMWLVREARKHIIEGDFRSWKDKMVVQMSQRL

SEQ ID NO: 55325 - protein, 376 aa, Flavobacterium branchiophilum
  REGION 1..376: note = tr|G2Z0I5|G2Z0I5_FLABF Queuine tRNA-ribosyltransferase OS=Flavobacterium branchiophilum (strain FL-15) OX=1034807 GN=tgt PE=3 SV=1
MKFDLLKTDPQSKARAGSITTDHGMIETPIFMPVGTVASVKGVHQRELKEEINPDIILGNTYHLYLRPQTAILEKAGGLHKFMNWDRNILTDSGGYQVYSLSANRKIKEEGVKFKSHIDGSYHFFTPENVMEIQRTIGADIIMAFDECTPYPCDYRYAQRSMHMTHRWLDRCILHLEKLPFKYGYEQTFFPIVQGSTYKDLRKQSAEYIANSNQQGNAIGGLSVGEPAEEMYAMTEVVCNILPEDKPRYLMGVGTPINILENIALGIDMFDCVMPTRNARNGMLFTAYGTINIKNKKWEADFSPIDPMGITFVDTEYTKAYLRHLFAANEYLGKQIATIHNLGFYMWLVREARKHIIEGDFRSWKDKMVVQMSQRL

SEQ ID NO: 55326 - protein, 376 aa, Flavobacterium caeni
  REGION 1..376: note = tr|A0A1G5HUB8|A0A1G5HUB8_9FLAO Queuine tRNA-ribosyltransferase OS=Flavobacterium caeni OX=490189; GN = tgt PE=3 SV=1
MEFELLHKDPQTQARAGKITLGHGVIETPIFMPVGTVASVKGVHQRELKDDINPDIILGNTYHLYLRPQMDVLEKAGGLHKFMNWDRNILTDSGGYQVYSLSANRKIKEEGVKFKSHIDGSYHVFTPENVMEIQRTIGADIIMAFDECTPYPCDYRYAQRSMHMTHRWLDRCIKHLDNLPFKYGYEQAFFPIVQGSTYKDLRQQSAEYIANANQPGNAIGGLSVGEPAEEMYAMTEVVTAILPEDKPRYLMGVGTPANILENIALGIDMFDCVMPTRNARNGMLFTANGTINIKNKKWEADFSPLDEMGHTFVDREYTKAYLRHLFAANEYLGKQIATIHNLGFYMWLVREARKHILAGDFREWKNKMVKQMDQRL

SEQ ID NO: 55327 - protein, 376 aa, Flavobacterium cauense
  REGION 1..376: note = tr|V6RYB7|V6RYB7_9FLAO Queuine tRNA-ribosyltransferase OS=Flavobacterium cauense R2A-7; OX = 1341154 GN=tgt PE=3 SV=1
MKFDLLLKDPQTKARAGSITTDHGVIETPIFMPVGTVASVKGVHQRELKDDINPDIILGNTYHLYLRPQTEILEKAGGLHKFMNWDRNILTDSGGYQVYSLSSNRKIKEEGVKFKSHIDGSYHFFSPENVMEIQRTIGADIIMAFDECTPYPCDYRYAQKSMKMTHRWLDRCINHLEKLPFKYGYEQTFFPIVQGSTYKDLRRQSAEYIANAGAQGNAIGGLSVGEPAEEMYAMTEVVTAILPEDKPRYLMGVGTPINILENIALGIDMFDCVMPTRNARNGMLFTANGTINIKNKKWEADFSPIDEMGHTFVDTEYTKAYLRHLFAANEYLGKQIATIHNLGFYMWLVREARKHILAGDFREWKEMMVKNMSQRL

SEQ ID NO: 55328 - protein, 376 aa, Flavobacterium cheniae
  REGION 1..376: note = tr|A0A562KC21|A0A562KC21_9FLAO Queuine tRNA-ribosyltransferase OS=Flavobacterium cheniae; OX = 295428 GN=tgt PE=3 SV=1
MKFDLITKDPKSKARAGKITTDHGVIETPIFMPVGTVASVKGVHQRELRDDINPDIILGNTYHLYLRPQTKILEAAGGLHKFMNWDRNILTDSGGYQVYSLSSNRKIKEEGVKFKSHIDGSYHFFSPENVMEIQRTIGADIIMAFDECTPYPCDYRYAKRSMHMTHRWLDRCINHLEKLPFKYGYEQTFFPIVQGSTYKDLREQSAEYIANAGAQGNAIGGLSVGEPAEEMYAMTEIVTAILPEDKPRYLMGVGTPINILENIALGIDMFDCVMPTRNARNGMLFTAHGTMNMKNKKWEADFSPIDEMGHTWVDTEYSKAYLRHLFAADEFLGKQIATIHNLGFYMWLVREARRQIIAGTFREWKDKMVIQMSQRL

SEQ ID NO: 55329 - protein, 376 aa, Flavobacterium chilense
  REGION 1..376: note = tr|A0A1M7G360|A0A1M7G360_9FLAO Queuine tRNA-ribosyltransferase OS=Flavobacterium chilense; OX = 946677 GN=tgt PE=3 SV=1
MKFDLLQKDPQSKARAGSINTDHGVIETPIFMPVGTVASVKGVHQRELKNDINPDIILGNTYHLYLRPQTEILEKAGGLHKFMNWDRNILTDSGGYQVYSLSSNRKIKEEGVKFKSHIDGSYHFFTPENVMEIQRTIGADIIMAFDECTPYPCDYRYAQRSMHMTHRWLDRCINHLDKVPYKYGYEQTFFPIVQGSTYKDLRRQSAEYIANAGQQGNAIGGLSVGEPAEEMYAMTEVVCEILPEDKPRYLMGVGTPINILENIALGIDMFDCVMPTRNARNGMLFTANGTINIKNKKWEADFSPIDEMGHTFVDTEYTKAYLRHLFAANEYLGKQIATIHNLGFYMWLVREARKHILAGDFRPWKEMMVKNMSQRL

SEQ ID NO: 55330 - protein, 376 aa, unidentified
  source 1..376: note = Flavobacterium circumlabens
  REGION 1..376: note = tr|A0A4Y7U678|A0A4Y7U678_9FLAO Queuine tRNA-ribosyltransferase OS=Flavobacterium circumlabens; OX = 2133765 GN=tgt PE=3 SV=1
MKFDLLQKDPQSKARAGSITTDHGVIETPIFMPVGTVASVKGVHQRELKEDINPDIILGNTYHLYLRPQTEILEKAGGLHKFMNWDRNILTDSGGYQVYSLSNNRKIKEEGVKFKSHIDGSYHFFSPESVMEIQRTIGADIIMAFDECTPYPCDYRYAQRSMHMTHRWLDRCISHLDKLPYKYGYEQTFFPIVQGSTYKDLRRQSAEYIANSGQQGNAIGGLSVGEPAEEMYAMTEVVCEILPEDKPRYLMGVGTPINILENIALGIDMFDCVMPTRNARNGMLFTANGTINIKNKKWEDDFSPIDEMGHTFVDTEYTKAYLRHLFAANEYLGKQIATIHNLGFYMWLVREARKHILAGDFRPWKEMMVKNMSQRL

SEQ ID NO: 55331 - protein, 376 aa, Flavobacterium columnare
  REGION 1..376: note = tr|A0A0X8C189|A0A0X8C189_9FLAO Queuine tRNA-ribosyltransferase OS=Flavobacterium columnare OX=996; GN = tgt PE=3 SV=1
MKFELLYTDPQTQARAGKVITDHGVIETPIFMPVGTVASVKGVHQRELKNDINPDIILGNTYHLYLRPQTKILEQAGGLHKFMNWDRNILTDSGGYQVYSLSSNRKIKEEGVKFKSHIDGSYHFFSPESVMEIQRSIGADIIMAFDECTPYPCDYRYAKRSMHMTHRWLDRCVDHLKKVPEMYGYEQTLFPIVQGSTYKDLRAQSAEYIANVGAQGNAIGGLSVGEPAEEMYAMTEVVTAILPKEKPRYLMGVGTPINILENIALGIDMFDCVMPTRNARNGMLFTANGVINIKNRKWADDFSPIDEMGHTFVDTDYTKAYLRHLFAADEYLGKQIATIHNLGFYMWLVREARKHILAGDFREWKEKMVKQMAQRL

SEQ ID NO: 55332 - protein, 376 aa, Flavobacterium columnare
  REGION 1..376: note = tr|A0A246G8H6|A0A246G8H6_9FLAO Queuine tRNA-ribosyltransferase OS=Flavobacterium columnare OX=996; GN = tgt PE=3 SV=1
MKFELLHTDPQTQARAGKVITDHGVIETPIFMPVGTVASVKGVHQRELKNDINPDIILGNTYHLYLRPQTKILEQAGGLHKFMNWDRNILTDSGGYQVYSLSSNRKIKEEGVKFKSHIDGSYHFFSPESVMEIQRSIGADIIMAFDECTPYPCDYRYAKRSMHMTHRWLDRCVEHLKKVPTMYGYEQTLFPIVQGSTYKDLRAQSAEYIANVGAEGNAIGGLSVGEPAEEMYAMTEVVTAILPKEKPRYLMGVGTPINILENIALGIDMFDCVMPTRNARNGMLFTANGVINIKNRKWADDFSPIDEMGHTFVDTEYTKAYLRHLFAADEYLGKQIATIHNLGFYMWLVREARRHILAGDFREWKEKMVKQMAQRL

SEQ ID NO: 55333 - protein, 376 aa, unidentified
  source 1..376: note = Flavobacterium commune
  REGION 1..376: note = tr|A0A1D9P736|A0A1D9P736_9FLAO Queuine tRNA-ribosyltransferase OS=Flavobacterium commune; OX = 1306519 GN=tgt PE=3 SV=1
MKFDLLQKDPLSKARAGSITTDHGVIETPIFMPVGTVASVKGVHQRELKNDINPDIILGNTYHLYLRPQTKILEAAGGLHKFMNWDRNILTDSGGYQVYSLSNSRKIKEEGVKFKSHIDGSYHVFTPENVMEIQRTIGADIIMAFDECTPYPCDYNYAKRSMHMTHRWLDRCINHLDKVPVKYGYDQAFFPIVQGSTYKDLRRQSAEYIANSGQVGNAIGGLSVGEPAEEMYAMTEVVTEILPEDKPRYLMGVGTPINILENIALGIDMFDCVMPTRNARNGMLFTANGTINIKNKKWEADFSPIDEMGITFVDTEYTKAYLRHLFAANEYLGKQIATIHNLGFYMWLVREARKHILAGDFRPWKEMMVKNMSQRL

SEQ ID NO: 55334 - protein, 376 aa, unidentified
  source 1..376: note = Flavobacterium crassostreae
  REGION 1..376: note = tr|A0A1B9E8V5|A0A1B9E8V5_9FLAO Queuine tRNA-ribosyltransferase OS=Flavobacterium crassostreae; OX = 1763534 GN=tgt PE=3 SV=1
MKFDLLKKDPLSKARAGSITTDHGVIETPIFMPVGTVASVKGVHQRELKQDINPDIILGNTYHLYLRPQTEILEKAGGLHKFMNWDRNILTDSGGYQVYSLSANRKIKEEGVKFKSHIDGSYHVFTPENVMEIQRTIGADIIMAFDECTPYPCDYNYAKRSMKMTHRWLDRCVNHLEKLPVKYGYDQAFFPIVQGSCYKDLRRQSAEYIANSNQVGNAIGGLSVGEPAEEMYAMTEVVCEILPEDKPRYLMGVGTPINILENIALGIDMFDCVMPTRNARNGMLFTANGTINIKNKKWEADFSPIDSMAITFVDTEYSKAYLRHLFAANEYLGKQIATIHNLGFYMWLVREARKHILAGDFRPWKEEMVKNMSQRL

SEQ ID NO: 55335 - protein, 376 aa, Flavobacterium croceum
  REGION 1..376: note = tr|A0A2S4N7U8|A0A2S4N7U8_9FLAO Queuine tRNA-ribosyltransferase OS=Flavobacterium croceum DSM 17960 OX=1121886 GN=tgt PE=3 SV=1
MKFDLLQKDPNSNARAGVITTDHGVIETPIFMPVGTVASVKGVHQRELKQDINPDIILGNTYHLYLRPQTTILEKAGGLHKFMNWDRNILTDSGGYQVYSLSANRKIKEEGVKFKSHIDGSYHFFSPESVMEIQRSIGADIIMAFDECTPYPCDYRYAKRSMHMTHRWLDRCVTHLEKVPEKYGYEQTLFPIVQGSTYKDLRQQSAEYIAGVGAQGNAIGGLSVGEPAEEMYAMTDVVCAILPQDKPRYLMGVGTPINILENIALGIDMFDCVMPTRNARNGMLFTAHGIINIKNKKWEDDFSPIDEMGHTFVDTEYTKAYLRHLFAANEFLGKQIATIHNLGFYLWLVREARRQILAGTFRAWKDKMVVQMATRL

SEQ ID NO: 55336 - protein, 376 aa, unidentified
  source 1..376: note = Flavobacterium crocinum
  REGION 1..376: note = tr|A0A2S1YFA1|A0A2S1YFA1_9FLAO Queuine tRNA-ribosyltransferase OS=Flavobacterium crocinum; OX = 2183896 GN=tgt PE=3 SV=1
MKFDLLQKDPQSKARAGSITTDHGVIETPIFMPVGTVASVKGVHQRELKEEINPDIILGNTYHLYLRPQTEILEKAGGLHKFMNWDRNILTDSGGYQVYSLSSNRKIKEEGVKFKSHIDGSYHFFTPENVMEIQRTIGADIIMAFDECTPYPCDYRYAQRSMHMTHRWLDRCINHLEKVPYKYGYEQTFFPIVQGSTYKDLRRQSAEYIANAGQQGNAIGGLSVGEPAEEMYAMTEVVCEILPEDKPRYLMGVGTPINILENIALGIDMFDCVMPTRNARNGMLFTANGTINIKNKKWEADFSPIDEMGHTFVDTEYTKAYLRHLFAANEYLGKQIATIHNLGFYMWLVREARKHILAGDFRPWKEMMVKNMSQRL

SEQ ID NO: 55337 - protein, 376 aa, Flavobacterium cucumis
  REGION 1..376: note = tr|A0A1M7ZZP2|A0A1M7ZZP2_9FLAO Queuine tRNA-ribosyltransferase OS=Flavobacterium cucumis; OX = 416016 GN=tgt PE=3 SV=1
MKFDLITKDPKSKARAGKITTDHGVIETPIFMPVGTVASVKGVHQRELKQDINPDIILGNTYHLYLRPQTKILEAAGGLHKFMNWDRNILTDSGGYQVYSLSGRRKIKEEGVKFKSHIDGSYHFFSPENVMEIQRTIGADIIMAFDECTPYPCDYRYAKRSMHMTHRWLDRCITHLEKLPFKYGYEQTFFPIVQGSTYKDLRAQSAEYIANVGAQGNAIGGLSVGEPAEEMYAMTEVVTAILPEDKPRYLMGVGTPINILENIALGIDMFDCVMPTRNARNGMLFTAYGSINIKNKKWEADFSPIDEMGHTWVDTEYSKAYLRHLFAANEFLGKQIATIHNLGFYMWLVREARRQILAGTFREWKDKMVIQMSQRL

SEQ ID NO: 55338 - protein, 376 aa, unidentified
  source 1..376: note = Flavobacterium cupreum
  REGION 1..376: note = tr|A0A434A392|A0A434A392_9FLAO Queuine tRNA-ribosyltransferase OS=Flavobacterium cupreum; OX = 2133766 GN=tgt PE=3 SV=1
MKFDLLQKDPQSKARAGSITTDHGVIETPIFMPVGTVASVKGVHQRELKEDINPDIILGNTYHLYLRPQTEILEKAGGLHKFMNWDRNILTDSGGYQVYSLSNNRKIKEEGVKFKSHIDGSYHFFTPENVMEIQRTIGADIIMAFDECTPYPCDYRYAQRSMHMTHRWLDRCISHLDKVPYKYGYEQTFFPIVQGSTYKDLRRQSAEYIANSGQQGNAIGGLSVGEPAEEMYAMTEVVCEILPEDKPRYLMGVGTPINILENIALGIDMFDCVMPTRNARNGMLFTSNGTINIKNKKWEADFSPIDEMGHTFVDTEYTKAYLRHLFAANEYLGKQIATIHNLGFYMWLVREARKHILAGDFRPWKEMMVKNMSQRL

SEQ ID NO: 55339 - protein, 376 aa, unidentified
  source 1..376: note = Flavobacterium cutihirudinis
  REGION 1..376: note = tr|A0A3D9FJ61|A0A3D9FJ61_9FLAO Queuine tRNA-ribosyltransferase OS=Flavobacterium cutihirudinis; OX = 1265740 GN=tgt PE=3 SV=1
MKFDLLQKDPQSKARAGSITTDHGVIETPIFMPVGTVASVKGVHQRELKDDINPDIILGNTYHLYLRPQTEILEKAGGLHKFMNWDRNILTDSGGYQVYSLSSNRKIKEEGVKFKSHIDGSYHFFTPENVMEIQRTIGADIIMAFDECTPYPCDYRYAQRSMHMTHRWLDRCINHLEKVPYKYGYEQTFFPIVQGSTYKDLRRQSAEYIANAGQQGNAIGGLSVGEPAEEMYAMTEVVCEILPEDKPRYLMGVGTPINILENIALGIDMFDCVMPTRNARNGMLFTANGTINIKNKKWEADFSPIDEMGHTFVDTEYTKAYLRHLFAANEYLGKQIATIHNLGFYMWLVREARKHILAGDFRPWKEMMVKNMSQRL

SEQ ID NO: 55340 - protein, 376 aa, unidentified
  source 1..376: note = Flavobacterium cyanobacteriorum
  REGION 1..376: note = tr|A0A255Z7X9|A0A255Z7X9_9FLAO Queuine tRNA-ribosyltransferase OS=Flavobacterium cyanobacteriorum; OX = 2022802 GN=tgt PE=3 SV=1
MKFDLVTKDPLSKARAGTITTDHGAIQTPIFMPVGTVASVKGVHQRELKEEINPDIILGNTYHLYLRPQADILEKAGGLHKFMNWDRNILTDSGGYQVYSLSANRKIKEEGVKFKSHIDGSYHFFSPESVMEIQRAIGADIIMAFDECTPYPCDYRYAKRSMHMTHRWLDRCIAHLEKVPYKYGYEQTFFPIVQGSTYKDLRAESAEYIANAGAQGNAIGGLSVGEPAEEMYAMTDVVCSILPEDKPRYLMGVGTPVNILENIALGVDMFDCVMPTRNARNGMLFTANGTINIKNKKWEDDFSPLDEMGITFVDTEYTKAYLRHLFAANEYLGKQIATIHNLGFYLWLVREARKHIIEGDFYTWKEKMVKQMSQRL

SEQ ID NO: 55341 - protein, 391 aa, Flavobacterium daejeonense
  REGION 1..391: note = tr|A0A0Q0WC70|A0A0Q0WC70_9FLAO Queuine tRNA-ribosyltransferase OS=Flavobacterium daejeonense; OX = 350893 GN=tgt PE=3 SV=1
MRSRIVGKTIGRETSMKFDLLQKDPLSKARAGSITTDHGVIETPIFMPVGTVASVKGVHQRELKDDINPDIILGNTYHLYLRPQTKILEQAGGLHKFMNWDRNILTDSGGYQVYSLSNSRKIKEEGVKFKSHIDGSYHTFTPENVMEIQRTIGADIIMAFDECTPYPCDYHYAKRSMHMTHRWLDRCINHLDKVPVKYGYDQAFFPIVQGSTYKDLRRQSAEYIANSGQVGNAIGGLSVGEPAEEMYAMTEVVTEILPEDKPRYLMGVGTPINILENIALGIDMFDCVMPTRNARNGMLFTANGTINIKNKKWEADFSPIDEMGITFVDTEYSKAYLRHLFSANEYLGKQIATIHNLGFYMWLVREARKHILAGDFRPWKEMMVKNMSQRL

SEQ ID NO: 55342 - protein, 376 aa, unidentified
  source 1..376: note = Flavobacterium dankookense
  REGION 1..376: note = tr|A0A4R6QE13|A0A4R6QE13_9FLAO Queuine tRNA-ribosyltransferase OS=Flavobacterium dankookense; OX = 706186 GN=tgt PE=3 SV=1
MKFELLANDPNSKARAGTITTDHGVIETPIFMPVGTVGTVKGVHQRELKEDINPDIILGNTYHLYLRPQTEILEKAGGLHKFMNWDRNILTDSGGYQVYSLSANRKIKEEGVKFKSHIDGSYHFFTPENVMEIQRSIGADIIMAFDECTPYPCDYRYAKRSMHMTHRWLDRCITHLDKLPFKYGYEQTFFPIVQGSTYKDLRQQSAEYIANAGQQGNAIGGLSVGEPAEEMYAMTEVVCEILPEDKPRYLMGVGTPINILENIALGIDMFDCVMPTRNARNGMLFTANGTINMKNKKWEADFSPIDEMGITFVDTQYTKAYLRHLFTVNELLGKQIATIHNLGFYMWLVREARKHILAGDFRTWKDMMVKNMSQRL

SEQ ID NO: 55343 - protein, 376 aa, Flavobacterium defluvii
  REGION 1..376: note = tr|A0A1M5MXX8|A0A1M5MXX8_9FLAO Queuine tRNA-ribosyltransferase OS=Flavobacterium defluvii; OX = 370979 GN=tgt PE=3 SV=1
MKFDLLQKDPQSKARAGSITTDHGVIETPIFMPVGTVASVKGVHQRELKDDINPDIILGNTYHLYLRPQTEILEKAGGLHKFMNWDRNILTDSGGYQVYSLSSNRKIKEEGVKFKSHIDGSYHVFTPENVMEIQRTIGADIIMAFDECTPYPCDYRYAQRSMHMTHRWLDRCINHLEKVPYKYGYEQTFFPIVQGSTYKDLRRQSAEYIANAGQQGNAIGGLSVGEPAEEMYAMTEVVCEILPEDKPRYLMGVGTPINILENIALGIDMFDCVMPTRNARNGMLFTANGTINIKNKKWEADFSPIDEMGHTFVDVQYTKAYLRHLFAANEYLGKQIATIHNLGFYMWLVREARKHILAGDFKPWKEMMVKNMSQRL

SEQ ID NO: 55344 - protein, 376 aa, Flavobacterium degerlachei
  REGION 1..376: note = tr|A0A1H3GAL7|A0A1H3GAL7_9FLAO Queuine tRNA-ribosyltransferase OS=Flavobacterium degerlachei; OX = 229203 GN=tgt PE=3 SV=1
MKFDLLQKDPQSKARAGSITTDHGVIETPIFMPVGTVASVKGVHQRELKLDINPDIILGNTYHLYLRPQTEILEKAGGLHKFMNWDRNILTDSGGYQVYSLSANRKIKEEGVKFKSHIDGSYHFFTPENVMEIQRTIGADIIMAFDECTPYPCDYNYAKRSMKMTHRWLDRCVNHLDKVPVKYGYDQAFFPIVQGSCYKDLRQQSAEYIANSNQVGNAIGGLSVGEPAEEMYAMTEVVCEILPEDKPRYLMGVGTPINILENIALGVDMFDCVMPTRNARNGMLFTANGTINIKNKKWEDDFSPIDEMAITYVDTEYTKAYLRHLFAANEYLGKQIATIHNLGFYMWLVREARKHIIAGDFRPWKEMMVKNMSQRL

SEQ ID NO: 55345 - protein, 376 aa, unidentified
  source 1..376: note = Flavobacterium endophyticum
  REGION 1..376: note = tr|A0A495LZY5|A0A495LZY5_9FLAO Queuine tRNA-ribosyltransferase OS=Flavobacterium endophyticum; OX = 1540163 GN=tgt PE=3 SV=1
MKFELLQNDPNSKARAGKITTDHGVIETPIFMPVGTVASVKGVHQRELKNDINPDIILGNTYHLYLRPQTQILEKAGGLHKFMNWDRNILTDSGGYQVYSLSSNRKIKEEGVKFKSHIDGSYHVFTPENVMEIQRTIGADIIMAFDECTPYPCDYRYAQRSMHMTHRWLDRCINHLDKLPYKYGYEQTFFPIVQGSTYKDLRQQSAEYIANAGAQGNAIGGLSVGEPAEEMYAMTEVVTEILPKDKPRYLMGVGTPINILENIALGIDMFDCVMPTRNARNGMLFTAHGTINIKNKKWEDDFSPLDEMGHTFVDTEYTKAYLRHLFAANEYLGKQIATIHNLGFYMWLVREARKHILAGDFRVWKEMMVKQMDQRL

SEQ ID NO: 55346 - protein, 376 aa, unidentified
  source 1..376: note = Flavobacterium enshiense
  REGION 1..376: note = tr|V6S9H4|V6S9H4_9FLAO Queuine tRNA-ribosyltransferase OS=Flavobacterium enshiense DK69; OX = 1107311 GN=tgt PE=3 SV=1
MKFDLVQKDPQTKARAGFITTDHGVIETPIFMPVGTVATVKGVHQRELKDDINPDIILGNTYHLYLRPQTEILEKAGGLHKFMNWDRNILTDSGGYQVYSLSSNRKIKEEGVKFKSHIDGSYHFFTPENVMEIQRTIGADIIMAFDECTPYPCDYRYAQKSMKMTHRWLDRCIRHLDNLPFKYGYEQTFFPIVQGSTYKDLRAQSAEYIANAGAQGNAIGGLSVGEPAEEMYAMTEVVTAILPEDKPRYLMGVGTPINILENIALGIDMFDCVMPTRNARNGMLFTANGTINIKNKKWEADFSPIDEMGHTFVDTEYSKAYLRHLFSVNEYLGKQIATIHNLGFYMWLVREARTRILAGDFREWKEMMVKNMSQRL

SEQ ID NO: 55347 - protein, 376 aa, unidentified
  source 1..376: note = Flavobacterium faecale
  REGION 1..376: note = tr|A0A2S1LJ18|A0A2S1LJ18_9FLAO Queuine tRNA-ribosyltransferase OS=Flavobacterium faecale; OX = 1355330 GN=tgt PE=3 SV=1
MKFDLLKKDPQSKARAGSITTDHGVIETPIFMPVGTVASVKGVHQRELREDINPDIILGNTYHLYLRPKTEILEKAGGLHKFMNWDRPILTDSGGYQVYSLSSNRKIKEDGVKFKSHIDGSYHVFTPENVMEIQRTIGADIIMAFDECTPYPCDYHYARRSMNMTHRWLERCITHLDKLPMKYGYNQHFFPIIQGSVYKDLREKSAEYIANTNQVGNAIGGLSVGEPAEEMYAMTEVVTAILPEDKPRYLMGVGTPINILENIALGIDMFDCVMPTRNARNGMLFTANGTINIKNKKWEADFSPIDDMAITWVDTEYTKAYLRHLFAANEYLGKQIATIHNLGFYMWLVREARKHIIAGDFRTWKDMMVKNMSQRL

SEQ ID NO: 55348 - protein, 376 aa, Flavobacterium flevense
  REGION 1..376: note = tr|A0A4Y4B4S0|A0A4Y4B4S0_9FLAO Queuine tRNA-ribosyltransferase OS=Flavobacterium flevense OX=983; GN = tgt PE=3 SV=1
MKFDLLQKDPLSKARAGSITTDHGVIETPIFMPVGTVASVKGVHQRELKNDINPDIILGNTYHLYLRPQTKILEAAGGLHKFMNWDRNILTDSGGYQVYSLSNNRKIKEEGVKFKSHIDGSYHFFSPESVMEIQRTIGADIIMAFDECTPYPCDYRYAQRSMHMTHRWLDRCINHLDKVPVKYGYDQAFFPIVQGSTYKDLRRQSAEYIANSNQVGNAIGGLSVGEPAEEMYAMTEVVTEILPEDKPRYLMGVGTPINILENIALGIDMFDCVMPTRNARNGMLFTANGTINIKNKKWEDDFSPIDEMGITFVDTEYSKAYLRHLFAANEYLGKQIATIHNLGFYMWLVREARKHIIAGDFRSWKEMMVKNMSQRL

SEQ ID NO: 55349 - protein, 376 aa, Flavobacterium fluvii
  REGION 1..376: note = tr|A0A1M5P3W2|A0A1M5P3W2_9FLAO Queuine tRNA-ribosyltransferase OS=Flavobacterium fluvii OX=468056; GN = tgt PE=3 SV=1
MKFDLLQKDPHTKARAGSITTDHGVIETPIFMPVGTVASVKGVHQRELKEEINPDIILGNTYHLYLRPQTEILEKAGGLHKFMNWDRNILTDSGGYQVYSLSANRKIKEEGVKFKSHIDGSYHFFTPENVMEIQRTIGADIIMAFDECTPYPCDYRYAQRSMHMTHRWLDRCINHLEKVPTKYGYDQTFFPIIQGSTYKDLRRQSAEYIANSGQQGNAIGGLSVGEPAEEMYAMTEVVCEILPEDKPRYLMGVGTPINILENIALGIDMFDCVMPTRNARNGMLFTANGTINIKNKKWEADFSPVDEMGHTFVDTEYTKAYLRHLFAANEYLGKQIATIHNLGFYMWLVREARKHILAGDFRTWKEMMVRNMSQRL

SEQ ID NO: 55350 - protein, 376 aa, unidentified
  source 1..376: note = Flavobacterium fontis
  REGION 1..376: note = tr|A0A1M5CJU4|A0A1M5CJU4_9FLAO Queuine tRNA-ribosyltransferase OS=Flavobacterium fontis; OX = 1124188 GN=tgt PE=3 SV=1
MKFELLHTDPQSQARAGKITTDHGFIETPIFMPVGTVASVKGVHQRELRDDINPDIILGNTYHLYLRPQLDILEKAGGLHKFMNWDRNILTDSGGYQVYSLSANRKIKEEGVKFKSHIDGSYHFFSPENVMEIQRTIGADIIMAFDECTPYPCDYRYAKRSMHMTHRWLDRCVAHLKTLPPKYGYEQTLFPIVQGSTYKDLRQMSAEYIANVGAEGNAIGGLSVGEPAEEMYAMTEVVTAVLPKDKPRYLMGVGTPINILENIALGIDMFDCVMPTRNARNGMLFTAHGVINIKNKKWEDDFSPIDEMGITFVDTEYSKAYLRHLFAANEYLGKQIATIHNLGFYLWLVREARKHIIAGDFRDWKNKMVQQMSQRL

SEQ ID NO: 55351 - protein, 376 aa, Flavobacterium frigidimaris
  REGION 1..376: note = tr|A0A1M5VUY8|A0A1M5VUY8_FLAFR Queuine tRNA-ribosyltransferase OS=Flavobacterium frigidimaris; OX = 262320 GN=tgt PE=3 SV=1
MKFDLLKKDPQSKARAGSITTDHGVIETPIFMPVGTVASVKGVHQRELKQDINPDIILGNTYHLYLRPQTEILEKAGGLHKFMNWDRNILTDSGGYQVYSLSNNRKIKEEGVKFKSHIDGSYHFFSPESVMEIQRTIGADIIMAFDECTPYPCDYRYAQRSMHMTHRWLDRCISHLDKLPFKYGYEQTFFPIVQGSTYKDLRQQSAEYIANSGQQGNAIGGLSVGEPAEEMYAMTEVVCEILPEDKPRYLMGVGTPINILENIALGIDMFDCVMPTRNARNGMLFTANGTINIKNKKWEDDFSPIDEMGHTFVDTEYTKAYLRHLFAANEYLGKQIATIHNLGFYMWLVREARKHILAGDFRPWKEMMVKNMSQRL

SEQ ID NO: 55352 - protein, 376 aa, Flavobacterium frigoris
  REGION 1..376: note = tr|H7FLH8|H7FLH8_FLAFP Queuine tRNA-ribosyltransferase OS=Flavobacterium frigoris (strain PS1) OX=1086011 GN=tgt PE=3 SV=1
MKFDLLKKDPQSKARAGSITTDHGVIETPIFMPVGTVASVKGVHQRELKLDINPDIILGNTYHLYLRPQTEILEKAGGLHKFMNWDRNILTDSGGYQVYSLSANRKIKEEGVKFKSHIDGSYHFFTPENVMEIQRTIGADIIMAFDECTPYPCDYNYAKRSMKMTHRWLDRCVNHLEKVPVKYGYDQAFFPIVQGSCYKDLRQQSAEYIANSNQVGNAIGGLSVGEPAEEMYAMTEVVCEILPEDKPRYLMGVGTPINILENIALGVDMFDCVMPTRNARNGMLFTANGTINIKNKKWEDDFSPIDEMAITYVDTEYTKAYLRHLFAANEYLGKQIATIHNLGFYMWLVREARKHILAGDFRPWKEMMVKNMNQRL

SEQ ID NO: 55353 - protein, 376 aa, Flavobacterium frigoris
  REGION 1..376: note = tr|A0A1H9RLU7|A0A1H9RLU7_FLAFI Queuine tRNA-ribosyltransferase OS=Flavobacterium frigoris; OX = 229204 GN=tgt PE=3 SV=1
MKFDLLQKDPQTKARAGSITTDHGVIETPIFMPVGTVASVKGVHQRELKEDINPDIILGNTYHLYLRPQMEILEKAGGLHKFMNWDRNILTDSGGYQVYSLSANRKIKEEGVKFKSHIDGSFHFFTPENVMEIQRTIGADIIMAFDECTPYPCDYRYAQRSMKMTHRWLDRCVSHLETVPVKYGYDQAFFPIVQGSCYKDLRQQSAEYIANSNQVGNAIGGLSVGEPAEEMYAMTEIVCEILPEDKPRYLMGVGTPINILENIALGVDMFDCVMPTRNARNGMLFTANGTINIKNKKWADDFSPIDEMAITYVDTEYTKAYLRHLFAANEYLGKQIATIHNLGFYMWLVREARKHILAGDFRTWKEMMVRNMSQRL

SEQ ID NO: 55354 - protein, 376 aa, Flavobacterium fryxellicola
  REGION 1..376: note = tr|A0A167Y038|A0A167Y038_9FLAO Queuine tRNA-ribosyltransferase OS=Flavobacterium fryxellicola; OX = 249352 GN=tgt PE=3 SV=1
MKFDLLKKDPLSKARAGSITTDHGVIETPIFMPVGTVASVKGVHQRELKEDINPDIILGNTYHLYLRPQTEILEKAGGLHKFMNWDRNILTDSGGYQVYSLSANRKIKEEGVKFKSHIDGSYHFFTPENVMEIQRTIGADIIMAFDECTPYPCDYRYAQRSMHMTHRWLDRCVNHLEKVPTKYGYDQTFFPIVQGSTYKDLRRQSAEYIANSNQQGNAIGGLSVGEPAEEMYAMTEVVCEVLPEDKPRYLMGVGTPINILENIALGIDMFDCVMPTRNARNGMLFTANGTINIKNKKWADDFSPIDEMAITYVDTEYTKAYLRHLFAANEYLGKQIATIHNLGFYMWLVREARKHILAGDFRSWKEMMVKNMSQRL

SEQ ID NO: 55355 - protein, 376 aa, Flavobacterium gillisiae
  REGION 1..376: note = tr|A0A1H4FIA9|A0A1H4FIA9_9FLAO Queuine tRNA-ribosyltransferase OS=Flavobacterium gillisiae; OX = 150146 GN=tgt PE=3 SV=1
MKFDLLQKDPQTKARAGSITTDHGVIETPIFMPVGTVASVKGVHQRELKEDINPDIILGNTYHLYLRPQMEILEKAGGLHKFMNWDRNILTDSGGYQVYSLSANRKIKEEGVKFKSHIDGSFHFFTPENVMEIQRTIGADIIMAFDECTPYPCDYRYAQRSMKMTHRWLDRCVDHLDKVPVKYGYDQAFFPIVQGSCYKDLRQQSAEYIANSNQVGNAIGGLSVGEPAEEMYAMTEIVCEILPEDKPRYLMGVGTPINILENIALGVDMFDCVMPTRNARNGMLFTANGTINIKNKKWADDFSPIDEMAITYVDTEYTKAYLRHLFAANEYLGKQIATIHNLGFYMWLVREARKHILAGDFRTWKEMMVRNMNQRL

SEQ ID NO: 55356 - protein, 376 aa, unidentified
  source 1..376: note = Flavobacterium gilvum
  REGION 1..376: note = tr|A0A085EP61|A0A085EP61_9FLAO Queuine tRNA-ribosyltransferase OS=Flavobacterium gilvum; OX = 1492737 GN=tgt PE=3 SV=1
MKFDLLKTDPQSKARAGSITTDHGVIETPIFMPVGTAASVKGVHQRELKEEINPDIILGNTYHLYLRPQTEILEKAGGLHKFMNWDRNILTDSGGYQVYSLSANRKIKEEGVKFKSHIDGSYHFFTPENVMEIQRTIGADIIMAFDECTPYPCDYRYAQRSMHMTHRWLDRCINHLEKLPFKYGYEQTFFPIVQGSTYKDLRRQSAEYIANSGQQGNAIGGLSVGEPAEEMYAMTEVVCEILPEDKPRYLMGVGTPINILENIALGIDMFDCVMPTRNARNGMLFTANGTINIKNKKWEADFSPIDEMGYTFVDTEYSKAYLRHLFAANEYLGKQIATIHNLGFYMWLVREARKHILAGDFKPWKEMMVKNMSQRL

SEQ ID NO: 55357 - protein, 376 aa, Flavobacterium glaciei
  REGION 1..376: note = tr|A0A562Q795|A0A562Q795_9FLAO Queuine tRNA-ribosyltransferase OS=Flavobacterium glaciei; OX = 386300 GN=tgt PE=3 SV=1
MKFDLLKKDPQSKARAGSITTDHGVIETPIFMPVGTVASVKGVHQRELKEDINPDIILGNTYHLYLRPQTEILEKAGGLHKFMNWDRNILTDSGGYQVYSLSANRKIKEEGVKFKSHIDGSYHFFTPENVMEIQRTIGADIIMAFDECTPYPCDYNYAKRSMKMTHRWLDRCINHLDTLPFKYGYEQTFFPIVQGSTYKDLRAQSAEYIANSNQQGNAIGGLSVGEPAEEMYAMTEVVCEILPEDKPRYLMGVGTPINILENIALGIDMFDCVMPTRNARNGMLFTANGTINIKNKKWEADFSPIDEMGITFVDTEYTKAYLRHLFAANEYLGKQIATIHNLGFYMWLVREARKHILAGDFRPWKEMMVKNMSQRL

SEQ ID NO: 55358 - protein, 376 aa, Flavobacterium glycines
  REGION 1..376: note = tr|A0A1B9DTS4|A0A1B9DTS4_9FLAO Queuine tRNA-ribosyltransferase OS=Flavobacterium glycines; OX = 551990 GN=tgt PE=3 SV=1
MKFDLLQKDPLSKARAGSITTDHGVIETPIFMPVGTVASVKGVHQRELREEINPDIILGNTYHLYLRPQTKILEAAGGLHKFMNWDRNILTDSGGYQVYSLSNSRKIKEEGVKFKSHIDGSYHTFTPENVMEIQRTIGADIIMAFDECTPYPCDYNYAKRSMHMTHRWLDRCINHLDKVPVKYGYDQAFFPIVQGSTYKDLRRQSAEYIANSGQVGNAIGGLSVGEPAEEMYAMTEVVTEILPEDKPRYLMGVGTPINILENIALGIDMFDCVMPTRNARNGMLFTANGTINIKNKKWEADFSPIDEMGITFVDTEYSKAYLRHLFAANEYLGKQIATIHNLGFYMWLVREARKHILAGDFRSWKEMMVKNMSQRL

SEQ ID NO: 55359 - protein, 376 aa, Flavobacterium granuli
  REGION 1..376: note = tr|A0A1M5QRX1|A0A1M5QRX1_9FLAO Queuine tRNA-ribosyltransferase OS=Flavobacterium granuli; OX = 280093 GN=tgt PE=3 SV=1
MKFDLLQKDPQSKARAGSITTDHGVIETPIFMPVGTVASVKGVHQRELKEDINPDIILGNTYHLYLRPQTEILEKAGGLHKFMNWDRNILTDSGGYQVYSLSSNRKIKEEGVKFKSHIDGSYHFFTPENVMEIQRTIGADIIMAFDECTPYPCDYNYAKRSMKMTHRWLDRCVNHLEKVPVKYGYDQAFFPIVQGSCYKDLRQQSAEYIANSNQVGNAIGGLSVGEPAEEMYAMTEVVCEILPEDKPRYLMGVGTPINILENIALGVDMFDCVMPTRNARNGMLFTANGTINIKNKKWEADFSPIDEMGHTFVDTEYTKAYLRHLFAANEYLGKQIATIHNLGFYMWLVREARKHIIAGDFRSWKEMMVRNMSQRL

SEQ ID NO: 55360 - protein, 376 aa, Flavobacterium haoranii
  REGION 1..376: note = tr|A0A1M6B7P7|A0A1M6B7P7_9FLAO Queuine tRNA-ribosyltransferase OS=Flavobacterium haoranii; OX = 683124 GN=tgt PE=3 SV=1
MKFDLLKKDPKSQARAGVVTTDHGVIETPIFMPVGTVASVKGVHQRELKDDINPDIILGNTYHLYLRPQTDILEKAGGLHKFMNWDRNILTDSGGYQVYSLSSNRKIKEEGVKFKSHIDGSYHFFSPENVMEIQRTIGADIIMAFDECTPYPCDYRYAKRSMHMTHRWLDRCVTHFNNTPAKYGYEQTLFPIVQGSTYKDLRQQSAEYIANVGAQGNAIGGLSVGEPAEEMYAMTEVVTAILPEDKPRYLMGVGTPVNILENIALGIDMFDCVMPTRNARNGMLFTANGIINIKNKKWEADFSPIDEMGHTFVDLEYSKSYLRHLFAANEYLGKQIATIHNLGFYLWLVREARRQILAGTFREWKDKMVIQLAQRL

SEQ ID NO: 55361 - protein, 376 aa, Flavobacterium hercynium
  REGION 1..376: note = tr|A0A226HN72|A0A226HN72_9FLAO Queuine tRNA-ribosyltransferase OS=Flavobacterium hercynium; OX = 387094 GN=tgt PE=3 SV=1
MKFDLLQKDPQSKARAGSITTDHGVIETPIFMPVGTVASVKGVHQRELKDDINPDIILGNTYHLYLRPQTEILEKAGGLHKFMNWDRNILTDSGGYQVYSLSNNRKIKEEGVKFKSHIDGSYHFFTPENVMEIQRTIGADIIMAFDECTPYPCDYRYAQRSMHMTHRWLDRCINHLDKVPYKYGYEQTFFPIVQGSTYKDLRRQSAEYIANSGQQGNAIGGLSVGEPAEEMYAMTEVVCEILPEDKPRYLMGVGTPINILENIALGIDMFDCVMPTRNARNGMLFTANGTINIKNKKWEADFSPVDEMGHTFVDTEYTKAYLRHLFAANEYLGKQIATIHNLGFYMWLVREARKHILAGDFRPWKEMMVKNMSQRL

SEQ ID NO: 55362 - protein, 376 aa, Flavobacterium hibernum
  REGION 1..376: note = tr|A0A0D0F9X2|A0A0D0F9X2_9FLAO Queuine tRNA-ribosyltransferase OS=Flavobacterium hibernum; OX = 37752 GN=tgt PE=3 SV=1
MKFDLLQKDPQSKARAGSITTDHGVIETPIFMPVGTVASVKGVHQRELKEDINPDIILGNTYHLYLRPQTEILEKAGGLHKFMNWDRNILTDSGGYQVYSLSNNRKIKEEGVKFKSHIDGSYHFFSPESVMEIQRTIGADIIMAFDECTPYPCDYRYAQRSMHMTHRWLDRCINHLDKVPYKYGYEQTFFPIVQGSTYKDLRRQSAEYIANAGQQGNAIGGLSVGEPAEEMYAMTEVVCEILPEDKPRYLMGVGTPINILENIALGIDMFDCVMPTRNARNGMLFTANGTINIKNKKWEADFSPIDEMGHTFVDTEYTKAYLRHLFAANEYLGKQIATIHNLGFYMWLVREARKHILAGDFRPWKEMMVKNMSQRL

SEQ ID NO: 55363 - protein, 376 aa, Flavobacterium hydatis
  REGION 1..376: note = tr|A0A085ZCB4|A0A085ZCB4_FLAHY Queuine tRNA-ribosyltransferase OS=Flavobacterium hydatis OX=991; GN = tgt PE=3 SV=1
MKFDLLQKDLQSKARAGSITTDHGVIETPIFMPVGTVASVKGVHQRELKNDINPDIILGNTYHLYLRPQTEILEKAGGLHKFMNWDRNILTDSGGYQVYSLSANRKIKEEGVKFKSHIDGSYHFFTPENVMEIQRTIGADIIMAFDECTPYPCDYRYAQRSMHMTHRWLDRCISHLDKVPFKYGYEQTFFPIVQGSTYKDLRRQSAEYIANAGQQGNAIGGLSVGEPAEEMYAMTEIVCEILPEDKPRYLMGVGTPINILENIALGVDMFDCVMPTRNARNGMLFTANGSINIKNKKWEADFSPIDEMGITFVDTEYTKAYLRHLFAANEYLGKQIATIHNLGFYMWLVREARKHILAGDFMPWKEMMVKNMSQRL

SEQ ID NO: 55364 - protein, 376 aa, Flavobacterium indicum
  REGION 1..376: note = tr|H8XU77|H8XU77_FLAIG Queuine tRNA-ribosyltransferase OS=Flavobacterium indicum (strain DSM 17447 / CIP 109464 / GPTSA100-9) OX=1094466 GN=tgt; PE = 3 SV=1
MKFDLLKKDPKSKARAGVVTTDHGVIETPIFMPVGTVASVKGVHQRELKQDINPDIILGNTYHLYLRPQTDILEKAGGLHKFMNWDRNILTDSGGYQVYSLSSNRKIKEEGVKFKSHIDGSYHFFSPENVMEIQRTIGADIIMAFDECTPYPCDYRYAKRSMHMTHRWLDRCIAHLDKLPFKYGYSQAFFPIVQGSTYKDLRQQSAEYIASVGAEGNAIGGLSVGEPAEEMYAMTEVVTAILPEDKPRYLMGVGTPINILENIALGIDMFDCVMPTRNARNGMLFTANGIINIKNKKWEADFSPIDEMGHTFVDLEYSKAYLRHLFAANEYLGKQIATIHNLGFYMWLVREARRQILAGTFREWKEKMVVQMAQRL

SEQ ID NO: 55365 - protein, 376 aa, Flavobacterium johnsoniae
  REGION 1..376: note = tr|A5FNZ0|A5FNZ0_FLAJ1 Queuine tRNA-ribosyltransferase OS=Flavobacterium johnsoniae (strain ATCC 17061 / DSM 2064 / UW101) OX=376686 GN=tgt; PE = 3 SV=1
MKFDLLQKDPQSKARAGSITTDHGVIETPIFMPVGTVASVKGVHQRELKEEINPDIILGNTYHLYLRPQTEILEKAGGLHKFMNWDRNILTDSGGYQVYSLSSNRKIKEEGVKFKSHIDGSYHFFTPENVMEIQRTIGADIIMAFDECTPYPCDYRYAQRSMHMTHRWLDRCINHLEKVPYKYGYEQTFFPIVQGSTYKDLRRQSAEYIANAGQQGNAIGGLSVGEPAEEMYAMTEVVCEILPEDKPRYLMGVGTPINILENIALGIDMFDCVMPTRNARNGMLFTANGTINIKNKKWEADFSPIDEMAHTFVDTEYSKAYLRHLFAANEYLGKQIATIHNLGFYMWLVREARKHILAGDFRPWKEMMVKNMSQRL

SEQ ID NO: 55366 - protein, 376 aa, Flavobacterium johnsoniae
  REGION 1..376: note = tr|A0A2W5TH73|A0A2W5TH73_FLAJO Queuine tRNA-ribosyltransferase OS=Flavobacterium johnsoniae; OX = 986 GN=tgt PE=3 SV=1
MKFELLQNDPNSKARAGKITTDHGVIETPIFMPVGTVASVKGVHQRELKNDINPDIILGNTYHLYLRPQTDILEKAGGLHKFMNWDRNILTDSGGYQVYSLSSNRKIKEEGVKFKSHIDGSYHVFTPENVMEIQRTIGADIIMAFDECTPYPCDYRYAQRSMHMTHRWLDRCISHLDKVPYKYGYEQTFFPIVQGSTYKDLRQQSAEYIANAGAEGNAIGGLSVGEPAEEMYAMTEVVTEILPKDKPRYLMGVGTPINILENIALGIDMFDCVMPTRNARNGMLFTAHGTINIKNKKWESDFSPLDEMGHTFVDTEYTKAYLRHLFAANEYLGKQIATIHNLGFYMWLVREARKHILAGDFRVWKEMMVKQMDQRL

SEQ ID NO: 55367 - protein, 376 aa, unidentified
  source 1..376: note = Flavobacterium kingsejongi
  REGION 1..376: note = tr|A0A2S1LTK3|A0A2S1LTK3_9FLAO Queuine tRNA-ribosyltransferase OS=Flavobacterium kingsejongi; OX = 1678728 GN=tgt PE=3 SV=1
MKFDFVTKDPHTKARAGAITTDHGVIETPIFMPVGTVASVKGVHQRELKEEINPDIILGNTYHLYLRPKTEILEKAGGLHKFMNWDRNILTDSGGYQVYSLSANRKIKEEGVKFKSHIDGSYHFFTPENVMEIQRTIGADIIMAFDECTPYPCDYRYAQRSMHMTHRWLDRCINHLEKLPFKYGYEQTFFPIVQGSTYKDLRMQSAEYIANSGQQGNAIGGLSVGEPAEEMYAMTEVVCDILPEDKPRYLMGVGTPINILENIALGVDMFDCVMPTRNARNGMLFTAHGTINIKNRKWEDDFSPLDENGTTFVDREYSKAYLRHLFAANEYLGKQIATIHNLGFYMWLVREARKHIIGGDFRVWKEMMVKQMDKRL

SEQ ID NO: 55368 - protein, 376 aa, unidentified
  source 1..376: note = Flavobacterium lacus
  REGION 1..376: note = tr|A0A328WM75|A0A328WM75_9FLAO Queuine tRNA-ribosyltransferase OS=Flavobacterium lacus OX=1353778; GN = tgt PE=3 SV=1
MKFDLLTTDPHSQARAGSITTDHGVIETPIFMPVGTVASVKGVHQRELKNDINPDIILGNTYHLYLRPQTEILEKAGGLHKFMNWDRNILTDSGGYQVYSLSSNRKIKEEGVKFKSHIDGSYHFFSPENVMEIQRTIGADIIMAFDECTPYPCDYNYARRSMHMTHRWLDRCINHLEKLPFQYGFEQTFFPIVQGSTYKDLRQQSAEYIANAGAQGNAIGGLSVGEPAEEMYAMTEVVTAILPQDKPRYLMGVGTPINILENIALGIDMFDCVMPTRNARNGMLFTANGSINIKNKKWEDDFSPIDEMGITFVDTEYTKAYLRHLFAANEYLGKQIATIHNLGFYMWLVREARKHIIAGDFKVWKDQMVKQMSQRL

SEQ ID NO: 55369 - protein, 376 aa, Flavobacterium limicola
  REGION 1..376: note = tr|A0A495RSN7|A0A495RSN7_9FLAO Queuine tRNA-ribosyltransferase OS=Flavobacterium limicola; OX = 180441 GN=tgt PE=3 SV=1
MKFDLLKKDPQSKARAGSITTDHGVIETPIFMPVGTVASVKGVHQRELKEDINPDIILGNTYHLYLRPQTEILEKAGGLHKFMNWDRNILTDSGGYQVYSLSANRKIKEEGVKFKSHIDGSYHFFTPENVMEIQRTIGADIIMAFDECTPYPCDYNYAKRSMKMTHRWLDRCINHLDTQPVKYGYDQAFFPIVQGSCYKDLRQQSAEYIANSNQVGNAIGGLSVGEPAEEMYAMTEVVCEILPEDKPRYLMGVGTPINILENIALGIDMFDCVMPTRNARNGMLFTANGTINIKNKKWEADFSPIDEMAITYVDTEYTKAYLRHLFAANEYLGKQIATIHNLGFYMWLVREARKHILAGDFRPWKEMMVKNMSQRL

SEQ ID NO: 55370 - protein, 376 aa, unidentified
  source 1..376: note = Flavobacterium limnosediminis
  REGION 1..376: note = tr|V6SK12|V6SK12_9FLAO Queuine tRNA-ribosyltransferase OS=Flavobacterium limnosediminis JC2902 OX=1341181 GN=tgt PE=3 SV=1
MKFDLLKKDPQTKARAGSITTDHGVIETPIFMPVGTVASVKGVHQRELKDDINPDIILGNTYHLYLRPQTDILEKAGGLHKFMNWDRNILTDSGGYQVYSLSSNRKIKEEGVKFKSHIDGSYHVFTPENVMEIQRTIGADIIMAFDECTPYPCDYRYAQKSMKMTHRWLDRCINHLEKLPFKYGYEQTFFPIVQGSTYKDLRAQSAEYIANAGAQGNAIGGLSVGEPAEEMYAMTEVVTAILPEDKPRYLMGVGTPANILENIALGIDMFDCVMPTRNARNGMLFTANGTINIKNKKWEADFSPIDEMGHTFVDTEYSKAYLRHLFAANEYLGKQIATIHNLGFYMWLVREARMHILAGDFREWKEMMVKNMSQRL

SEQ ID NO: 55371 - protein, 387 aa, Flavobacterium lindanitolerans
  REGION 1..387: note = tr|A0A497TZU3|A0A497TZU3_9FLAO Queuine tRNA-ribosyltransferase OS=Flavobacterium lindanitolerans; OX = 428988 GN=tgt PE=3 SV=1
MPPKVWDKEKRMKFELLQNDPNSKARAGKITTDHGVIETPIFMPVGTVASVKGVHQRELKNDINPDIILGNTYHLYLRPQTDILEKAGGLHKFMNWDRNILTDSGGYQVYSLSSNRKIKEEGVKFKSHIDGSYHVFTPENVMEIQRTIGADIIMAFDECTPYPCDYRYAQRSMHMTHRWLDRCISHLDKVPYKYGYEQTFFPIVQGSTYKDLRQQSAEYIANAGAEGNAIGGLSVGEPAEEMYAMTEVVTEILPKDKPRYLMGVGTPINILENIALGIDMFDCVMPTRNARNGMLFTAHGTINIKNKKWESDFSPLDEMGHTFVDTEYTKAYLRHLFAANEYLGKQIATIHNLGFYMWLVREARKHILAGDFRVWKEMMVKQMDQRL

SEQ ID NO: 55372 - protein, 376 aa, unidentified
  source 1..376: note = Flavobacterium macacae
  REGION 1..376: note = tr|A0A3P3WIB2|A0A3P3WIB2_9FLAO Queuine tRNA-ribosyltransferase OS=Flavobacterium macacae; OX = 2488993 GN=tgt PE=3 SV=1
MKFELLHTDPATQARAGKITTDHGVIETPIFMPVGTVASVKGVHQRELKEEINPDIILGNTYHLYLRPQTQILEKAGGLHKFMNWDRNILTDSGGYQVYSLSSNRKIKEEGVKFKSHIDGSYHVFTPENVMEIQRTIGADIIMAFDECTPYPCDYRYAQRSMHMTHRWLDRCINHLDKLPYKYGYEQTFFPIVQGSTYKDLRQQSAEYIANAGAQGNAIGGLSVGEPAEEMYAMTEVVTAILPKDKPRYLMGVGTPINILENIALGIDMFDCVMPTRNARNGMLFTAHGTINIKNKKWEDDFSPIDEMAHTFVDTEYSKAYLRHLFAANEYLGKQIATIHNLGFYMWLVREARKHILAGDFRAWKEMMVKQMDKRL

SEQ ID NO: 55373 - protein, 376 aa, unidentified
  source 1..376: note = Flavobacterium magnum
  REGION 1..376: note = tr|A0A2S0RE67|A0A2S0RE67_9FLAO Queuine tRNA-ribosyltransferase OS=Flavobacterium magnum; OX = 2162713 GN=tgt PE=3 SV=1
MKFDLLQKDPQSKARAGRITTDHGVIETPIFMPVGTVASVKGVHQRELKDEINPDIILGNTYHLYLRPQTEILEKAGGLHKFMNWDRNILTDSGGYQVYSLSANRKIKEEGVKFKSHIDGSYHYFTPENVMEIQRTIGADIIMAFDECTPYPCDYRYAQRSMHMTHRWLDRCISHLDKLPFKYGYEQTFFPIVQGSTYKDLRKQSAEYIANAGQQGNAIGGLSVGEPAEEMYAMTEVVCDILPEDKPRYLMGVGTPINILENIALGIDMFDCVMPTRNARNGMLFTAHGTINIKNKKWEADFSPLDEMAHTFVDVEYSKAYLRHLFAANEYLGKQIATIHNLGFYMWLVREARKHILAGDFREWKEKMVKQMDQRL

SEQ ID NO: 55374 - protein, 376 aa, unidentified
  source 1..376: note = Flavobacterium marinum
  REGION 1..376: note = tr|A0A1H6K597|A0A1H6K597_9FLAO Queuine tRNA-ribosyltransferase OS=Flavobacterium marinum; OX = 1159016 GN=tgt PE=3 SV=1
MTFDLLHTDINSKARAGVITTDHGVIETPIFMPVGTAATVKGVHQRELKEDINPDIILGNTYHLYLRPKTEILEKAGGLHKFMNWDRNILTDSGGFQVYSLSGRRKIKEEGVKFKSHIDGSYHFFSPENVMEIQRTIGADIIMAFDECTPYPCDYRYAKRSMHMTHRWLDRCISHLEKVPVKYGYDQAFFPIVQGSTFKDLRAESAEYIANAGAVGNAIGGLSVGEPAEEMYEMCEIVTNILPKDKPRYLMGVGTPINILENIALGIDMFDCVMPTRNARNGMLFTSEGFINIKNKKWADDFSPIDPMAITWVDTDYSKAYLRHLFISDEYLAKQIATIHNLGFYMWLVREARKQILAGTFYAWKEKMVKQMATRL

SEQ ID NO: 55375 - protein, 376 aa, Flavobacterium micromati
  REGION 1..376: note = tr|A0A1M5GKF0|A0A1M5GKF0_9FLAO Queuine tRNA-ribosyltransferase OS=Flavobacterium micromati; OX = 229205 GN=tgt PE=3 SV=1
MKFDLLKKDPLSKARAGSITTDHGVIETPIFMPVGTVASVKGVHQRELKQDINPDVILGNTYHLYLRPQTEILEKAGGLHKFMNWDRNILTDSGGYQVYSLSANRKIKEEGVKFKSHIDGSYHFFTPENVMEIQRTIGADIIMAFDECTPYPCDYRYAQRSMHMTHRWLNRCVDHLAKTPVKYGYDQAFFPIVQGSTYKDLRRQSAEYIANSNQVGNAIGGLSVGEPAEEMYAMTEVVCEILPEDKPRYLMGVGTPINILENIALGVDMFDCVMPTRNARNGMLFTANGSINIKNKKWEADFSPIDEMGITFVDTEYTKAYLRHLFAANEYLGKQIATIHNLGFYMWLVREARKHILAGDFKPWKEMMVKNMNQRL

SEQ ID NO: 55376 - protein, 376 aa, unidentified; identical to SEQ ID NO: 55336
  source 1..376: note = Flavobacterium nitrogenifigens
  REGION 1..376: note = tr|A0A521EN68|A0A521EN68_9FLAO Queuine tRNA-ribosyltransferase OS=Flavobacterium nitrogenifigens; OX = 1617283 GN=tgt PE=3 SV=1

SEQ ID NO: 55377 - protein, 376 aa, unidentified
  source 1..376: note = Flavobacterium noncentrifugens
  REGION 1..376: note = tr|A0A1G9CDC5|A0A1G9CDC5_9FLAO Queuine tRNA-ribosyltransferase OS=Flavobacterium noncentrifugens; OX = 1128970 GN=tgt PE=3 SV=1
MKFDLLKTDPQTKARAGKITTDHGVIETPIFMPVGTVASVKGVHQRELKDDINPDIILGNTYHLYLRPQTEILEKAGGLHKFMNWDRNILTDSGGYQVYSLSANRKIKEEGVKFKSHIDGSYHFFTPENVMEIQRTIGADIIMAFDECTPYPCDFHYARRSMHMTHRWLDRCISHLDKLPFKYGFEQTFFPIVQGSTYKDLRVQSAEYIANAGQQGNAIGGLSVGEPAEEMYAMTEIVTAILPEDKPRYLMGVGTPINILENIALGIDMFDCVMPTRNARNGMLFTSQGTINIKNKKWEADFSPLDNMGHTFVDTEYTKAYLRHLFAANEYLGKQIATIHNLGFYMWLVREARKHILAGDFREWKEKMVKQMDQRL

SEQ ID NO: 55378 - protein, 376 aa, Flavobacterium omnivorum
  REGION 1..376: note = tr|A0A1G7X1P2|A0A1G7X1P2_9FLAO Queuine tRNA-ribosyltransferase OS=Flavobacterium omnivorum; OX = 178355 GN=tgt PE=3 SV=1
MKFDLLKKDPLSKARAGSITTDHGVIETPIFMPVGTVASVKGVHQRELKEDINPDIILGNTYHLYLRPQTEILEKAGGLHKFMNWDRNILTDSGGYQVYSLSANRKIKEEGVKFKSHIDGSYHFFTPENVMEIQRTIGADIIMAFDECTPYPCDYRYAQRSMHMTHRWLDRCVNHLEKVPTKYGYDQTFFPIVQGSTYKDLRRQSAEYIANSNQQGNAIGGLSVGEPAEEMYAMTEVVCEILPEDKPRYLMGVGTPINILENIALGIDMFDCVMPTRNARNGMLFTANGTINIKNKKWADDFSPIDEMAITYVDTEYTKAYLRHLFAANEYLGKQIATIHNLGFYMWLVREARKHILAGDFRTWKEMMVKNMSQRL

SEQ ID NO: 55379 - protein, 376 aa, Flavobacterium oncorhynchi
  REGION 1..376: note = tr|A0A226I0J1|A0A226I0J1_9FLAO Queuine tRNA-ribosyltransferase OS=Flavobacterium oncorhynchi; OX = 728056 GN=tgt PE=3 SV=1
MKFDLLQKDPQSKARAGSITTDHGVIETPIFMPVGTVASVKGVHQRELKDDINPDIILGNTYHLYLRPQTEILEKAGGLHKFMNWDRNILTDSGGYQVYSLSSNRKIKEEGVKFKSHIDGSYHFFTPENVMEIQRTIGADIIMAFDECTPYPCDYRYAQRSMHMTHRWLDRCINHLEKVPYKYGYEQTFFPIVQGSTYKDLRRQSAEYIANAGQQGNAIGGLSVGEPAEEMYAMTEVVCEILPEDKPRYLMGVGTPINILENIALGIDMFDCVMPTRNARNGMLFTANGTINIKNKKWEADFSPIDEMGHTFVDTEYSKAYLRHLFAANEYLGKQIATIHNLGFYMWLVREARKHILAGDFRPWKEMMVKNMSQRL

SEQ ID NO: 55380 - protein, 376 aa, unidentified
  source 1..376: note = Flavobacterium pallidum
  REGION 1..376: note = tr|A0A2S1SHR7|A0A2S1SHR7_9FLAO Queuine tRNA-ribosyltransferase OS=Flavobacterium pallidum; OX = 2172098 GN=tgt PE=3 SV=1
MKFDLLQKDSQSKARAGSITTDHGVIETPIFMPVGTVASVKGVHQRELKEEINPDIILGNTYHLYLRPQTEILEKAGGLHKFMNWDRNILTDSGGYQVYSLSANRKIKEEGVKFKSHIDGSYHFFTPENVMEIQRTIGADIIMAFDECTPYPCDYRYAQRSMHMTHRWLDRCISHLDTLPFKYGYEQTFFPIVQGSTYKDLRRQSAEYIANAGQQGNAIGGLSVGEPAEEMYAMTEVVCEILPEDKPRYLMGVGTPINILENIALGIDMFDCVMPTRNARNGMLFTSNGTINIKNKKWEADFSPLDEMGHTFVDTEYTKAYLRHLFAANEYLGKQIATIHNLGFYMWLVREARKHILAGDFREWKEKMVKQMDQRL

SEQ ID NO: 55381 - protein, 376 aa, Flavobacterium pectinovorum
  REGION 1..376: note = tr|A0A1M7M549|A0A1M7M549_9FLAO Queuine tRNA-ribosyltransferase OS=Flavobacterium pectinovorum; OX = 29533 GN=tgt PE=3 SV=1
MKFDLLQKDPQSKARAGSITTDHGVIETPIFMPVGTVASVKGVHQRELKEDINPDIILGNTYHLYLRPQTEILEKAGGLHKFMNWDRNILTDSGGYQVYSLSSNRKIKEEGVKFKSHIDGSYHFFTPENVMEIQRTIGADIIMAFDECTPYPCDYRYAQRSMHMTHRWLDRCINHLDKLPYKYGYEQTFFPIVQGSTYKDLRRQSAEYIANSGQQGNAIGGLSVGEPAEEMYAMTEVVCEILPEDKPRYLMGVGTPINILENIALGIDMFDCVMPTRNARNGMLFTANGTINIKNKKWEDDFSPIDEMGHTFVDTEYTKAYLRHLFAANEYLGKQIATIHNLGFYMWLVREARKHILAGDFRPWKEMMVKNMSQRL

SEQ ID NO: 55382 - protein, 376 aa, Flavobacterium pectinovorum
  REGION 1..376: note = tr|A0A502ENT9|A0A502ENT9_9FLAO Queuine tRNA-ribosyltransferase OS=Flavobacterium pectinovorum; OX = 29533 GN=tgt PE=3 SV=1
MKFDLLQKDPQSKARAGSITTDHGVIETPIFMPVGTVASVKGVHQRELKEDINPDIILGNTYHLYLRPQTEILEKAGGLHKFMNWDRNILTDSGGYQVYSLSNNRKIKEEGVKFKSHIDGSYHFFSPESVMEIQRTIGADIIMAFDECTPYPCDYRYAQRSMHMTHRWLDRCINHLDKVPFKYGYEQTFFPIVQGSTYKDLRQQSAEYIANSGQQGNAIGGLSVGEPAEEMYAMTEVVCEILPEDKPRYLMGVGTPINILENIALGIDMFDCVMPTRNARNGMLFTANGTINIKNKKWEDDFSPIDEMGHTFVDTDYTKAYLRHLFAANEYLGKQIATIHNLGFYMWLVREARKHILAGDFRPWKEMMVKNMSQRL

SEQ ID NO: 55383 - protein, 376 aa, Flavobacterium phragmitis
  REGION 1..376: note = tr|A0A1I1VVT6|A0A1I1VVT6_9FLAO Queuine tRNA-ribosyltransferase OS=Flavobacterium phragmitis; OX = 739143 GN=tgt PE=3 SV=1
MKFDLLQKDPQSKARAGSITTDHGVIETPIFMPVGTVASVKGVHQRELKEEINPDIILGNTYHLYLRPQTEILEKAGGLHKFMNWDRNILTDSGGYQVYSLSSNRKIKEEGVKFKSHIDGSYHFFTPENVMEIQRTIGADIIMAFDECTPYPCDYRYAQRSMHMTHRWLDRCINHLEKVPYKYGYEQTFFPIVQGSTYKDLRRQSAEYIANSGQQGNAIGGLSVGEPAEEMYAMTEVVCEILPEDKPRYLMGVGTPINILENIALGIDMFDCVMPTRNARNGMLFTANGTINIKNKKWEADFSPIDEMGHTFVDTEYSKAYLRHLFAANEYLGKQIATIHNLGFYMWLVREARKHILAGDFRPWKEMMVKNMSQRL

SEQ ID NO: 55384 - protein, 376 aa, Flavobacterium psychrolimnae; identical to SEQ ID NO: 55369
  REGION 1..376: note = tr|A0A366B5B9|A0A366B5B9_9FLAO Queuine tRNA-ribosyltransferase OS=Flavobacterium psychrolimnae; OX = 249351 GN=tgt PE=3 SV=1

SEQ ID NO: 55385 - protein, 304 aa, Flavobacterium psychrophilum
  REGION 1..304: note = tr|A0A1Z5HL71|A0A1Z5HL71_FLAPS Queuine tRNA-ribosyltransferase OS=Flavobacterium psychrophilum; OX = 96345 GN=FPS14_contig00039-0017 PE=3 SV=1
MKFDLLKKDPQTKARAGSITTDHGVIETPIFMPVGTVASVKGVHQRELKEEINPDIILGNTYHLYLRPKTDILEKAGGLHKFMNWDRNILTDSGGYQVYSLSANRKIKEEGVKFKSHIDGSYHFFTPENVMEIQRTIGADIIMAFDECTPYPCDYRYAQRSMKMTHRWLDRCINHLDKLPFKYGYEQTFFPIVQGSCYKDLREQSAEYIANAGAQGNAIGGLSVGEPAEEMYAMTEIVTAILPEDKPRYLMGVGTPINILENIALGIDMFDCVMPTRNARNGMLFTANGTINIKIKNGKPIFLQ

SEQ ID NO: 55386 - protein, 376 aa, Flavobacterium psychrophilum
  REGION 1..376: note = tr|A6GX92|A6GX92_FLAPJ Queuine tRNA-ribosyltransferase OS=Flavobacterium psychrophilum (strain JIP02/86 / ATCC 49511) OX=402612 GN=tgt PE=3 SV=1
MKFDLLKKDPQTKARAGSITTDHGVIETPIFMPVGTVASVKGVHQRELKEEINPDIILGNTYHLYLRPKTDILEKAGGLHKFMNWDRNILTDSGGYQVYSLSANRKIKEEGVKFKSHIDGSYHFFTPENVMEIQRTIGADIIMAFDECTPYPCDYRYAQRSMKMTHRWLDRCINHLDKLPFKYGYEQTFFPIVQGSCYKDLREQSAEYIANAGAQGNAIGGLSVGEPAEEMYAMTEIVTAILPEDKPRYLMGVGTPINILENIALGIDMFDCVMPTRNARNGMLFTANGTINIKNKKWEADFSPVDEMGITFVDTEYTKAYLRHLFAANEYLGKQIATIHNLGFYMWLVREARKHIIAGDFREWKDMMVKNMSQRL

SEQ ID NO: 55387 - protein, 376 aa, Flavobacterium reichenbachii
  REGION 1..376: note = tr|A0A085ZI07|A0A085ZI07_9FLAO Queuine tRNA-ribosyltransferase OS=Flavobacterium reichenbachii; OX = 362418 GN=tgt PE=3 SV=1
MKFDLLQKDPQSKARAGSITTDHGVIETPIFMPVGTVASVKGVHQRELKDDINPDIILGNTYHLYLRPQTEILEKAGGLHKFMNWDRNILTDSGGYQVYSLSNNRKIKEEGVKFKSHIDGSYHFFTPENVMEIQRTIGADIIMAFDECTPYPCDYRYAQRSMHMTHRWLDRCINHLDKVPYKYGYEQTFFPIVQGSTYKDLRRQSAEYIANSGQQGNAIGGLSVGEPAEEMYAMTEVVCEILPEDKPRYLMGVGTPINILENIALGIDMFDCVMPTRNARNGMLFTANGTINIKNKKWEADFSPIDEMGHTFVDTEYTKAYLRHLFAANEYLGKQIATIHNLGFYMWLVREARKHILAGDFRPWKEMMVKNMSQRL

SEQ ID NO: 55388 - protein, 376 aa, Flavobacterium resistens
  REGION 1..376: note = tr|A0A521EJN0|A0A521EJN0_9FLAO Queuine tRNA-ribosyltransferase OS=Flavobacterium resistens; OX = 443612 GN=tgt PE=3 SV=1
MKFDLLQKDPQSKARAGSITTDHGVIETPIFMPVGTVASVKGVHQRELKDDINPDIILGNTYHLYLRPQTEILEKAGGLHKFMNWDRNILTDSGGYQVYSLSSNRKIKEEGVKFKSHIDGSYHFFTPENVMEIQRTIGADIIMAFDECTPYPCDYRYAQRSMHMTHRWLDRCINHLEKVPYKYGYEQTFFPIVQGSTYKDLRRQSAEYIANSGQQGNAIGGLSVGEPAEEMYAMTEVVCEILPEDKPRYLMGVGTPINILENIALGIDMFDCVMPTRNARNGMLFTANGTINIKNKKWEADFSPIDEMGHTFVDTEYTKAYLRHLFAANEYLGKQIATIHNLGFYMWLVREARKHILAGDFRPWKEMMVKNMSQRL

SEQ ID NO: 55389 - protein, 376 aa, Flavobacterium rivuli
  REGION 1..376: note = tr|A0A0A2M8N1|A0A0A2M8N1_9FLAO Queuine tRNA-ribosyltransferase OS=Flavobacterium rivuli WB 3.3-2 = DSM 21788 OX=1121895 GN=tgt PE=3 SV=1
MKFDLVTKDPLSKARAGSLTTDHGVIQTPIFMPVGTMGTVKGVHQRELKEDINPDIILGNTYHLYLRPQTEILEKAGGLHKFMNWDRSILTDSGGYQVYSLSANRKIKEEGVKFKSHIDGSYHFFSPESVMEIQRTIGADIIMAFDECTPYPCDYRYAKRSMHMTHRWLDRCISHLEKLPYKYGYSQAFFPIVQGSTYTDLRQQSAEYIANAGAVGNAIGGLSVGEPAEEMYAMTDVVCSILPEDKPRYLMGVGTPINILENIALGVDMFDCVMPTRNARNGMLFTANGTINIKNKKWEDDFSPVDEMGITFVDTQYTKAYLRHLFAANEYLGKQIATIHNLGFYMWLVREAREHIIAGDFYAWKEKMVKQMSQRL

SEQ ID NO: 55390 - protein, 376 aa, Flavobacterium saccharophilum
  REGION 1..376: note = tr|A0A1M7JCJ3|A0A1M7JCJ3_9FLAO Queuine tRNA-ribosyltransferase OS=Flavobacterium saccharophilum; OX = 29534 GN=tgt PE=3 SV=1
MKFDLLQKDPQSKARAGSITTDHGVIETPIFMPVGTVASVKGVHQRELKEDINPDIILGNTYHLYLRPQTEILEKAGGLHKFMNWDRNILTDSGGYQVYSLSSNRKIKEEGVKFKSHIDGSYHFFTPENVMEIQRTIGADIIMAFDECTPYPCDYRYAQRSMHMTHRWLDRCINHLDKLPYKYGYEQTFFPIVQGSTYKDLRRQSAEYIANSGQQGNAIGGLSVGEPAEEMYAMTEVVCEILPEDKPRYLMGVGTPINILENIALGIDMFDCVMPTRNARNGMLFTANGTINIKNKKWEADFSPIDEMGHTFVDTEYTKAYLRHLFAANEYLGKQIATIHNLGFYMWLVREARKHILAGDFRPWKEMMVKNMSQRL

SEQ ID NO: 55391 - protein, 376 aa, Flavobacterium saliperosum
  REGION 1..376: note = tr|A0A1G4V1M9|A0A1G4V1M9_9FLAO Queuine tRNA-ribosyltransferase OS=Flavobacterium saliperosum; OX = 329186 GN=tgt PE=3 SV=1
MKFDLLLKDPQTKARAGSITTDHGVIETPIFMPVGTVASVKGVHQRELKDDINPDIILGNTYHLYLRPQTEILEKAGGLHKFMNWDRNILTDSGGYQVYSLSSNRKIKEEGVKFKSHIDGSYHFFSPENVMEIQRTIGADIIMAFDECTPYPCDYRYAQKSMKMTHRWLDRCINHLEKLPFKYGYEQTFFPIVQGSTYKDLREQSAEYIANAGAQGNAIGGLSVGEPAEEMYAMTEVVTAILPEDKPRYLMGVGTPINILENIALGIDMFDCVMPTRNARNGMLFTANGTINIKNKKWEADFSPIDEMGHTFVDTEYTKAYLRHLFAANEYLGKQIATIHNLGFYMWLVREARKHILAGDFREWKEMMVKNMSQRL

SEQ ID NO: 55392 - protein, 376 aa, unidentified
  source 1..376: note = Flavobacterium sediminis
  REGION 1..376: note = tr|A0A2U8QRM1|A0A2U8QRM1_9FLAO Queuine tRNA-ribosyltransferase OS=Flavobacterium sediminis; OX = 2201181 GN=tgt PE=3 SV=1
MKFDLIKKDEKSKARAGIVTTDHGVIETPIFMPVGTVASVKGVHQRELKDDINPDIILGNTYHLYLRPQTDILEKAGGLHKFMNWDRNILTDSGGYQVYSLSSNRKIKEEGVKFKSHIDGSYHFFSPENVMEIQRTIGADIIMAFDECTPYPCDYRYAKRSMHMTHRWLDRCVDHLGKVPAKYGYEQTLFPIVQGSTYKDLRQQSAEYIANVGAEGNAIGGLSVGEPAEEMYAMTEVVTAILPEDKPRYLMGVGTPVNILENIALGIDMFDCVMPTRNARNGMLFTANGIINIKNKKWEADFSPIDSMGHTFVDLEYSKAYLRHLFAANEYLGKQIATIHNLGFYLWLVREARRQILAGTFREWKDKMVIQLAQRL

SEQ ID NO: 55393 - protein, 376 aa, Flavobacterium segetis
  REGION 1..376: note = tr|A0A1M5ECZ7|A0A1M5ECZ7_9FLAO Queuine tRNA-ribosyltransferase OS=Flavobacterium segetis; OX = 271157 GN=tgt PE=3 SV=1
MKFDLLKKDPLSKARAGSITTDHGVIETPIFMPVGTVASVKGVHQRELKEDINPDIILGNTYHLYLRPQTEILEKAGGLHKFMNWDRNILTDSGGYQVYSLSANRKIKEEGVKFKSHIDGSYHFFTPENVMEIQRTIGADIIMAFDECTPYPCDYRYAQRSMHMTHRWLNRCIDHLVKTPVKYGYDQAFFPIVQGSTYKDLRRQSAEYIANSNQVGNAIGGLSVGEPAEEMYAMTEVVCEILPEDKPRYLMGVGTPINILENIALGVDMFDCVMPTRNARNGMLFTANGSINIKNKKWEADFSPIDEMGITFVDTDYTKAYLRHLFAANEYLGKQIATIHNLGFYMWLVREARKHILAGDFKPWKEMMVKNMNQRL

SEQ ID NO: 55394 - protein, 397 aa, unidentified
  source 1..397: note = Flavobacterium seoulense
  REGION 1..397: note = tr|A0A066WTN7|A0A066WTN7_9FLAO Queuine tRNA-ribosyltransferase OS=Flavobacterium seoulense; OX = 1492738 GN=tgt PE=3 SV=1
MSLFSKLNYLCQPNNRKKNPSMKFDLLQKDPLSKARAGSITTDHGVIETPIFMPVGTVASVKGVHQRELKEEINPDIILGNTYHLYLRPQTKILEAAGGLHKFMNWDRNILTDSGGYQVYSLSNNRKIKEEGVKFKSHIDGSYHFFTPENVMEIQRTIGADIIMAFDECTPYPCDYNYAKRSMHMTHRWLDRCISHLDKVPVKYGYNQAFFPIVQGSTYKDLRRQSAEYIANSGQVGNAIGGLSVGEPAEEMYAMTEVVTEILPEDKPRYLMGVGTPINILENIALGIDMFDCVMPTRNARNGMLFTANGTINIKNKKWEDDFSPIDEMGITFVDTEYSKAYLRHLFAANEYLGKQIATIHNLGFYMWLVREARKHIIAGDFRAWKEMMVKNMSQRL

SEQ ID NO: 55395 - protein, 376 aa, Flavobacterium sinopsychrotolerans; identical to SEQ ID NO: 55369
  REGION 1..376: note = tr|A0A1H8NK65|A0A1H8NK65_9FLAO Queuine tRNA-ribosyltransferase OS=Flavobacterium sinopsychrotolerans OX=604089 GN=tgt PE=3 SV=1

SEQ ID NO: 55396 - protein, 376 aa, Flavobacterium sp.
  REGION 1..376: note = tr|A0A2N0HFJ1|A0A2N0HFJ1_9FLAO Queuine tRNA-ribosyltransferase OS=Flavobacterium sp. 5 OX=2035199; GN = tgt PE=3 SV=1
MKFDLLKTDPQSKARAGSITTDHGVIETPIFMPVGTVASVKGVHQRELKEEINPDIILGNTYHLYLRPQTEILEKAGGLHKFMGWDRNILTDSGGYQVYSLSNNRKIKEEGVKFKSHIDGSYHFFTPENVMEIQRTIGADIIMAFDECTPYPCDYRYAQRSMHMTHRWLDRCINHLDKLPFKYGYEQTFFPIVQGSTYKDLRRQSAEYIANSGQQGNAIGGLSVGEPAEEMYAMTEVVCEVLPEDKPRYLMGVGTPINILENIALGIDMFDCVMPTRNARNGMLFTANGTINIKNKKWEADFSPIDEMAHTFVDTEYSKAYLRHLFAANEYLGKQIATIHNLGFYMWLVREARKHILAGDFRPWKEMMVKNMDQRL

SEQ ID NO: 55397 - protein, 376 aa, Flavobacterium sp.
  REGION 1..376: note = tr|A0A4V2YTX9|A0A4V2YTX9_9FLAO Queuine tRNA-ribosyltransferase OS=Flavobacterium sp. AT-3-2; OX = 2541732 GN=tgt PE=3 SV=1
MKFDLLKKDPLSKARAGSITTDHGVIETPIFMPVGTVASVKGVHQRELKEDINPDIILGNTYHLYLRPQTEILEKAGGLHKFMNWDRNILTDSGGYQVYSLSANRKIKEEGVKFKSHIDGSYHFFTPENVMEIQRTIGADIIMAFDECTPYPCDYNYAKRSMKMTHRWLDRCINHLDTQPVKYGYDQAFFPIVQGSCYKDLRQQSAEYIANSNQVGNAIGGLSVGEPAEEMYAMTEVVCEILPEDKPRYLMGVGTPINILENIALGIDMFDCVMPTRNARNGMLFTAHGTINIKNKKWEDDFSPIDEMGITFVDTEYTKAYLRHLFAANEYLGKQIATIHNLGFYMWLVREARKHILAGDFKPWKEMMVKNMSQRL

SEQ ID NO: 55398 - protein, 376 aa, unidentified
  source 1..376: note = Flavobacterium spartansii
  REGION 1..376: note = tr|A0A1S1J172|A0A1S1J172_9FLAO Queuine tRNA-ribosyltransferase OS=Flavobacterium spartansii; OX = 1278819 GN=tgt PE=3 SV=1
MKFDLLQRDPQSKARAGSITTDHGVIETPIFMPVGTVASVKGVHQRELKDDINPDIILGNTYHLYLRPQTEILEKAGGLHKFMNWDRNILTDSGGYQVYSLSNNRKIKEEGVKFKSHIDGSYHFFSPESVMEIQRTIGADIIMAFDECTPYPCDYRYAQRSMHMTHRWLDRCINHLDKVPYKYGYEQTFFPIVQGSTYKDLRRQSAEYIANAGQQGNAIGGLSVGEPAEEMYAMTEVVCEILPEDKPRYLMGVGTPINILENIALGIDMFDCVMPTRNARNGMLFTANGTINIKNKKWEADFSPIDEMGHTFVDTEYTKAYLRHLFAANEYLGKQIATIHNLGFYMWLVREARKHILAGDFRPWKEMMVKNMSQRL

SEQ ID NO: 55399 - protein, 376 aa, Flavobacterium subsaxonicum
  REGION 1..376: note = tr|A0A0A2MI79|A0A0A2MI79_9FLAO Queuine tRNA-ribosyltransferase OS=Flavobacterium subsaxonicum WB 4.1-42 = DSM 21790 OX=1121898 GN=tgt PE=3 SV=1
MKFDLVTKDPLSKARAGTLTTDHGVIQTPIFMPVGTMGTVKGVHQRELKEDINPDIILGNTYHLYLRPQTEILEKAGGLHKFMNWDRPILTDSGGYQVYSLSANRKIKEEGVKFKSHIDGSYHFFSPESVMEIQRTIGADIIMAFDECTPYPCDYRYAKRSMHMTHRWLDRCITHLEKLPFKYGYSQAFFPIVQGSTYTDLRQQSAEYIANAGAVGNAIGGLSVGEPAEEMYAMTEVVTAILPEDKPRYLMGVGTPINILENIALGIDMFDCVMPTRNARNGMLFTANGTINIKNKKWEDDFSPVDEMGITYVDTQYTKAYLRHLFAANEYLGKQIATIHNLGFYMWLVREAREHIIAGDFYAWKEKMVKQMSQRL

SEQ ID NO: 55400 - protein, 376 aa, Flavobacterium succinicans
  REGION 1..376: note = tr|A0A199XTK6|A0A199XTK6_9FLAO Queuine tRNA-ribosyltransferase OS=Flavobacterium succinicans; OX = 29536 GN=tgt PE=3 SV=1
MKFDLLQKDTQSKARAGSITTDHGVIETPIFMPVGTAGTVKGVHQRELKDDINPDIILGNTYHLYLRPQTPILEKAGGLHKFMNWDRNILTDSGGYQVYSLSANRKIKEEGVKFKSHIDGSYHFFTPENVMEIQRTIGADIIMAFDECTPYPCDYRYAQRSMHMTHRWLNRCINHLEKVPYKYGYEQTFFPIVQGSTYKDLRRQSAEYIANAGQQGNAIGGLSVGEPAEEMYAMTEIVCDILPEDKPRYLMGVGTPINILENIALGVDMFDCVMPTRNARNGMLFTANGSINIKNKKWEDDFSPIDEMGITYVDTFYTKAYLRHLFASNEMLGKQIATIHNLGFYMWLVREARKHILADDFRPWKEMMVKNMSQRL

SEQ ID NO: 55401 - protein, 376 aa, Flavobacterium succinicans
  REGION 1..376: note = tr|A0A1I4SNG5|A0A1I4SNG5_9FLAO Queuine tRNA-ribosyltransferase OS=Flavobacterium succinicans; OX = 29536 GN=tgt PE=3 SV=1
MKFDLLQKDTQSKARAGSITTDHGVIETPIFMPVGTAGTVKGVHQRELKEDINPDIILGNTYHLYLRPQTPILEKAGGLHKFMNWDRPILTDSGGYQVYSLSASRKIKEEGVKFKSHIDGSYHFFTPENVMEIQRTIGADIIMAFDECTPYPCDFRYAQRSMHMTHRWLDRCINHLEKVPYKYGYEQTFFPIVQGSTYKDLRRQSAEYIANAGQQGNAIGGLSVGEPAEEMYEMTEIVCDILPEDKPRYLMGVGTPINILENIALGVDMFDCVMPTRNARNGMLFTANGTINIKNKKWEDDFSPLDEMGMTYVDTHYTKAYLRHLFAANEYLGKQIATIHNLGFYMWLVREARKHILAGDFRPWKDMMVKNMSQRL

SEQ ID NO: 55402 - protein, 376 aa, Flavobacterium suncheonense
  REGION 1..376: note = tr|A0A0A2MB14|A0A0A2MB14_9FLAO Queuine tRNA-ribosyltransferase OS=Flavobacterium suncheonense GH29-5 = DSM 17707 OX=1121899 GN=tgt PE=3 SV=1
MKFDLVQKDPQTKARAGFITTDHGIIETPIFMPVGTVASVKGVHQRELKDDINPDIILGNTYHLYLRPQTDILEKAGGLHKFMNWDRNILTDSGGYQVYSLSSNRKIKEEGVKFKSHIDGSYHFFSPENVMEIQRTIGADIIMAFDECTPYPCDYHYARRSMHMTHRWLDRCVKHLENLPFKYGYEQTLFPIVQGSTYKDLRAQSAEYIANVGAQGNAIGGLSVGEPAEEMYAMTEVVTAILPEDKPRYLMGVGTPINILENIALGIDMFDCVMPTRNARNGMLFTANGTINIKNKKWADDFSPIDEMGHTFVDIEYTKAYLRHLFAADEYLGKQIATIHNLGFYMWLVREARKHILAGDFRQWKEMMVKNMSQRL

SEQ ID NO: 55403 - protein, 376 aa, Flavobacterium swingsii
  REGION 1..376: note = tr|A0A1I0VAJ3|A0A1I0VAJ3_9FLAO Queuine tRNA-ribosyltransferase OS=Flavobacterium swingsii; OX = 498292 GN=tgt PE=3 SV=1
MKFDLLKKDPQTKARAGTITTDHGVIETPIFMPVGTVASVKGVHQRELKEEINPDIILGNTYHLYLRPQTEILEKAGGLHKFMNWDRNILTDSGGYQVYSLSANRKIKEEGVKFKSHIDGSYHFFTPENVMEIQRTIGADIIMAFDECTPYPCDYHYANRSMKMTHRWLDRCIKHLEKVPTKYGYDQTFFPIVQGSCYKDLRMQSAEYIANAGAQGNAIGGLSVGEPAEEMYAMTEIVTAILPEDKPRYLMGVGTPINILENIALGIDMFDCVMPTRNARNGMLFTANGTINIKNKKWEADFSPVDEMGLTFVDTEYSKAYLRHLFAANEYLGKQIATIHNLGFYMWLVREARKHIIAGDFREWKEMMIKNMSQRL

SEQ ID NO: 55404 - protein, 383 aa, Flavobacterium terrae
  REGION 1..383: note = tr|A0A1M6FLJ1|A0A1M6FLJ1_9FLAO Queuine tRNA-ribosyltransferase OS=Flavobacterium terrae OX=415425; GN = tgt PE=3 SV=1
MPTIFDSMKFDLVQKDPQTKARAGFVTTDHGVIETPIFMPVGTVASVKGVHQRELKEEVNPDIILGNTYHLYLRPQTEILEKAGGLHKFMNWDRNILTDSGGYQVYSLSSNRKIKEEGVKFKSHIDGSYHFFSPESVMEIQRSIGADIIMAFDECTPYPCDYRYAKRSMHMTHRWLDRCVSHLENLPFKYGYEQTLFPIVQGSTYKDLRQQSAEYIANVGAQGNAIGGLSVGEPAEEMYAMTEVVTAILPEDKPRYLMGVGTPINILENIALGIDMFDCVMPTRNARNGMLFTAHGTINIKNKKWEADFSPIDEMGHTFVDTEYTKAYLRHLFAANEYLGKQIATIHNLGFYMWLVREARKHILAGDFREWKEKMVKQMSQRL

SEQ ID NO: 55405 - protein, 376 aa, Flavobacterium terrigena
  REGION 1..376: note = tr|A0A1H6R2V9|A0A1H6R2V9_9FLAO Queuine tRNA-ribosyltransferase OS=Flavobacterium terrigena; OX = 402734 GN=tgt PE=3 SV=1
MKFDLLKTDAQSQARAGLVTTDHGVIETPIFMPVGTVASVKGVHQRELKNDINPDIILGNTYHLYLRPKLDILEKAGGLHKFMNWDRNILTDSGGYQVYSLSGRRKIKEEGVKFKSHLDGAYHFFSPENVMETQRTIGADIIMAFDECTPYPCDYRYAQRSMHMTHRWLDRCINHLDTLPFKYDYSQAFFPIVQGSTYKDLRQQSAEFIASRDQVGNAIGGLSVGEPAEEMYAMTEVVTAILPKDKPRYLMGVGTPANILENIALGIDMFDCVMPTRNARNGMLFTSEGFINIKNKKWEEDFSPIDTMAHTYVDTDYSKAYLRHLFIANEFLGKQIATIHNLGFYMWLVREARQQILAGTFREWKDIMVKKVTTRL

SEQ ID NO: 55406 - protein, 380 aa, unidentified
  source 1..380: note = [Flavobacterium] thermophilum
  REGION 1..380: note = tr|A0A377G369|A0A377G369_9BACL Queuine tRNA-ribosyltransferase OS=[Flavobacterium] thermophilum; OX = 1414643 GN=tgt PE=3 SV=1
MTTPIRFELIKTCRQTGARLGILHTPHGSFETPMFMPVGTLATVKTLSPEELKEMGAGVILSNTYHLWLRPGHDIVEEAGGLHAFMNWDRGILTDSGGFQVFSLSEFRRIEEEGVYFRNHLNGDKLFLSPEKAMEIQNALGADIIMAFDECPPYPATYDYMKWSVERTSRWAERCLKAHRRPDEQGLFGIVQGGEYEELRRQSARDLVSLDFPGYAVGGLSVGEPKEVMNRVLEFTTPLLPADKPRYLMGVGSPDSLIDGAIRGIDMFDCVLPTRIGRNGTVMTSEGRVVIKNAQYARDFSPLDPNCDCYTCRNYTRAYIRHLIKCDETFGIRLTSYHNVYFLIKLMEQVRQAIREDRLADFREEFFERYGFNKPNAKNF

SEQ ID NO: 55407 - protein, 376 aa, Flavobacterium tiangeerense
  REGION 1..376: note = tr|A0A562KVN6|A0A562KVN6_9FLAO Queuine tRNA-ribosyltransferase OS=Flavobacterium tiangeerense; OX = 459471 GN=tgt PE=3 SV=1
MKFDLLKNDPLSKARAGTITTDHGVIETPIFMPVGTVASVKGVHQRELKNDINPDIILGNTYHLYLRPQTEILEKAGGLHKFMNWDRNILTDSGGYQVYSLSANRKIKEEGVKFKSHIDGSYHFFTPENVMEIQRTIGADIIMAFDECTPYPCDYNYAKRSMKMTHRWLDRCINHLDTLPFKYGYEQTFFPIVQGSTYKDLRRQSAEYIANSNQQGNAIGGLSVGEPAEEMYAMTEVVCEILPEDKPRYLMGVGTPINILENIALGIDMFDCVMPTRNARNGMLFTAHGTINIKNKKWEADFSPIDEMGITFVDTEYTKAYLRHLFAANEYLGKQIATIHNLGFYMWLVREARKHILAGDFKPWKEMMVKNMSQRL

SEQ ID NO: 55408 - protein, 376 aa, unidentified
  source 1..376: note = Flavobacterium tibetense
  REGION 1..376: note = tr|A0A365NYL9|A0A365NYL9_9FLAO Queuine tRNA-ribosyltransferase OS=Flavobacterium tibetense; OX = 2233533 GN=tgt PE=3 SV=1
MKFDLITKDPKSKARAGKITTDHGVIETPIFMPVGTVASVKGVHQRELREDINPDIILGNTYHLYLRPQTKILEAAGGLHKFMNWDRNILTDSGGYQVYSLSSNRKIKEEGVKFKSHIDGSYHFFSPENVMEIQRTIGADIIMAFDECTPYPCDYRYAKRSMHMTHRWLDRCINHLETLPFKYGYEQTFFPIVQGSTYKDLRAQSAEYIANAGAQGNAIGGLSVGEPAEEMYAMTEVVTAILPEDKPRYLMGVGTPINILENIALGIDMFDCVMPTRNARNGMLFTAHGTINMKNKKWEADFSPIDEMGHTWVDTEYSKAYLRHLFAANEFLGKQIATIHNLGFYMWLVREARKQILAGTFREWKDKMVVQMSQRL

SEQ ID NO: 55409 - protein, 376 aa, unidentified
  source 1..376: note = Flavobacterium ummariense
  REGION 1..376: note = tr|A0A1I4XT54|A0A1I4XT54_9FLAO Queuine tRNA-ribosyltransferase OS=Flavobacterium ummariense; OX = 913024 GN=tgt PE=3 SV=1
MKFDLLHTDINSKARAGVITTDHGVIETPIFMPVGTAATVKGVHQRELKEDINPDIILGNTYHLYLRPKTEILEKAGGLHKFMNWDRNILTDSGGFQVYSLSGRRKIKEEGVKFKSHIDGSYHFFSPENVMEIQRTIGADIIMAFDECTPYPCDYRYAQRSMHMTHRWLDRCINHLEKVPTKYGYDQAFFPIVQGSTFKDLRAQSAEYIANAGAVGNAIGGLSVGEPAEEMYEMCEVVTNILPKDKPRYLMGVGTPINILENIALGIDMFDCVMPTRNARNGMLFTSEGFINIKNKKWADDYSPIDPMGNTWVDTDYSKAYLRHLFVSDEYLGKQIATIHNLGFYMWLVREARKQIIAGTFYAWKEKMVKQMATRL

SEQ ID NO: 55410 - protein, 376 aa, unidentified
  source 1..376: note = Flavobacterium urocaniciphilum
  REGION 1..376: note = tr|A0A1H8YWV9|A0A1H8YWV9_9FLAO Queuine tRNA-ribosyltransferase OS=Flavobacterium urocaniciphilum; OX = 1299341 GN=tgt PE=3 SV=1
MKFDLLKKDAQSQARAGQITTDHGVIETPIFMPVGTVASVKGVHQRELKNDINPDIILGNTYHLYLRPQLDVLEKAGGLHKFMNWDRNILTDSGGYQVYSLSGRRKIKEEGVKFKSHIDGSYHFFSPENVMEIQRTIGADIIMAFDECTPYPCDYRYAQRSMHMTHRWLDRCINHLETLPFKYGYSQAFFPIVQGSTYKDLRQQSAEFIASRNAVGNAIGGLSVGEPAEEMYAMTEVVTAILPQDKPRYLMGVGTPANILENIALGIDMFDCVMPTRNARNGMLFTSEGFINIKNKKWEDDFSPVDPMGLTYVDTDYSKAYLRHLFVANEFLGKQIATIHNLGFYMWLVREARKQILAGTFRDWKEMMVKKVTTRL

SEQ ID NO: 55411 - protein, 376 aa, Flavobacterium urumqiense
  REGION 1..376: note = tr|A0A1H5ZVH9|A0A1H5ZVH9_9FLAO Queuine tRNA-ribosyltransferase OS=Flavobacterium urumqiense; OX = 935224 GN=tgt PE=3 SV=1
MKFDLLKKDPLSKARAGSITTDHGVIETPIFMPVGTVASVKGVHQRELKEDINPDIILGNTYHLYLRPQTEILEKAGGLHKFMNWDRNILTDSGGYQVYSLSANRKIKEEGVKFKSHIDGSYHFFTPENVMEIQRTIGADIIMAFDECTPYPCDFRYAQRSMHMTHRWLDRCISHLDKVPVKYGYDQAFFPIVQGSTYKDLRRQSAEYIANSNQVGNAIGGLSVGEPAEEMYAMTEVVCEILPEDKPRYLMGVGTPINILENIALGIDMFDCVMPTRNARNGMLFTANGSINIKNKKWADDFSPVDEMGITFVDTEYTKAYLRHLFAANEYLGKQIATIHNLGFYMWLVREARKHILAGDFKPWKEMMVKNMNQRL

SEQ ID NO: 55412 - protein, 376 aa, Flavobacterium weaverense
  REGION 1..376: note = tr|A0A3L9ZS77|A0A3L9ZS77_9FLAO Queuine tRNA-ribosyltransferase OS=Flavobacterium weaverense; OX = 271156 GN=tgt PE=3 SV=1
MKFDLLKTDPLSKARAGTITTDHGVIETPIFMPVGTVASVKGVHQRELKEDINPDIILGNTYHLYLRPQTEILEKAGGLHKFMNWDRNILTDSGGYQVYSLSANRKIKEEGVKFKSHIDGSYHFFTPENVMEIQRTIGADIIMAFDECTPYPCDYRYAQRSMHMTHRWLDRCINHLDKVPVKYGYDQAFFPIIQGSTYKDLRRQSAEYIANSNQVGNAIGGLSVGEPAEEMYAMTEVVCEILPEDKPRYLMGVGTPINILENIALGIDMFDCVMPTRNARNGMLFTANGTINIKNKKWEADFSPIDEMGMTFVDTEYTKAYLRHLFAANEYLGKQIATIHNLGFYMWLVREARKHILAGDFKPWKEMMVKNMNQRL

SEQ ID NO: 55413 - protein, 376 aa, Flavobacterium xanthum
  REGION 1..376: note = tr|A0A1M6XDW5|A0A1M6XDW5_9FLAO Queuine tRNA-ribosyltransferase OS=Flavobacterium xanthum OX=69322; GN = tgt PE=3 SV=1
MKFDLLKKDPLSKARAGSITTDHGVIETPIFMPVGTVASVKGVHQRELKEDINPDIILGNTYHLYLRPQTEILEKAGGLHKFMNWDRNILTDSGGYQVYSLSANRKIKEEGVKFKSHIDGSYHFFTPENVMEIQRTIGADIIMAFDECTPYPCDYRYAQRSMHMTHRWLDRCVNHLEKVPTKYGYNQAFFPIVQGSCYKDLRQQSAEYIANSNQVGNAIGGLSVGEPAEEMYAMTEVVCEILPEDKPRYLMGVGTPINILENIALGIDMFDCVMPTRNARNGMLFTANGTINIKNKKWADDFSPIDEMAITYVDTEYTKAYLRHLFAANEYLGKQIATIHNLGFYMWLVREARKHILAGDFRTWKEMMVKNMSQRL

SEQ ID NO: 55414 - protein, 412 aa, Flavobacterium xinjiangense
  REGION 1..412: note = tr|A0A1M7PNB1|A0A1M7PNB1_9FLAO Queuine tRNA-ribosyltransferase OS=Flavobacterium xinjiangense; OX = 178356 GN=tgt PE=3 SV=1
MSGTHFFISSEEKYFFDVGFKLTYLCQPNNRVKYVTMKFDLLKKDPLSKARAGSITTDHGVIETPIFMPVGTVGSVKGVHQRELKDDINPDIILGNTYHLYLRPQTEILEKAGGLHKFMNWDRNILTDSGGYQVYSLSANRKIKEEGVKFKSHIDGSYHFFTPENVMEIQRTIGADIIMAFDECTPYPCDYNYAKRSMKMTHRWLDRCINHLDTQPFKYGYEQTFFPIVQGSCYKDLRQQSAEYIANSNQQGNAIGGLSVGEPAEEMYAMTEVVCEILPEDKPRYLMGVGTPINILENIALGIDMFDCVMPTRNARNGMLFTANGSINIKNKKWEADFSPIDEMGITYVDTEYTKAYLRHLFAANEYLGKQIATIHNLGFYMWLVREARKHILAGDFKPWKEMMVKNMNQRL

SEQ ID NO: 55415 - protein, 376 aa, Flavobacterium xueshanense
  REGION 1..376: note = tr|A0A1I2IUX6|A0A1I2IUX6_9FLAO Queuine tRNA-ribosyltransferase OS=Flavobacterium xueshanense; OX = 935223 GN=tgt PE=3 SV=1
MKFDLLKKDPLSKARAGSITTDHGVIETPIFMPVGTVASVKGVHQRELKEDINPDIILGNTYHLYLRPQTEILEKAGGLHKFMNWDRNILTDSGGYQVYSLSANRKIKEEGVKFKSHIDGSYHFFTPENVMEIQRTIGADIIMAFDECTPYPCDYNYAKRSMKMTHRWLDRCINHLDTQPVKYGYDQTFFPIVQGSCYKDLRQQSAEYIANSNQQGNAIGGLSVGEPAEEMYAMTEIVCEILPEDKPRYLMGVGTPINILENIALGIDMFDCVMPTRNARNGMLFTANGTINIKNKKWEADFSPVDEMGITFVDTEYTKAYLRHLFAANEYLGKQIATIHNLGFYMWLVREARKHILAGDFKPWKEMMVKNMNQRL

SEQ ID NO: 55416 - protein, 376 aa, Flavonifractor plautii
  REGION 1..376: note = tr|A0A4R2MLV4|A0A4R2MLV4_FLAPL Queuine tRNA-ribosyltransferase OS=Flavonifractor plautii DSM 6740; OX = 649753 GN=tgt PE=3 SV=1
MFEVLKTEGKARRGVFTCAHGTVQTPVFMNVGTQGAIKGAVSAHDLKEIGCQVELSNTYHLHLRPGDQVVRQMGGLHRFMRWDGPILTDSGGFQVFSLSGLRKIKEEGVTFASHIDGRRIFMGPEESMQIQSNLGSDIAMAFDECVENPATYEYAKASCERTLRWLARCKAEHDRLNALPDTVNPRQMLFGINQGATFPELRIWHMKETAKIDCEGYAIGGLAVGEPTQVMYDIIDAVEPYMPAEKPRYLMGVGTPSNIIEGVARGVDFFDCVMPARNARHAKLFTWSGALNIRNEKYKLDERPIDPDCDCPVCRSFSRAYLRHLFAAEEMLAMRLAVLHNLYFYNKLAERIRQALDAGQFAAFRAEYSEKLAGRL

SEQ ID NO: 55417 - protein, 376 aa, Flavonifractor plautii
  REGION 1..376: note = tr|G9YNG6|G9YNG6_FLAPL Queuine tRNA-ribosyltransferase OS=Flavonifractor plautii ATCC 29863 OX=411475 GN=tgt PE=3 SV=1
MFEVLKTEGKARRGVFTCAHGTVQTPVFMNVGTQGAIKGAVSAHDLKEIGCQVELSNTYHLHLRPGDQVVRQMGGLHRFMRWDGPILTDSGGFQVFSLSGLRKIKEEGVTFASHIDGRRIFMGPEESMQIQSNLGSDIAMAFDECVENPATYEYAKASCERTLRWLARCKAEHDRLNALPDTVNPRQMLFGINQGATFPELRIWHMKETAKIDCEGYAIGGLAVGEPTQVMYDIIDAVEPYMPADKPRYLMGVGTPSNIIEGVARGVDFFDCVMPARNARHAKLFTWSGALNIRNEKYKLDERPIDPDCDCPVCRSFSRAYLRHLFAAEEMLAMRLAVLHNLYFYNKLAERIRQALDAGQFAAFRAEYSEKLAGRL

SEQ ID NO: 55418 - protein, 376 aa, Flavonifractor sp.
  REGION 1..376: note = tr|A0A1Y3XFC3|A0A1Y3XFC3_9FIRM Queuine tRNA-ribosyltransferase OS=Flavonifractor sp. An52; OX = 1965642 GN=tgt PE=3 SV=1
MFEVIKTEGKARRGVFTCAHGTVQTPVFMNVGTQGAIKGALSAFDLKDIGCQVELSNTYHLHLRPGDQVVRQMGGLHKFMRWDGPILTDSGGFQVFSLSGLRKIKEEGVTFASHIDGRRIFMGPEESMQIQSNLGSDIAMAFDECVENPATYEYAKASCERTLRWLQRCKVEHDRLNALPDTVNPHQMLFGINQGATFPDLRVWHMKETAKIDCEGYAIGGLAVGEPTQVMYDIIDAVEPHMPADKPRYLMGVGTPSNIIEGVARGVDFFDCVMPARNARHAKLFTWSGAMNIRNEKYKTDERPIDPDCDCPVCRNFSRAYLRHLFVADEMLAMRLAVMHNLYFYNKLAQRIRDALDAGQFTAFRAEYSEKLAGRI

SEQ ID NO: 55419 - protein, 376 aa, Flavonifractor sp.
  REGION 1..376: note = tr|A0A1Y4WHZ1|A0A1Y4WHZ1_9FIRM Queuine tRNA-ribosyltransferase OS=Flavonifractor sp. An10; OX = 1965537 GN=tgt PE=3 SV=1
MFEVLKTEGKARRGVFTCAHGTVQTPVFMNVGTQGAIKGAVSALDLKEIGCQVELSNTYHLHLRPGDQVVRQMGGLHKFMRWDGPILTDSGGFQVFSLSGLRKIKEEGVTFASHIDGRRIFMGPEESMQIQSNLGSDIAMAFDECVENPATYEYAKASCERTLRWLERCVAEHNRLNALPDTVNPRQMLFGINQGATFEDLRIWHMKEIAKLDCDGYAIGGLAVGEPTQVMYDIIDAVEPWMPADKPRYLMGVGTPSNIIEGVARGVDFFDCVMPARNARHAKLFTWSGALNIRNEKYKLDERPIDPDCDCPVCRNFSRAYLRHLFAAEEMLAMRLAVLHNLYFYNKLTQRIRQALDEGQFAAFRAEYSEKLSGRL

SEQ ID NO: 55420 - protein, 377 aa, Flectobacillus sp.
  REGION 1..377: note = tr|A0A267TIJ4|A0A267TIJ4_9BACT Queuine tRNA-ribosyltransferase OS=Flectobacillus sp. BAB-3569; OX = 1509483 GN=tgt PE=3 SV=1
MTFDIHSTDPNSKARAGVIHTDHGDIQTPIFMPVGTAGSVKAVHQRELKEDIKAQIILGNTYHLYLRPGLDVLERAGGLHKFNGWDRPILTDSGGYQVYSLAGTGRKIKEEGVTFKSHIDGSIHHFTPERVMDIQRSIGADIIMAFDECTPYPCDYTYARESMEMTHRWLKRCCDHFDATEPKYGYSQTLFPIVQGSVYKDLRVKSAEVIASFEREGNAIGGLSVGEPAEMMYETTDIVTDILPKDKPRYLMGVGTPANILEGIGLGIDMFDCVMPTRNARNGMLFTTEGIINIKNEKWKDDYSPIDAGLDSYVSNAYTKAYLRHLVKAEEILGAMIASVHNLTFYLWLVGQAREHILAGTFRAWKDQMVVKLMQRL

SEQ ID NO: 55421 - protein, 376 aa, Flexibacter flexilis
  REGION 1..376: note = tr|A0A1I1FRR8|A0A1I1FRR8_9BACT Queuine tRNA-ribosyltransferase OS=Flexibacter flexilis DSM 6793; OX = 927664 GN=tgt PE=3 SV=1
MQFKLEAQDAGSKARAGLITTDHGTIETPIFMPVGTAASVKAIHQRELKEDIKAQIILGNTYHLYLRPGLSVLEQAGGLHKFNGWDRPILTDSGGYQVYSLSGTRKIKEEGVTFKSHIDGSKHIFTPEGVMDIQRTIGADIMMAFDECTPYPCDYEYARKSMDMTHRWLKRCISRFDSTEPKYGYSQTLFPIVQGSTYKDLRKASAEFIAEQNREGNAIGGLSVGEPAEDMYEMTELVCDILPKDKPRYLMGVGTPANILEGIALGVDMFDCVMPTRNGRNGMIFTTQGIVNIRNEKWKNDFSPLDPGLDGYVSSFYTKAYIRHLFISEEILGMQIASLQNLSFYLHLVQQARQKIKEGTFAAWKTQTIKQVMQRL

SEQ ID NO: 55422 - protein, 376 aa, unidentified; identical to SEQ ID NO: 55317
  source 1..376: note = [Flexibacter] sp.
  REGION 1..376: note = tr|A0A1V2C8A1|A0A1V2C8A1_9FLAO Queuine tRNA-ribosyltransferase OS=[Flexibacter] sp. ATCC 35103; OX = 1937528 GN=tgt PE=3 SV=1

SEQ ID NO: 55423 - protein, 376 aa, unidentified
  source 1..376: note = [Flexibacter] sp.
  REGION 1..376: note = tr|A0A1V2B1M9|A0A1V2B1M9_9BACT Queuine tRNA-ribosyltransferase OS=[Flexibacter] sp. ATCC 35208; OX = 1936242 GN=tgt PE=3 SV=1
MIFELTTTDSESKARAGVITTGHGVIETPIFMPVGTVGSVKALTQEQVKQDVQAQIILGNTYHLYLRPGTEILSKAGGLHKFNGWDRPILTDSGGYQVFSLAANRKIKEEGCLFQSHIDGSRHLFTPENVMDIQRTIGADIIMAFDECPPYPSEYRYAKKSMELTHRWLDRCIARLKETQPAYGYEQTLFPIVQGSTFKDLRTISATEIAARECAGNAIGGLSVGEPEADMYEMCGLVCDILPKEKPRYLMGVGTPWNILENIALGVDMFDCVMPTRNGRNGMLFTWNGVINIKNKKWADDFSPIDENSPCFASSQYSKAYLRHLFVAGEILGMTLASIHNLAFYLELVKEARKQILTGNYAQWKNRMVPQLKQRL

SEQ ID NO: 55424 - protein, 376 aa, Flexibacter sp.
  REGION 1..376: note = tr|A0A2M7NKT7|A0A2M7NKT7_9BACT Queuine tRNA-ribosyltransferase OS=Flexibacter sp. CG_4_10_14_3_um_filter_32_15 OX=1975530 GN=tgt PE=3 SV=1
MKFELHTTDKETSARAGTITTAHGQIQTPIFMPVGTLGTVKGVPPEALKDQVKAQIILGNTYHLYLRPNTEVLEAAGGLHKFMNWDRPILTDSGGYQVYSLGQIRKIKEEGVIFSSHIDGSKLNFTPEYVMDIQRSIGADIIMAFDECPPYPSDYEYAKKSMEMTHRWLTRCINRFDSTEGKYGYEQTLFPIVQGSTYKDLRKASAEFIAEQNRDGNAIGGLSVGEPAEKMYEFTELVCDILPKDKPRYLMGVGTPANILEGIALGVDMFDCVMPTRNARNGMLFTTKGVINIKNKKWEKDFSVLDEGLDCHVSNTYSKSYLRHLNKANELLGAYIASTHNLAFYLYLVGEARKHILAGDFTSWKREQVEVLMQRL

SEQ ID NO: 55425 - protein, 385 aa, unidentified
  source 1..385: note = Flexilinea flocculi
  REGION 1..385: note = tr|A0A0S7BZ44|A0A0S7BZ44_9CHLR Queuine tRNA-ribosyltransferase OS=Flexilinea flocculi OX=1678840; GN = tgt PE=3 SV=1
MLETNSINGKISSVMTKDNFSFELLATDGKARAGIFHTPHGPIPTPIFAPVGTQATVKAVTPEQLEALDASLVLSNTYHLYLRPGADLVAELGGLHQFMAWPKPILTDSGGFQVFSLTGLRKIDDDGVTFKSYLDGSIHRFSPEISIAVQEKLGADIIMAFDECSNPNDYAYNIKSMERTHRWLERCIAAKKRNDQALFGIVQGGIFEDLRKASAEFVSSFDLPGFAIGGLSVGESKAEMNAILDIVPAMLPNNKPRYLMGVGSPEDLINGILRGIDIFDCVLPTRLARHGAAMTFLGRLNMNNAIFAHDSRPITEECDCYACRNFSRAYIRHLILSKEMLAATLLSIHNIATLEKLVKQSRQAIFDGTYTQYAENFLKNYKTVS

SEQ ID NO: 55426 - protein, 373 aa, Flexistipes sinusarabici
  REGION 1..373: note = tr|A0A5D0MY34|A0A5D0MY34_FLESI Queuine tRNA-ribosyltransferase OS=Flexistipes sinusarabici; OX = 2352 GN=tgt PE=3 SV=1
MFDFTIEAEDNSCKARATKIKTHSGTIETPVFMPVGTVGSVKTLTPDELKDCGAEIILGNTYHLYLRPGTDVLEHFNGIHNFISWDRNILTDSGGFQVFSLSELRDISDEGVYFKSHLDGSKFFMSPEKSMEIQKSIGSDIVMAFDECVNNNLERSYFEKSVDLTTKWAERCKKVPLQSHQSLFGIIQGGTYKDLRRKSAEDIVNIGFNGYAIGGLSVGETTEKMYETTDYTTDFMPKNAPRYLMGVGTPEDILNGIEFGVDMFDCVMPTRNARNGMLFTSSGKLHIKRAQWGYSDEPLDNECSCYTCRNFSKGYLRHLYKAGEILALRLNSIHNINFYLSLVKGARNAIKRGCFAKFKSEVINKMKTGGDNV

SEQ ID NO: 55427 - protein, 373 aa, Flexistipes sinusarabici
  REGION 1..373: note = tr|A0A3D5QBB9|A0A3D5QBB9_FLESI Queuine tRNA-ribosyltransferase OS=Flexistipes sinusarabici; OX = 2352 GN=tgt PE=3 SV=1
MFDFTIEAEDSSCKARAAKIKTHSGTIETPVFMPVGTVGSVKTLTPDELKDCGAEIILGNTYHLYLRPGTDVLEHFNGIHNFISWDRNILTDSGGFQVFSLSELRDISEEGVYFKSHLDGSKFFMSPEKSMEIQKSIGSDIVMAFDECVNNNLERSYFEKSVDLTTKWAERCKNVPLQSHQNLFGIIQGGTYRDLRKKSAEDIVRVGFKGYAIGGLSVGETTEKMYEITDYTTDFMPEKAPRYLMGVGTPEDILNGIEFGIDMFDCVMPTRNARNGMLFTSRGKLHIKRAQWIYSDEPLDNECSCYTCRNFSKGYLRHLYKSGEILALRLNTIHNINFYLSLVKGARNAIKRGCFAKFKSEMINKMKTGGDNV

SEQ ID NO: 55428 - protein, 381 aa, unidentified
  source 1..381: note = Floricoccus penangensis
  REGION 1..381: note = tr|A0A1E8GFK5|A0A1E8GFK5_9LACT Queuine tRNA-ribosyltransferase OS=Floricoccus penangensis; OX = 1859475 GN=tgt PE=3 SV=1
MKDSPIKYRLIKTEKHTGARLGEIITPHGTFPTPMFMPVGTLATVKTQSPEELKEMGAGIILSNTYHLWLRPGDELVKKAGGLHKFMNWDQPILTDSGGFQVFSLADTRKIEEEGVHFKSHLNGAPLFLSPEKAIQIQNNLGSDIMMSFDECPQFYQPYDYVKASVERTSRWAERGLNAHANKDRQGLFGIVQGAGFEDLRRQSARDLVSMDFPGYSIGGLAVGESHEEMNAVLDFTTSMLPTNKPRYLMGVGAPDSLIDGVIRGIDMFDCVLPTRIARNGTCMTSRGRLVVKNAQYAEDFRPLDENCDCYTCKNYTRAYIRHLIKCDETFGMRLTSTHNLHFLINLMKNVRQAIMDDNLLEFRQDFCEAYGYNKEGAKDF

SEQ ID NO: 55429 - protein, 381 aa, unidentified
  source 1..381: note = Floricoccus tropicus
  REGION 1..381: note = tr|A0A1E8GK36|A0A1E8GK36_9LACT Queuine tRNA-ribosyltransferase OS=Floricoccus tropicus OX=1859473; GN = tgt PE=3 SV=1
MKDSPIKYRLIKTEKHTGARLGEIITPHGTFPTPMFMPVGTLATVKTQSPEELKEMGAGIILSNTYHLWLRPGDELVKKAGGLHKFMNWDQPILTDSGGFQVFSLADTRKIEEEGVHFKSHLNGAPLFLSPEKAIQIQNNLGSDIMMSFDECPQFYQPYDYVKASVERTSRWAERGLNAHAKKDSQGLFGIVQGAGFEDLRRQSAQDLVSMDFPGYSIGGLAVGESHEEMNAVLDFTTPMLPTNKPRYLMGVGAPDSLIDGVIRGIDMFDCVLPTRIARNGTCMTSRGRLVVKNAQYAEDFRPLDENCDCYACKNYTRAYIRHLIKCDETFGMRLTSTHNLHFLINLMKNVRQAIMDDNLLEFREDFCEAYGYNKEGAKDF

SEQ ID NO: 55430 - protein, 386 aa, Fluoribacter bozemanae
  REGION 1..386: note = tr|A0A0W0S1T3|A0A0W0S1T3_FLUBO Queuine tRNA-ribosyltransferase OS=Fluoribacter bozemanae OX=447; GN = tgt PE=3 SV=1
MKTFSCDVLYKHSATQARVTRVTTAHGEFITPVFMPVGTRAGVNNMTPVELRDAHSQIILGGNTYHMLCAPGMEVIEKAGGMHPFMGWHGPMLTDSGGFQVFSLSKNKEICTIDEEGAHFRLPGSERLIHMTPEMSLETQKIIGADIIMAFDQCTPDSCTKDEVSHIMTRTHRWLKQSMQYHQQYPNSRYGYEQALFGIIQGGTFKDLRRESADFVSSMNTEGIAIGGETIGFDMKTTVEVIRWVRDYLPENKPRYTMGVGMSPQDLLDVVAEGIDMFDCVAPTRNARHGSLYCGELIREGNWLRFASEYESERIQIKKSCFADDMSPIMAQCSCYTCLNYSRSYLHQLAKQKTNLFTALASIHNVHVMHDVCDKMRELIMSERSN

SEQ ID NO: 55431 - protein, 398 aa, Fluoribacter dumoffii
  REGION 1..398: note = tr|A0A377G656|A0A377G656_9GAMM Queuine tRNA-ribosyltransferase OS=Fluoribacter dumoffii OX=463; GN = tgt_1 PE=3 SV=1
MAIIGVLNYFKQMKTFSCNVLHKHSATQARVTRVTTAHGEFVTPVFMPVGTRAGVNNMTPPELRDAHSQIILGGNTYHMLCAPGMEVIEKAGGMHPFMGWHGPMLTDSGGFQVFSLSKNKEICTIDEEGAHFRLPGSQRLIHMTPEMSLETQKIIGADIIMAFDQCTPDNCTKDEVSHIMERTHRWLKQSLQYHHQHPNSRYGYQQALFGIIQGGTFKDLRRESADFIASMNTEGIAIGGETIGFDMKTTVEVIRWVRDYLPEQKPRYTMGVGMSPQDLLDVVAEGIDMFDCVAPTRNARHGSLYCGELIRQGNWLRFVSDYENERIQIKKSCFADDMSPIMKQCSCYTCRNYSRSYLHQLAKQKTNLFTALASIHNVHVMHDVCDKMRELIINESSN

SEQ ID NO: 55432 - protein, 277 aa, Fluoribacter dumoffii
  REGION 1..277: note = tr|A0A377G7U5|A0A377G7U5_9GAMM Queuine tRNA-ribosyltransferase OS=Fluoribacter dumoffii OX=463; GN = tgt_2 PE=4 SV=1
MLTAVQNFIPVLTSEAGLCLTTANWQEAKVTAASYSLEQLLYKPGQELLKSIDDLSHYLVCPGITVLNALSLRSNKEGVYVLKSPYDGSIIKFTSKDLIHLVQHLKPAAVILPANILQNFPEIWDNWNDEIIPFLHAQELKNQQLSQPHGVYFNVLDEVDWEQLERWSHLPRYVTGCFDAELVWRLGNKGIGFIETDEPAQAAMQGKVYSHAGDVDLTDSKTQMQFELIDADCVCPTCSQQFTRAYLHHLLQHTPLLCQRFLIQHNVYYVQNSKPSS

SEQ ID NO: 55433 - protein, 386 aa, Fluoribacter gormanii
  REGION 1..386: note = tr|A0A377GG04|A0A377GG04_9GAMM Queuine tRNA-ribosyltransferase OS=Fluoribacter gormanii OX=464; GN = tgt_1 PE=3 SV=1
MKTFSCDVLHKHSSTQARVTRVTTAHGEFITPVFMPVGTRAGVNNMTPAELHDAHSQIILGGNTYHMLCAPGMEVIEKAGGMHPFMGWHGPMLTDSGGFQVFSLSKNKEICTIDEDGAHFRLPGSQRLIHMTPEMSLETQKIIGADIIMAFDQCTPDSCTKDEVSHIMTRTHRWLKQSIHYHQQYPNSRYGYVQALFGIIQGGTFKDLRRESADFVSSMDTDGIAIGGETIGFDMKTTVEVIRWVRDYLPENKPRYTMGVGMSPQDLLDVVAEGIDMFDCVAPTRNARHGSLYCGELIREGNWLRFVSEYENERIQIKKSCFADDMSPIMARCTCYTCRNYSRSYLHQLTKQKANLFTALASIHNVHVMHDVCDKMRELIINERVN

SEQ ID NO: 55434 - protein, 274 aa, Fluoribacter gormanii
  REGION 1..274: note = tr|A0A377GHB5|A0A377GHB5_9GAMM Queuine tRNA-ribosyltransferase OS=Fluoribacter gormanii OX=464; GN = tgt_2 PE=4 SV=1
MLAAVQNFIPVLTSEAGLCLTTANWQEVKVSAASYSLERLLYKPGQVALQKISDLAHYLACPGRMIINAASLVANKEKVYVLKSPYDGSRVKITLEELIGLIQHLKPDAVLLPQNIMRDFPQIWDDWDDAIVPFIHGDDLEQHVVMRPHGVYFKILNESNWVKLEQWSHIPRYVMGCFESEIIQRLRHRGIGFIETDEPAQAAMQGKVYSKTGTVDLMDSKTQMQFEMIDANCACPTCSQQFTRAYLHHLLQHTPLLCQRFLIQHNVFYVQNLG

SEQ ID NO: 55435 - protein, 376 aa, unidentified
  source 1..376: note = Fluviibacterium aquatile
  REGION 1..376: note = tr|A0A4R6AQN7|A0A4R6AQN7_9RHOB Queuine tRNA-ribosyltransferase OS=Fluviibacterium aquatile; OX = 2552766 GN=tgt PE=3 SV=1
MTQRFSYQLQSTDGQARQGIVHTPRGDIRTPAFMPVGTAATVKAMMPSSVRETGADILLGNTYHLMLRPTAERIASLGGLHRFMNWDGPILTDSGGFQVMSLAELRKLTEEGVSFRSHIDGSRHMLTPERSMEIQRLLGSDIVMCFDECPALPADRARLESSMQLSMRWAQRSRDAFGDRPGHALFGIQQGGDDEELRGQSAEALRAIEFDGYAVGGLAVGEGQEIMFRVLDYAPAMLPTDKPRYLMGVGKPDDLVGAVKRGIDMFDCVLPSRSGRTGQAFTARGVVNIKNARHQDDPRPLEEGCPCPACSGYSRAYLHHVFRAKEIISSMLLTWHNLTYYQRLMADMRAAIAEQKFAEFEAKFHAGRAQGDVEPV

SEQ ID NO: 55436 - protein, 370 aa, unidentified
  source 1..370: note = Fluviicoccus keumensis
  REGION 1..370: note = tr|A0A4Q7ZBI9|A0A4Q7ZBI9_9GAMM Queuine tRNA-ribosyltransferase OS=Fluviicoccus keumensis; OX = 1435465 GN=tgt PE=3 SV=1
MQFKLMATDGAARRGELTLQHGKVQTPAFMPVGTYGTVKGMLPRDIHDIGADIILGNTFHLWLRPGTDVVSQFGGLHGFINWEKPILTDSGGFQVFSLGALRKISEEGVKFQSPIDGSKVFLTPEISMQIQRALNSDIVMIFDECTPYPATEKQARESMELSLRWAARCKTAHEGNPNALFGIVQGGMYENLRDVSLAGLMDIGFDGYAIGGLSVGEPKEEMIKVLDHVPQRLPADKPRYLMGVGKPEDIVEAVRRGVDMFDCVMPTRNARNGHYFVTDGIVRIRNTQYKTDNLPVDPHCDCYACRNFSRAYLHHLDKCGEMLGAMLGTIHNLRYYQRLMAGLRTAIETGTLHDFVHDFYARRDLPVPAL

SEQ ID NO: 55437 - protein, 376 aa, Fluviicola sp.
  REGION 1..376: note = tr|A0A1G0CHK9|A0A1G0CHK9_9FLAO Queuine tRNA-ribosyltransferase OS=Fluviicola sp. RIFCSPHIGHO2_12_FULL_43_24 OX=1798019 GN=tgt PE=3 SV=1
MHFELKHTDPRSKARAGILQTDHGAIETPIFMPVGTQGTVKGVHQQELRDDVNAQIILGNTYHLYMRPGIEVMEAAGGLHQFMGWERPILTDSGGYQVYSLAGSRKITEEGVRFQSHINGSYHFFTPEYAIDIQRTIGADIIMAFDECTPYPCDYDYAQRSMHMTHRWLKRCIAQMDKTESKYGHNQMLFPIVQGSVYPDLRKQSAEFIAEQGAVGNAIGGLSVGEPDEDLYSMTDLVCSTLPTEKPRYLMGVGTPVNILEAIALGVDMFDCVMPSRNARHGMLFTWEGTINIKNEKWKMDFSPLDSAGTAYVDQVYTKAYLHHLVKAKENLAIQIATIHNLAFYLALVKEARRRILDGTFRTWKDEQVQKLGRRI

SEQ ID NO: 55438 - protein, 376 aa, Fluviicola sp.
  REGION 1..376: note = tr|A0A556MYX6|A0A556MYX6_9FLAO Queuine tRNA-ribosyltransferase OS=Fluviicola sp. MAH-3 OX=2597671; GN = tgt PE=3 SV=1
MHFELKHTDPHSKARAGLIHTDHGTIETPIFMPVGTQGTVKGVHQQELRDDVEAQIILGNTFHLYLRPGLDVIEGAGGLHQFIGWERPILTDSGGYQVYSLATSRKITEEGVRFQSHHDGSYHFFSPERAIDIQRTIGADIIMAFDECTPYPCEYNYAKRSMHMTHRWLKRCITQMDSTEPKYGYSQALFPIVQGSVYPDLRKESAEFIAEQHAVGNAIGGLSVGEPDEDMYSMTDLVCSILPTDKPRYLMGVGTPVNILESIALGVDMFDCVMPSRNARHGMLFTSEGTINIKNHKWRMDYSPLDPNGTTYVDQVYTKAYLHHLIKAKENLAIQIATIHNLAFYLALVKEARRRILDGTFRTWKDEQVKKLGRRI

SEQ ID NO: 55439 - protein, 376 aa, Fluviicola taffensis
  REGION 1..376: note = tr|F2IHA9|F2IHA9_FLUTR Queuine tRNA-ribosyltransferase OS=Fluviicola taffensis (strain DSM 16823 / NCIMB 13979 / RW262) OX=755732 GN=tgt PE=3 SV=1
MHFELKHTDPHSKARAGLVHTDHGTIETPIFMPVGTQGTVKGVHQQELRDDVQAQIILGNTFHLYLRPGLDVIEGAGGLHQFIGWERPILTDSGGYQVYSLATSRKITEEGVRFQSHHDGSYHFFSPERAIDIQRSIGADIIMAFDECTPYPCDYNYAKRSMHMTHRWLKRCITQMDSTEPKYGFSQALFPIVQGSVYPDLRKESAEFIASQNAEGNAIGGLSVGEPDEDLYSMTDLVCSILPADKPRYLMGVGTPVNILESIAMGVDMFDCVMPSRNARHGMLFTSEGTINIKNQKWKMDFSPLDVNGTAYVDQVYSKAYLHHLIKAKENLAIQIATIHNLAFYLALVKEARARILDGTFRKWKDEQVKILGRRI

SEQ ID NO: 55440 - protein, 375 aa, Fodinibius salinus
  REGION 1..375: note = tr|A0A5D3YJ47|A0A5D3YJ47_9BACT Queuine tRNA-ribosyltransferase OS=Fodinibius salinus OX=860790; GN = tgt PE=3 SV=1
MFELKKTADSSKARLGTLTTDHGEIDTPIFMPVGTLATVKAVKQNDLINKIKAQIILGNTYHLYLRPGCDIIENAGGLHPFMSWDRPILTDSGGYQVFSLSDNRELTEEGAEFKSHLDGSKHMFTPESVVDIQRTLGSDIMMVLDECPPHPCSYEYAKESMELTHRWEKRGRDAFLNTDPKYGHKQAQFGIVQGGTFEDLRIESAKRVTDMDFEGIAIGGLSVGEPTDLMYEMTDLNTDYLPENKPRYLMGVGKPANLLHCIARGVDMFDCVLPTRNARNGQIFTENGYINISNAKWKNHNEPLDPNFPSDLCSKYKMSYIHHLFRNNELLGLELASLHNLIFYLSLMDEVKERIANDTFHNWYEDKAELLNTKI

SEQ ID NO: 55441 - protein, 381 aa, Fontibacillus panacisegetis
  REGION 1..381: note = tr|A0A1G7Q7Y7|A0A1G7Q7Y7_9BACL Queuine tRNA-ribosyltransferase OS=Fontibacillus panacisegetis; OX = 670482 GN=tgt PE=3 SV=1
MIILAAITYEHIKTCKQSGARLGRVHTPHGIIETPVFMPVGTQATVKTMSPEELKEMDARIILSNTYHLFLRPGHEIIREAGGLHKFMNWDRAILTDSGGFQVFSLSEMRKITEEGVHFRSHLSGDKLFLSPEVAMEIQNALGSDIMMAFDECAPYPAEYDYVKHSLERTTRWAERCLKSHARPDDQGLFAIVQGGMYEDLRKQSARDLTSMDFPGYAIGGLSVGEPKHLMYDVLDYTVPLLPTDKPRYLMGVGSPDALIEGSIRGIDMFDCVLPTRIARNGTTMTSQGRLVVRNAQYAKDFGPLDPECDCYTCRNYSRAYLRHLIKADETFGLRLTTYHNLHFLVNLMGKVRQAIMDDRLLDFRDEFFEQYGLIGNEKGF

SEQ ID NO: 55442 - protein, 379 aa, unidentified
  source 1..379: note = Fontibacillus phaseoli
  REGION 1..379: note = tr|A0A369BLH1|A0A369BLH1_9BACL Queuine tRNA-ribosyltransferase OS=Fontibacillus phaseoli; OX = 1416533 GN=tgt PE=3 SV=1
MAAAITYEHIKTCKQSGARLGRVHTPHGTIETPVFMPVGTQATVKTMSPEELKEMDARIILSNTYHLFLRPGHELVREAGGLHKFMNWDRAILTDSGGFQVFSLSEMRKITEEGVHYRSHLNGDKLFLSPEVVMEIENALGPDIMMAFDECAPYPADYDYVKKSMERTTRWAERCLKSHARPHDQGLFGIVQGGMFEDLRKQSARDLTSLDFPGYAIGGLSVGEPKHLMYEMLECTVPLLPSDKPRYLMGVGSPDALIEGAIRGVDMFDCVLPTRIARNGTTMTSQGRLVVRNAQYANDFGPLDPECGCYTCRNYSRAYLRHLIKADETFGLRLTTYHNLHFLINLMGKVRQAIMDDRLLDFRDEFFEQYGLIGNEKGF

SEQ ID NO: 55443 - protein, 374 aa, unidentified
  source 1..374: note = Fonticella tunisiensis
  REGION 1..374: note = tr|A0A4R7K9F6|A0A4R7K9F6_9CLOT Queuine tRNA-ribosyltransferase OS=Fonticella tunisiensis; OX = 1096341 GN=tgt PE=3 SV=1
MGAIRYELIKQCRQTGARRGRLHTPHGIIETPIFMPVGTQATVKAMTPEELKEIGAQIILSNTYHLHMRPGEKLIEKAGGLHKFMNWDRPILTDSGGFQVFSLSELRDIKEEGVTFKSHIDGSKHFISPEKAIEIENALGADIIMAFDECPPYPADYDYTKKSLYMTIRWAERCKAAHRNTEKQALFGIIQGGMYKDLREEAVREMVKLDFPGYSIGGLSIGEPKPIMYEVLDWTTHLMPENKPRYLMGVGSPDALIEGVIRGIDMFDCVLPTRIARNGTVFTSRGKVVVRNAEYAEDFRPLDEECDCYACRNYSRAYIRHLFKAKEILAARLATIHNLRFLLKLMENIRQAIMEDSLLDFKKEFFAKYGYSEK

SEQ ID NO: 55444 - protein, 378 aa, unidentified
  source 1..378: note = Fontimonas thermophila
  REGION 1..378: note = tr|A0A1I2K6E0|A0A1I2K6E0_9GAMM Queuine tRNA-ribosyltransferase OS=Fontimonas thermophila; OX = 1076937 GN=tgt PE=3 SV=1
MNFQLLATCGAARRGRLVFERGTVETPAFMPVGTYGTVKTMTPEELRAIGAEIVLGNTFHLMLRPGERTIRALGGLHRFMNWDGPILTDSGGFQVWSLSGLRKITEEGVKFASPVNGDRIFLSPERAIEIQHALGSDVIMQFDECTPYPATAKQARKSMELSARWAERCKAAHGDHPGALFGIVQGGMYPELRLESLRRLRAIGFDGYAVGGLSVGEAESERLAVLDALAPELPHESPRYLMGVGTPRDLVLAVARGIDMFDCVMPTRNARNGHLFTSQGVVKIRNAVHREDPRPLDPACDCYTCRNYSRAYLHHLDRCNEILGARLNTIHNLRYYQNHMRAIRAAIEENRYAEFAEAFLASPAGAPSRSRMQQEPQV

SEQ ID NO: 55445 - protein, 370 aa, Formivibrio citricus
  REGION 1..370: note = tr|A0A1I4ZRY0|A0A1I4ZRY0_9NEIS Queuine tRNA-ribosyltransferase OS=Formivibrio citricus OX=83765; GN = tgt PE=3 SV=1
MKFELKAVSGAARRGSLQLNHGVVETPVFMPVGTYGTVKAMTPRDLNDIGAQIVLGNTFHLWLRPGLEVIETFGGLHGFMGWDKPILTDSGGFQVFSLGELRKITEEGVKFQSPINGDKLFLTPEESMRIQSVLNSDIVMIFDECTPYPADRRQAGESMRLSLRWAKRSRNEFDRLQNHNALFGIVQGGMHEDLRDESLAGLKDIGFHGYAIGGLSVGEPKEDFARILAHTAPKLPTHSPRYLMGVGTPEDLVFAVGQGVDMFDCVMPTRNARNGMLFTRWGDVRIKNAKYRNDARPLDEGCGCYTCRHFSRAYLHHLFRAGEILGSQLNTIHNLHYYQELMRDIRAAIEADGFAAFTTRFAQERARGVD

SEQ ID NO: 55446 - protein, 376 aa, Formosa agariphila
  REGION 1..376: note = tr|T2KIH5|T2KIH5_FORAG Queuine tRNA-ribosyltransferase OS=Formosa agariphila (strain DSM 15362 / KCTC 12365 / LMG 23005 / KMM 3901) OX=1347342; GN = tgt PE=3 SV=1
MIFDLKAKDTQSNARAGVITTDHGKIETPIFMPVGTVGSVKGVHQRELKNDINPDIILGNTYHLYLRPKTKILEKAGGLHKFINWDRNILTDSGGYQVYSLSSNRKIKEEGVKFKSHIDGSYHVFTPENVMEIQRSIGADIIMAFDECTPYPCDYNYARRSMHMTHRWLERCLTHLDKTPFTYDYAQTFFPIVQGSTYKDLRKQSAEYIAGVGAEGNAIGGLSVGEPAEEMYAMTEVVTDILPWDKPRYLMGVGTPINILENIALGVDMFDCVMPTRNARNGMLFTAYGSINIKNKKWEDDFSPIDDMGITFVDTEYSKAYLKHLFSVNELLGKQIATIHNLGFYMWLVREARKHILAGDFRVWKDMMVKQMDNRL

SEQ ID NO: 55447 - protein, 376 aa, Formosa algae
  REGION 1..376: note = tr|A0A2K2Z377|A0A2K2Z377_9FLAO Queuine tRNA-ribosyltransferase OS=Formosa algae OX=225843 GN=tgt; PE = 3 SV=1
MTFDLKAQDPQSKARAGVITTDHGKIETPIFMPVGTVGSVKGVHQRELKNDINPDIILGNTYHLYLRPKTKILEKAGGLHKFINWDRNILTDSGGYQVYSLSSNRKIKEEGVKFKSHIDGSYHVFTPENVMEIQRSIGADIIMAFDECTPYPCDYNYARRSMHMTHRWLERCLTHLDKTPYTYDYAQTFFPIVQGSTYKDLRKQSAEYIASVGAEGNAIGGLSVGEPAEEMYAMTEVVTDILPWDKPRYLMGVGTPINILENIALGVDMFDCVMPTRNARNGMLFTAYGSINIKNKKWEDDFSPIDEMGITFVDTEYSKAYLKHLFSVNELLGKQIATIHNLGFYLWLVREARKHILAGDFRVWKDMMVKQMDNRL

SEQ ID NO: 55448 - protein, 376 aa, Formosa sp.
  REGION 1..376: note = tr|A0A2D4WWE8|A0A2D4WWE8_9FLAO Queuine tRNA-ribosyltransferase OS=Formosa sp. OX=2018467 GN=tgt; PE = 3 SV=1
  VARIANT 236: note = Xaa can be any naturally occurring amino acid
MKFNLITTDTNSKARAATLATDHGVIETPIFMPVGTVGTVKGVHQRELKNDINPDIILGNTYHLYLRPQVQILEKAGGLHKFMNWDRNILTDSGGYQVYSLSANRKIKEEGVKFRSHIDGGYHVFTPENVMEIQRNIGADIIMAFDECTPYPCDYNYAKRSMHMTHRWLDRCVNHLEKLPFKYGFSQAFFPIVQGSVYKDLRQQSAEYIANTNAVGNAIGGLSVGEPAEEMYAMTXVVCAILPEDKPRYLMGVGTPINILENIALGIDMFDCVMPTRNARNGMLFTAHGTINIRNKKWTDDFSPIDEMAITWVDTEYSKAYLRHLFSVNELLGKQIATIHNLGFYMWLVREARKRILAGDFLSWKTMMIVQMDKRL

SEQ ID NO: 55449 - protein, 376 aa, Formosa sp.
  REGION 1..376: note = tr|A0A5D0G1J9|A0A5D0G1J9_9FLAO Queuine tRNA-ribosyltransferase OS=Formosa sp. 1494 OX=2592046; GN = tgt PE=3 SV=1
MLFELKGKDTKSNARGGEITTDHGTIETPIFMPVGTVASVKGVHQRELKNDINPDIILGNTYHLYLRPQTNILEQAGGLHKFMNWDRNILTDSGGYQVYSLSSNRKIKEEGVKFKSHIDGSYHTFTPENVMEIQRTIGADIIMAFDECTPYPCDYHYAKRSMHMTHRWLDRCINHLEKTPFKYDYSQSFFPIVQGSTYKDLRKQSAEYIANAGAEGNAIGGLSVGEPAEEMYAMTEIVTNILPVDKPRYLMGVGTPINILENIALGVDMFDCVMPTRNARNGMLFTAHGTINIKNLKWADDFSPIDDMGITFVDTDYTKAYLRHLFSVNERLGAQIATIHNLGFYMWLVREARKHILAGDFRTWKDMMVKQMDKRL

SEQ ID NO: 55450 - protein, 376 aa, Formosa spongicola
  REGION 1..376: note = tr|A0A316DKF1|A0A316DKF1_9FLAO Queuine tRNA-ribosyltransferase OS=Formosa spongicola OX=570520; GN = tgt PE=3 SV=1
MIFELKGKDTQSNARAGEITTDHGKIETPIFMPVGTVASIKGVHQRELKNDINPDIILGNTYHLYLRPQTTILEQAGGLHKFMNWDRNILTDSGGYQVYSLSANRKIKEEGVKFKSHIDGSYHTFTPENVMEIQRTIGADIIMAFDECTPYPCDYHYAKRSMHMTHRWLDRCINHLEKTPFKYNYSQTFFPIVQGSTYKDLRKQSAEYIANAGAEGNAIGGLSVGEPAEEMYAMTEIVTDILPEDKPRYLMGVGTPINILENIALGVDMFDCVMPTRNARNGMLFTAHGTINIKNLKWADDFSPVDDMGITFVDTDYTKAYLRHLFTVNERLGAQIATIHNLGFYMWLVREARKHILAGDFRTWKDMMVKQMDKRL

SEQ ID NO: 55451 - protein, 377 aa, unidentified
  source 1..377: note = Fournierella massiliensis
  REGION 1..377: note = tr|A0A4R1R0C7|A0A4R1R0C7_9FIRM Queuine tRNA-ribosyltransferase OS=Fournierella massiliensis; OX = 1650663 GN=tgt PE=3 SV=1
MPYRLLKTEHNARRGEFETVHGTVQTPAFMNVATAAAIKGGLSAFDLKDIHCQVMLCNTYHLHLRPGDKLVAEMGGLHKFTRWEGPILTDSGGFQVFSLSKLRKITEEGVTFNSHLDGHKIFMGPEESMQIQANLGSTIAMAFDECVENPAEYKYSKASCDRTVRWLKRCKAEMERLKREGLAVNPDQMLFGINQGCTYEDLRVEHMKQIAELDLDGYAIGGLAVGEPAEDMYRIISAVEPHMPKDKIRYLMGVGTPGNIIEAVSRGVDLFDCVMPSRNARHGHLNTWSGIINIKNLKYQKDEGPIDPECDCPVCRNFSRAYLRHLFKADEMLGMRLGVMHNLYFYNRLMERIRQALDEGNFQEFHDRYVTLLDTRI

SEQ ID NO: 55452 - protein, 367 aa, unidentified
  source 1..367: note = Francisella adeliensis
  REGION 1..367: note = tr|A0A2Z4Y056|A0A2Z4Y056_9GAMM Queuine tRNA-ribosyltransferase OS=Francisella adeliensis; OX = 2007306 GN=tgt PE=3 SV=1
MTVMKFDLLKTEGKARRGKISFPRGDIQTPAFMPVGTYGAVKSLSPAELKEMGADIILGNTFHLWLRPGTEIIKKHGTLHNFNGWDKPILTDSGGFQVFSLGKMRKLTEEGVTFKSPINGSKVFLSPEISMQVQRDLGSDIVMCFDECTPYPATEKEAKDSMELSMRWAQRSKEAHGDNPSALFGIIQGGMYEHLRDESLEALKKIDFDGFAIGGLSVGEPKDEMIKILDHTAHQMPEDKPRYLMGVGTPKDLVEAVYRGVDMFDCVMPSRNARNGHIFTSEGTIRIRNSKFKEDTSALDPNCDCYTCKNFSRSYLHHLDKTKEILGSRLNTIHNLTYYQNLMKKIRNSLEEGTFEEFREEFLENYS

SEQ ID NO: 55453 - protein, 367 aa, Francisella halioticida
  REGION 1..367: note = tr|A0A2Z2L1L4|A0A2Z2L1L4_9GAMM Queuine tRNA-ribosyltransferase OS=Francisella halioticida; OX = 549298 GN=tgt PE=3 SV=1
MTVMKFDLIKKEGKARRGKISFPRGNIQTPAFMPVGTYGAVKSLSPVELNEMGADIILGNTFHLWLRPGTDIIKKHGSLHGFNGWDKPILTDSGGFQVFSLGKMRKLTEDGVTFKSPINGSKVFLSPEISMQVQRDLGSDIVMCFDECTPYPATEKEAKESMKLSMRWAKRSKNAHEDNQSALFGIIQGGMYEHLRDESLAALEEIGFDGFAIGGLSVGEPKEDMIRILDHIAHQMPEDKPRYLMGVGTPKDLVEAVYRGIDMFDCVMPSRNARNGHIFTSEGVIKIRNAKHKDDISPLDPNCDCYTCKNFSRSYLHHLDKTKEILGSRLNTIHNLTFYQNLMENIRKAIEEVRFEEFRKDFLENYK

SEQ ID NO: 55454 - protein, 367 aa, Francisella hispaniensis
  REGION 1..367: note = tr|F4BKD7|F4BKD7_9GAMM Queuine tRNA-ribosyltransferase OS=Francisella hispaniensis; OX = 622488 GN=tgt PE=3 SV=1
MTVMKFELLKKEGKARRAKISFPRGDIQTPAFMPVGTYGAVKSLSPVELKEMGAEIILGNTFHLWLRPGTEIIKKHGSLHGFNGWDKPILTDSGGFQVFSLGKMRKLTEDGVTFKSPINGSKVFLSPEISMQVQRDLGSDIVMCFDECTPYPATEKEAKESMELSMRWAKRSKDAHGDNPSALFGIIQGGMYEHLRDESLAKLKEIDFDGFAIGGLSVGEPKEDMIRILDHTAHQMPEDKPRYLMGVGTPKDLVEAVYRGVDMFDCVMPSRNARNGHIFTSEGVIKIRNSKYKDDISPLDPNCDCYTCKNFTKSYLHHLDKTKEILGSRLNTIHNLTFYQNLMKSIRKALDEGRFAEFRKEFLANYK

SEQ ID NO: 55455 - protein, 367 aa, Francisella hispaniensis
  REGION 1..367: note = tr|A0A153JIS5|A0A153JIS5_9GAMM Queuine tRNA-ribosyltransferase OS=Francisella hispaniensis FSC454; OX = 1088883 GN=tgt PE=3 SV=1
MTVMKFELLKKEGKARRAKISFPRGDIQTPAFMPVGTYGAVKSLSPVELRQMGAEIILGNTFHLWLRPGTEIIKKHGSLHGFNGWDKPILTDSGGFQVFSLGKMRKLTEDGVTFKSPINGSKVFLSPEISMQVQRDLGSDIVMCFDECTPYPATEKEAKESMELSMRWAKRSKDAHGDNPSALFGIIQGGMYEHLRDESLAKLKEIDFDGFAIGGLSVGEPKEDMIRILDHTAHQMPEDKPRYLMGVGTPKDLVEAVYRGVDMFDCVMPSRNARNGHIFTSEGVIKIRNSKYKDDISPLDPNCDCYTCKNFTKSYLHHLDKTKEILGSRLNTIHNLTFYQNLMKSIRKALDEGRFAEFRKEFLANYK

SEQ ID NO: 55456 - protein, 368 aa, unidentified
  source 1..368: note = Francisella marina
  REGION 1..368: note = tr|A0A5C2C2H0|A0A5C2C2H0_9GAMM Queuine tRNA-ribosyltransferase OS=Francisella marina OX=2249302; GN = tgt PE=3 SV=1
MTVMKFDLIKKEGKARRGKISFPRGDIQTPAFMPVGTYGAVKSLSPVELKEMGADIILGNTFHLWLRPGTEIIRKHGTLHDFNGWDKPILTDSGGFQVFSLGKMRKLTEEGVTFKSPINGSKVFLSPEISMQVQRDLGSDIVMCFDECTPYPATEKEAKDSMELSMRWAKRSKDAHGDNPSALFGIIQGGMYEHLRDESLKALKEIDFDGFAIGGLSVGEPKEDMIRILDHTAHQMPEDKPRYLMGVGTPKDLVEAVYRGVDMFDCVMPSRNARNGHMFTSEGVVRIRNAKHKDDVSPLDSNCDCYTCQNFSRSYLHHLDKTQEILGSRLNTIHNLTYYQNLMKNIRQALEEGRFEEFRKEFLESYKG

SEQ ID NO: 55457 - protein, 368 aa, Francisella noatunensis
  REGION 1..368: note = tr|I2AZW8|I2AZW8_FRANT Queuine tRNA-ribosyltransferase OS=Francisella noatunensis subsp. orientalis (strain Toba 04) OX=1163389 GN=tgt PE=3 SV=1
MTVMKFDLIKKEGKARRGKISFPRGDIQTPAFMPVGTYGAVKSLSPVELKEMDADIILGNTFHLWLRPGTEIIKKHGTLHDFNGWDKPILTDSGGFQVFSLGKMRKLTEEGVTFKSPINGSKVFLSPEISMQVQRDLGSDIVMCFDECTPYPATEKEAKDSMELSMRWAKRSKDAHGDNPSALFGIIQGGMYEHLRDESLKALKEIDFDGFAIGGLSVGEPKEDMIRILDHTAHQMPEDKPRYLMGVGTPKDLVEAVYRGVDMFDCVMPSRNARNSHMFTSEGVIRIRNAKHKEDTSPLDSNCDCYTCKNFSRSYLHHLDKTQEILGSRLNTIHNLTYYQNLMKNIRQALEEGKFEEFRKEFLENYKG

SEQ ID NO: 55458 - protein, 368 aa, Francisella noatunensis; identical to SEQ ID NO: 55457
  REGION 1..368: note = tr|A0A5C1RX02|A0A5C1RX02_9GAMM Queuine tRNA-ribosyltransferase OS=Francisella noatunensis subsp. orientalis OX=299583 GN=tgt PE=3 SV=1

SEQ ID NO: 55459 - protein, 367 aa, unidentified
  source 1..367: note = Francisella novicida
  REGION 1..367: note = tr|A0A2L1CIC2|A0A2L1CIC2_FRANO Queuine tRNA-ribosyltransferase OS=Francisella novicida OX=264; GN = tgt PE=3 SV=1
MTVMKFDLIKKEGKARRGKISFPRGDIQTPAFMPVGTYGAVKSLSPVELKEMGAEIILGNTFHLWLRPGTEIIKKHGSLHGFNGWDKPILTDSGGFQVFSLGKMRKLTEEGVTFKSPINGSKVFLSPEISMQVQRDLGSDIVMCFDECTPYPATEKEAKESMELSMRWAKRSKDAHGDNPSALFGIIQGGMYEHLRDESLAKLKEIDFDGFAIGGLSVGEPKEDMIRILDHTAHQMPEDKPRYLMGVGTPKDLVEAVYRGVDMFDCVMPSRNARNGHIFTSEGVIKIRNSKYKDDTSPLDPNCDCYTCKNFTKSYLHHLDKTKEILGSRLNTIHNLTFYQNLMKSIRKALDEGRFAEFRKEFLANYK

SEQ ID NO: 55460 - protein, 367 aa, unidentified
  source 1..367: note = Francisella persica
  REGION 1..367: note = tr|A0A0K2JR25|A0A0K2JR25_9GAMM Queuine tRNA-ribosyltransferase OS=Francisella persica ATCC VR-331; OX = 1086726 GN=tgt PE=3 SV=1
MTIMKFELLKKEGKARRAKISFPRGDIQTPAFMPVGTYGAVKSLSPVELKEMGAEIILGNTFHLWLRPGTEIVKKHGSLHQFNGWDRPILTDSGGFQVFSLGKMRKLTEEGVTFKSPINGSKVFLSPEISIQVQRDLGSDIVMCFDECTPYPATEKEAKKSMELSMRWAKRSKDAHDENPSALFGIIQGGMYEHLRDESLAKLKEINFDGFAIGGLSVGEPKEDMIRILDHTAHQMPEDKPRYLMGVGTPKDLVEAVYRGIDMFDCVMPSRNARNGHIFTSEGEIKIRNAKYKDDTSPLDQNCGCYTCKNFTKSYLHHLDKTKEILGSRLNTIHNLTFYQNLMKSIRKALDEYKFVEFRKEFLVNYK

SEQ ID NO: 55461 - protein, 368 aa, Francisella philomiragia
  REGION 1..368: note = sp|B0TYY3|TGT_FRAP2 Queuine tRNA-ribosyltransferase; OS = Francisella philomiragia subsp. philomiragia (strain ATCC 25017) OX=484022 GN=tgt PE=3 SV=1
MTVMKFDLIKKEGKARRGKISFPRGDIQTPAFMPVGTYGAVKSLSPVELKEMGADIILGNTFHLWLRPGTEIIKKHGTLHDFNGWDKPILTDSGGFQVFSLGKMRKLTEEGVTFKSPINGSKVFLSPEISMQVQRDLGSDIVMCFDECTPYPATEKEAKDSMELSMRWAKRSKDAHGDNPSALFGIIQGGMYEHLRDESLKALKEIDFDGFAIGGLSVGEPKEDMIRILDHTAHQMPEDKPRYLMGVGTPKDLVEAVYRGVDMFDCVMPSRNARNGHMFTSEGVVRIRNAKHKDDVSLLDPNCDCYTCQNFSRSYLHHLDKTQEILGSRLNTIHNLTYYQNLMKNIRQALEEGRFEEFRKEFLENYKG

SEQ ID NO: 55462 - protein, 365 aa, Francisella philomiragia
  REGION 1..365: note = tr|A0A0E3A081|A0A0E3A081_9GAMM Queuine tRNA-ribosyltransferase OS=Francisella philomiragia; OX = 28110 GN=tgt PE=3 SV=1
MKFDLIKKEGKARRGKISFPRGDIQTPAFMPVGTYGAVKSLSPVELKEMGADIILGNTFHLWLRPGTEIIKKHGTLHDFNGWDKPILTDSGGFQVFSLGKMRKLTEEGVTFKSPINGSKVFLSPEISMQVQRDLGSDIVMCFDECTPYPATEKEAKDSMELSMRWAKRSKDAHGDNPSALFGIIQGGMYEHLRDESLKALKEIDFDGFAIGGLSVGEPKEDMIRILDHTAHQMPEDKPRYLMGVGTPKDLVEAVYRGVDMFDCVMPSRNARNGHMFTSEGVVRIRNAKHKDDVSPLDPNCDCYTCQNFSRSYLHHLDKTQEILGSRLNTIHNLTYYQNLMKNIRQALEEGRFEEFRKEFLENYKG

SEQ ID NO: 55463 - protein, 367 aa, Francisella sp.
  REGION 1..367: note = tr|A0A073A8B1|A0A073A8B1_9GAMM Queuine tRNA-ribosyltransferase OS=Francisella sp. W12-1067; OX = 1385420 GN=tgt PE=3 SV=1
MTVMKFEISKKQGKARRGKITFPRGEIQTPAFMPVGTYGAVKSLSPVELKEMGADIILGNTFHLWLRPGTDIIKKHGDLHDFIGWDKPILTDSGGFQVFSLGKLRKLTEDGVTFSSPVNGSKVFLSPEISMQVQKDLGSDIVMCFDECTPYPATEKEAKESMELSMRWAKRSKDAHGNNSSALFGIIQGGMYEHLRDESLEKLTEIDFDGYAIGGLSVGEPKEDMIRILDHIACKMPEDKPRYLMGVGTPKDLVEAVYRGVDMFDCVMPSRNARNGHIFTSEGIIRIRNSKYKEDTSALDPNCDCYTCKNFSKSYLHHLDKTKEILGSRLNTIHNLTFYQSLMKKIRKAIEEDSFEEFRNGFLENYK

SEQ ID NO: 55464 - protein, 364 aa, Francisella sp.
  REGION 1..364: note = tr|A0A1S2WWH7|A0A1S2WWH7_9GAMM Queuine tRNA-ribosyltransferase OS=Francisella sp. TX076608; OX = 573568 GN=tgt PE=3 SV=1
MKFDLIKKEGKARRGKISFPRGDIQTPAFMPVGTYGAVKSLSPVELKEMGAEIILGNTFHLWLRPGTEIIKKHGSLHGFNGWDKPILTDSGGFQVFSLGKMRKLTEEGVTFKSPINGSKVFLSPEISMQVQRDLGSDIVMCFDECTPYPATEKEAKESMELSMRWAKRSKDAHGDNPLALFGIIQGGMYEHLRDESLAKLKEIDFDGFAIGGLSVGEPKEDMIRILDHTAHQMPEDKPRYLMGVGTPKDLVEAVYRGVDMFDCVMPSRNARNGHIFTSEGVIKIRNSKYKDDTSPLDPNCDCYTCKNFTKSYLHHLDKTKEILGSRLNTIHNLTFYQNLMKSIRNALDEGRFAEFRKEFLANYK

SEQ ID NO: 55465 - protein, 367 aa, Francisella tularensis
  REGION 1..367: note = sp|Q5NFU8|TGT_FRATT Queuine tRNA-ribosyltransferase; OS = Francisella tularensis subsp. tularensis (strain SCHU S4 / Schu 4) OX=177416 GN=tgt PE=3 SV=1
MTVMKFDLIKKEGKARRGKITFPRGDIQTPAFMPVGTYGAVKSLSPVELKEMGAEIILGNTFHLWLRPGTEIIKKHGSLHGFNGWDKPILTDSGGFQVFSLGKMRKLTEEGVTFKSPINSSKVFLSPEISMQVQRDLGSDIVMCFDECTPYPATEKEAKESMELSMRWAKRSKEAHGDNPSALFGIIQGGMYEHLRDESLAKLKEIDFDGFAIGGLSVGEPKEDMIRILDHTAHQMPEDKPRYLMGVGTPKDLVEAVYRGVDMFDCVMPSRNARNGHIFTSEGVIKIRNSKYKDDTSPLDPNCDCYTCKNFTKSYLHHLDKTKEILGSRLNTIHNLTFYQNLMKSIRKALDEGRFSEFRKEFLASYK

SEQ ID NO: 55466 - protein, 367 aa, Francisella tularensis
  REGION 1..367: note = sp|Q0BMC7|TGT_FRATO Queuine tRNA-ribosyltransferase; OS = Francisella tularensis subsp. holarctica (strain OSU18); OX = 393011 GN=tgt PE=3 SV=1
MTVMKFDLIKKEGKARRGKITFPRGDIQTPAFMPVGTYGAVKSLSPVELKEMGAEIILGNTFHLWLRPGTEIIKKHGSLHGFNGWDKPILTDSGGFQVFSLGKMRKLTEEGVTFKSPVNSSKVFLSPEISMQVQRDLGSDIVMCFDECTPYPATEKEAKESMELSMRWAKRSKEAHGDNPSALFGIIQGGMYEHLRDESLAKLKEIDFDGFAIGGLSVGEPKEDMIRILDHTAHQMPEDKPRYLMGVGTPKDLVEAVYRGVDMFDCVMPSRNARNGHIFTSEGVIKIRNSKYKDDTSPLDPNCDCYTCKNFTKSYLHHLDKTKEILGSRLNTIHNLTFYQNLMKSIRKALDEGRFSEFRKEFLASYK

SEQ ID NO: 55467 - protein, 375 aa, unidentified
  source 1..375: note = Franconibacter pulveris
  REGION 1..375: note = tr|A0A0J8VTG6|A0A0J8VTG6_9ENTR Queuine tRNA-ribosyltransferase OS=Franconibacter pulveris; OX = 435910 GN=tgt PE=3 SV=1
MKYELQTTDGRARRGRLIFDRGVVETPAFMPVGTYGTVKGMTPEEVEATGAQIILGNTFHLWLRPGQEIMKLHGDLHDFMQWKGPILTDSGGFQVFSLGDIRKITEAGVHFRNPINGDAIFLDPEKSMEIQYDLGSDIVMIFDECTPYPADWDYAKRSMEMSLRWAKRSRDRFDSLGNKNALFGIIQGSVYEDLRDISVKGLVEIGFDGYAVGGLAVGEPKEDMHRILEHVCPQIPADKPRYLMGVGKPEDLVEGVRRGIDMFDCVMPTRNARNGHLFVTTGVVKIRNAKYKSDTAPLDEECDCYTCRNYSRAYLHHLDRCNEILGARLNTIHNLRYYQRVMAGLRKAIEEGKLEHFVADFYQRQGRPVPPLNVD

SEQ ID NO: 55468 - protein, 386 aa, unidentified
  source 1..386: note = Frankia casuarinae
  REGION 1..386: note = tr|Q2J7K9|Q2J7K9_FRACC tRNA-guanine transglycosylase; OS = Frankia casuarinae (strain DSM 45818 / CECT 9043 / CcI3) OX=106370 GN=Francci3_3378 PE=4 SV=1
MPRMSPPVMPVVPAPVLATPHGTVELPTFLPDGTRAAVRSTDPRDLREVGIEAVMCNAFHLAQRPGVRPVKRVGGLRRFMAWDGVVVTDSGGFQVLSLLRRQGQHSAIRPGGVVFRNPADGTKVELTPQRVIEWQFGLGSGVVIALDDCTGPEDSPAEVVASVDRTIRWFRDTRTAFDLQCRQRRLENPPLLVGVVQGGADPDQRKRCVEALVEAGAQGFGFGGWPLDGNGVLEREMFALLSASTPPEAPLFALGVGKPEHLVALCQIDRRWVFDCTIPTRDARHGRLYAFNNAPLAADGSFYQNVHILDERNHRIDEPICPTCDCPTCTRYGRSYLHHLFRVRDGQADRLATLHNLRFYTRLIEQLRAGGRALAAGPAEIGDDDT

SEQ ID NO: 55469 - protein, 383 aa, Frankia sp.
  REGION 1..383: note = tr|W9CSZ0|W9CSZ0_9ACTN Queuine/archaeosine tRNA-ribosyltransferase OS=Frankia sp. CcI6 OX=1352929; GN = CcI6DRAFT_04728 PE=4 SV=1
MSPPVMPVVPAPVLATPHGTVELPTFLPDGTRAAVRSTDPRDLREVGIEAVMCNAFHLAQRPGVRPVKRVGGLRRFMAWDGVVVTDSGGFQVLSLLRRQGQHSAIRPGGVVFRNPADGTKVELTPQRVIEWQFGLGSGVVIALDDCTGPEDSPAEVVASVDRTIRWFRDTRTAFDLQCRQRRLENPPLLVGVVQGGADPDQRKRCVEALVEAGAQGFGFGGWPLDGNGVLEREMFALLSASTPPEAPLFALGVGKPEHLVALCQIDRRWVFDCTIPTRDARHGRLYAFNNAPLAADGSFYQNVHILDERNHRIDEPICPTCDCPTCTRYGRSYLHHLFRVRDGQADRLATLHNLRFYTRLIEQLRAGGRALAAGPAEIGDDDT

SEQ ID NO: 55470 - protein, 383 aa, Frankia sp.
  REGION 1..383: note = tr|A0A062WV20|A0A062WV20_9ACTN Queuine/archaeosine tRNA-ribosyltransferase OS=Frankia sp. BMG5.23 OX=683305; GN = BMG523Draft_04264 PE=4 SV=1
MSPPVMPVVPAPVLATPHGTVELPTFLPDGTRAAVRSTDPRDLREVGIEAVMCNAFHLAQRPGVRPVKRVGGLRRFMAWDGVVVTDSGGFQVLSLLRRQGQHSAIRPGGVVFRNPADGTKVELTPQRVIEWQFGLGSGVVIALDDCTGPEDSPAEVVASVDRTIRWFRDTRTAFDLQCRQRRLENPPLLVGVVQGGADPDQRKRCVEALVEAGAQGFGFGGWPLDGNGVLEREMFALLSASTPPEAPLFALGVGKPEHLVALCQIDCRWVFDCTIPTRDARHGRLYAFNNAPLAADGSFYQNVHILDERNHRIDEPICPTCDCPTCTRYGRSYLHHLFRVRDGQADRLATLHNLRFYTRLIEQLRAGGRALAAGPAEVGDDDT

SEQ ID NO: 55471 - protein, 376 aa, Frateuria aurantia
  REGION 1..376: note = tr|H8L5X4|H8L5X4_FRAAD Queuine tRNA-ribosyltransferase OS=Frateuria aurantia (strain ATCC 33424 / DSM 6220 / NBRC 3245 / NCIMB 13370) OX=767434; GN = tgt PE=3 SV=1
MTALTFELDATDGAARRGRVHLPHGSLETPAFMPVGTYGSVKAMTPRDLKESGAEIILGNTFHLFLRPGLEVISRFGGLHKFVGWDRPMLTDSGGFQVFSLAHKRKITEEGVTFASPVDGSKVFLSPEVSMQIQSTLNSDIAMIFDECTPYPATEPVAAESMRLSLRWAERSRQAFTELGSGNALFGIVQGSVYESLRRESAEGLVKIGFDGYAVGGLAVGEPEDARNHTLDFTVPMLPQDKPRYLMGVGRPEDIVEAVRRGIDMFDCVMPTRNARNGFLFTAQGTLRIRNAKFALDTAVIEEGCDCYTCASGFSRAYLRHLDRCNEILGSQLATIHNLRYYQRLMQGLRDAIAARRLDDFVAEFYALRQGAAAAA

SEQ ID NO: 55472 - protein, 375 aa, Frateuria sp.
  REGION 1..375: note = tr|A0A0Q9PC17|A0A0Q9PC17_9GAMM Queuine tRNA-ribosyltransferase OS=Frateuria sp. Soil773; OX = 1736407 GN=tgt PE=3 SV=1
MTSLTFDLLATDGAARRGRLAFARGTVETPAFMPVGTYGSVKAMTPRDIVGIGAEIILGNTFHLFLRPGLEIVEAFGGLHRFIGWDKPILTDSGGFQVFSLAHKRKLAEEGVTFASPVDGSKVFLSPEVSMKIQKTLDSDVAMIFDECTPYPATEKVAAESMELSLRWAERSRRAFDELRNPNALFGIVQGSVYEPLRRRSAEGLVRIGFDGYAVGGLAVGEPEAERNHTLDFTVSLLPQDKPRYLMGVGRPEDIVEAVRRGIDMFDCVMPTRNARNGFLFVPEGTLRIRNAKFAADTRVVEEGCDCYACANGFSRAYLRHLDRCNEILASQLATMHNLRHYQRLMAGLRDAIAAGRLEDFAARFYALRQGAQAA

SEQ ID NO: 55473 - protein, 373 aa, Frateuria terrea
  REGION 1..373: note = tr|A0A1H6Y8A0|A0A1H6Y8A0_9GAMM Queuine tRNA-ribosyltransferase OS=Frateuria terrea OX=529704; GN = tgt PE=3 SV=1
MTFQLLARDGAARRGRLAFDRGTVETPAFMPVGTYGSVKAMTPRDLTELGAEIILGNTFHLYLRPGLEIVEKFAGLHRFIGWDKPILTDSGGFQVFSLAHKRKLAEEGVTFASPVDGSKVFLSPEVSMKIQTVLDSDIAMIFDECTPYPATEQQAGDSMAMSLRWAERSRRAFDELKNPNALFGIVQGGVYEPLRRRSAEGLVGIGFDGYAVGGLAVGEPEAERNHTLDFTVSMLPQDKPRYLMGVGRPEDIVEAVRRGIDMFDCVMPTRNARNGFLFVPEGTLRIRNARYADDTRVIEEGCDCYACANGFSRAYLRHLDRCNEILASQLATHHNLRHYQRLMAGLRAAIAAGTLEDFVAAFYARRQGGTPDA

SEQ ID NO: 55474 - protein, 384 aa, unidentified
  source 1..384: note = Frederiksenia canicola
  REGION 1..384: note = tr|A0A3N4XFR3|A0A3N4XFR3_9PAST Queuine tRNA-ribosyltransferase OS=Frederiksenia canicola; OX = 123824 GN=tgt PE=3 SV=1
MKYELHKTSGNARRGRLTFSRPKGEFHVETPAFMPVGTYGTVKGMTPEEVAATGAQILLGNTFHLWLRPGQEIMKLHGDLHDFMQWHGPILTDSGGFQVFSLGKLRKIKEEGVTFQNPISGEKIFLSPEKSMEIQYDLGSDIVMIFDECTPYPATFDYAKQSMEMSLRWAKRSRDRFDELENPNALFGIIQGGVYEELRKISVEKLVEIGFDGYAVGGLAVGEPKEDMHRILEYVCPQIPADKPRYLMGVGKPEDLVEGVRRGIDMFDCVMPTRNARNGHLFVSNGVVKIRNAKYRNDTSPLDAECDCYTCKNYTKAYLYHLDKCNEILGARLNTIHNLRYYQRLMAQIRQAIEEDRFDEFVVAFYQKIGKEIPPLQLGNNENA

SEQ ID NO: 55475 - protein, 605 aa, unidentified
  source 1..605: note = Fremyella diplosiphon
  REGION 1..605: note = tr|A0A1Z4M8K0|A0A1Z4M8K0_MICDP Queuine tRNA-ribosyltransferase OS=Fremyella diplosiphon NIES-3275; OX = 1973485 GN=tgt PE=4 SV=1
MKITKSPLTKTLVSTSTISRLRTLIITSCTGKKLHNPTNQLTIEDFKDTKRLRERTQSLSEFSCSACQMYTGLQHLRLMEGVDILRSRFGKEVVDVKIISAGYGLIPEDKVIVPYSVTFNSMKSDEISSWANFIGIHKDFQETVIGYDLVFVLLGDKYLRALNLPVETHPKQTFIILASNKSRNLVFLEDTNFELLTFSNADASRFGCALVGLKGQLLKLIASESRREPNLLSELYNNPKILEKVLNNQPQQLELPLEITSTTSKKTNINKKSQKQKKTIANLDEFLKLPRAINTHLIMKYFIPEWDDKVDNGYNFLLDEATKNRSAYKDDIYAHEIYSEPNYDGILVSKVVVDKIKNKRADIEKLGGIRNFVRFPGEIMGDCGAFGYIKLEIPPYNTVEILDYYEKLQFNYGVSIDHLIVGPFAEPGVREKRYDLTLRNAEEFISKHHKIGYNFTPIGVAQGWNPQTYADAVKKLVEMGYDYIAIGGVARTPTIEILEILKEVYQHLTPNTRLHLFGVGRIDALPYFRHLGITSFDSASPLRKAWFDAVENYHTLSGKAYAAVRIPFIDKQSPRIKHLFKSGFTSNYFDYLNHDGGNKNTAPLG

SEQ ID NO: 55476 - protein, 332 aa, unidentified
  source 1..332: note = Fremyella diplosiphon
  REGION 1..332: note = tr|A0A1Z4MPR9|A0A1Z4MPR9_MICDP Queuine tRNA-ribosyltransferase OS=Fremyella diplosiphon NIES-3275; OX = 1973485 GN=tgt PE=3 SV=1
MPVGTLANVKTVTPAQLRDTGAQMVLSNTYHLHLQPGEAIVAGGGGLHKFMGWNGPMLTDSGGFQVFSLSEMRKITEEGVTFRSPHDGQIIKLTPERSIEIQNTLGADVIMAFDECPPYPATRQEVEAATERTYRWLERCIVAHKRSDQALFGIVQGGVYLDLRSQAAVALAKLNLPGYAIGGVSVGEPPELMAQIVQTTAPLLPPEKPRYLMGVGTYKEMAIAIASGVDLFDCVIPTRWARHGTAIVQGERWNLKNAKFREDFTPLDETCPCYACQNFSRAYISHLVRSQEILAYTLLSIHNITELIRFTQRIREAILSDRFESEFGHWLE

SEQ ID NO: 55477 - protein, 378 aa, unidentified
  source 1..378: note = Fretibacterium fastidiosum
  REGION 1..378: note = tr|D4MAS8|D4MAS8_9BACT Queuine tRNA-ribosyltransferase OS=Fretibacterium fastidiosum; OX = 651822 GN=tgt PE=3 SV=1
MFEFKVLAVCPETGARAGELTTPHGVIRTPVFMPVGTQATVKAMAPWELEEIGAQIVLGNTYHLYLRPGAELVAEAGGLHRFMSWAHPILTDSGGFQVFSLADLNRVTDEAVVCRSHLDGSRHVMSPEWSMRVQELLGSDIAMCFDQCGPFPADHGQAEAALVRTTLWARRSQEAHRREDQALFGIVQGSVYDDLRLRSAEEIIELGFPGFGIGGLSVGEPHEVMYHVLDLLNGVMPREKPRYLMGVGYPSNVVEGIARGVDMFDCVLPTRNGRNGTLFTSFGRVNIKGKQYEHDFGSIDPECGCRLCRGFSRAYLRHLYHCGEILAARLCTLHNLSFTLNLAARAREAILDGTFPAFRAEFNAKFVDGPGRDAGGER

SEQ ID NO: 55478 - protein, 372 aa, unidentified
  source 1..372: note = Fretibacterium sp.
  REGION 1..372: note = tr|A0A3P1Y4I2|A0A3P1Y4I2_9BACT Queuine tRNA-ribosyltransferase OS=Fretibacterium sp. OH1220_COT-178 OX=2491047 GN=tgt PE=3 SV=1
MFEFKVEAVCPRTGARAGVLRTPHGPVRTPVFMPVGTQATVKAMTPPELEEIGAQIILGNTYHLYLRPGAELVAEAGGLHRFMGWNRPILTDSGGFQVFSLAQLNKVTDQDVRCRSHLDGSEHVMSPEWAMRVQELLGSDIAMCFDQCGPFPATHAQAETALERTTLWAERSKAAHSRPDQALFGIVQGSVYDDLRLRSAREIVGMDFPGYGIGGLSVGESHDVMYRVLDLLDGVMPREKPRYLMGVGYPPNIVEGVARGVDMFDCVLPTRNGRNGTLFTSFGRVNIKAQRYERDFGPVDPECDCYLCRDFSRAYLRHLYRCGEILAARLCTWHNLRYTVRLAERAREAILAGSFPEFRERFREGFQDGERG

SEQ ID NO: 55479 - protein, 383 aa, unidentified
  source 1..383: note = Frischella perrara
  REGION 1..383: note = tr|A0A0A7S8S8|A0A0A7S8S8_FRIPE Queuine tRNA-ribosyltransferase OS=Frischella perrara OX=1267021; GN = tgt PE=3 SV=1
MKFELDNTDGLARRGRMKFDRRGVEYTVETPAFMPVGTYGTVKGMTPEEVAATGAQILLGNTFHLWLRPGQDIMRKHGDLHDFMQWKGPILTDSGGFQVFSLGELRKIKEEGVHFRNPINGDAIFLSPEISMEIQYDLGSDIVMIFDECAPFPADWDYVKKSMEMSLRWAKRSRQRFDELGNKNALFGIVQGGIHQELRDISIKGLTEIGFDGYAVGGLAVGEPKADMHRILEGTCPQLPADKPRYLMGVGKPEDLVEGVRRGIDMFDCVMPTRNARNGHLFVTNGVIKIRNAKYRDDTTPLDPECDCYTCKHYTKSYLHHLDKCGEILGARLNTIHNLRYYQRLMAEIRQAVAEQRYEEFVQEFYQQIGKTPAPFNHETSVK

SEQ ID NO: 55480 - protein, 383 aa, unidentified
  source 1..383: note = Frischella perrara
  REGION 1..383: note = tr|A0A318MUY0|A0A318MUY0_FRIPE Queuine tRNA-ribosyltransferase OS=Frischella perrara OX=1267021; GN = tgt PE=3 SV=1
MKFELDNTDGLARRGRMKFDRRGVEYTVETPAFMPVGTYGTVKGMTPEEVAATGAQILLGNTFHLWLRPGQDIMRKHGDLHDFMQWKGPILTDSGGFQVFSLGELRKIKEEGVHFRNPINGDAIFLSPEISMEIQYDLGSDIVMIFDECAPFPADWDYVKKSMEMSLRWAKRSRQRFDELGNKNALFGIVQGGIHQELRDISIKGLTEIGFDGYAVGGLAVGEPKADMHRILEGTCPQLPADKPRYLMGVGKPEDLVEGVRRGIDMFDCVMPTRNARNGHLFVTNGVIKIRNAKYRDDTTPLDPECDCYTCKHYTKSYLHHLDKCGEILGARLNTIHNLRYYQRLMAEIRQAVAEQRYEEFVQEFYQRIGKTPAPFYHETSVK

SEQ ID NO: 55481 - protein, 378 aa, unidentified
  source 1..378: note = Frisingicoccus caecimuris
  REGION 1..378: note = tr|A0A4R2L6Q4|A0A4R2L6Q4_9FIRM Queuine tRNA-ribosyltransferase OS=Frisingicoccus caecimuris; OX = 1796636 GN=tgt PE=3 SV=1
MYKLLTTDGSAKRGQFTTVHGTIQTPVFMNVGTAAAIKGAVATTDLQQIKTQVELSNTYHLHLRPGDKIVKKLGGLHKFMNWDKPILTDSGGFQVFSLTSLRKIKEEGVYFNSHIDGHKIFMGPEESMQIQSNLASTIAMAFDECPSSLATRDYIQNSVDRTTRWLHRCKAEMQRLNSLPDTINPNQMLFGINQGGTFADIRIEHAKAISELDLDGYALGGLAVGETHEEMYHIIEETVPYLPQNKPTYLMGVGTPANILEAVDRGVDFFDCVYPSRNGRHGHVYTNHGKLNLFNAKFELDERPIEEGCGCPACKNYSRAYIRHLLKAKEMLGMRLCVLHNLYFYNTMMEEIREAIEEHRYASYKKTKLEGFEMKEEN

SEQ ID NO: 55482 - protein, 405 aa, Fructobacillus durionis
  REGION 1..405: note = tr|A0A1I1FPP6|A0A1I1FPP6_9LACT Queuine tRNA-ribosyltransferase OS=Fructobacillus durionis; OX = 283737 GN=tgt PE=3 SV=1
MTDKKPAVWYEHLHTEKHTGARRGRLHTPHGVYETPMFMPVGTQGAVKGVNTRTLKEIGSQFILANTYHLWVRPGDELIAQAGGLHKYMGWDQAILTDSGGFQVFSLSDARKLKEEGVTFQNHVNGDKMSLSPEVAMRIQNNLGSDVMMQLDEAIPYFETYDYVKESMQRSLRWADRAQQYHKKTDTQALFGIVQGAGFRDLRTESANELVKMDLPGYAVGGLSVGESKKEMNRVLDFTMPLLPEDKPRYLMGVAAPDSLIDGVIRGVDMFDCVLPTRIGRKGTLMTSKGRVVIKNSRYKDDFSPIDPDLTYYSDNPIRKNQFGNLAQYDLPNYSPYQNLSRSYLHHLFNAHERLGEQIASEHNLRYLLHLMEEMRKAIEEDRLLEFREQVLEEYGYNKKNARLF

SEQ ID NO: 55483 - protein, 405 aa, Fructobacillus ficulneus
  REGION 1..405: note = tr|A0A0K8MGG0|A0A0K8MGG0_9LACT Queuine tRNA-ribosyltransferase OS=Fructobacillus ficulneus; OX = 157463 GN=tgt PE=3 SV=1
MTQEKGAVWYEHLHTEKHTGARRGRLHTPHGTFETPMFMPVGTQGAVKGVNNKTLKEIGSQFILANTYHLWVRPGDELIAEAGGLHKYMGWDQAILTDSGGFQVFSLADARKLTEEGATFRNHVNGSKMFLSPEVAMRIQNNLGSDVMMQLDEAIPYFESYEYIKDSMQRSLRWADRAQQYHKKTDTQALFGIVQGAGFKGLRTESAQELVKLDLPGYAVGGLSVGESKKEMNRVLDFTMPLLPEDKPRYLMGVAAPDSLIDSVIRGVDMFDCVLPTRVGRKGTLMTRRGRVVIKNSKYKNDFSPIDPDLDYYSKNPIRQEQFGNLAQYDVPGYSPYQNLSRSYLHHLFNANELLGAQIASEHNLRYLLNLMEEMRTAIENDQLLEFRERVLEEYGYNKANARLF

SEQ ID NO: 55484 - protein, 369 aa, Fructobacillus fructosus
  REGION 1..369: note = tr|A0A3F3I265|A0A3F3I265_9LACT Queuine tRNA-ribosyltransferase OS=Fructobacillus fructosus KCTC 3544 OX=930946 GN=tgt PE=3 SV=1
MFMPVGTQGAVKGVNTRTLKEIGSQFILANTYHLWVRPGDELIAQAGGLHKYMGWDQAILTDSGGFQVFSLSDARKLKEEGVTFQNHVNGDKMFLSPEVAMRIQNNLGSDVMMQLDEAIPYFETYDYIKDSMQRSLRWADRAQKYHQKTDTQALFGIVQGAGFRDLRTESATELVKMDLPGYAVGGLSVGESKTEMNRVLDFTVPLLPEDKPRYLMGVAAPDSLIDGVIRGIDMFDCVLPTRIGRKGTLMTSKGRVVIKNSRYKADFSPIDPDLTYYSDNPIRKNQFGNLAQYDLPNYSPYQNLSRSYLHHLFNANERLGAQIASEHNLRYLLHLMEEMRTAIEEDRLLEFRERILEEYGYNKKNARLF

SEQ ID NO: 55485 - protein, 405 aa, Fructobacillus pseudoficulneus
  REGION 1..405: note = tr|A0A3F3GS76|A0A3F3GS76_9LACT Queuine tRNA-ribosyltransferase OS=Fructobacillus pseudoficulneus; OX = 220714 GN=tgt PE=3 SV=1
MTQQKGAVWYEHLHTEKHTGARRGRIHTPHGTFETPMFMPVGTQGAVKGVNNKTLKEIGSQFILANTYHLWVRPGDELIAEAGGLHKYMGWDQAILTDSGGFQVFSLSDSRKLDESGATFRNHVNGDKMFLSPEVAMRIQNNLGSDVMMQLDEAIPYFETYDYIKDSMQRSLRWADRAQQYHKKTDTQALFGIVQGAGFRDLRTESAQELVKMDLPGYAVGGLSVGESKVEMNRVLDFTMPLLPEDKPRYLMGVAAPDSLIDSVIRGVDMFDCVLPTRVGRKGTLMTRRGRVVIKNSKYKKDFSPIDPDLEYYSKNPIRTEQFGNLAQYDVPGYSPYQNLSRSYLHHLFNANELLAAEIASEHNLRYLLNLMEEMRTAIENDQLLEFRERVLEEYGYNKENARLF

SEQ ID NO: 55486 - protein, 405 aa, Fructobacillus sp.
  REGION 1..405: note = tr|A0A0J5PBL7|A0A0J5PBL7_9LACT Queuine tRNA-ribosyltransferase OS=Fructobacillus sp. EFB-N1; OX = 1658766 GN=tgt PE=3 SV=1
MTQQKGAVWYEHLHTEKHTGARRGRLHTPHGTFETPMFMPVGTQGAVKGVNNRTLKEIGSQFILANTYHLWVRPGDELIAEAGGLHKYMDWDQAILTDSGGFQVFSLSDSRKLSEEGATFRNHVNGDKMFLSPEVAMRIQNNLGSDVMMQLDEAIPYFETYEYIRDSMQRSLRWADRAQQYHKKTDTQALFGIVQGAGFRDLRTESAKELVKMDLPGYAVGGLSVGESKKEMNRVLDFTMPILPEDKPRYLMGVAAPDSLIDSVIRGVDMFDCVLPTRVGRKGTLMTKRGRVVIKNSKYKNDFSPIDSDLEYYSKNPIRTNQFGNLAQYDLPSYSPYQNLSRSYLHHLFNANELLGAQIASEHNLRYLLNLMEEMRTAIEEDRLLEFREQVLEDYGYNKANARLF

SEQ ID NO: 55487 - protein, 405 aa, Fructobacillus tropaeoli
  REGION 1..405: note = tr|A0A3F3H0S3|A0A3F3H0S3_9LACT Queuine tRNA-ribosyltransferase OS=Fructobacillus tropaeoli; OX = 709323 GN=tgt PE=3 SV=1
MTQQKGAVWYEHLHTEKHTGARRGRLHTPHGTFETPMFMPVGTQGAVKGVNNRTLKEIGSQFILANTYHLWVRPGDELIAEAGGLHKYMGWDQAILTDSGGFQVFSLSDSRKLSEEGATFRNHVNGDKMFLSPEVAMRIQNNLGSDVMMQLDEAIPYFETYEYIRDSMQRSLRWADRAQQYHKKTDTQALFGIVQGAGFRDLRTESAKELVKMDLPGYAVGGLSVGESKKEMNRVLDFTMPILPEDKPRYLMGVAAPDSLIDSVIRGVDMFDCVLPTRVGRKGTLMTKRGRVVIKNSKYKNDFSPIDPDLEYYSKNPIRTNQFGNLAQYDLPSYSPYQNLSRSYLHHLFNANELLGAQIASEHNLRYLLNLMEEMRTAIEEDRLLEFREQVLEDYGYNKANARLF

SEQ ID NO: 55488 - protein, 372 aa, unidentified
  source 1..372: note = Fuerstia marisgermanicae
  REGION 1..372: note = tr|A0A1P8WLS0|A0A1P8WLS0_9PLAN Queuine tRNA-ribosyltransferase OS=Fuerstia marisgermanicae; OX = 1891926 GN=tgt PE=3 SV=1
MTHFAFHLDATDTETAARAGRWETPHGVVDTPAFMPVGTLATVKGLLPEQLKATGAQMVLSNTYHLALRPGSDIVKEMGGLHKFMDWEGPILTDSGGFQVFSLAGLRKLTDEKAVFRSHIDGSLLELSPEKAVKIQEDLGADCIMCLDECPPANDVPEKIKAAVDRTTLWAKRCRDAQVRDDQALFGIVQGGISEEMRTRSAEGLVPLGFPGYAVGGLSVGEAPVDMYRTLDFTVPHLPVEKPRYLMGVGRPEDILEAVYRGIDLFDCVLPTRNGRNAMAFTSDGPVRLRNAVHQRDERPLDPECDCTACTRYSRAYLRHLFIAKEMLGGILLSLHNIAFYQKLVRDLRNAVNSGTVAQFRANQLARWQAQS

SEQ ID NO: 55489 - protein, 376 aa, unidentified
  source 1..376: note = Fulvimarina manganoxydans
  REGION 1..376: note = tr|A0A1W1YL75|A0A1W1YL75_9RHIZ Queuine tRNA-ribosyltransferase OS=Fulvimarina manganoxydans; OX = 937218 GN=tgt PE=3 SV=1
MSDEFRFNLIATDGKARRGEITMPRGTVRTPAFMPVGTAGTVKAMYLDQVRDLGSDIILGNVYHLMLRPGAERVARLGGLHEFARWPYPILTDSGGFQIMSLADLRKLDERGVKFKSHVDGSEYELTPERSIEIQNLLDSDIQMQLDECIRLPAERAEIERAMELSLRWAERSAKAFGNQPGKAMFGIVQGGDVIDLRLRSAEALAAMDLKGYSVGGLAVGEPQEVMLKVLEETLPAMPGEKPRYLMGVGTPDDLLQSVARGIDMFDCVMPTRAGRHGLAYTRFGKINLRNARHADDPRPLDETSDCPATRDYSRAYLHHLVRANESLAGMLLTWTNLAYYQSLMAGMRSAIEAGRFADFRSETMEAWARGDIEAI

SEQ ID NO: 55490 - protein, 376 aa, Fulvimarina pelagi
  REGION 1..376: note = tr|Q0G037|Q0G037_9RHIZ Queuine tRNA-ribosyltransferase OS=Fulvimarina pelagi HTCC2506; OX = 314231 GN=tgt PE=3 SV=1
MTERFRFNLLATNGKARRGEITMPRGTVRTPAFMPVGTAGTVKAMYLDQVRELGSDIILGNVYHLMLRPGAERVARLGGLHEFARWPYPILTDSGGFQVMSLADLRKLDETGVRFKSHIDGTEYSLTPERSIEIQGLLDSDIQMQLDECIRLPAERSEIERAMELSLRWAERSAKAFGDQPGKAMFGIVQGGDVPDLRIRSAEALAAMDLKGYSIGGLAVGEPQDVMLKTLEETLPVLPETKPRYLMGVGTPDDLLQSVARGVDMFDCVMPTRAGRHGLAYTRFGKINLRNARHAEDQRPLDETSDCPAARDYSRAYLHHLVRANESLAGMLLTWSNLAYYQSLMAGIRAAIETGRFDDFKTETEHGWKCGDLLPI

SEQ ID NO: 55491 - protein, 376 aa, Fulvimarina pelagi; identical to SEQ ID NO: 55490
  REGION 1..376: note = tr|A0A0N7KZ20|A0A0N7KZ20_9RHIZ Queuine tRNA-ribosyltransferase OS=Fulvimarina pelagi OX=217511; GN = tgt PE=3 SV=1

SEQ ID NO: 55492 - protein, 376 aa, Fulvimarina sp.
  REGION 1..376: note = tr|A0A2E1H7Z8|A0A2E1H7Z8_9RHIZ Queuine tRNA-ribosyltransferase OS=Fulvimarina sp. OX=1969479; GN = tgt PE=3 SV=1
MTERFSFQLLATDGKARRGEITMPRGTVRTPAFMPVGTAGTVKAMYLDQVRALGADIILGNVYHLMLRPGAERVARLGGLHDFALWPHPILTDSGGFQVMSLAELRKLDEKGVTFRSHVDGSVHSLSPERSIEIQGLLDSDIQMQLDECIRLPAERAEIERAMELSLRWAERCKVAFGEQPGKAMFGIVQGGDQIDLRQRSASSLAGMDLKGYAVGGLAVGEPQAVMLATLDETVPVLPEEKPRYLMGVGTPDDLIRSVARGIDMFDCVMPTRAGRHGLAYTRRGKINLKNARHAEDHRPLDEESDCPAARDYSRAYLHHLVRSDESLGGMLLTWNNLAYYQDLMAGIRAAIEAKRYADFCEEVSGAWAKGDLPPL

SEQ ID NO: 55493 - protein, 376 aa, Fulvimarina sp.
  REGION 1..376: note = tr|A0A371X7G9|A0A371X7G9_9RHIZ Queuine tRNA-ribosyltransferase OS=Fulvimarina sp. 85 OX=2293836; GN = tgt PE=3 SV=1
MTERFTFTLQATDGKARRGEITMPRGTVRTPAFMPVGTAGTVKAMYLDQVRDLGSDIILGNVYHLMLRPGAERVARLGGLHEFARWPHPILTDSGGFQVMSLAALRKLDERGVTFKSHIDGTEYELTPERSIEIQHLLDSDIQMQLDECIRLPAERAEIERAMELSLRWAERSAKAFGDQPGKAMFGIVQGGDVPDLRIRSAERLAAMDLKGYSIGGLAVGEPQAVMLKTLEETLPVLPEHKPRYLMGVGTPDDLLQSVARGIDMFDCVMPTRAGRHGLAYSCFGKINLRNARHADDHRPLDEASACPAARDYSRAYLHHLVRCNEALGGMLLTWINLAYYQDLMAGMRAAIEAGRFADFKAETEAGWARGDIAPL

SEQ ID NO: 55494 - protein, 374 aa, Fulvimonas soli
  REGION 1..374: note = tr|A0A316IGK5|A0A316IGK5_9GAMM Queuine tRNA-ribosyltransferase OS=Fulvimonas soli OX=155197; GN = tgt PE=3 SV=1
MTSLTFDLLATDGAARRGRLSFDRGTVETPAFMPVGTYGSVKAMTPRDLVEVGAEVILGNTFHLFLRPGLEIVEKFGGLHRFIGWEKPVLTDSGGFQVFSLAHRRKLTEEGVTFASPVDGSKVFLSPEVSMKIQTVLDSDIAMIFDECTPYPATERQASDSMELSLRWAGRSRRAFDDLGNPNSLFGIVQGSVYEPLRRRSAEGLVGIGFDGYAVGGLAVGEPEAERNRTLDFTVALLPKDRPRYLMGVGRPEDIVEAVRRGIDMFDCVMPTRNARNGFLFVPEGTLRIRNARYADDTRVIEEGCDCYACAHGFSRAYLRHLDRCNEILASQLATMHNLRHYQRLMAGLREAIAAGRLEDFVAAFYARRQGAAG

SEQ ID NO: 55495 - protein, 376 aa, unidentified
  source 1..376: note = Fulvivirga imtechensis
  REGION 1..376: note = tr|L8JQL5|L8JQL5_9BACT Queuine tRNA-ribosyltransferase OS=Fulvivirga imtechensis AK7; OX = 1237149 GN=tgt PE=3 SV=1
MEFKLEATDKGSKARTGIITTDHGEIKTPIFMPVGTAGSVKAVHQRELKEDIKAQIILGNTYHLYLRPGLEIIEKAGGLHKFNGWDRPILTDSGGYQVYSLSETRKIKEEGVTFKSHIDGSKHIFTPEAVMDIQRTIGADIIMAFDECTPYPCEYDYAEQSMHMTHRWLKRCCEYFDKTEGKYGYSQTLFPIVQGSVYKDLRKQSAEVIASYQREGNAIGGLSVGEPAEMMYEMTELVCDILPYDKPRYLMGVGTPANILECITLGIDMFDCVMPTRNARNGMLFTSEGIINIKNKKWESDFSPVDPELSGYVDTFYSKAYLRHLIISKEILGAQIASIHNLTFYLWLVGEARAQIEAGTFAEWKSGMVKKVSQRL

SEQ ID NO: 55496 - protein, 376 aa, Fulvivirga sp.
  REGION 1..376: note = tr|A0A553FFC4|A0A553FFC4_9BACT Queuine tRNA-ribosyltransferase OS=Fulvivirga sp. M361 OX=2594266; GN = tgt PE=3 SV=1
MKFEIQGADSNSKARAGKVTTDHGDILTPIFMPVGTAGSVKAVHQRELENDIKAQIILGNTYHLYLRPGLDIIESAGGLHAFNGWRKPILTDSGGYQVYSLADSRKIKEEGVTFQSHIDGSKHVFTPENVMDIQRTIGADIIMAFDECTPYPCDYQYAKDSMHMTHRWLERCCHRFDATEGKYGYNQTLFPIVQGSVYKDLRKEAAETVASFGREGNAIGGLSVGEPAEMMYEMTELVCDILPVDKPRYLMGVGTPANLLECIALGIDMFDCVMPTRNARNGMLFTSEGIINIKNKKWEGDHGPIDPELGGYVDTFYSRAYLRHLIMSKEILGAQIASIHNLTFYLWLMNSAREEIQKGTFFDWKSGMVEKVNRRL

SEQ ID NO: 55497 - protein, 376 aa, Fusibacter sp.
  REGION 1..376: note = tr|A0A1B6BFU4|A0A1B6BFU4_9FIRM Queuine tRNA-ribosyltransferase OS=Fusibacter sp. 3D3 OX=1048380; GN = tgt PE=3 SV=1
MAIRYELIKECKQTGARLGRLHTPHGVIETPIFMPVGTQATVKAMTPEELKEMNAQIILSNTYHLYLRPGHDLVRAAGGLHKFMNWDRPILTDSGGFQVFSLGDLRKITEEGVEFQSHIDGSKHFLTPEKVMEIETALGADIIMAFDECAPFPAEWQYVKDSLERTTRWAVRCKAAHTNTDNQALFGIVQGGMYRDLREQSAKELVALDFPGYSIGGLSVGEPKELMYEVLDYTTPLLPKNKPRYLMGVGSPDALIEGSIRGIDMFDCVLPTRIARNGTAMTSQGKVIIKNAKYTRDFTPLDPECDCYACKHYTRAYIRHLYKADEILSSRLLSTHNLHFLINLMKQVREAIMEDRLGDFRNAFFAKYYGETSKED

SEQ ID NO: 55498 - protein, 372 aa, Fusibacter sp.
  REGION 1..372: note = tr|A0A4V1PPH1|A0A4V1PPH1_9FIRM Queuine tRNA-ribosyltransferase OS=Fusibacter sp. A1 OX=2283630; GN = tgt PE=3 SV=1
MAVKYELIKTCKQSGARLGRLTTPHGVIDTPIFMPVGTKATVKAMTPEEVEGLGAQIILSNTYHLYMRPGHDLIKEAGGLHKFMNWNKPILTDSGGFQVFSLGSLRKIKEEGVEFRSHIDGSKHFISPEKAVEIQTALGSDIMMAFDECAPYPAEHDYVKKSLERTTRWAKRCKDAHTNTENQALFGIVQGGMYKDLREQSVRELVALDFPGYAIGGLSVGEPKDLMYEVLDYTAPLLPEDKARYLMGVGSPDALFEGAIRGIDMFDCVLPTRTARMGTAMTSVGPVSIKQAKYQRDFTTLDAECECYTCKNYTKAYLRHLYKENEILSARLFTIHNLHFLINLMSEIRQAIMDDRLLDFKNEFFKKYGYES

SEQ ID NO: 55499 - protein, 378 aa, unidentified
  source 1..378: note = Fusicatenibacter saccharivorans
  REGION 1..378: note = tr|A0A174IBW5|A0A174IBW5_9FIRM Queuine tRNA-ribosyltransferase OS=Fusicatenibacter saccharivorans; OX = 1150298 GN=tgt PE=3 SV=1
MYKILKMEGRAKRAHMETVHGNIETPVFMNVGTAAAIKGAVSTEDLQQIGTQVELSNTYHLHVRPGDEVVKKMGGLHKFMVWDKPILTDSGGFQVFSLAGLRKIKEEGVYFHSHVDGRKIFMGPEESMQIQSNLASTIAMAFDECPSSVAERRYVQNSVDRTARWLQRCKNKMQELNQREDTINKHQLLFGINQGAIYEDIRIDHAKRISEMDLDGYAVGGLAVGESHEEMYHILDEVVPYLPKDKPTYLMGVGTPANILEGVERGIDFFDCVYPSRNGRHGHVYTNHGKMNLFNQKYELDPRPIEEGCQCPACRHYSRAYIRHLLKAKEMLGMRLCVLHNLYFYNNMMTEIRTALDEGSFASYKRAKLAGFEEYDKK

SEQ ID NO: 55500 - protein, 379 aa, unidentified
  source 1..379: note = Fusicatenibacter saccharivorans
  REGION 1..379: note = tr|A0A174PVN9|A0A174PVN9_9FIRM Queuine tRNA-ribosyltransferase OS=Fusicatenibacter saccharivorans; OX = 1150298 GN=tgt PE=3 SV=1
MYKILKMEGRAKRAHMETVHGNIETPVFMNVGTAAAIKGAVSTEDLQQIGTQVELSNTYHLHVRPGDEVVKKMGGLHKFMVWDKPILTDSGGFQVFSLAGLRKIKEEGVYFHSHVDGRKIFMGPEESMQIQSNLASTIAMAFDECPSSVADRRYVQNSVDRTTRWLQRCKDKMQELNQREDTINKHQLLFGINQGAIYEDIRIDHAKRISEMDLDGYAVGGLAVGETHEEMYHILDEVVPYLPKEKPTYLMGVGTPANILEGVERGVDFFDCVYPSRNGRHGHVYTNHGKMNLFNQKYELDPRPIEEGCQCPACRHYSRAYIRHLLKAKEMLGMRLCVLHNLYFYNNMMTEIRTALDEGNFASYKRAKLAGFEEYDKKE

SEQ ID NO: 55501 - protein, 377 aa, unidentified; identical to SEQ ID NO: 54888
  source 1..377: note = Fusicatenibacter sp.
  REGION 1..377: note = tr|A0A174WUL3|A0A174WUL3_9FIRM Queuine tRNA-ribosyltransferase OS=Fusicatenibacter sp. 2789STDY5834925 OX=1806509 GN=tgt PE=3 SV=1

SEQ ID NO: 55502 - protein, 387 aa, unidentified
  source 1..387: note = Fusobacteriaceae bacterium
  REGION 1..387: note = tr|A0A349GT35|A0A349GT35_9FUSO Queuine tRNA-ribosyltransferase OS=Fusobacteriaceae bacterium; OX = 2053555 GN=tgt PE=3 SV=1
MNKLPVNYELSHIDGKARAGVITTPHGNIKTPVFMPVGTQATVKTMNPEEVRELGADIILGNTYHLFLRPGDDVVAKFGGLHKFMNWPHPILTDSGGFQVFSLGAIRKIKEEGVYFRSHIDGSRRFISPEKSIDIQNNLGSDIVMLFDECPPGQSSREYLIPSIERTTRWAKRCVTAHKKPNEQGLFAIVQGGIYEDLRDKSMNELMEMDESFSGYAIGGLAVGEPREDMYRILDYITPKLPEHKPRYLMGVGEPLDMLEAVEHGVDMMDCVQPSRIGRHGTTFTKYGRLVIKNAKYALDPRPLDEDCDCYVCKNYTRGYIRHLFKANEMLGQKLATYHNLYFLIKMMNGARDAIINKRFVAFKEEFIENYTQGKDSEWIIPQRIEE

SEQ ID NO: 55503 - protein, 374 aa, Fusobacterium canifelinum
  REGION 1..374: note = tr|A0A3P1USQ8|A0A3P1USQ8_9FUSO Queuine tRNA-ribosyltransferase OS=Fusobacterium canifelinum; OX = 285729 GN=tgt PE=3 SV=1
MKLPVTYKIEDKDGKARAGVITTPHGEIETPVFMPVGTQATVKTMSKEELFDIGSEIILGNTYHLYLRPNDELIARLGGLHKFMNWDKPILTDSGGFQVFSLGSLRKIKEEGVYFSSHIDGSKHFISPEKSIQIQNNLGSDIVMLFDECPPGLSTREYIIPSIERTTRWAKRCVEAHQKKDSQGLFAIVQGGIYEDLRQKSLDELSQMDENFSGYAIGGLAVGESREDMYRILDYIVEKCPEEKPRYLMGVGEPVDMLNAVESGIDMMDCVQPTRLARHGTVFTKDGRLVIKSERYKEDTKPLDEECDCYVCKNYSRAYIRHLIKVQEVLGLRLTSYHNLYFLIKLMKDAREAIKEKRFKEFKEKFIQRYEGKE

SEQ ID NO: 55504 - protein, 379 aa, Fusobacterium equinum
  REGION 1..379: note = tr|A0A133NEZ9|A0A133NEZ9_9FUSO Queuine tRNA-ribosyltransferase OS=Fusobacterium equinum OX=134605; GN = tgt PE=3 SV=1
MKKLPVTYTLEMTDGKARAGKIQTPHGIIETPVFMPVGTQATVKAMTKEELDDIGTQIILGNTYHLFLRPGDDLIDRLGGLHQFMSWKKPILTDSGGFQVFSLGALRKIKEEGVYFSSHIDGSKRFISPEKSIEIQNHLGSDIAMLFDECPPGLSTREYLIPSIERTTRWAKRCVEAHQKADKQGLFAIVQGGIYEDLRQKSLEELLEMDEHFSGYAIGGLAVGEPREDMYRILDSIVEKCPENKPRYLMGVGEPIDMLEAVESGIDMMDCVQPTRIARHGTVFTKHGRLVIKNAEYAEDTRALDEECDCYVCRNYSRAYIRHLLKVDEILGARLTSYHNLYFLVQLMKDAREAIKKGEFQKFKKEFIDKYNINIHRRK

SEQ ID NO: 55505 - protein, 379 aa, Fusobacterium gonidiaformans; identical to SEQ ID NO: 55504
  REGION 1..379: note = tr|E5BEF9|E5BEF9_9FUSO Queuine tRNA-ribosyltransferase OS=Fusobacterium gonidiaformans 3-1-5R OX=469605 GN=tgt PE=3 SV=1

SEQ ID NO: 55506 - protein, 373 aa, unidentified
  source 1..373: note = Fusobacterium hwasookii
  REGION 1..373: note = tr|A0A0S2ZHN6|A0A0S2ZHN6_9FUSO Queuine tRNA-ribosyltransferase OS=Fusobacterium hwasookii ChDC F300 OX=1307444 GN=tgt PE=3 SV=1
MKLPVTYKIEDKDGKARAGVITTPHGEIETPVFMPVGTQATVKTMSKEELIDIGSEIILGNTYHLYLRPNDELIARLGGLHKFMNWNKPILTDSGGFQVFSLGSLRKIKEEGVYFSSHIDGSKHFISPEKSIQIQNNLGSDIVMLFDECPPGLSTREYIIPSIERTTRWAKRCVEAHKNKDSQGLFAIVQGGIYEDLRQKSLDELSEMDKHFSGYAIGGLAVGEPREDMYRILDYIVEKCPEEKPRYLMGVGEPVDMLNAVESGIDMMDCVQPTRLARHGTVFTKDGRLVIKSERYKEDTKPLDEECDCYVCKNYSRAYIRHLIKVQEVLGLRLTSYHNLYFLIKLMKDAREAIKEKRFKEFKEKFIQRYEGK

SEQ ID NO: 55507 - protein, 373 aa, unidentified
  source 1..373: note = Fusobacterium hwasookii
  REGION 1..373: note = tr|J8VGG6|J8VGG6_9FUSO Queuine tRNA-ribosyltransferase OS=Fusobacterium hwasookii ChDC F128 OX=1216362 GN=tgt PE=3 SV=1
MKLPVTYKIEDKDGKARAGVITTPHGEIETPVFMPVGTQATVKTMSKEELLDIGSEIILGNTYHLYLRPNDELIARLGGLHKFMNWNKPILTDSGGFQVFSLGSLRKIKEEGVYFSSHIDGSKHFISPEKSIQIQNNLGSDIVMLFDECPPGLSTREYIIPSIERTTRWAKRCVEAHKNKDSQGLFAIVQGGIYEDLRQKSLDELSEMDEHFSGYAIGGLAVGETREDMYRILDYIVEKCPEEKPRYLMGVGEPVDMLNAVESGIDMMDCVQPTRLARHGTVFTKDGRLVIKSERYKEDTKPLDEECDCYVCKNYSRAYIRHLIKVQEVLGLRLTSYHNLYFLIKLMKDAREAIKEKRFKEFKENFIQRYEGK

SEQ ID NO: 55508 - protein, 388 aa, Fusobacterium mortiferum
  REGION 1..388: note = tr|C3WCD2|C3WCD2_FUSMR Queuine tRNA-ribosyltransferase OS=Fusobacterium mortiferum ATCC 9817 OX=469616 GN=tgt PE=3 SV=1
MTKKLPVTYELQKKSGKARAGKITTPHGEIETPVFMPVGTQATVKAMTPEELEAIGSQIILGNTYHLYLRPSDELVAKFGGLHKFMNWKKPILTDSGGFQVFSLGALRKITEEGVRFSSHLDGSKHFLTPEKSINIQNNLGSDIVMLFDECPPGLSSREYMIPSIERTTRWAKRCIEAHKRPDEQGLFAIVQGGIYEDLRDKSLRELSEMDEHFSGYAIGGLAVGEPREDMYRILDYIVEKCPENKPRYLMGVGEPLDMLEAVESGIDMMDCVQPTRIGRHGTVFTKYGRLVIKNAMYSEDDRPLDEDCDCYVCRNFKRGYIRHLFKAEEILGQRLATYHNLYFLIKLMKNAREAILEDRFTEFKEEFIRNYNMGKESDWIKPKKIGE

SEQ ID NO: 55509 - protein, 388 aa, Fusobacterium mortiferum
  REGION 1..388: note = tr|A0A414PML5|A0A414PML5_FUSMR Queuine tRNA-ribosyltransferase OS=Fusobacterium mortiferum OX=850; GN = tgt PE=3 SV=1
MTKKLPVTYELQKKSGKARAGKITTPHGEIETPVFMPVGTQATVKAMTPEELEAIGSQIILGNTYHLYLRPSDELVAKFGGLHKFMNWKKPILTDSGGFQVFSLGALRKITEEGVRFSSHLDGSKHFLTPEKSINIQNNLGSDIVMLFDECPPGLSSREYMIPSIERTTRWAKRCIEAHKRPDEQGLFAIVQGGIYEDLRDKSLRELSEMDEHFSGYAIGGLAVGEPREDMYRILDYIVEKCPENKPRYLMGVGEPLDMLEAVESGIDMMDCVQPTRIGRHGTVFTKYGRLVIKNAMYSEDDRPLDEDCDCYVCRNFKRGYIRHLFKAEEILGQRLATYHNLYFLIKLMKNAREAILEDRFTEFKEEFIKNYNMGKESDWIKPKKIGE

SEQ ID NO: 55510 - protein, 383 aa, Fusobacterium naviforme
  REGION 1..383: note = tr|A0A2P8EK60|A0A2P8EK60_9FUSO Queuine tRNA-ribosyltransferase OS=Fusobacterium naviforme; OX = 77917 GN=tgt PE=3 SV=1
MKYKILATEGRAKRAHMETVHGSIETPVFMNVGTVAAIKGAVSTDDLKEIGTQVELSNTYHLHVRPGDRERSGDELIRAFGGLHRFMHWDRPILTDSGGFQVFSLAGLRKIREEGVTFHSHIDGRKIFMGPEESITIQSNLGSTIAMAFDECPPSLAERSYIEKSVARTTRWLRRCKEKIAELNGREDTVNREQLLFGINQGGILEDVRIAHADEISAMDCDGYAVGGLAVGESAEEMYRILDAVVPHLPKEKPTYLMGVGTPVNILEGVERGVDFFDCVYPSRNGRHGHVYTNQGKLNLFNRKYELDSRPIEEGCGCPACRSYSRAYIRHLLKAGEMLGMRLCVLHNLYFYNTMMYEIRESIEQGRFAEYKKKKMEGMEAKA

SEQ ID NO: 55511 - protein, 388 aa, Fusobacterium necrogenes
  REGION 1..388: note = tr|A0A377GWN0|A0A377GWN0_9FUSO Queuine tRNA-ribosyltransferase OS=Fusobacterium necrogenes OX=858; GN = tgt PE=3 SV=1
MTKKLPVTYELQKKSGKARAGKITTPHGEIETPVFMPVGTQATVKAMTPEELEAIGSQIILGNTYHLYLRPSDELVAKFGGLHKFMNWKKPILTDSGGFQVFSLGALRKITEEGVRFSSHLDGSKHFLTPEKSINIQNNLGSDIVMLFDECPPGLSSREYMIPSIERTTRWAKRCIEAHKRPDEQGLFAIVQGGIYEDLRDKSLRELSEMDEHFSGYAIGGLAVGEPREDMYRILDYIVEKCPENKPRYLMGVGEPLDMLEAVESGIDMMDCVQPTRIGRHGTVFTKYGRLVIKNAMYSEDDRPLDEDCDCYVCRNFKRGYIRHLFKAEEILGQRLATYHNLYFLIKLMKNAREAILEDRFTEFKEEFIRNYNMGKEFDWIKPKKIVG

SEQ ID NO: 55512 - protein, 379 aa, Fusobacterium necrophorum
  REGION 1..379: note = tr|A0A2P1RLU7|A0A2P1RLU7_9FUSO Queuine tRNA-ribosyltransferase OS=Fusobacterium necrophorum subsp. funduliforme OX=143387 GN=tgt PE=3 SV=1
MKKLPITYTLESKDGRARVGRIQTPHGEIETPVFMPVGTQATVKAMTKEELDEIGTQIILGNTYHLFLRPGDDVIDRLGGLHSFMNWKKPILTDSGGFQVFSLGALRKIQEEGVYFRSHIDGSKRFISPEKSIEIQNHLGSDIAMLFDECPPGLSSREYLIPSIERTTRWAKRCVEAHQKAEKQGLFAIVQGGVYEDLRQKSLEELLEMDEHFSGYAIGGLAVGEPREDMYRILDYIVEKCPENKPRYLMGVGEPLDMLEAVESGIDMMDCVQPTRIARHGTVFTKQGRLVVKNAEYAEDTKPLDEECHCYVCRNYSRAYIRHLLKVDEILGARLTSYHNLYFLVHLMKDARIAIQEGRFQQFKAEFIEKYNTNQHRRK

SEQ ID NO: 55513 - protein, 379 aa, Fusobacterium necrophorum
  REGION 1..379: note = tr|J5TR32|J5TR32_9FUSO Queuine tRNA-ribosyltransferase OS=Fusobacterium necrophorum subsp. funduliforme Fnf 1007 OX=1161424 GN=tgt PE=3 SV=1
MKKLPITYTLESKDGRARAGRIQTPHGEIETPVFMPVGTQATVKAMTKEELDEIGTQIILGNTYHLFLRPGDDVIDRLGGLHSFMNWKKPILTDSGGFQVFSLGALRKIQEEGVYFRSHIDGSKRFISPEKSIEIQNHLGSDIAMLFDECPPGLSSREYLIPSIERTTRWAKRCVEAHQKAEKQGLFAIVQGGVYEDLRQKSLEELLEMDEHFSGYAIGGLAVGEPREDMYRILDYIVEKCPENKPRYLMGVGEPLDMLEAVESGIDMMDCVQPTRIARHGTVFTKQGRLVVKNAEYAEDTKPLDEECHCYVCRNYSRAYIRHLLKVDEILGARLTSYHNLYFLVHLMKDARIAIQEGRFQQFKAEFIEKYNTNQHRRK

SEQ ID NO: 55514 - protein, 373 aa, Fusobacterium nucleatum
  REGION 1..373: note = sp|Q8RDN0|TGT_FUSNN Queuine tRNA-ribosyltransferase; OS = Fusobacterium nucleatum subsp. nucleatum (strain ATCC 25586 / CIP 101130 / JCM 8532 / LMG 13131) OX=190304 GN= tgt PE=3 SV=1
MKLPVTYKVEDKDGKARAGVITTLHGEIETPVFMPVGTQATVKTMSKEELLDIGSEIILGNTYHLYLRPNDELIARLGGLHKFMNWDRPILTDSGGFQVFSLGSLRKIKEEGVYFSSHIDGSKHFISPEKSIQIQNNLGSDIVMLFDECPPGLSTREYIIPSIERTTRWAKRCVEAHQKKDIQGLFAIVQGGIYEDLRQKSLDELSEMDENFSGYAIGGLAVGEPREDMYRILDYIVEKCPEEKPRYLMGVGEPVDMLNAVESGIDMMDCVQPTRLARHGTVFTKDGRLVIKSERYKEDTKPLDEECDCYVCKNYSRAYIRHLIKVQEVLGLRLTSYHNLYFLIKLMKDAREAIKEKRFKEFKEKFIQRYEGK

SEQ ID NO: 55515 - protein, 374 aa, Fusobacterium nucleatum
  REGION 1..374: note = tr|U7T267|U7T267_FUSNU Queuine tRNA-ribosyltransferase OS=Fusobacterium nucleatum CTI-5; OX = 1316586 GN=tgt PE=3 SV=1
MKLPITYKIENKDGKARAGVITTPHGEIETPVFMPVGTQATVKTMSKEELIDIGSEIILGNTYHLYLRPNDELIARLGGLHKFMNWDRPILTDSGGFQVFSLGSLRKIKEEGVYFSSHIDGSKHFISPEKSIQIQNNLGSDIAMLFDECPPGLSSREYIIPSIERTTRWAKRCVEAHQKKDSQGLFAIVQGGIYEDLRQKSLDELSEMDENFSGYAIGGLAVGEPREDMYRILDYIVEKCPEEKPRYLMGVGEPVDMLNAVESGIDMMDCVQPTRLARHGTVFTKDGRLVIKSERYKEDTKPLDEECDCYVCRNYSRAYIRHLIKVQEVLGLRLTSYHNLYFLIKLMKDARKAIKEKRFKEFKENFIKRYENKK

SEQ ID NO: 55516 - protein, 378 aa, Fusobacterium periodonticum
  REGION 1..378: note = tr|D4CSN7|D4CSN7_9FUSO Queuine tRNA-ribosyltransferase OS=Fusobacterium periodonticum ATCC 33693 OX=546275 GN=tgt PE=3 SV=1
MIGELMKLAVTYKVENKDGKARAGLITTPHGEIETPVFMPVGTQATVKTMSKEELIDIGSEIILGNTYHLYLRPNDELIAKLGGLHKFMNWDKPILTDSGGFQVFSLGSLRKIKEEGVYFSSHIDGSKHFISPEKSIQIQNNLGSDIVMLFDECPPGLSTREYIIPSIERTTRWAKRCVEAHQKKDSQGLFAIVQGGIYEDLRQKSLDELSEMDEHFSGYAIGGLAVGEPREDMYRILDYIVEKCPEDKPRYLMGVGEPVDMLNAVESGIDMMDCVQPTRLARHGTVFTKKGRLIIKSERYKEDTAPLDEECDCYVCKNYSRAYIRHLIKVQEVLGLRLTSYHNLHFLIKLMKDAREAIKEKRFKEFKNDFIKKYEGK

SEQ ID NO: 55517 - protein, 373 aa, Fusobacterium periodonticum
  REGION 1..373: note = tr|A0A2D3NPY0|A0A2D3NPY0_9FUSO Queuine tRNA-ribosyltransferase OS=Fusobacterium periodonticum; OX = 860 GN=tgt PE=3 SV=1
MKLAVTYKVENKDGKARAGLITTPHGEIETPVFMPVGTQATVKTMSKEELIDIGSEIILGNTYHLYLRPNDELIARLGGLHKFMNWDKPILTDSGGFQVFSLGSLRKIKEEGVYFSSHIDGSKHFISPEKSIQIQNNLGSDIVMLFDECPPGLSTREYIIPSIERTTRWAKRCVEAHQKKDTQGLFAIVQGGIYEDLRQKSLDELSEMDEHFSGYAIGGLAVGEPREDMYRILDYIVEKCPEDKPRYLMGVGEPVDMLNAVESGIDMMDCVQPTRLARHGTVFTKKGRLIIKSERYKEDTAPLDEECDCYVCKNYSRAYIRHLIKVQEVLGLRLTSYHNLHFLIKLMKDAREAIKEKRFKEFKDDFIKKYEGK

SEQ ID NO: 55518 - protein, 373 aa, Fusobacterium sp.
  REGION 1..373: note = tr|A0A1E9EJC7|A0A1E9EJC7_9FUSO Queuine tRNA-ribosyltransferase OS=Fusobacterium sp. HMSC064B12; OX = 1739279 GN=tgt PE=3 SV=1
MKLPVRYKIEDKDGKARAGVITTPHGEIKTPVFMPVGTQATVKTMSKEELLAIGSEIILGNTYHLYLRPNDELIARLGGLHKFMNWDKPILTDSGGFQVFSLGSLRKIKEEGVYFSSHIDGSKHFISPEKSIQIQNNLGSDIAMLFDECPPGLSTREYIIPSIERTTRWAKRCVEAHQKKDSQGLFAIVQGGIYEDLRQKSLDELSEMDENFSGYAIGGLAVGEPREDMYRILDYIVEKCPEEKPRYLMGVGEPVDMLNAVESGIDMMDCVQPTRLARHGTVFTKDGRLVIKSERYKEDIKPLDEECDCYVCKNYSRAYIRHLIKVQEVLGLRLTSYHNLYFLIKLMKDARRAIKEKRFKEFKENFIKRYENK

SEQ ID NO: 55519 - protein, 374 aa, Fusobacterium sp.
  REGION 1..374: note = tr|R5X085|R5X085_9FUSO Queuine tRNA-ribosyltransferase OS=Fusobacterium sp. CAG:649; OX = 1262900 GN=tgt PE=3 SV=1
MKLPITYKIENKDGKARAGVITTPHGEIETPVFMPVGTQATVKTMSKEELIDIGSEIILGNTYHLYLRPNDELIARLGGLHKFMNWDKPILTDSGGFQVFSLGSLRKIKEEGVYFSSHIDGSKHFISPEKSIQIQNNLGSDIAMLFDECPPGLSSREYIIPSIERTTRWAKRCVEAHQKKDSQGLFAIVQGGIYEDLRQKSLDELSEMDENFSGYAIGGLAVGEPREDMYRILDYIVEKCPEEKPRYLMGVGEPVDMLNAVESGIDMMDCVQPTRLARHGTVFTKDGRLVIKSERYKEDTKPLDEECDCYVCKNYSRAYIRHLIKVQEVLGLRLTSYHNLYFLIKLMKDARKAIKEKRFKEFKENFIKRYENKK

SEQ ID NO: 55520 - protein, 389 aa, Fusobacterium ulcerans
  REGION 1..389: note = tr|H1PPK1|H1PPK1_9FUSO Queuine tRNA-ribosyltransferase OS=Fusobacterium ulcerans 12-1B; OX = 457404 GN=tgt PE=3 SV=1
MTIKLPVTYELVKKQGKARAGKITTPHGEIETPVFMPVGTQATVKTMTPEELETIGAEIILGNTYHLYLRPSDELIAKFGGLHKFMNWNKPILTDSGGFQVFSLGALRKITEEGVKFSSHIDGSKHFLSPEKSIDIQNNLGSDIVMLFDECPPGLSTREYIIPSIERTTRWAKRCIEAHKRPDEQGLFAIVQGGVYEDLRDKSLNELMEMDESFSGYAIGGLAVGEPREDMYRILHHIVERCPEDKPRYLMGVGEPLDMLEAIEAGIDMMDCVQPSRIGRHGTVFTKYGRLVIKNASYAEDDRPLDEDCDCYVCRNYTRGYIRHLFKAEEILGQRLATYHNLYFLLKLMKNARKAILADNFEEYKDNFVKNYTMGKESEWIKPKKISEK

SEQ ID NO: 55521 - protein, 389 aa, Fusobacterium ulcerans; identical to SEQ ID NO: 55520
  REGION 1..389: note = tr|A0A2P1S874|A0A2P1S874_9FUSO Queuine tRNA-ribosyltransferase OS=Fusobacterium ulcerans OX=861; GN = tgt PE=3 SV=1

SEQ ID NO: 55522 - protein, 385 aa, Fusobacterium varium
  REGION 1..385: note = tr|A0A250LVH6|A0A250LVH6_FUSVA Queuine tRNA-ribosyltransferase OS=Fusobacterium varium OX=856; GN = tgt PE=3 SV=1
MTIKLPVTYELVKKQGKARAGKITTPHGEIETPVFMPVGTQATVKTMTPEELETIGAEIILGNTYHLYLRPSDELIAKFGGLHKFMNWNKPILTDSGGFQVFSLGALRKITEEGVKFSSHIDGSKHFLSPEKSIDIQNNLGSDIVMLFDECPPGLSTREYIIPSIERTTRWAKRCIEAHKRPNEQGLFAIVQGGVYEDLRDKSLNELMEMDESFSGYAIGGLAVGEPREDMYRILHHIVEKCPEEKPRYLMGVGEPLDMLEAVEAGIDMMDCVQPSRIGRHGTVFTKYGRLVIKNASYAEDDRPLDEECDCYVCKNYTRGYIRHLFKAEEILGQRLATYHNLYFLLKLMKNARKAILADKFEEYKNNFIKNYILGKDSEWIKPKK

SEQ ID NO: 55523 - protein, 389 aa, Fusobacterium varium
  REGION 1..389: note = tr|A0A414TLH8|A0A414TLH8_FUSVA Queuine tRNA-ribosyltransferase OS=Fusobacterium varium OX=856; GN = tgt PE=3 SV=1
MTIKLPVTYELVKKQGKARAGKITTPHGEIETPVFMPVGTQATVKTMTPEELETIGAEIILGNTYHLYLRPSDELIAKFGGLHKFMNWNKPILTDSGGFQVFSLGALRKITEEGVKFSSHIDGSKHFLSPEKSIEIQNNLGSDIVMLFDECPPGLSTREYIIPSIERTTRWAKRCIEAHKRPDEQGLFAIVQGGVYEDLRDKSLNELMEMDNSFSGYAIGGLAVGEPREDMYRILHHIVERCPEEKPRYLMGVGEPLDMLEAVEAGIDMMDCVQPSRIGRHGTVFTKYGRLVIKNASYAEDDRPLDEDCDCYVCRNYTRGYIRHLFKAEEILGQRLATYHNLYFLLKLMKNARKAILADKFEEYKNDFVKNYTLGKESEWIKPKKIIEK

SEQ ID NO: 55524 - protein, 376 aa, Gaetbulibacter sp.
  REGION 1..376: note = tr|A0A2G5GM70|A0A2G5GM70_9FLAO Queuine tRNA-ribosyltransferase OS=Gaetbulibacter sp. 4G1; OX = 1891971 GN=tgt PE=3 SV=1
MTFELKAKDSQSKARAGEVTTDHGVIETPIFMPVGTVATVKGVHQRELKEEINPDIILGNTYHLYLRPQTHILEKAGGLHKFMNWDRSILTDSGGYQVYSLSANRKIKEEGVKFKSHIDGSYHTFTPENVMEIQRTIGADIIMAFDECTPYPCDYNYAKRSMHMTHRWLDRCINHLEKTPLKYDYSQAFFPIVQGSTYKDLRMQSAEYIANSGAVGNAIGGLSVGEPAEEMYAMTDVVCSILPEDKPRYLMGVGTPINILENIALGVDMFDCVMPTRNARNGMLFTAHGTINIKNLKWADDFSPIDEMGITFVDTEYSKAYLRHLFTVNELLGKQIATIHNLGFYLWLVREARKHILAGDFGIWKDKMVKQMNNRL

SEQ ID NO: 55525 - protein, 376 aa, Gaetbulibacter sp.
  REGION 1..376: note = tr|A0A2G5KN86|A0A2G5KN86_9FLAO Queuine tRNA-ribosyltransferase OS=Gaetbulibacter sp. 5U11; OX = 1889780 GN=tgt PE=3 SV=1
MTFDLKAKDTQSNARAGVITTDHGVIETPIFMPVGTAGTVKGVHQRELKDDINPDIILGNTYHLYLKPQIDVLEKAGGLHKFMNWDRNILTDSGGYQVYSLSGNNKIKEEGVKFKSHIDGSYHTFTPENVMEIQRSIGADIIMAFDECTPYPCEYNYARRSMHMTHRWLERCLTHLDKTPFKYDYSQSFFPIVQGSTYKDLRKQSAEYIAGVGAEGNAIGGLSVGEPAEEMYAMTEVVTDILPWDKPRYLMGVGTPINILENIALGVDMFDCVMPTRNARNGMLFTAYGSINIKNLKWRDDFSPIDEMGITYVDTEYSKAYLRHLFNTNELLGKQIATIHNLGFYLWLTREARKHILAGDFRAWKDKMVKQMNNRL

SEQ ID NO: 55526 - protein, 368 aa, unidentified
  source 1..368: note = Gaiellales bacterium
  REGION 1..368: note = tr|A0A419GRL2|A0A419GRL2_9ACTN Queuine tRNA-ribosyltransferase OS=Gaiellales bacterium OX=2093372; GN = tgt PE=3 SV=1
MPLTGFSLQAVDGPARSGLLTTPHGAVETPCFMPVGTQATVKTLSPRDLREAGAGIVLANAYHLYFRPGVETVESLGALHRFMSWDGPILTDSGGFQVFSLAARARVKGDGVEFRSIYDGSRHFFTPELATDIQQRLGADIIMCFDECVPAGADRAYLEESVRRTAAWAARCRRSHQRDDQMLMGIVQGGIDLQLRRESVELTLELDFPGYAIGGLSVGEERGAMLEAMAFTAGLLPAEKPRYFMGLGDPEGILDAIAAGIDMFDCVLPTRAARNGGAYTSGGRLNLKNARFARDAGPLDPQCGCYACTGFSRAYLRHLVTQKEILGLRLLSLHNVTFLLDLTRQAREAIKVGRFTQFRASVRLEPES

SEQ ID NO: 55527 - protein, 376 aa, unidentified
  source 1..376: note = Galbibacter marinus
  REGION 1..376: note = tr|K2PS29|K2PS29_9FLAO Queuine tRNA-ribosyltransferase OS=Galbibacter marinus OX=555500; GN = tgt PE=3 SV=1
MDFKILAKDTAGKARAATITTDHGTIETPIFMPVGTVASVKGVHQRELKEDINPDIILGNTYHLYLRPKTPILEAAGGLHKFMNWDRNILTDSGGYQVYSLSGTRKIKEEGVKFKSHIDGSYHVFSPENVMDIQRTIGADIIMAFDECTPYPCDYNYAKRSMHMTHRWLDRCINRFQQTQPKYGYNQTLFPIVQGSTYKDLRIQSAEYIANAGAQGNAIGGLSVGEPAEEMYAMTEVVCDILPEDKPRYLMGVGTPINILENIALGVDMFDCVMPTRNARNGMLFTAHGTINIKNKKWEDDFSPIDEMGITYVDTYYSKAYLRHLFAANEYLGKQIATIHNLGFYLWLVRQARKHILAGDFTTWKNTMVKQMDKRL

SEQ ID NO: 55528 - protein, 372 aa, Gallaecimonas pentaromativorans
  REGION 1..372: note = tr|A0A3N1P9J1|A0A3N1P9J1_9GAMM Queuine tRNA-ribosyltransferase OS=Gallaecimonas pentaromativorans; OX = 584787 GN=tgt PE=3 SV=1
MKYELFNTDGQARRGQLVFERGTVQTPAFMPVGTYGTVKGMTPEEVADTGAEILLGNTFHLWLRPGQDVMKAHGDLHDFMHWHGPILTDSGGFQVFSLGDIRKITEAGVHFRNPINGDKIFLDPEKSMEIQTDLGSDIVMIFDECTPYPATHDEAKKSMEMSLRWAKRSRDHFDKLENPNALFGIIQGSVYEDLRDVSIKGLTEIGFDGYAVGGLAVGEPKDDMHRILSHVNPQLPADKPRYLMGVGKPEDLVEGVRRGIDMFDCVMPTRNARNGHLFVTEGVIKIRNAKHRSDTSPLDGECDCYTCKHYSKAYLHHLDRCNEILGARLNTIHNLRYYQRVMEGLRGAIEQGRLDAFVKDFYERKGMEVPAL

SEQ ID NO: 55529 - protein, 372 aa, unidentified
  source 1..372: note = Gallaecimonas xiamenensis
  REGION 1..372: note = tr|K2JKE2|K2JKE2_9GAMM Queuine tRNA-ribosyltransferase OS=Gallaecimonas xiamenensis 3-C-1; OX = 745411 GN=tgt PE=3 SV=1
MKYELFNTDGQARRGQLVFERGIVQTPAFMPVGTYGTVKGMTPEEVADTGAEILLGNTFHLWLRPGQEVMKAHGDLHDFMHWHGPILTDSGGFQVFSLGDIRKITEEGVHFRNPINGDKIFLDPEKSMEIQTDLGSDIVMIFDECTPYPATHDEAKKSMEMSLRWAKRSRDHFDKLENPNALFGIIQGSVYEDLRDVSIKGLVDIGFDGYAVGGLAVGEPKDDMHRILSHVNPQLPADKPRYLMGVGKPEDLVEGVRRGIDMFDCVMPTRNARNGHLFVTEGVIKIRNAKHRDDTSPLDAECDCYTCKHYSKAYLHHLDRCNEILGARLNTIHNLRYYQRVMEGLRGAIEQGRLDAFVKDFYERKGMEVPAL

SEQ ID NO: 55530 - protein, 385 aa, Gallibacterium anatis
  REGION 1..385: note = tr|A0A0A2XB62|A0A0A2XB62_9PAST Queuine tRNA-ribosyltransferase OS=Gallibacterium anatis OX=750; GN = tgt PE=3 SV=1
MKYQLKNTDGRARRGELTFERPQGTFTVQTPAFMPVGTYGTVKGMTPEEVRETGAEILLGNTFHLWLRPGQEIMRKHGDLHDFMQWHRPILTDSGGFQVFSLGKLRKITEEGVKFQNPINGERIFLSPEKSMEIQYDLGSDIVMIFDECTPYPSTFDYAKNSMELSLRWAKRCRTRFDELGNKNALFGIIQGGVHENLRQISLDGLLEIGFDGYAVGGLAVGEPKEDMHRILEYICPKIPQDKPRYLMGVGKPEDLVEGVRRGIDMFDCVMPTRNARNGHLFVTDGVVKIRNAKYRDDTSTLDPECDCYTCRHYTKSYLHHLDKCGEILGARLNTIHNLRYYQRLMAQIRQAIEEERFEEFVQEFYARIGKPVPPLNQYHPFEQD

SEQ ID NO: 55531 - protein, 380 aa, Gallibacterium anatis
  REGION 1..380: note = tr|F4HEB3|F4HEB3_GALAU Queuine tRNA-ribosyltransferase OS=Gallibacterium anatis (strain UMN179) OX=1005058 GN=tgt PE=3 SV=1
MKYQLKNTDGGARRGELTFERPQGVFTVQTPAFMPVGTYGTVKGMTPEEVRETGAEILLGNTFHLWLRPGQEIMRKHGDLHDFMQWHRPILTDSGGFQVFSLGKLRKITEEGVKFQNPINGERIFLSPEKSMEIQYDLGSDIVMIFDECTPYPSTFEYAKNSMELSLRWAKRCRVHFDKLGNKNALFGIIQGGVHENLRQISLDGLLEIGFDGYAVGGLAVGEPKEDMHRILEYICPKIPQDKPRYLMGVGKPEDLVEGVRRGIDMFDCVMPTRNARNGHLFVTDGVVKIRNAKYRDDTSTLDPECDCYTCRHYTKSYLHHLDKCGEILGARLNTIHNLRYYQRLMAQIRQAIEEQRFEAFVKTFYERMGKPVPPLNTSY

SEQ ID NO: 55532 - protein, 380 aa, unidentified
  source 1..380: note = Gallibacterium genomosp.
  REGION 1..380: note = tr|A0A0A2YPM6|A0A0A2YPM6_9PAST Queuine tRNA-ribosyltransferase OS=Gallibacterium genomosp. 1; OX = 155515 GN=tgt PE=3 SV=1
MKYQLKNTDGGARRGELTFERPQGTFTVQTPAFMPVGTYGTVKGMTPEEVRATGAEILLGNTFHLWLRPGQEIMRKHGDLHDFMQWHRPILTDSGGFQVFSLGKLRKITEEGVKFQNPINGERIFLSPEKSMEIQYDLGSDIVMIFDECTPYPSTFEYAKNSMELSLRWAKRCRVHFDKLGNKNALFGIIQGGVHENLRQISLDGLLEIGFDGYAVGGLAVGEPKEDMHRILEYICPKIPQDKPRYLMGVGKPEDLVEGVRRGIDMFDCVMPTRNARNGHLFVTDGVVKIRNAKYRDDTSTLDPECDCYTCRHYTKSYLHHLDKCGEILGARLNTIHNLRYYQRLMAQIRQAIEEQRFEAFVKTFYERMGKPVPPLNTSY

SEQ ID NO: 55533 - protein, 380 aa, unidentified
  source 1..380: note = Gallibacterium genomosp.
  REGION 1..380: note = tr|A0A0A2XHU0|A0A0A2XHU0_9PAST Queuine tRNA-ribosyltransferase OS=Gallibacterium genomosp. 2; OX = 155517 GN=tgt PE=3 SV=1
MKYQLKNTDGGARRGELTFERPQGVFTVQTPAFMPVGTYGTVKGMTPEEVRETGAEILLGNTFHLWLRPGQEIMRKHGDLHDFMQWHRPILTDSGGFQVFSLGKLRKITEEGVKFQNPINGERIFLSPEKSMEIQYDLGSDIVMIFDECTPYPSTFEYAKNSMELSLRWAKRCRVHFDKLGNKNALFGIIQGGVHENLRQISLDGLLEIGFDGYAVGGLAVGEPKEDMHRILEYICPKIPQDKPRYLMGVGKPEDLVEGVRRGIDMFDCVMPTRNARNGHLFVTDGVVKIRNAKYRDDTSTLDPECDCYTCRHYTKSYLHHLDKCGEILGARLNTIHNLRYYQRLMAQIRQAIEEQRFEAFVKTFYERIGKPVPPLNTSY

SEQ ID NO: 55534 - protein, 384 aa, Gallibacterium salpingitidis
  REGION 1..384: note = tr|A0A1A7NX17|A0A1A7NX17_9PAST Queuine tRNA-ribosyltransferase OS=Gallibacterium salpingitidis; OX = 505341 GN=tgt PE=3 SV=1
MKYELKKTDGRARRGQLTFERPQGTFTVQTPAFMPVGTYGTVKGMTPEEVRATGAEILLGNTFHLWLRPGQEVMRKHGDLHDFMQWHRPILTDSGGFQVFSLGKLRKITEEGVKFQNPINGERIFLSPEKSMEIQYDLGSDIVMIFDECTPFPSTFDYAKQSMELSLRWAKRCRDRFDQLGNKNALFGIIQGGIHEELRQVSLDGLVNIGFDGYAVGGLAVGEPKEDMHRILEYICPKIPQDKPRYLMGVGKPEDLVEGVRRGIDMFDCVMPTRNARNGHLFVTDGVVKIRNAKYRDDTTPLDPECDCYTCKHYTKSYLYHLDKCGEILGARLNTIHNLRYYQRLMEQIRQAIEAERFEEFVQEFYARIGKPVPPLNQYHPFEG

SEQ ID NO: 55535 - protein, 372 aa, unidentified
  source 1..372: note = Gallionella capsiferriformans
  REGION 1..372: note = tr|D9SJA9|D9SJA9_GALCS Queuine tRNA-ribosyltransferase OS=Gallionella capsiferriformans (strain ES-2) OX=395494 GN=tgt PE=3 SV=1
MEFTLYKTSGKARRGQLTLAHGTVQTPAFMPVGTYGTVKAMSPLELRDIGANIVLGNTFHLWLRPGLDVIAAHGGLHDFMGWDGPILTDSGGFQVFSLGALRKITEEGVKFQSPVNGDKLFLTPEESMRIQRVLNSDIVMIFDECTPYPATEREAADSMRLSLRWAARSKAAHEGNPNALFGIVQGGMFEGLRDESLSELVNIGFDGFAIGGLSVGEPKEDMRRILEHTAPKLPQDKPRYLMGVGTPEDLVASVAQGIDMFDCVMPTRNARNGMLFTQHGDIKIKNAQYRLDTRPLDEGCSCYTCRNFSRAYLHHLYRLKEILSARLNTIHNLHYYQQLMAEIRASIEADAFAEFAVRFAERRAGLCADIKP

SEQ ID NO: 55536 - protein, 424 aa, Gallionella sp.
  REGION 1..424: note = tr|A0A522X7V0|A0A522X7V0_9PROT Queuine tRNA-ribosyltransferase OS=Gallionella sp. OX=2052161; GN = tgt PE=3 SV=1
MNFTLHKTDGLARRGILQLAHGTVETPAFMPVGTYGTVKAMSPAELHEIGAHIVLGNTFHLWLRPGLEVIAAHGGLHRFMGWDGPILTDSGGFQVFSLGALRKITEEGVKFQSPVNGDKLFLTPEESMRIQRVLNSDIVMIFDECTPYPATEREAAESMRLSLRWAARSRAAHDGNPNGHSNKACYARSSLPNPLPQTAPLSNSLPQAGERTNVKGNLESLGEGANESLREFNTNALFGIVQGGMYEGLRDESLAGLANIGFDGYAIGGLSVGEPKEDMLRILAHTAPRLPQDKPRYLMGVGTPEDIVAAVAQGIDMFDCVMPTRNARNGHLFTRHGDVRIKNARYRLDTRPLDEQCGCYTCRNFTRAYLHHLHRLNEILGARLNTIHNLHYYQQLMGEIRSAIEADAFDAFVARFGQMRGGAT

SEQ ID NO: 55537 - protein, 372 aa, Gallionella sp.
  REGION 1..372: note = tr|A0A3D2H376|A0A3D2H376_9PROT Queuine tRNA-ribosyltransferase OS=Gallionella sp. OX=2052161; GN = tgt PE=3 SV=1
MEFTLYKTSGKARRGQLTLAHGTVQTPAFMPVGTYGTVKAMSPLELRDIGANIVLGNTFHLWLRPGLDVIAAHGGLHDFMGWDGPILTDSGGFQVFSLGALRKITEEGVKFQSPVNGDKLFLTPEESMRIQRVLNSDIVMIFDECTPYPATMHEAADSMRLSLRWAARSKAAHEGNPNALFGIVQGGMYEELRDESLSELTRIGFDGFAIGGLSVGEPKEDMRRILEHTAPKLPQDKPRYLMGVGTPEDLVASVAQGIDMFDCVMPTRNARNGMLFTQHGDIKIKNSQYRLDTRPLDENCSCYTCQNFSRAYLHHLYRLKEILSARLNTIHNLHYYQQLMAEIRASIEADAFAEFAVRFAEQRAGLCTDIKP

SEQ ID NO: 55538 - protein, 372 aa, unidentified
  source 1..372: note = Gallionellaceae bacterium
  REGION 1..372: note = tr|A0A1J4TKL9|A0A1J4TKL9_9PROT Queuine tRNA-ribosyltransferase OS=Gallionellaceae bacterium CG1_02_60_325 OX=1805162 GN=tgt PE=3 SV=1
MKFTLHNTSGAARRGTLELTHGKVETPAFMPVGTYGTVKAMSPQELHDIDAHIVLGNTFHLWLRPGLEVIAAHGGLHRFMGWDGPILTDSGGFQVFSLGELRKITGGGVEFRSPVNGDKCFLSPEESMRIQKVLNSDIVMIFDECTPYPADEQIAGASMRMSLDWAARSKRAHEGNPNALFGIVQGGMHEPLRDESLAGLQDIGFDGFAIGGLSVGEPKEDMRRILAHTAPQLPQDRPRYLMGVGTPEDLVEAVGQGIDMFDCVMPTRNARNGHLFTRYGDVRIKNAIHRLDTRPLDPQCTCYTCRNFSRAYLHHLHRLGEILGARLNTIHNLHYYQELMRDIRAAIEAGRYAEFAAAFHAARATPGALPAD

SEQ ID NO: 55539 - protein, 371 aa, unidentified
  source 1..371: note = Gallionellaceae bacterium
  REGION 1..371: note = tr|A0A521Q6U3|A0A521Q6U3_9PROT Queuine tRNA-ribosyltransferase OS=Gallionellaceae bacterium; OX = 2052162 GN=tgt PE=3 SV=1
MKFTLHNTSGVARRGTLELAHGKLETPAFMPVGTYGTVKAMSPLELKNMGAQIVLGNTFHLWLRPGLEVIAAHGGLHRFMGWDGPILTDSGGFQVFSLGPLRKITGGGVEFKSPVNGDKCFLSPEESMRIQKVLNSDIVMIFDECTPYPADEQTAAVSMRLSMSWAERSKKAHEGNANALFGIVQGGMHEHLRDESLAGLVNIGFDGFAIGGLSVGEPKEDMLRILRHTAPQLPQDKPRYLMGVGTPEDLVDAVAAGIDMFDCVMPTRNARNGHLFTRSGDVRIKNAQYRMDTKPLDPQCTCYTCRNFTRAYLHHLHRLNEILGARLNSIHNLHYYQELMADMRAAIERDQLAEFVAAFRLARAGKRVPGA

SEQ ID NO: 55540 - protein, 368 aa, unidentified
  source 1..368: note = Gallionellales bacterium
  REGION 1..368: note = tr|A0A1G0CXE3|A0A1G0CXE3_9PROT Queuine tRNA-ribosyltransferase OS=Gallionellales bacterium GWA2_59_43 OX=1798245 GN=tgt PE=3 SV=1
MEFTLYKTSGMARRGQVSLAHGNVQTPAFMPVGTYGTVKAMSPAELRDIDAHIVLGNTFHLWLRPGLDVIAAHGGLHRFMGWDGPILTDSGGFQVFSLGALRKITGGGVEFRSPVNGDKCFLSPEESMRIQKVLNSDIVMIFDECTPYPADEKVAGESMRMSLGWAERSKRGHEGNPNALFGIVQGGMHEHLRDESLAGLTNIGFDGYAIGGLSVGEPKDDMLRILTHTAPQLPADKPRYLMGVGTPEDIVAAVSQGIDMFDCVMPTRNARNGHLFTRHGDVRIKNAQYRMDTRPLDEECGCYTCRNFTRAYLHHLHRLGEILGARLNTIHNLHYYQDLMRDIRASIEAGRFPDFVEEFAHRRAGGKL

SEQ ID NO: 55541 - protein, 362 aa, unidentified
  source 1..362: note = Gallionellales bacterium
  REGION 1..362: note = tr|A0A2M8DWF8|A0A2M8DWF8_9PROT Queuine tRNA-ribosyltransferase (Fragment) OS=Gallionellales bacterium CG_4_9_14_0_8_um_filter_55_61 OX=1974015; GN = CO070_06595 PE=3 SV =1
MEFTLYKTSGLARRGQLTLAHGRVQTPAFMPVGTYGTVKAMSPQELHDIGAHIVLGNTFHLWLRPGLEVIAAHGGLHGFMGWSGPILTDSGGFQVFSLGALRKISEEGVAFQSPVNGDKLFLSPEESMRIQRVLNSDIVMIFDECTPFPATEREAADSMRLSLRWAARSRAAHQGNPNALFGIVQGGMYENLRDESLAELVNIGFDGYAIGGLSVGEPKQDMQRILEHTAPKLPQDKPRYLMGVGTPEDLVAAVAQGIDMFDCVMPTRNARNGMLFTQYGDIKIKNAQYKLDTRPLDAECTCYTCQHFSRGYLHHLHRLKEILGARLNTIHNLHYYQQLMGEMRAAIEADAFAEFMVGFALR

SEQ ID NO: 55542 - protein, 373 aa, unidentified
  source 1..373: note = Unknown
  REGION 1..373: note = tr|E1VLQ4|E1VLQ4_9GAMM Queuine tRNA-ribosyltransferase OS=gamma proteobacterium HdN1; OX = 83406 GN=tgt PE=3 SV=1
MQFDLLSTDGRARRGQLQFARGAVQTPAFMPVGTYGTVKGMLPRDIEGIGAEIILGNTFHLMLRPGTSVVKAHGDLHDFIGWNRPILTDSGGFQVFSLGESRKITEEGVTFRSPVDGSKIFMSPEISMQVQRELGSDIVMIFDECTPYPASVDQARQSMELSLRWARRSRTAHGDNPNALFGIVQGGMHEALRKISLDALVEIGFDGYAIGGLSVGEPKEDMIRILDFLPHQMPAHAPRYLMGVGRPEDIVEAVRRGIDMFDCVMPTRNARNGHLFTSTGVVRIRNAVHRHDTGPLDAACDCYTCQNFSRSYLHHLDRCGEMLASQLNTIHNLRYYQLLMAGLRRAIEQGTFVRFVEDFYEKRGELVPALAFA

SEQ ID NO: 55543 - protein, 369 aa, unidentified
  source 1..369: note = Unknown
  REGION 1..369: note = tr|A0A2U0AJ08|A0A2U0AJ08_9GAMM Queuine tRNA-ribosyltransferase OS=gamma proteobacterium symbiont of Ctena orbiculata OX=1968598 GN=tgt PE=3 SV=1
MKFNILEQDGASRRGRLEFPRGSVETPAFMPVGTYGTVKAMTPEELTDLGAEIILGNTFHLMLRPGTEVISKHGDLHGFTHWEKPILTDSGGFQVFSLGDMRKISEEGVTFQSLIDGSKVFMGPEESMQVQRELGSDIVMIFDECTPYPASEEESRLSMELSLRWAQRSRAAHGDNPSALFGIVQGGMFEHLRERSLQGLIEIGFDGYAVGGLSVGEPEADRWRVLDYLSTRMPADKPRYLMGVGTPEDIVESVHRGIDMFDCVMPTRNARNGHLFTHQGVVRIRHSAHQYDEGPLDPECDCYTCRNYSRAYLRHLDKCNEILGARLNTIHNLYYYQKLMRDLRGAIESGTLGEFTERFYDKRVVPLTG

SEQ ID NO: 55544 - protein, 392 aa, unidentified
  source 1..392: note = Gammaproteobacteria bacterium
  REGION 1..392: note = tr|W2UFH8|W2UFH8_9GAMM Queuine tRNA-ribosyltransferase OS=Gammaproteobacteria bacterium MOLA455 OX=1411685 GN=tgt PE=3 SV=1
MSSTPDTQTDSQANTQSKRKCFMNFSVSATDGKARRGEMTFPRGKVQTPAFMPVGTYGTVKGMLPKDIVEIGAEMILGNTFHLMLRPGTEVIKTHGDLHDFTQWQGPILTDSGGFQVFSLGDMRKITEEGVKFKSPIDGSPVFIDPETSMQVQADLGSDVVMIFDECTPHPATVKQASDSMQLSLRWAKRSKTAHGDSPSALFGIVQGGMYESLRDESLKGLVDIGFDGYAIGGLSVGEPKEDMMRILDHLAHQMPADRPRYLMGVGKPEDLVEGVRRGIDMFDCVMPTRNARNGHLFTSTGVVKIRNARHRHDTDTLDSQCDCYTCTNFSRGYLHHLERCGEMLSAQLNTIHNLRFYQTLMAGLREAIAENRLEAFADQFYLQQGKDKPAL

SEQ ID NO: 55545 - protein, 381 aa, unidentified
  source 1..381: note = Gammaproteobacteria bacterium
  REGION 1..381: note = tr|A0A1G0I5M7|A0A1G0I5M7_9GAMM Queuine tRNA-ribosyltransferase OS=Gammaproteobacteria bacterium RIFCSPHIGHO2_12_FULL_43_28 OX=1798287 GN=A3F14_06075 PE=3; SV = 1
MTNQYHSSIVKKHKTLPARVMQFSTPHGNVLTPAFMPVGTRAMLNYLTPTDLKAAGSEIILGGNTYHMLVAPGMDVLQAVGGMHRFMGWDKAMLTDSGGFQVLSLSKKGQICLIDEEGAHFKHPITGKIIHLNPHTSIGTQKIIGADIIMAFDQCTPETGGREAALAALDRTHRWLLLCKEEQEKNPNSAYGLRQALFGIIQGGSFRDLRDTSTEFVVNLDLDGIAIGGEVIGFDMPKTAEIIDWVRPMLPANKIRYTMGVGLNPQDLIDVVAKGIDIFDCVAPTRNARHGTLYHGDLVERDGWLAFEGERISIKKGLYAKDDQPLMQDCTCYTCQRFSRAYLHYLFKEGLIAYFHLASIHNVHVMQMTCAKMREIMLRDD

SEQ ID NO: 55546 - protein, 372 aa, Garciella nitratireducens
  REGION 1..372: note = tr|A0A1T4K1W1|A0A1T4K1W1_9FIRM Queuine tRNA-ribosyltransferase OS=Garciella nitratireducens DSM 15102 OX=1121911 GN=tgt PE=3 SV=1
MAIKFEVIKEEKYTGARLGKLYTPHGVIDTPIFMPVGTQATVKTMTPEELKEIETQIILSNTYHLYLRPGHELVKEAGGLHQFMHWDGPILTDSGGFQVFSLSSLRNITEEGVTFRSHLNGSKHFIGPEKAIEIQNALGSDIIMAFDECTPYPSNYEYVKNSLERTIRWAKRCKKAHKKESEQALFGIIQGGTYQDLREQSVKEMLELDFPGYSIGGLSVGEPKDLMYQVLDYTIPLMPKNKPRYLMGVGSPDALIEGVIRGIDMFDCVLQTRIARNGTAMTSMGKIVIKNATYERDFSPLDPNCHCYTCQNYSRAYLRHLFKTKEILGLRLTTYHNLYFTLQLMKNIRQAIKEDRLLDFKKEFFLNYGYTQ

SEQ ID NO: 55547 - protein, 433 aa, Gardnerella sp.
  REGION 1..433: note = tr|A0A2K0X4H6|A0A2K0X4H6_9BIFI Queuine tRNA-ribosyltransferase OS=Gardnerella sp. KA00735; OX = 1973156 GN=tgt PE=3 SV=1
MNNLIEHPRGAEPNKPGDRSEFYFTSKTRLPDSENGKGLNGARYGRTGIIHTPHGDIHTPAFVPVATQAAMKAVLPETIKDLGAQCMLSNAFHLYERPGADTLDEAGGLAKFMNWNGPTFTDSGGFQVLSLGAGFKKTLAMDVTGMKSDDVIAEGKERMAFVDEDGVTFKSPLNGAKHRFSAEISMGIQHKLGADIMFAFDELTTLMNTRHYQEESVERTFRWAKRCVDEHKRLTQERLGKPYQALYGVVQGANYEDLRRRAASQIASLDFDGVGIGGAIEKRIIGDTCAWICDAMPENRPRHVLGIAAVDDIFACVENGGDTFDCVAPARCGRNGAIFTRHGRYNVKRADFKHDQGPLEEGCDCYTCTHYSRMYVNHLLRAKEMNGYTLATIHNERFFVKLLDDIRSSIDNGYFEEFRDESLAHYYENGSKG

SEQ ID NO: 55548 - protein, 433 aa, Gardnerella sp.
  REGION 1..433: note = tr|A0A2K0X9V3|A0A2K0X9V3_9BIFI Queuine tRNA-ribosyltransferase OS=Gardnerella sp. DNF01162; OX = 1973155 GN=tgt PE=3 SV=1
MTSLLEHPRGAEPGKPGDRKEFSFTTKTRLSNTAEGKGRDGARYGRTGVIHTPHGDIQTPAFVPVATQAAMKAVLPESIKDLGAQCMLSNAFHLYERPGADVLDEAGGLGKFMNWDKPTFTDSGGFQVLSLGAGFKKTLAMDVTGMKSDDVIAAGKERMAFVDEDGVTFKSPLNGAKHRFSAEISMGIQHKLGADIMFSFDELTTLMNTRRYQEESVERTFRWAKRCVAEHQRLTEERVGKPYQALYGVVQGANYEDLRRHAAEQIASLDFDGVGIGGAIEKRIIGDTCAWICDAMPENRPRHVLGIAAVDDIFACVENGGDTFDCVAPARCGRNGAIFTRHGRYNVKRAEFKHDQRPLEEGCDCYTCTHYSRMYVDHLLRASEMNGFTLATIHNERFFVKLLDDIRASIDGGYFEEFRDETLAHYYENGSKG

SEQ ID NO: 55549 - protein, 404 aa, Gardnerella vaginalis
  REGION 1..404: note = tr|A0A2W5D0V0|A0A2W5D0V0_GARVA Queuine tRNA-ribosyltransferase OS=Gardnerella vaginalis OX=2702; GN = tgt PE=3 SV=1
MENTASGKGKDGARYGRTGVIRTPHGDIHTPAFVPVATQAAMKAVLPESIKDLGGQCMLSNAFHLYERPGEDILDEAGGLAKFMNWDGPTFTDSGGFQVLSLGAGFKKTLAMDVTGMKSDDVIAEGKERMAFVDEDGVTFKSPLNGSKHRFSAEISMGIQHKLGADIMFAFDELTTLMNTRRYQEESVERTFRWAKRCVAEHKRLTEARLGKPYQALYGVVQGANYEDLRRHAAEQIASLDFDGVGIGGAIEKRIIGDTCAWICDAMPENRPRHVLGIAAVDDIFACVENGGDTFDCVAPARCGRNGAIFTRHGRYNVKRAEFKHNQGPLEAGCDCYTCTHYSRMYVNHLLRAKEMNGYTLATIHNERFFVKLLDDIRASIDGGYFEDFRDESLAHYYENGSRG

SEQ ID NO: 55550 - protein, 433 aa, Gardnerella vaginalis
  REGION 1..433: note = tr|I4LMA5|I4LMA5_GARVA Queuine tRNA-ribosyltransferase OS=Gardnerella vaginalis 0288E; OX = 698952 GN=tgt PE=3 SV=1
MTNLIEHPRGAEPGKPGDRREFSFTTKTRLENTASGKGKDGARYGRTGVIRTPHGDIHTPAFVPVATQAAMKAVLPESIKDLGGQCMLSNAFHLYERPGEDILDEAGGLAKFMNWDGPTFTDSGGFQVLSLGAGFKKTLAMDVTGMKSDDVIAEGKERMAFVDEDGVTFKSPLNGSIHRFSAEISMGIQHKLGADIMFAFDELTTLMNTRRYQEESVERTFRWAKRCVAEHKRLTEARLGKPYQALYGVVQGANYEDLRRHAAEQIASLDFDGVGIGGAIEKRIIGDTCAWICDAMPENRPRHVLGIAAVDDIFACVENGGDTFDCVAPARCGRNGAIFTRHGRYNVKRAEFKHDQGPLEAGCDCYTCTHYSRMYVSHLLRAKEMNGYTLATIHNERFFVKLLDDIRASIDGGYFEEFRDESLAHYYENGSRG

SEQ ID NO: 55551 - protein, 374 aa, unidentified
  source 1..374: note = Geitlerinema sp.
  REGION 1..374: note = tr|K9SAG9|K9SAG9_9CYAN Queuine tRNA-ribosyltransferase OS=Geitlerinema sp. PCC 7407; OX = 1173025 GN=tgt PE=3 SV=1
MSQSAFSYQCQAQCCHTHARAGVFMTPHGPVETPRFMPVGTLANVKTLTPAQLKDTGAQMVLANTYHLHLQPGENIVAQAGGLHRFMHWQGPMLTDSGGFQVFSLSEMRVISEEGVKFRSPKDGQLINLTPERSIEIQNALGADVIMAFDECPPYPASREAVQEATARTYRWLQRCIAAHQRSDQALFGIVQGGVYGDLRQAAARQLVELDLPGYAIGGVSVGEPADLIEGIVQATAPLLPAHKPRYLMGVGTYREMVQAIAAGVDLFDCVIPTRFARHGAVLSHGTRWNIKNSQYREDFSPIDETCPCYTCQHFTRAYLCHLVRSQELLAYTLLSIHNVTELIRFTQRIRDSIFAGTFTTEFAEWLSPESLRA

SEQ ID NO: 55552 - protein, 376 aa, Gelidibacter algens
  REGION 1..376: note = tr|A0A1A7QYY1|A0A1A7QYY1_9FLAO Queuine tRNA-ribosyltransferase OS=Gelidibacter algens OX=49280; GN = tgt PE=3 SV=1
MKFELKGKDLQSKARAGTITTDHGVIETPIFMPVGTVASVKGVHQRELKNDINADIILGNTYHLYLRPQTRILEQAGGLHKFMNWDRNILTDSGGYQVYSLSANRKIKEEGVKFKSHIDGSYHTFTPENVMEIQRTIGADIIMAFDECTPYPCDYNYAKRSMHMTHRWLDRCINHLDTLPFKYGYEQSFFPIVQGSTYKDLRLQSAEYIANAGAVGNAIGGLSVGEPADEMYAMTEVVCGVLPEDKPRYLMGVGTPINILENIALGIDMFDCVMPTRNARNGMLFTAHGSINIKNKKWEDDFSALDEMDMTYVDTEYSKAYLRHLFSVNERLAMQIATIHNLGFYLWLVREARKHILAGDFRTWKEMMVKQMDKRL

SEQ ID NO: 55553 - protein, 376 aa, Gelidibacter gilvus
  REGION 1..376: note = tr|A0A4Q0XBG4|A0A4Q0XBG4_9FLAO Queuine tRNA-ribosyltransferase OS=Gelidibacter gilvus OX=59602; GN = tgt PE=3 SV=1
MKFELKGKDPQSKARAGKLTTDHGVIETPIFMPVGTVGSVKGVHQRELKNDINADVILGNTYHLYLRPQTRILEQAGGLHKFMNWDRNILTDSGGYQVYSLSANRKIKEEGVKFKSHIDGSYHTFTPENVMEIQRIIGADIIMAFDECTPYPCDYNYAKRSMHMTHRWLDRCINHLEKLPFKYGYEQSFFPIVQGSTYKDLRAQSAEYIANAGAVGNAIGGLSVGEPADEMYAMTEVVCEILPEDKPRYLMGVGTPINILENIALGVDMFDCVMPTRNARNGMLFTAHGSINIKNKKWEDDFSPLDEMAMTYVDTEYSKAYLRHLFSVNERLAMQIATIHNLGFYMWLVREARKHILAGDFRTWKDMMVKQMDKRL

SEQ ID NO: 55554 - protein, 376 aa, Gelidibacter salicanalis
  REGION 1..376: note = tr|A0A5C7ACB9|A0A5C7ACB9_9FLAO Queuine tRNA-ribosyltransferase OS=Gelidibacter salicanalis; OX = 291193 GN=tgt PE=3 SV=1
MKFELKGKDLQSKARAGVLTTDHGVIETPIFMPVGTVASVKGVHQRELKNDINADVILGNTYHLYLRPQTRILEQAGGLHKFMNWDRNILTDSGGYQVYSLSANRKIKEEGVKFKSHIDGSYHTFTPENVMEIQRTIGADIIMAFDECTPYPCDYNYAKRSMHMTHRWLDRCVNHLEKLPFKYGYEQSFFPIVQGSTYKDLRLQSAEYIANAGAVGNAIGGLSVGEPAEEMYAMTEVVCGVLPEDKPRYLMGVGTPINILENIALGIDMFDCVMPTRNARNGMLFTAHGTINIKNKKWEDDFSALDEMDMTYVDTEYSKAYLRHLFSVNERLAMQIATIHNLGFYLWLVREARKHILAGDFRPWKEMMVKQMDKRL

SEQ ID NO: 55555 - protein, 376 aa, unidentified
  source 1..376: note = Gelidibacter sediminis
  REGION 1..376: note = tr|A0A4R7PKJ4|A0A4R7PKJ4_9FLAO Queuine tRNA-ribosyltransferase OS=Gelidibacter sediminis; OX = 1608710 GN=tgt PE=3 SV=1
MKFELKGKDLQSKARAGVITTDHGVIETPIFMPVGTVASVKGVHQRELKNDINADIILGNTYHLYLRPQTKILEQAGGLHKFMNWERNILTDSGGYQVYSLSANRKIKEEGVKFKSHIDGSYHTFTPENVMEIQRIIGADIIMAFDECTPYPCDYNYAKRSMHMTHRWLDRCINHLEKLPFKYGYEQSFFPIVQGSTYKDLRLQSAEYIANAGAVGNAIGGLSVGEPAAEMYAMTEVVCSVLPEDKPRYLMGVGTPINILENIALGIDMFDCVMPTRNARNGMLFTAHGTINIKNKKWEADFSALDDMGMTYVDTEYSKAYLRHLFSVNERLAMQIATIHNLGFYLWLVREARKHILAGDFRPWKEMMVKQMDKRL

SEQ ID NO: 55556 - protein, 384 aa, Gemella asaccharolytica
  REGION 1..384: note = tr|A0A133ZT67|A0A133ZT67_9BACL Queuine tRNA-ribosyltransferase OS=Gemella asaccharolytica; OX = 502393 GN=tgt PE=3 SV=1
MRNIKKNAVWYQHIKTCKQTGARLGIVHTPHGSFETPVFMPVGTQATVKTMSPEEVKNLGADIILSNTYHLWLRPGEKIIENAGGLHKFMNYNSSILTDSGGFQVFSLSKLRKIEEEGVYFKNHLSGADLFLSPEKSVQIQTALGSDIMMAFDECPGFNHDYNYIKKSVERTSRWAERCLNEQKNPDKQSLFGIIQGEGYKDLRYQSAKDLVSLDFPGYAIGGLSVGEPKDVMYRVLDETTSLLPSNKPRYLMGVGSPDALIEGVIRGIDMFDCVLPTRIARNGTCMTSIGRIVIKNAKYSADYTPLDPECDCYCCKNYTRAYLRHLFKSNEIFGARLATTHNIYFLIKLMKNIRKAILEDRLLDFKNEFFEKYGLNKNNPKNF

SEQ ID NO: 55557 - protein, 384 aa, Gemella bergeri
  REGION 1..384: note = tr|U2Q013|U2Q013_9BACL Queuine tRNA-ribosyltransferase OS=Gemella bergeri ATCC 700627; OX = 1321820 GN=tgt PE=3 SV=1
MRDVRENAVWYEHIKTCKQSGARLGIVHTPHGSFETPVFMPVGTQATVKAMAPEEVKSMGANIILSNTYHLWLRPGESVVEKAGGLHKFMNWDGSILTDSGGFQVFSLSDLRKIEEEGVHFRNHLSGEKLFLSPEKAMFIQNSLGSDIMMAFDECPDFNHDYKYIRQSVERTSRWAERCLKAHKNPKTQSIFGIVQGAGYDDLRKQSAKDLVSLDFPGYAIGGLSVGEPKHEMYRVLEYLTPLLPTNKARYLMGVGSPDALFEGVLRGVDMFDCVLPTRIARNGTCMTSQGRVVVKNAKYAEDFTPLDPECDCYCCKNYTKAYLRHLFKADEIFGARLTSTHNIHFLINMMKNIRKAIMEDRLLDYKEEFFEKYGLNQKNPKNF

SEQ ID NO: 55558 - protein, 384 aa, Gemella haemolysans
  REGION 1..384: note = tr|A0A134A2N6|A0A134A2N6_9BACL Queuine tRNA-ribosyltransferase OS=Gemella haemolysans OX=1379; GN = tgt PE=3 SV=1
MRDVKENAVWYEHIKTCKQSGARLGIVHTPHGSFETPVFMPVGTQATVKAMSPEEVKGMGADIILSNTYHLWLRPGEEIVERAGGLHKFMNWDGSILTDSGGFQVFSLSEMRKIEEEGVHFKNHLSGEKLFLSPEKAMHIQNALGSDIMMAFDECPDYNHDYKYIRQSVERTSRWAESCLEAHKNPKTQSIFGIVQGAGFNDLREQSAKDLVSMDFPGYAIGGLSVGEPKHEMYRVLEHVTPLLPANKARYLMGVGSPDALFEGVLRGVDMFDCVLPTRIARNGTCMTSEGRVVVKNAKYAEDFTPLDPECSCYCCKNYTRAYLRHLFKADEIFGARLATTHNIHFLINMMKDIRQAIREDRLLDFKEEFFEKYGLNQENPKNF

SEQ ID NO: 55559 - protein, 384 aa, Gemella haemolysans
  REGION 1..384: note = tr|F3A175|F3A175_9BACL Queuine tRNA-ribosyltransferase OS=Gemella haemolysans M341; OX = 562981 GN=tgt PE=3 SV=1
MRDVKENAVWYEHIKTCKQSGARLGIVHTPHGSFETPVFMPVGTQATVKAMSPEEVKGMGADIILSNTYHLWLRPGEEIVEKAGGLHKFMNWDGSILTDSGGFQVFSLSEMRKIEEEGVHFKNHLSGEKLFLSPEKAMHIQNALGSDIMMAFDECPDYNHDYKYIRQSVERTSRWAERCLAAHKNPKTQSIFGIVQGAGFNDLREQSAKDLVSMDFPGYAIGGLSVGEPKHEMYRVLEHVTPLLPANKARYLMGVGSPDALFEGVLRGVDMFDCVLPTRIARNGTCMTSAGRVVVKNAKYAEDFTPLDPECSCYCCKNYTKAYLRHLFKADEIFGARLATTHNIHFLINMMKDIRQAIREDRLLDFKEEFFEKYGLNQENPKNF

SEQ ID NO: 55560 - protein, 384 aa, Gemella morbillorum
  REGION 1..384: note = tr|E5V237|E5V237_9BACL Queuine tRNA-ribosyltransferase OS=Gemella morbillorum M424; OX = 562982 GN=tgt PE=3 SV=1
MRDVKENAVWYEHIKTCKQSGARLGIVHTPHGSFGTPVFMPVGTQATVKTMAPEEVKSMGADIILSNTYHLWLRPGEKIVEKAGGLHKFMNWDGSILTDSGGFQVFSLSDFRKIEEEGVHFKNHLSGEKLFLSPEKAMHIQNALGSDIMMAFDECPDFNHDYKYIRQSVERTSRWAERCLEAHKNPKTQSIFGIVQGAGFNDLREQSAKDLVSMDFPGYAIGGLSVGEPKQEMYRVLEHVTPLLPANKARYLMGVGSPDALFEGVLRGIDMFDCVLPTRIARNGTCMTSQGRVVIKNAKYAEDFTPLDSECSCYCCKNYTKAYLRHLFKADEIFGARLATTHNIHFLINMMKDIRQAIMEDRLLDFKEEFFKKYGLNKKNPKNF

SEQ ID NO: 55561 - protein, 384 aa, Gemella morbillorum
  REGION 1..384: note = tr|A0A2X4NBN9|A0A2X4NBN9_9BACL Queuine tRNA-ribosyltransferase OS=Gemella morbillorum OX=29391; GN = tgt PE=3 SV=1
MRDVKENAVWYEHIKTCKQSGARLGIVHTPHGSFETPVFMPVGTQATVKTMAPEEVKSMGADIILSNTYHLWLRPGEKVVEKAGGLHKFMNWDGSILTDSGGFQVFSLSDFRKIEEEGVHFKNHLSGEKLFLSPEKAMHIQNALGSDIMMAFDECPDFNHDYKYIRQSVERTSRWAERCLEAHKNPKTQSIFGIVQGAGFNDLREQSAKDLVSMDFPGYAIGGLSVGEPKQEMYRVLEHVTPLLPANKARYLMGVGSPDALFEGVLRGIDMFDCVLPTRIARNGTCMTSQGRVVIKNAKYAEDFTPLDSECSCYCCKNYTKAYLRHLFKADEIFGARLATTHNIHFLINMMKDIRQAIMEDRLLDFKEEFFEKYGLNKKNPKNF

SEQ ID NO: 55562 - protein, 384 aa, Gemella sanguinis
  REGION 1..384: note = tr|A0A2N6SH38|A0A2N6SH38_9BACL Queuine tRNA-ribosyltransferase OS=Gemella sanguinis OX=84135; GN = tgt PE=3 SV=1
MRDVKENAVWYEHIKTCKQSGARLGIVHTPHGSFETPVFMPVGTQATVKTMSPEEVKAMGADIILSNTYHLWLRPGEKIVEKAGGLHKFMNWNGSILTDSGGFQVFSLSDFRKIEEEGVHFKNHLSGEKLFLSPEKAMHIQNSLGSDIMMAFDECPDFNHDYKYIRQSVERTSRWAERCLEAHKNPKTQSIFGIVQGAGYNDLREQSAKDLVSMDFPGYAIGGLSVGEPKHEMYRVLEHVTPLLPANKARYLMGVGSPDALFEGVLRGIDMFDCVLPTRIARNGTCMTSEGRVVIKNAKYAEDFTPLDPECSCYCCKNYTRAYLRHLFKADEVFGARLATTHNIHFLINMMKNIRQAIMEDRLLDYKEEFFEKYGLNKENPKNF

SEQ ID NO: 55563 - protein, 384 aa, Gemella sp.
  REGION 1..384: note = tr|A0A533I423|A0A533I423_9BACL Queuine tRNA-ribosyltransferase OS=Gemella sp. OX=1966354 GN=tgt; PE = 3 SV=1
MRDVKENAVWYEHIKTCKQSGARLGIVHTPHGSFETPVFMPVGTQATVKAMSPEEVKGMGADIILSNTYHLWLRPGEEIVEKAGGLHKFMNWDGSILTDSGGFQVFSLSEMRKIEEEGVHFKNHLSGEKLFLSPEKAMHIQNSLGSDIMMAFDECPDYNHDYKYIRQSVERTSRWAERCLEAHKNPKTQSIFGIVQGAGFNDLREQSAKDLVSMDFPGYAIGGLSVGEPKHEMYRVLEHVTPLLPANKARYLMGVGSPDALFEGVLRGVDMFDCVLPTRIARNGTCMTSEGRVVVKNAKYAEDFTPLDPECSCYCCKNYTRAYLRHLFKADEIFGARLATTHNIHFLINMMKDIRQAIREDRLLDFKEEFFEKYGLNQENPKNF

SEQ ID NO: 55564 - protein, 384 aa, Gemella sp.
  REGION 1..384: note = tr|A0A0X8KLI1|A0A0X8KLI1_9BACL Queuine tRNA-ribosyltransferase OS=Gemella sp. oral taxon 928; OX = 1785995 GN=tgt PE=3 SV=1
MRDVRENAVWYEHIKTCKQSGARLGIVHTPHGSFETPVFMPVGTQATVKAMSPEEVKSMGANIILSNTYHLWLRPGEGIVEKAGGLHKFMNWDGSILTDSGGFQVFSLSDLRKIEEEGVHFRNHLSGEKLFLSPEKAMAIQNSLGSDIMMAFDECPDFNHDYKYIRQSVERTSRWAERCLKAHKNPKTQSIFGIVQGAGYDDLRKQSAKDLVSLDFPGYAIGGLSVGEPKHEMYRVLEYLTPLLPTNKARYLMGVGSPDALFEGVLRGVDMFDCVLPTRIARNGTCMTSQGRVVVKNAKYAEDFTPLDSECDCYCCKNYTKAYLRHLFKADEIFGARLTSTHNIHFLINMMKNIRKAIMEDRLLDYKEEFFEKYGLNQENPKNF

SEQ ID NO: 55565 - protein, 375 aa, Geminicoccus sp.
  REGION 1..375: note = tr|A0A2D6C0V8|A0A2D6C0V8_9PROT Queuine tRNA-ribosyltransferase OS=Geminicoccus sp. OX=2024832; GN = tgt PE=3 SV=1
MSDFSFEILASDGAARRGRLHTAHGTVETPAFMPVGTAATVKAMMPESVRATGAEIILGNTYHLMIRPTAERIHHLGGLHKFMHWDGPILTDSGGYQVMSLADLRKMTEEGVTFRSHIDGSKHRLTPEDSMHIQHLLGSTITMALDECTPYPIDKLGADTSMQLSMRWAKRSRDAWVDRPGYGIYGIAQGSTFADLREESIRALEPMDFHGIAVGGLAVGEGQELMFKTLDDCEPHLPQHKPRYLMGVGKPLDLVGAVRRGIDQFDCVLPTRSGRTGQAFTWRGPINMRNARHQDDPRPIDEDCSCPACRNYSRAYIRHLHRADEMLGAMLLSWHNIQHYQDLMARMRSAIEAGAFADFEAGVVAGYARGDIDPL

SEQ ID NO: 55566 - protein, 375 aa, Geminicoccus sp.
  REGION 1..375: note = tr|A0A2E3IRK8|A0A2E3IRK8_9PROT Queuine tRNA-ribosyltransferase OS=Geminicoccus sp. OX=2024832; GN = tgt PE=3 SV=1
MSDFSFEILASDGAARRGRLHTAHGTVETPAFMPVGTAATVKAMMPESVRATGAEIILGNTYHLMIRPTAERIHHLGGLHKFMHWDGPILTDSGGYQVMSLAGLRKMTEEGVTFRSHIDGSKHRLTPEDSMHIQHLLGSTITMALDECTPYPIDKLGADTSMQLSMRWAKRSRDAWVGRLGYGVYGIAQGSTFADLREESIRALEPMDFHGIAVGGLAVGEGQEMMFKTLDDCEPHLPQHKPRYLMGVGKPLDLVGAVRRGIDQFDCVLPTRSGRTGQAFTWRGPINMRNARHQDDPRPIDEDCSCPACHNYSRAYIRHLHRADEMLGAMLLSWHNIQHYQDLMARMRSAIEAGAFADFEAGVVAGYAQGDIDPL

SEQ ID NO: 55567 - protein, 367 aa, unidentified
  source 1..367: note = Geminocystis sp.
  REGION 1..367: note = tr|A0A0D6AS76|A0A0D6AS76_9CHRO Queuine tRNA-ribosyltransferase OS=Geminocystis sp. NIES-3709; OX = 1617448 GN=tgt PE=3 SV=1
MTFSYSLIASCSHTKARAGVFSTPHGDVETPKFMPVGTVGTVKGITPSQLKDVNAQMILGNTYHLHIQPGEEIIAKAGGLHSFVGWDKPMLTDSGGFQVFSLAKLRQITDDGVKFRSPRDGRIINMTPENSIRIQNALGADVIMAFDECPPATATKEEVVIAVERTYKWLQRCINAHGNTDKQALFGIVQGGIYADLRTQSALDLVGLDLPGYAIGGVSVGEKPELIHQIIQWTTPLLPVNKPRYLMGVGSYKEMVIAIASGIDLFDCVIPTRLGRHGAALVQGERINLRNAQYKEDFTPLDPQCSCYTCKNFTRAYLNHLIRSGEMLGYILLSLHNLHELIEFTNKIRQAIINDRFILEFGHWLEL

SEQ ID NO: 55568 - protein, 365 aa, unidentified
  source 1..365: note = Geminocystis sp.
  REGION 1..365: note = tr|A0A0D6AJQ3|A0A0D6AJQ3_9CHRO Queuine tRNA-ribosyltransferase OS=Geminocystis sp. NIES-3708; OX = 1615909 GN=tgt PE=3 SV=1
MSFSYSLIASCSHTKARAGVFSTPHGDVETPKFMPVGTIGTVKGITPAQLKDVNAQMILGNTYHLHIQPGEGIIEKAGGLHNFVGWDRPMLTDSGGFQVFSLSKLRQLTDDGVKFRSPKDGRIINMTPENSIRIQNALGADVIMAFDECPPATATKDEVIIAVERTYKWLQRCINAHAKSDKQALFGIVQGGIYADLRTQSAQDLISLDLPGYAIGGVSVGEKPELIHQIIQWTTPLLPVNKPRYLMGVGTYREMVIAIASGIDLFDCVIPTRLGRHGAALVQGKRINLKNAPYKEDFTPLDPECSCYTCKNFTRAYLNHLLRSGEMLGFILLSIHNLHELVNFTNKIRRAIINDTFISEFGHWL

SEQ ID NO: 55569 - protein, 369 aa, Gemmata obscuriglobus
  REGION 1..369: note = tr|A0A2Z3H869|A0A2Z3H869_9BACT Queuine tRNA-ribosyltransferase OS=Gemmata obscuriglobus OX=114; GN = tgt PE=3 SV=1
MAISFTLHATDGAARAGTVHTPHGDVSTPAFMPVGTQGTVKGLTPEMVRDAGAHILLGNTYHLALRPGDEIVRDLGGLHTFMNWNRPILTDSGGFQVFSLAGQVKITDHGAKFKSHIDGSPLELTPERAVEIQQNLGSDIAMVLDECPPADGAPEVIRRAVTRSIKWAERCKRHHSRPDQAQFAIVQGGLNLDLRAECAKELVAMDFPGYALGGFSVGEAPEAMHAALPACAACLPEHKPRYLMGVGRPQDLLAGVASGIDMFDCVMPTRNGRNALAFTDEGPVRLRNAKHRRDPKPLMSGCGCYCCANYSRGYLHHLFAAEEMLGPTLLSLHNISFYLNLMAGARDAIRAGRFAEFRAGCLARWTPAS

SEQ ID NO: 55570 - protein, 369 aa, Gemmata sp.
  REGION 1..369: note = tr|A0A142XA89|A0A142XA89_9BACT Queuine tRNA-ribosyltransferase OS=Gemmata sp. SH-PL17 OX=1630693; GN = tgt PE=3 SV=1
MLFPFTLQATDGAARAGTLTTPHGEVPTPAFMPVGTQATVKGLTPEMVRAAGAHIILGNTYHLALRPGDEIVRDFGGLHKFMHWDGPILTDSGGFQVFSLAGQVKITDHGAKFKSHIDGSPLELTPERAVEIQQNLGSDIAMVLDECPPATSEPAKMRAAVLRTIRWAERCKKHHSRPGQAQFAIVQGGLNLDLRAECARELVAMDFPGYALGGFSVGEAPEAMHAALPTCAACLPEHKPRYLMGVGRPQDLLAGVASGIDMFDCVMPTRNGRNALAFTSDGPIRLRNAKHRRDPAPVASDCACYCCENYSRGYLHHLFAADEMLGPTLLSLHNIAFYLRLMADARRAITEGRFAAFRAGCLARWNADS

SEQ ID NO: 55571 - protein, 370 aa, unidentified
  source 1..370: note = Gemmataceae bacterium
  REGION 1..370: note = tr|A0A4V0HZG9|A0A4V0HZG9_9BACT Queuine tRNA-ribosyltransferase OS=Gemmataceae bacterium; OX = 2052164 GN=tgt PE=3 SV=1
MAISFQLDATDQQARAGTMATPHGAVRTPVFMPVGTQGTVKGLTPEMVRDAGSQIILGNTYHLALRPGDELVRDLGGLHRFMNWPGPILTDSGGFQVFSLATQVKITDDGAKFRSHIDGSPLELTPERAVRIQENLGSDIAMVLDECPSLKETTPAKVRAAVTRTVRWAARCKACHTRPDQAQFAIVQGGLDIELRAECARELVAMDFPGYALGGFSVGESPESMHAALPACAALLPEGKPRYLMGVGRPQDLLAGVAAGIDMFDCVMPTRNGRNALAFTADGPIRLRNAKHRRDPAPVESGCGCYCCANYSRAYLHHLFAADEMLGPTLLSLHNVEFYLRLMRDARDAIIAGRYAAFHAGCLARWNAAP

SEQ ID NO: 55572 - protein, 372 aa, unidentified
  source 1..372: note = Gemmataceae bacterium
  REGION 1..372: note = tr|A0A5C1A9W4|A0A5C1A9W4_9BACT Queuine tRNA-ribosyltransferase OS=Gemmataceae bacterium PX52; OX = 2598579 GN=tgt PE=3 SV=1
MTFSFELLHRDGPARVGRMATPHGVVETPVFMPVGTQATVKGLTPDMVRDAGAQIILGNTYHLALRPGGDLVAELGGLHKFMKWDGPILTDSGGFQVFSLASQAKITDAGAKFRSHVDGSLLELTPEKAVEIQQQLGSDIAMVLDECPPGDAPPEVVRRAVTRSIRWAERCKAHHTRKDQVQFAIVQGGTNLDLRAECAKELVAMDFPGYALGGFSVGESPAAMHAALPTCAACLPEEKPRYLMGVGRPEDLLAGVASGIDMFDCVMPTRNGRNATAFTYAGIVKLRNSRHQRDPAPLEADCPCYCCRTFSRAYLHHLFRVDEMLGPILLSLHNIAFYLRLMRDSRRAIVEGRFADFHAECLAGWKRPAPAA

SEQ ID NO: 55573 - protein, 385 aa, unidentified
  source 1..385: note = Gemmatimonadaceae bacterium
  REGION 1..385: note = tr|A0A2E8H3A5|A0A2E8H3A5_9BACT Queuine tRNA-ribosyltransferase OS=Gemmatimonadaceae bacterium; OX = 2026741 GN=tgt PE=3 SV=1
MSDGDSSFRYELIAEDGATGARAGLLHTPHGAIETPVFMPVGTRATVKALSQQDLLQLDASIILGNAYHLYLRPGHERIERFGGLHGFMSWPRPILTDSGGFQVFSLQELRRITEDGVRFQSHLDGSSHLFTPESVMDIEHSLGADIIMAFDECTPYPATEEYARDSMERTQRWAERCLRRHEELQTVQVAAGRPPQALFGIVQGGVYPQLRRRSARDLVALDLPGYAIGGLAVGEPRPEMLSTLEETVPELPTRKPRYLMGVGLPQDLIDGVERGIDMFDCVIPTRNARNSTLFTSTGRVRMKNAVHADDNGPLDAACDCLTCRQYHRGYLRHLFQTDEILGLHLATLHNVHFFLQLMRAMRAAIIERRFADWRGAFSATYQDG

SEQ ID NO: 55574 - protein, 380 aa, unidentified
  source 1..380: note = Gemmatimonadaceae bacterium
  REGION 1..380: note = tr|A0A2E0DR44|A0A2E0DR44_9BACT Queuine tRNA-ribosyltransferase OS=Gemmatimonadaceae bacterium; OX = 2026741 GN=tgt PE=3 SV=1
  VARIANT 9: note = Xaa can be any naturally occurring amino acid
  VARIANT 61: note = Xaa can be any naturally occurring amino acid
  VARIANT 99: note = Xaa can be any naturally occurring amino acid
  VARIANT 270: note = Xaa can be any naturally occurring amino acid
  VARIANT 288: note = Xaa can be any naturally occurring amino acid
  VARIANT 318: note = Xaa can be any naturally occurring amino acid
  VARIANT 331: note = Xaa can be any naturally occurring amino acid
  VARIANT 352: note = Xaa can be any naturally occurring amino acid
MFDYTLSAXEGSARAGSFTTPHGSVSTPAFMPVGTAGTVKSLIMEEVKELGAQVVLANTYXLYLRPGQDLVRQLGGLHDFMRWDGPILTDSGGYQVFSXKGMRKVHDDGVDFQSHVDGSRHVFTPESVMDIQRALGADIVMAFDECPPGGCDRQTAEQANRRTLEWLGRCRARFDELEKVGEFPEQSLFPVLQGNVFDDLRKEHADQFMSLNDWDGFGIGGLSVGESKPDMWRTLELLDDVLPKERPRYLMGVGYPDDLLEAIKRGCDLXDCVAPTRNARHGTAWTSXEGQINLKAARFRSDTRPIDTECDCYTCARXDRAYLRHLVVSGXWLPLRLISIHNLRFLVRLGEXARRRVIDGSFDHWHRDWLERYKKEGKAS

SEQ ID NO: 55575 - protein, 376 aa, unidentified
  source 1..376: note = Gemmatimonadales bacterium
  REGION 1..376: note = tr|A0A524HQD9|A0A524HQD9_9BACT Queuine tRNA-ribosyltransferase OS=Gemmatimonadales bacterium; OX = 2448054 GN=tgt PE=3 SV=1
MFEFTLHATADAARAGSLLLPHGTVDTPAFMPVGTYGVVRGLHPSELERAGAQIILANTYHLHVRPGEATIQAVGGLHHFTTWRRPMLTDSGGFQVFSLKGLRTITEDGVEFQNPLNGDIHFLTPERAVEIQYALGADIAMAFDHVVPGQSSHEAARDGMERTLRWLERCATRHATLDRGQGRQTLWPIVQGGGHDDLRTRSATDTLTRGPWSGIAIGGLSVGEPKPRMHHVLELLHPVLPPTLPRYLMGVGFPPDLLEGIARGIDLFDCVAATRNGRHGSAWTVSGALNIRAARHRTAREPIDPECDCETCARFSRAYLRHLFMAEDMLGLRLVSIHNVRFAIRLAEQARARILDGSFAGWSRNWLERYYARGNE

SEQ ID NO: 55576 - protein, 371 aa, unidentified
  source 1..371: note = Gemmatimonadales bacterium
  REGION 1..371: note = tr|A0A524IVR6|A0A524IVR6_9BACT Queuine tRNA-ribosyltransferase OS=Gemmatimonadales bacterium; OX = 2448054 GN=tgt PE=3 SV=1
MEARCGTARAGTLRLRHGDVVTPCFMPVGTVGTVKFLTPEDLRAAGATIILGNTYHLYLRPGTEVIEAAGGLAPFMHWDGPILTDSGGFQVYSLSNLNRVEEHGATFRSHIDGSSHLLTPENVVDIQAVIGSDVMMALDVCPPGNADRQTANDAVERTLRWLARCRSRREELLHKSDSRAGLLFPIVQGSSFEDLRLESARRTQEMADWSGIAIGGLSVGEPKHVTYEMLEVLDPVLSTDRPRYLMGVGYPDDLVESIRRGADMFDCVAPTRNGRNGTAFTSYGQVNVRKAAFRTDFQPLDPNCACECCRNYSRAYLRHLFKCGELLGHRLLSVHNVAFLLSLAARAREEILAGSFEGWASSWLERYPAGP

SEQ ID NO: 55577 - protein, 376 aa, unidentified
  source 1..376: note = Gemmatimonadetes bacterium
  REGION 1..376: note = tr|A0A1Q7E3V1|A0A1Q7E3V1_9BACT Queuine tRNA-ribosyltransferase OS=Gemmatimonadetes bacterium 13_1_40CM_66_11 OX=1805195 GN=tgt PE=3 SV=1
MFDFWIDGQSGAARSGSLTLPHGTVETPVFMPVGTQATVRTLSPADLKAVGAQIVLANTYHLHVRPGEDVIAQLGGLHKFMAWERPLLTDSGGFQVFSLEGFRKVDEAGVEFQSHVDGGRRTLTPERAIEIQATLGSDIAMAFDHVIPGGADEATARDALDRTLRWLARCKKRHDELQTSEQTLWPIIQGGTLPALRTECLDRILELGPWTGIAIGGLSVGEAKDVMYQTIDVLEARLPPALPRYLMGVGFPADLVAAVERGVDLFDCVAPTRGGRNGSAFTPEGTLNIRNAAYRTDDSPLDPSCDCETCTTYSRGYLRHLFVAGELLGLRLLSLHNVRFLIRLAAEMRAAIQRGGDAFRVWADDWRRRYQPTGVA

SEQ ID NO: 55578 - protein, 372 aa, unidentified
  source 1..372: note = Gemmatimonadetes bacterium
  REGION 1..372: note = tr|A0A1Q7AC12|A0A1Q7AC12_9BACT Queuine tRNA-ribosyltransferase OS=Gemmatimonadetes bacterium 13_2_20CM_2_69_23 OX=1805204 GN=tgt PE=3 SV=1
MFEFTIEATSSAARTGTLVLPHGTIETPAFMPVGTQGTVRTLSPADLKSVGAQLVLANTYHLHVRPGEGVVQRLGGLHRFMGWDRPLLTDSGGFQVFSLEGSRRVDEDGVEFQSHVDGSRRHLTPERATEIQWTLGADIAMAFDHVVPGGADEATARDALERTLRWLERCAARHRELADGRQTLWPILQGGTHLGLREEGLRRIGDLASWTGLAIGGLSVGEPKPVMYQMLEGLEPRLPPAWPRYLMGVGFPEDLVAAVERGMDLFDCVAPTRNGRNGSAFTPDGPVNIRNAEHREDPRPLDATCDCETCGTFSRGYLRHLFVAEELLGLRLLSLHNVRFLIRLAREMGAATRAGTFPRWAAEWRRRYTRSD

SEQ ID NO: 55579 - protein, 405 aa, Gemmatimonas aurantiaca
  REGION 1..405: note = tr|C1AC58|C1AC58_GEMAT Queuine tRNA-ribosyltransferase OS=Gemmatimonas aurantiaca (strain T-27 / DSM 14586 / JCM 11422 / NBRC 100505) OX=379066; GN = tgt PE=3 SV=1
MTDFGFSTSHASGAARLGAFRTPHGVVQTPAFMPVGTHASVRGLAMHEIRDAGAQMVLANAYHLYLRPGDEMVRALGGVHAFARWDGPMLTDSGGYQVFSLSRYRTVTEDGVEFRSKLDGSRHRYTPEKVMQIERNIGADVIMQLDELIEGGSSFDASRSAMERSLRWLERCRVEFERLSREGRAPVASMSVPDGAPPLATHDVERDRLAPPQALFPIVQGGTYAELRRASIEGILSAGDWVGVAVGGLSVGEAKEAMYDTFDVCSPLLPADKPRYLMGVGFPDDLLEAVSRGMDLFDCVAPTRMGRHGTVFTRDGKMQIQKSSNRTDRRPLTDACPCPACTQYDRAYLRHLMVTEEPLGPRLLALHNLTFLMELMRETRVALRDGVFAGWSGEWLARYRRKEKD

SEQ ID NO: 55580 - protein, 405 aa, Gemmatimonas aurantiaca; identical to SEQ ID NO: 55579
  REGION 1..405: note = tr|A0A3D4VC53|A0A3D4VC53_9BACT Queuine tRNA-ribosyltransferase OS=Gemmatimonas aurantiaca; OX = 173480 GN=tgt PE=3 SV=1

SEQ ID NO: 55581 - protein, 384 aa, unidentified
  source 1..384: note = Gemmatimonas phototrophica
  REGION 1..384: note = tr|A0A143BIG5|A0A143BIG5_9BACT Queuine tRNA-ribosyltransferase OS=Gemmatimonas phototrophica; OX = 1379270 GN=tgt PE=3 SV=1
MSHFSFETQHTDGHARAGVFHTPHGPVETPQFMPVGTLASVKSLDPEDLSRLGATMVLANAYHLRLRPGDELVRTMGGLHQFMQWSGPMLTDSGGFQVFSLEGLRTIQEEGVEFRSHLDGSLQQFTPESVMRIERNLGADVIMQFDHVVPGQSPHDLAKVAMERSIRWLDRCRIAFDELQATDLSAPTPVQALFPIVQGGIHADLRRASAQAIRNAGDWVGYGIGGLSVGEAKPDMYAMLDVVNEELPTDRPRYLMGVGFPEDLVEGVARGVDVFDCVAPTRMGRTGAFFTSTGRRSIKNAQWRTDPEPLEVGCTCAACTRFSKAYIRHLFVAEEILGLRLLSLHNVHFLVALMRDARAAVQAGTFEGWSRDWLARYHSRKTAS

SEQ ID NO: 55582 - protein, 405 aa, unidentified
  source 1..405: note = Gemmatimonas phototrophica
  REGION 1..405: note = tr|A0A143BLC1|A0A143BLC1_9BACT Queuine tRNA-ribosyltransferase OS=Gemmatimonas phototrophica; OX = 1379270 GN=tgt PE=3 SV=1
MTAFGFRTSHANGHARLGWFTTPHGVVETPAFMPVGTHASVRGLAMQEIRDAGAQMILANAYHLYLRPGDQMVRALGGLHAFSRWEGPMLTDSGGYQVFSLARYRKVSEEGVEFRNKIDGSLHQYTPEKVMQIERNIGADVIMQLDELIEGGSEHRASYRAMERSLRWLERCRVEFERLDRDGRAPVRGLTVPDGAPALSTQDMTRDVVAPPQALFPIVQGGTYADLRTASINGILQSGDWAGIAVGGLSVGEAKSAMYDTFDTCAPLLPLDKPRYLMGVGFPDDLLEAVSRGMDLFDCVAPTRMGRHGTVFTSDGKVQIQKSSNRTDRRPLTDDCACPACMQYDRAYLRHLMVTEEPLGPRLLALHNLTFLMALMAKAREQLAAGEFGAWSSGWLSRYRSKGMG

SEQ ID NO: 55583 - protein, 379 aa, Gemmatimonas sp.
  REGION 1..379: note = tr|A0A0S8B7J6|A0A0S8B7J6_9BACT Queuine tRNA-ribosyltransferase OS=Gemmatimonas sp. SG8_28; OX = 1703357 GN=tgt PE=3 SV=1
MFDFTLEATGGPARAGRLTLPHGVVSTPAFMPVGTQGTVRALSPQDLTAVGATMVLANTYHLHVRPGEDTVAALGGLHRFMAWSGPILTDSGGFQVFSLEGFRRVAEEGVEFQSHVDGGRRHLGPERAVEIQWVLGSDVAMAFDHVVPGGVDVSTAEDAMDRTTRWLARCLARHRELATEDPERQTLWPILQGAAHTSLRRVHARQVLGLADWTGLAIGGLAVGEPKPVMYEVLEALAPDLPPDRPRYLMGVGFPGDLLGSIARGVDLFDCVAPTRNGRNGSAYTVEGPVNIRNAAHRTDLAPLDPECDCETCRTYSRGYLRHLFVAEELLGLRLLSLHNVRFLVRLAAQARQHIVAGTFETWHREWLDRYNTRGQRDT

SEQ ID NO: 55584 - protein, 380 aa, Gemmatimonas sp.
  REGION 1..380: note = tr|A0A0S7Z3I9|A0A0S7Z3I9_9BACT Queuine tRNA-ribosyltransferase OS=Gemmatimonas sp. SG8_23; OX = 1703356 GN=tgt PE=3 SV=1
MFDYDLTSRAGAARAGTFTTPHGEVPTPAFMPVGTAATVKGLIMEEVEALGARMVLANTYHLYLRPGHDLIRRLGGLHDFMRWEGPILTDSGGYQVFSLADIRSIHEEGVEFQSHVDGSRHTFTPESVMDVQRALGADVIMAFDECPPGGCDRATAEAANRRTLAWLERCRARFEELAGERAVPEQALFPVLQGNVYDDLRREHAQQFMDLADWPGYGIGGLSVGEAKEDMWRTLELLDGILPEDRPRYLMGVGYPDDLLEAVARGCDLFDCVAPTRNARHGTAWTSEEGQVNLKAARFREDTRPIDPGCDCYTCSRYDRAYLRHLVVCAEWLPVRLLSIHNLRFLVRLGEEARRRIGDGSFDGWSRDWLERYRNARSSA

SEQ ID NO: 55585 - protein, 433 aa, unidentified
  source 1..433: note = Gemmatirosa kalamazoonesis
  REGION 1..433: note = tr|W0RH39|W0RH39_9BACT Queuine tRNA-ribosyltransferase OS=Gemmatirosa kalamazoonesis; OX = 861299 GN=tgt PE=3 SV=1
MPFDFTTHGMLGRARTGTFTTPHGPIATPTFMAVGTLATVKSLDPEDLRAMGATMILANAYHLHLRPGDELVREMGGLHRFMAWDRPILTDSGGFQVFSLEGLRTIDEDGVDFRSHIDGSRRRFTPESVMRIERNLGADVVMQFDHVPPGQSEPAVARDAMERSLRWLARCRAEHARLRSDDPDAPTPEQALFPIVQGGIHAELRQASARGIRDMGDWVGYGVGGLSVGEAKPDMYAMLEVVDDELPADRPRYLMGVGYPEDLVEAVRRGVDLFDCVAPTRMGRNGAALTQDGRINLKNARYRNEPGPLDEACDCTACRRFSRAYVRHLVAADEMLGLRLLSLHNVHFLVALMRDARAAIERGTFDGWSAAWLDRYLAGERARGAVSRPVLPHAKKSGLGTRDSGLGSPEPTSPESRVPSPESRVPSPESRNR

SEQ ID NO: 55586 - protein, 377 aa, Gemmiger formicilis
  REGION 1..377: note = tr|A0A1T4WQD6|A0A1T4WQD6_9FIRM Queuine tRNA-ribosyltransferase OS=Gemmiger formicilis OX=745368; GN = tgt PE=3 SV=1
MPYRLIKQEGAARRGEFTTVHGTVQTPAFQNVATAAAIKGGLSALDLKDIRAQVMLCNTYHLHLRPGDKLVAEMGGLHKFTKWDGPILTDSGGFQVFSLAKLRHITEEGVTFNSHLDGHRIFMGPEQSMQIQANLGSTIAMAFDECVENPATYEYAKNSCARTARWLLRCKDEMNRLKHEEKAVNPDQLLFGINQGCTFADLRVEHMKQIAEYDLDGYAIGGLAVGEPAEVMYDIISAVEPFAPKNKIRYLMGVGTPGNIIEGVYRGVDLFDCVMPSRNARHGHLFTWDGIINIKNLKYERDESPIDPHCDCPVCRNFSRAYIRHLQKADELLGMRLAVMHNLYFYNHLMERIREALDNGTFQQFHDTYVHKLDTRI

SEQ ID NO: 55587 - protein, 377 aa, Gemmiger sp.
  REGION 1..377: note = tr|A0A1Y3XJJ2|A0A1Y3XJJ2_9FIRM Queuine tRNA-ribosyltransferase OS=Gemmiger sp. An50 OX=1965639; GN = tgt PE=3 SV=1
MPYRLLKTEHNARRGEFETVHGTVQTPAFMNVATAAAIKGGLSAFDLKDIHCQVMLCNTYHLHLRPGDKLVAEMGGLHKFTRWDGPILTDSGGFQVFSLSKLRKITEEGVTFNSHLDGHKIFMGPEESMQIQANLGSTIAMAFDECVENPAEYKYSKDSCDRTVRWLKRCKAEMERLKREGLAVNPNQMLFGINQGCTYEDLRVEHMKQIAELDLDGYAIGGLAVGEPAEDMYRIISAVEPHMPKDKIRYLMGVGTPGNIIEAVSRGVDLFDCVMPSRNARHGHLNTWSGIINIKNLKYQKDEGPIDPECDCPVCRNFSRAYLRHLFKADEMLGMRLGVMHNLYFYNRLMERIRQALDEGNFQEFHDRYVTLLDTRI

SEQ ID NO: 55588 - protein, 381 aa, Gemmiger sp.
  REGION 1..381: note = tr|A0A1Y4TMB7|A0A1Y4TMB7_9FIRM Queuine tRNA-ribosyltransferase OS=Gemmiger sp. An120 OX=1965549; GN = tgt PE=3 SV=1
MDTPLPYTLLKQEHNARRGQFETVHGTVQTPAFMNVATAAAIKGGLSALDLKDIRCQVMLCNTYHLHLRPGDKIVAELGGLHKMTRWDGPILTDSGGFQVFSLSKLRKITEEGVTFQSHLDGHRIFMGPEESMQIQANLGSTIAMAFDECVENPAEYAYSKASCDRTVRWLARCKAEMARLKNEGKAVNPHQLLFGINQGCTFDDLRVEHMKQIAELDLDGYAIGGLAVGEPTEEMYRVISAVEPHMPKDKIRYLMGVGTPGNIIEAVSRGVDLFDCVMPSRNARHGHLNTWSGIINIKNLKYQKDEQPIDPECDCPVCRTFTRAYLRHLFKADEMLGMRLAVMHNLYFYNRLMERIREALDNGTFAQFHDQYVTLLDTRI

SEQ ID NO: 55589 - protein, 376 aa, Gemmobacter aquatilis
  REGION 1..376: note = tr|A0A1H8CA48|A0A1H8CA48_9RHOB Queuine tRNA-ribosyltransferase OS=Gemmobacter aquatilis OX=933059; GN = tgt PE=3 SV=1
MSGKFGFQLQATDGAARTGVISTPRGEIRTPAFMPVGTAATVKAMMPESVRATGADILLGNTYHLMLRPTAERIARLGGLHKFMNWERPILTDSGGFQVMSLASLRKLTEEGVKFSSHIDGSKHMLSPERSMEIQKLLGSDIVMCFDECPALPATEGEVAKSMRLSMRWAQRSRDAFGDRPGHALFGIMQGGVTPELREESAKALTAIGFDGYAVGGLAVGEGQEAMFGVLDYAPGYLPADKPRYLMGVGKPDDIVGAVERGIDMMDCVLPSRSGRTGQGWTRRGQVNIKNARHMDDPRPLDEDCTCPCCRNYSRAYLHHVFKSQEIISSMLLTWHNLHYFQELMQGLRDAIAGQRLAAFVAAFHAQRAEGDIEPL

SEQ ID NO: 55590 - protein, 376 aa, unidentified
  source 1..376: note = Gemmobacter caeni
  REGION 1..376: note = tr|A0A2T6AP46|A0A2T6AP46_9RHOB Queuine tRNA-ribosyltransferase OS=Gemmobacter caeni OX=589035; GN = tgt PE=3 SV=1
MTQRFGFQLHATNGRARTGVISTPRGEIRTPAFMPVGTAATVKAMLPESVRATGADILLGNTYHLMLRPTAERIARLGGLHKFMNWDRPILTDSGGFQVMSLASLRKLTEEGVRFSSHVDGSKHMLTPERSMEIQRLLGSDIVMCFDECPALPATEDEVAKSMRLSMRWAQRSRDAFGDRPGHALFGIMQGGVTPELREESAAALKSIGFDGYAVGGLAVGEGQEAMLGVLDYAPGYLPEDKPRYLMGVGKPDDIVGAVERGIDMMDCVLPSRSGRTGQAWTRRGQVNIKNARHQDDPRPLDENCTCPACRSYSRAYLHHVFRAGEMISGMLLTWHNLHYYQELMQGLRDAIAEGRMAAFVADFHARRAEGDIDPL

SEQ ID NO: 55591 - protein, 376 aa, unidentified
  source 1..376: note = Gemmobacter intermedius
  REGION 1..376: note = tr|A0A444MFF9|A0A444MFF9_9RHOB Queuine tRNA-ribosyltransferase OS=Gemmobacter intermedius; OX = 1553448 GN=tgt PE=3 SV=1
MAEGFGFTLKATDGAARTGVIHTTRGEIRTPAFMPVGTAATVKAMMPDSVRATGADILLGNTYHLMLRPGAERVARLGGLHKFMNWERPILTDSGGFQVMSLSSLRKLTEEGVTFRSHYDGSKHVLTPERSMEIQKLLGSDIVMCFDECPALPATEAEVAKSMRLSMRWAQRSRDAFGDRPGHALFGIMQGGVTRDLREESAEKLKSIGFDGYAVGGLAVGEGQEAMFDVLNYAPGFLPEDKPRYLMGVGKPDDIVGAVERGIDMMDCVLPSRSGRTAQGWTRRGQVNLRNARHQDDPRPLDENCSCPACRNYSRGYLHHVIRAQEIIGSMLLTWHNLHYYQDLMQGLRDAIEAQNLKAFVADFHAKRAEGDIDPL

SEQ ID NO: 55592 - protein, 376 aa, unidentified
  source 1..376: note = Gemmobacter lutimaris
  REGION 1..376: note = tr|A0A398BP81|A0A398BP81_9RHOB Queuine tRNA-ribosyltransferase OS=Gemmobacter lutimaris; OX = 2306023 GN=tgt PE=3 SV=1
MTQRFGFQLHATDGRARTGVISTPRGEIRTPAFMPVGTAATVKAMLPESVRATGADILLGNTYHLMLRPTAERIARLGGLHKFMNWDRPILTDSGGFQVMSLASLRKLTEEGVRFSSHVDGSKHMLSPERSMEIQRLLGSDIVMCFDECPALPATEDEVAKSMRLSMRWAQRSRDAFGDRPGHALFGIMQGGVTPELREESAEALKAIGFDGYAVGGLAVGEGQEAMFGVLDYAPGYLPEDKPRYLMGVGKPDDIVGAVERGIDMMDCVLPSRSGRTGQAWTRRGQVNIKNARHQDDPRPLDENCTCPACRSYSRAYLHHVFRAGEMISGMLLTWHNLHYYQELMQGLRDAIAEGRLAAFVADFHAQRGAGDIEPL

SEQ ID NO: 55593 - protein, 376 aa, unidentified
  source 1..376: note = Gemmobacter megaterium
  REGION 1..376: note = tr|A0A1N7QSL6|A0A1N7QSL6_9RHOB Queuine tRNA-ribosyltransferase OS=Gemmobacter megaterium; OX = 1086013 GN=tgt PE=3 SV=1
MIPSFRFHISTSCGMARTGVISTPRGEIRTPAFMPVGTAGTVKAMMPDSVRATGADILLGNTYHLMLRPGAERVARLGGLHRFMNWERPILTDSGGFQVMSLSSLRKLTEEGVTFRSHYDGSRHKLTPERSMEIQRLLGSDIVMCFDECPALPATEAEVAKSMQLSMRWAQRSRDAFGDRPGHALFGIMQGGVTRDLREESAQALRAIGFDGYAVGGLAVGEGQAAMFGVLDYAPGFLPEDKPRYLMGVGKPDDIVGAVERGIDMMDCVLPSRSGRTGQGWTRRGSVNIRNARHADDPRPLDEACTCPACRNYSRAYLHHVVRSGEIIGSMLLTWHNLHYFQELMQGLRDAITAGRLPQFVADFHALRAEGDIEPL

SEQ ID NO: 55594 - protein, 376 aa, Gemmobacter sp.
  REGION 1..376: note = tr|A0A3P3DGY6|A0A3P3DGY6_9RHOB Queuine tRNA-ribosyltransferase OS=Gemmobacter sp. YIM 102744-1; OX = 2488730 GN=tgt PE=3 SV=1
MAEGFGFTLKATDGAARTGVIHTTRGEIRTPAFMPVGTAATVKAMMPESVRATGADILLGNTYHLMLRPGAERVDRLGGLHKFMNWERPILTDSGGFQVMSLSSLRKLTEEGVTFRSHYDGSKHVLTPERSMEIQKLLGSDIVMCFDECPALPATEAEVAKSMRLSMRWAQRSRDAFGDRPGHALFGIMQGGVTRDLREESAEKLKSIGFDGYAVGGLAVGEGQEAMFDVLNYAPGFLPEDKPRYLMGVGKPDDIVGAVERGIDMMDCVLPSRSGRTAQGWTRRGQVNLRNARHQDDPRPLDENCSCPACRNYSRGYLHHVIRAQEIIGSMLLTWHNLHYYQDLMQGLRDAIESQNLKAFVAAFHAKRAEGDIDPL

SEQ ID NO: 55595 - protein, 376 aa, Gemmobacter sp.
  REGION 1..376: note = tr|A0A2S0UKS2|A0A2S0UKS2_9RHOB Queuine tRNA-ribosyltransferase OS=Gemmobacter sp. HYN0069; OX = 2169400 GN=tgt PE=3 SV=1
MATGFGFTVQATDGKARTGVIETTRGAVRTPAFMPVGTAGTVKAMLPESVRATGADILLGNTYHLMLRPTAERIAALGGLHKFMNWDRPILTDSGGFQVMSLASLRKMTEEGVRFSSHIDGSKHMLTPERSMEIQKLLGSDIVMCFDECPALPATDAEVAKSMRMSMRWAQRSRDAFGDRPGHALFGIMQGGVTRALREESAEALTAIGFDGYAVGGLAVGEGQEAMFDVLNYAPGMLPEDKPRYLMGVGKPDDIVGAVERGIDMMDCVLPSRSGRTGQAWTRMGQINIKNARHQNDPRPLDEACTCPACRNYSRAYLHHVNKAGEIIASMLMTWHNLHYYQELMQGLRDAIAGGRLAAFVADFHAKRAQGDIEPL

SEQ ID NO: 55596 - protein, 378 aa, Geoalkalibacter ferrihydriticus
  REGION 1..378: note = tr|A0A1G9PXR0|A0A1G9PXR0_9DELT Queuine tRNA-ribosyltransferase OS=Geoalkalibacter ferrihydriticus; OX = 392333 GN=tgt PE=3 SV=1
MNHFQFSLLTADPESAARRGRIQTPRGVIETPIFMPVGTQGTVKGMLPEALKDIGAQIILANTYHLFLRPGHERVQRLGGLHRFMNWDRPILTDSGGFQVFSLGELRRITEEGVVFQSHLDGSAHLLSPELSIGVQQALGADIIMAFDECIPYPATREYVLQSTLRSTRWALRCKNALGEKGQQALFGIVQGGMHSDLRRQSSDQLQEIGFDGYAVGGLSVGEEAEVMYEAMDFTLPLLPQDRPRYVMGVGTPENLIEGIRRGVDMFDCVMPTRNARNGVLFTSFGKISIKQARYMDDQQPVDSVCSCYVCRNYSRAYLRHLYQSGEILASVLNTHHNLHYYLDLMTQARQAIEEGSFSRFRREFYRIRQEQNLLSES

SEQ ID NO: 55597 - protein, 374 aa, Geoalkalibacter ferrihydriticus
  REGION 1..374: note = tr|A0A0C2HL74|A0A0C2HL74_9DELT Queuine tRNA-ribosyltransferase OS=Geoalkalibacter ferrihydriticus DSM 17813 OX=1121915 GN=tgt PE=3 SV=1
MFQFELLHTDRTSRARRGRLSTPHGVIETPIFMPVGTHGALKAMTTAQVEETGAQIILSNTYHLHLRPGEGLVEKAGGLHRFMNWSKPILTDSGGFQVFSLPKKKITDDGVFFRHEVSGNEIFLGPQEATRIQNALGADIIMAFDECIPYPSTHAYAAQSIKKTLRWAELCLKSHSRSDQALFAIVQGSVYADLRRDCAQALVDLDFPGYAVGGVSVGEGLELLKKVVDDTAPYLPENKPRYLMGVGLPEDILESIERGMDMFDCVIPTRYARSATLFTSHGRLRLTHRRYRRDFFPVDPACECYCCRNFTRAYLHHLYNANEILSATLAAIHNVHFYLNLTTQARKAIEQDEFQAFKQDFLGRYQSQGKDEQP

SEQ ID NO: 55598 - protein, 372 aa, Geoalkalibacter subterraneus
  REGION 1..372: note = tr|A0A0B5FQM9|A0A0B5FQM9_9DELT Queuine tRNA-ribosyltransferase OS=Geoalkalibacter subterraneus; OX = 483547 GN=tgt PE=3 SV=1
MIPFSFDLLHQDTRTQARRGRIHTSRGKIETPIFMPVGTQATVKGLLPEALKEVGAQIILANTYHLFLRPGHQTVQDLGGLHRFMNWDRPILTDSGGFQVFSLGQLRKISEEGVLFQSHLDGSTHLLTPELATGVQEALGADIIMAFDECIAYPSPRDYVQRSTDLSARWARRCKEARREGDGSALFGIVQGGMFPDLRRKSCEDLLEIGFDGYALGGLSVGEEASVMYDVMEATLPHLPHDHPRYVMGVGTPENLIEGISRGVDMFDCVMPTRNARNGVLFTSFGRISIKQARYARDEQPVDPACGCYVCRNYSRAYLRHLYQSGEILASVLNTHHNIHYYLDLMASARSAIEANSFVEFKRDFYHQRATH

SEQ ID NO: 55599 - protein, 370 aa, Geoalkalibacter subterraneus
  REGION 1..370: note = tr|A0A0B5FWL0|A0A0B5FWL0_9DELT Queuine tRNA-ribosyltransferase OS=Geoalkalibacter subterraneus; OX = 483547 GN=tgt PE=3 SV=1
MKFDLIKKDPTTRARRGRVTTPHGTIETPIFMPVGTHAALKAMSPAQVEETGAQIILSNTYHLHLRPGEGLISKAGGLHKFMSWDKPILTDSGGFQVFSLPKKKIAEDGVYFRHEISGQEIFLGPAEATRIQNELGADIAMAFDECIPYPSTHAYAAQSIKKTLRWAEICMKSHARPDQALFGIVQGSTFEDLRRDCAKALVDMDFPGYAVGGVSVGEGLELLKKVVDYTEPFLPENKPRYLMGVGLPEDILESIERGMDMFDCVIPTRYARSATLFTSHGRLRLTHRRYRRDFFPVDPACDCYCCRNFSRAYLHHLYNANEILSATLAAIHNVRFYLNMVAGARDAIEQGTFAEFKREFLAEYNSQGKS

SEQ ID NO: 55600 - protein, 380 aa, Geobacillus galactosidasius
  REGION 1..380: note = tr|A0A226QL16|A0A226QL16_9BACI Queuine tRNA-ribosyltransferase OS=Geobacillus galactosidasius; OX = 883812 GN=tgt PE=3 SV=1
MTSPIRFELIKTCKQTGARLGILHTPHGSFETPMFMPVGTLATVKTLSPEELKEIGAGIILSNTYHLWLRPGHEIVKEAGGLHSFMNWDRGILTDSGGFQVFSLSEFRRIEEEGVYFRNHLNGDKLFLSPEKAIEIQNALGSDIMMAFDECPPYPATYEYMKQSVERTSRWAERCLKAHKRPNEQGLFGIVQGGEFEDLRRQSAQDLVSLDFPGYAVGGLSVGEPKEVMNRVLEFTTPLLPANKPRYLMGVGSPDSLIDGAIRGIDMFDCVLPTRIGRNGTVMTSQGRVVIKNAQYARDFSPLDPNCDCYTCRNYTRAYIRHLIKCDETFGIRLTSYHNVYFLIKLMEQVRQAIREDRLGDFREEFFEQYGFNKPNAKNF

SEQ ID NO: 55601 - protein, 380 aa, Geobacillus kaustophilus
  REGION 1..380: note = tr|A0A4D7QBU7|A0A4D7QBU7_GEOKU Queuine tRNA-ribosyltransferase OS=Geobacillus kaustophilus NBRC 102445 OX=1220595 GN=tgt PE=3 SV=1
MTTPIRFELIKTCRQTGARLGILHTPHGSFETPMFMPVGTLATVKTLSPEELKTMGAGVILSNTYHLWLRPGHDIVAEAGGLHAFMNWDRGILTDSGGFQVFSLSEFRRIEEEGVYFRNHLNGDKLFLSPEKAVEIQNALGADIIMAFDECPPYPATYEYMKQSIERTSRWAERCLKAHRRPNEQGLFGIVQGGEYEDLRRQSARDLVSLDFPGYAVGGLSVGEPKEVMNRVLEFTTPLLPADKPRYLMGVGSPDSLIDGAIRGIDMFDCVLPTRIGRNGTVMTSEGRVVIKNAQYARDFSPLDPNCDCYTCRNYTRAYIRHLIKCDETFGIRLTSYHNVYFLIKLMEQVRQAIREDRLADFREEFFERYGFNKPNAKNF

SEQ ID NO: 55602 - protein, 380 aa, Geobacillus kaustophilus
  REGION 1..380: note = sp|Q5KWR4|TGT_GEOKA Queuine tRNA-ribosyltransferase; OS = Geobacillus kaustophilus (strain HTA426) OX=235909; GN = tgt PE=3 SV=1
MTTPIRFELIKTCRQTGARLGILHTPHGSFETPMFMPVGTLATVKTLSPEELKEMGAGVILSNTYHLWLRPGHDIVEEAGGLHAFMNWDRGILTDSGGFQVFSLSEFRRIEEEGVYFRNHLNGDKLFLSPEKAVEIQNALGADIIMAFDECPPYPATYEYMKQSIERTSRWAERCLKAHRRPNEQGLFGIVQGGEYEELRRQSARDLVSLDFPGYAVGGLSVGEPKEVMNRVLEFTTPLLPADKPRYLMGVGSPDSLIDGAIRGIDMFDCVLPTRIGRNGTVMTSEGRVVIKNAQYARDFSPLDPNCDCYTCRNYTRAYIRHLIKCDETFGIRLTSYHNVYFLIKLMEQVRQAIREDRLADFREEFFECYGFNKPNAKNF

SEQ ID NO: 55603 - protein, 380 aa, Geobacillus lituanicus
  REGION 1..380: note = tr|A0A223DUL1|A0A223DUL1_9BACI Queuine tRNA-ribosyltransferase OS=Geobacillus lituanicus; OX = 169283 GN=tgt PE=3 SV=1
MTTPIRFELIKTCRQTGARLGILHTPHGSFETPMFMPVGTLATVKTLSPEELKEMGAGVILSNTYHLWLRPGHDIVAEAGGLHAFMNWDRGILTDSGGFQVFSLSEFRRIEEEGVYFRNHLNGDKLFLSPEKAVEIQNALGADIIMAFDECPPYPATYEYMKQSIERTSRWAERCLKAHRRPNEQGLFGIVQGGEYEDLRRQSARDLVSLDFPGYAVGGLSVGEPKEVMNRVLEFTTPLLPADKPRYLMGVGSPDSLIDGAIRGIDMFDCVLPTRIGRNGTVMTSEGRVVIKNAQYARDFSPLDPNCDCYTCRNYTRAYIRHLIKCDETFGIRLTSYHNVYFLIKLMEQVRQAIREDRLADFREEFFERYGFNKPNAKNF

SEQ ID NO: 55604 - protein, 380 aa, unidentified
  source 1..380: note = Geobacillus proteiniphilus
  REGION 1..380: note = tr|A0A1Q5TA29|A0A1Q5TA29_9BACI Queuine tRNA-ribosyltransferase OS=Geobacillus proteiniphilus; OX = 860353 GN=tgt PE=3 SV=1
MTTPIRFELIKTCRQTGARLGILHTPHGSFETPMFMPVGTLATVKTLSPEELKEMGAGVILSNTYHLWLRPGHDIVAEAGGLHAFMNWDRGILTDSGGFQVFSLSEFRRIEEEGVYFRNHLNGDKLFLSPEKAVEIQNALGADIIMAFDECPPYPATYEYMKQSIERTSRWAERCLKAHRRPNEQGLFGIVQGGEYEELRRQSARDLVSLDFPGYAVGGLSVGEPKEVMNRVLEFTTPLLPADKPRYLMGVGSPDSLIDGAIRGIDMFDCVLPTRIGRNGTVMTSEGRVVIKNAQYARDFSPLDPHCDCYTCRNYTRAYIRHLIKCDETFGIRLTSYHNVYFLIKLMEQVRQAIREDRLADFREEFFERYGFNKPNAKNF

SEQ ID NO: 55605 - protein, 380 aa, Geobacillus sp.
  REGION 1..380: note = tr|L7ZUI9|L7ZUI9_9BACI Queuine tRNA-ribosyltransferase OS=Geobacillus sp. GHH01; OX = 1233873 GN=tgt PE=3 SV=1
MTTPIRFELIKTCRQTGARLGILHTPHGSFETPMFMPVGTLATVKTLSPEELKEMGAGVILSNTYHLWLRPGHDIVAEAGGLHAFMNWDRGILTDSGGFQVFSLSEFRRIEEEGVYFRNHLNGDKLFLSPEKAVEIQNALGADIIMAFDECPPYPATYEYMKQSIERTSRWAERCLKAHRRPNEQGLFGIVQGGEYEELRRQSARDLVSLDFPGYAVGGLSVGEPKEVMNRVLEFTTPLLPADKPRYLMGVGSPDSLIDGAIRGIDMFDCVLPTRIGRNGTVMTSEGRVVIKNAQYARDFSPLDPNCDCYTCRNYTRAYIRHLIKCDETFGIRLTSYHNVYFLIKLMEQVRQAIREDRLADFREEFFERYGFNKPNAKNF

SEQ ID NO: 55606 - protein, 380 aa, Geobacillus sp.
  REGION 1..380: note = tr|A0A0Q0YE42|A0A0Q0YE42_9BACI Queuine tRNA-ribosyltransferase OS=Geobacillus sp. Sah69; OX = 1737624 GN=tgt PE=3 SV=1
MTTPIRFELIKTCRQTSARLGILHTPHGSFETPMFMPVGTLATVKTLSPEELKTMGAGVILSNTYHLWLRPGHDIVAEAGGLHAFMNWDRGILTDSGGFQVFSLSEFRRIEEEGVYFRNHLNGDKLFLSPEKAVEIQNALGADIIMAFDECPPYPATYEYMKQSIERTSRWAERCLKAHRRPNEQGLFGIVQGGEYEDLRRQSARDLVSLDFPGYAVGGLSVGEPKDVMNRVLEFTTPLLPADKPRYLMGVGSPDSLIDGAIRGIDMFDCVLPTRIGRNGTVMTSEGRVVIKNAQYARDFSPLDPNCDCYTCRNYTRAYIRHLIKCDETFGIRLTSYHNVYFLIKLMEQVRQAIREDRLADFREEFFERYGFNKPNAKNF

SEQ ID NO: 55607 - protein, 380 aa, Geobacillus stearothermophilus
  REGION 1..380: note = tr|A0A0K2H646|A0A0K2H646_GEOSE Queuine tRNA-ribosyltransferase OS=Geobacillus stearothermophilus 10 OX=272567 GN=tgt PE=3 SV=1
MTTPIRFELIKTCRQTGARLGILHTPHGSFETPMFMPVGTLATVKTLSPEELKEMGAGVILSNTYHLWLRPGHDIVAEAGGLHAFMNWDRGILTDSGGFQVFSLSEFRRIEEEGVYFRNHLNGDKLFLSPEKAVEIQNALGADIIMAFDECPPYPATYEYMKQSIERTSRWAERCLKAHRRPNEQGLFGIVQGGEYEELRRQSARDLVSLDFPGYAVGGLSVGEPKEVMNRVLEFTTPLLPVDKPRYLMGVGSPDSLIDGAIRGIDMFDCVLPTRIGRNGTVMTSEGRVVIKNAQYARDFSPLDPNCDCYTCRNYTRAYIRHLIKCDETFGIRLTSYHNVYFLIKLMEQVRKAIREDRLADFREEFFERYGFNKPNAKNF

SEQ ID NO: 55608 - protein, 380 aa, Geobacillus stearothermophilus; identical to SEQ ID NO: 55601
  REGION 1..380: note = tr|A0A0K9HJK2|A0A0K9HJK2_GEOSE Queuine tRNA-ribosyltransferase OS=Geobacillus stearothermophilus; OX = 1422 GN=tgt PE=3 SV=1

SEQ ID NO: 55609 - protein, 380 aa, Geobacillus subterraneus
  REGION 1..380: note = tr|A0A143MJ81|A0A143MJ81_9BACI Queuine tRNA-ribosyltransferase OS=Geobacillus subterraneus; OX = 129338 GN=tgt PE=3 SV=1
MTTPIRFELIKTCRQTGARLGILHTPHGSFETPMFMPVGTLATVKTLSPEELKDMGAGVILSNTYHLWLRPGHDIVAEAGGLHAFMNWDRGILTDSGGFQVFSLSEFRRIEEEGVHFRNHLNGDKLFLSPEKATEIQNALGADIIMAFDECPPYPATHDYMKQSVERTSRWAERCLKAHRRPNEQGLFGIVQGGEYEDLRRQSARDLVSLDFPGYAVGGLSVGEPKEVMNRVLEFTTPLLPADKPRYLMGVGSPDSLIDGAIRGIDMFDCVLPTRIGRNGTVMTSEGRVVIKNAQYARDFTPLDPHCDCYTCRNYTRAYLRHLIKCDETFGIRLTSYHNVYFLIKLMEQVRQAIREDRLADFREEFFERYGFNKPNAKNF

SEQ ID NO: 55610 - protein, 380 aa, Geobacillus thermocatenulatus
  REGION 1..380: note = tr|A0A226QAV2|A0A226QAV2_9BACI Queuine tRNA-ribosyltransferase OS=Geobacillus thermocatenulatus; OX = 33938 GN=tgt PE=3 SV=1
MTTPIRFELIKTCRQTGARLGILHTPHGSFETPMFMPVGTLATVKTLSPEELKEMGAGIILSNTYHLWLRPGHDIVAEAGGLHAFMNWDRGILTDSGGFQVFSLSEFRRIEEEGVHFRNHLNGDQLFLSPEKAMEIQNALGADIIMAFDECPPYPATYEYMKQSIERTSRWAERCLKAHRRPNEQGLFGIVQGGEYEELRRQSARDLVSLDFPGYAVGGLSVGEPKEVMNRVLEFTTPLLPADKPRYLMGVGSPDSLIDGAIRGIDMFDCVLPTRIGRNGTVMTSEGRVVIKNAQYARDFSPLDPNCDCYTCRNYTRAYIRHLIKCDETFGIRLTSYHNVYFLIKLMKQVRQAIREDRLADFREEFFERYGFNKPNAKNF

SEQ ID NO: 55611 - protein, 380 aa, Geobacillus thermodenitrificans
  REGION 1..380: note = sp|A4IRA9|TGT_GEOTN Queuine tRNA-ribosyltransferase; OS = Geobacillus thermodenitrificans (strain NG80-2); OX = 420246 GN=tgt PE=3 SV=1
MTTPIRFELIKTCRQTGARLGILHTPHGSFETPMFMPVGTLATVKTLSPEELKEMGAGVILSNTYHLWLRPGHDIVAEAGGLHAFMNWDRGILTDSGGFQVFSLSEFRRIEEEGVYFRNHLNGDKLFLSPEKATEIQNALGADIIMAFDECPPYPATYDYMKRSVERTSRWAERCLKAHRRSNEQGLFGIVQGGEYEDLRRQSARDLVSLDFPGYAVGGLSVGEPKDVMNRVLEFTTPLLPTDKPRYLMGVGSPDSLIDGAIRGIDMFDCVLPTRIGRNGTVMTSEGRVVIKNAQYARDFTPLDPNCDCYTCRNYTRAYIRHLIKCDETFGIRLTSYHNVYFLIKLMEQVRQAIREDRLADFREEFFERYGFNKPNAKNF

SEQ ID NO: 55612 - protein, 380 aa, Geobacillus thermodenitrificans; identical to SEQ ID NO: 55611
  REGION 1..380: note = tr|A0A1W6VU76|A0A1W6VU76_GEOTD Queuine tRNA-ribosyltransferase OS=Geobacillus thermodenitrificans; OX = 33940 GN=tgt PE=3 SV=1

SEQ ID NO: 55613 - protein, 380 aa, Geobacillus thermoleovorans; identical to SEQ ID NO: 55602
  REGION 1..380: note = tr|G8N3I1|G8N3I1_GEOTH Queuine tRNA-ribosyltransferase OS=Geobacillus thermoleovorans CCB_US3_UF5 OX=1111068 GN=tgt PE=3 SV=1

SEQ ID NO: 55614 - protein, 387 aa, Geobacillus thermoleovorans
  REGION 1..387: note = tr|A0A098L157|A0A098L157_GEOTH Queuine tRNA-ribosyltransferase OS=Geobacillus thermoleovorans B23; OX = 1406857 GN=tgt PE=3 SV=1
MRKENSTLTTPIRFELIKTCRQTGARLGILHTPHGSFETPMFMPVGTLATVKTLSPEELKEMGAGVILSNTYHLWLRPGHDIVEEAGGLHAFMNWDRGILTDSGGFQVFSLSEFRRIEEEGVYFRNHLNGDKLFLSPEKAVEIQNALGADIIMAFDECPPYPATYEYMKQSIERTSRWAERCLKAHRRPNEQGLFGIVQGGEYEELRRQSARDLVSLDFPGYAVGGLSVGEPKEVMNRVLEFTTPLLPADKPRYLMGVGSPDSLIDGAIRGIDMFDCVLPTRIGRNGTVMTSEGRVVIKNAQYARDFSPLDPNCDCYTCRNYTRAYIRHLIKCDETFGIRLTSYHNVYFLIKLMEQVRQAIREDRLADFREEFFECYGFNKPNAKNF

SEQ ID NO: 55615 - protein, 371 aa, Geobacter argillaceus
  REGION 1..371: note = tr|A0A562VNC0|A0A562VNC0_9DELT Queuine tRNA-ribosyltransferase OS=Geobacter argillaceus OX=345631; GN = tgt PE=3 SV=1
MRFTLLKTDPHTAARRGRLETPHGTIETPIFMPVGTHAAMKAMTPEQVEATGAQIILSNTYHLHLRPGEGLVAKAGGLHRFMAWDRPILTDSGGFQVFSLPNKRITEHGAYFKHEITGDEVFLDPAKAIAIQEALGADIIMAFDECIPYPCDRQYAAASTNKTIRWAEACKKAQTRADQALFGIVQGSVFEDLRALCARELVAMDFPGYAIGGVSVGEGLELLKKVVAMTAPFLPTDKPRYLMGVGLPEDILESVERGMDMFDCVIPTRYARSATLFTNRGKIRLTHKNYKRDFYPIEPNCTCYTCQNFTRAYLHHLFNANEVLSAILASIHNVHFYLAMMADIRQAIEDGRFAEYKRTFLAEYLGKGSTN

SEQ ID NO: 55616 - protein, 379 aa, Geobacter argillaceus
  REGION 1..379: note = tr|A0A562WQY7|A0A562WQY7_9DELT Queuine tRNA-ribosyltransferase OS=Geobacter argillaceus OX=345631; GN = tgt PE=3 SV=1
MSAIQFTLIRQDGNARLGSLTTPHGTIETPIFMPVGTQGTVKAMTPDELRQVGSQIILGNTYHLYLRPGHELVARLGGLHRFMAWDGPILTDSGGFQVFSLGELRKITEEGVRFQSHLDGSYHLLTPERSIAVQEALGADIIMCFDECPPEPGDFAYVSRSLELTTRWARRCREAHHRSDQALFGIVQGGLFPELRERSVQELREIGFDGYALGGVSVGEEKARMREVMAFSAPFFPQDQPRYVMGIGTPEDLVEAVAAGYDMFDCVMPTRNARNGMLFTSFGRVSIKRGEYAADEGPLDPECDCYVCRTFSRAYLRHLYRAGEILASRLNTWHNLHYYLNLMSQMRQAIGDGRFAEFRREFYAKRQDAKGSGLRADSL

SEQ ID NO: 55617 - protein, 372 aa, Geobacter bemidjiensis
  REGION 1..372: note = tr|B5EFX8|B5EFX8_GEOBB Queuine tRNA-ribosyltransferase OS=Geobacter bemidjiensis (strain Bem / ATCC BAA-1014 / DSM 16622) OX=404380 GN=tgt-2 PE=3; SV = 1
MAAISFELIKKDPGSLARLGSLTTTHGSIQTPIFMPVGTQATVKAMTPEELVEVGSQIILANTYHLYLRPGHELIARLGGLHRFMHWDRPMLTDSGGFQVFSLGELRKISEEGVNFRSHIDGSRHFISPEVSIAIQEALGADIAMCFDECPPYPAEYSYVQKSLELTTRWAQRCKNAHQRPDQALFGIVQGGMHPELRRESAKQITDIGFDGYALGGLSVGEEKEVMHRMMHECSDILPENSPRYIMGIGAPEDLVEAVNAGFDMFDCVMPTRNARNGALFTSFGRINIKAAVFAEDQSPIDPACSCYVCRNYSRAYLRHLYRSQEILASRLNSWHNLHYFLDLMAQMRAAIGRGEFSSFRKDFYAARSQQL

SEQ ID NO: 55618 - protein, 368 aa, Geobacter bemidjiensis
  REGION 1..368: note = tr|B5EAJ1|B5EAJ1_GEOBB Queuine tRNA-ribosyltransferase OS=Geobacter bemidjiensis (strain Bem / ATCC BAA-1014 / DSM 16622) OX=404380 GN=tgt-1 PE=3; SV = 1
MIFKLLKKDPKSGARRGVVTTAHGEIQTPIFMPVATHAAMKAMTPAQVHDTGAQIILSNTYHLHLHPGEALVQKAGGLHQFMGWDGPILTDSGGFQVFSLPKKRITEEGVFFRHEDTGEEVFLDPAKAVAIQEALGADIIMNFDECIPYPCEKSYAERSTEKTIRWAKQCREAHKREKQYLFGIVQGSVFEDLRKRCAKELVKMDFPGYAIGGVSVGEGLELLKQVVGYTAPHLPEDKPRYLMGVGLPEDILESVERGIDMFDCVIPTRYARSATLFTNRGRIRLTNKNYRRDFYPIEPNCTCYTCRNFTRAYLHHLFTANEVLSAILASIHNVHFYLNMMAEIRNSIEEGRFKEYKETFLASYLKGK

SEQ ID NO: 55619 - protein, 369 aa, Geobacter daltonii
  REGION 1..369: note = tr|B9M7F0|B9M7F0_GEODF Queuine tRNA-ribosyltransferase OS=Geobacter daltonii (strain DSM 22248 / JCM 15807 / FRC-32) OX=316067 GN=tgt PE=3 SV=1
MTMFTLIKKDSKTAARRGQLTTPHGTIETPIFMPVGTHAAMKAMTPQQVKETGAQIILSNTYHLHLRPGESLVEKAGGLHRFMAWEGPILTDSGGFQVFSLPNKRITDDGAYFKHEITGEEVFLDPAKAIAIQEALGSDIIMAFDECIPYPCDKRYADQSTQKTIRWAEACKKAQTRKDQALFGIVQGSVFEDLREMCAKELVGMDFPGYAIGGVSVGEGLELLKKVVAMTAPFLPEDKPRYLMGVGLPEDILESVERGMDMFDCVIPTRYARSATLFTNRGKIRLTNKNYRRDFYPIDPNCSCYACRNFTRAYIHHLFNANEVLSAILASIHNVHFYLEMMAGIRKAIEEDRFPQFKQEFLASYLKGK

SEQ ID NO: 55620 - protein, 375 aa, Geobacter daltonii
  REGION 1..375: note = tr|B9M5N5|B9M5N5_GEODF Queuine tRNA-ribosyltransferase OS=Geobacter daltonii (strain DSM 22248 / JCM 15807 / FRC-32) OX=316067 GN=tgt PE=3 SV=1
MSAIHFNLIKTCSTSGARLGSLTTPHGRIDTPIFMPVGTQATVKAMTPEELVQAGAQIILANTYHLYMRPGHELVARLGGLHRFMHWQGPILTDSGGFQVFSLGELRKITEEGVKFQSHLDGSYHFISPETSIAIQEALGSDIMMCFDECPPYPADYAYVAKSMEMTTRWALRCKNAKKGKDQALFGIVQGGMVPELRERSALALQEIGFDGYALGGVSVGEEKKLMHEVMNFSAPFFPMDKPRYVMGIGAPEDLIEGINAGFDMFDCVMPTRNARNGMVFTSFGRLNIKGARYAEDSLPIDPECDCYVCRNYSRAYLRHLFRSGEILASRLNTWHNLHYYLSLMESARKAIAEDRFAGFRKNFYEKRSGIDGTL

SEQ ID NO: 55621 - protein, 380 aa, Geobacter lovleyi
  REGION 1..380: note = tr|B3E2S0|B3E2S0_GEOLS Queuine tRNA-ribosyltransferase OS=Geobacter lovleyi (strain ATCC BAA-1151 / DSM 17278 / SZ) OX=398767 GN=tgt PE=3 SV=1
MPDHFQVEHQDGGCRARTGRLTTPHGEIQTPIFMPVGTNASVKAMRPEDLTDAGAQIILANTYHLYLRPGHRLVEELGGLHRFMSWDRPILTDSGGFQVYSLTELRKITEEGVKFRSHIDGSMHLLTPELSIKVQEALGADIIMCFDECPPADAGREYVERSLAMTTRWAQRSKDAHTRRDQLLFGIVQGGRFSDLRQRSLQELQGIGFDGYALGGLSVGEEKPVMHEVMDACSDLLPADYPRYIMGIGTPEDLVEAVWRGYDMFDCVMPTRNARNGMLFTSQGRVNIKRKQYEQDQGPLDPACSCYVCRNYSRAYLRHLFRSGEILASMLNTHHNIAWYLSLMGRIREAIRQDQFEAFRKEFYHQQHTTAENNKEEYNV

SEQ ID NO: 55622 - protein, 380 aa, Geobacter lovleyi
  REGION 1..380: note = tr|B3E2S6|B3E2S6_GEOLS Queuine tRNA-ribosyltransferase OS=Geobacter lovleyi (strain ATCC BAA-1151 / DSM 17278 / SZ) OX=398767 GN=tgt PE=3 SV=1
MNFTLLKKDTHSAARLGILQTSHGEIQTPIFMPVATHGAMKPLTPAQIHETGAQIILSNTYHLHLQPGEGLVKKAGGLHRFMAWEKPILTDSGGFQVFSLPKKRITEDGVFFKHELTGEEIYLDPAKAIGIQQELGSDIMMAFDECIPYPCDKAYAEQSTKKTIRWLKECQKAWTNRETQALFGIVQGSVYEDLRIMCAKEMRKLDLPGYAIGGVSVGEGLELLKKVVGWTAPHLPEDKPRYLMGVGLPEDILESVERGMDMFDCVIPTRYARSATLFTRRGKIRVTNKNYKRDFFPVDPSCSCYTCQNFSRAYLHHLFAANEVLSAVLSAIHNVTFYLQMMAEIRQAIADNRFMAYKQAFLAEYLASEKQPQGPKKHTK

SEQ ID NO: 55623 - protein, 370 aa, Geobacter metallireducens
  REGION 1..370: note = tr|Q39XD0|Q39XD0_GEOMG Queuine tRNA-ribosyltransferase OS=Geobacter metallireducens (strain GS-15 / ATCC 53774 / DSM 7210) OX=269799 GN=tgt; PE = 3 SV=1
MIHFKLIKKDGAARLGSLTTPRGTIETPIFMPVGTQATVKAMTPEELKTIGARIILANTYHLYIRPGHELVRRMGGLHRFMNWDRPILTDSGGFQVFSLNELRKITEEGVKFRSHLDGSYHFISPEDAIAIQGALGSDIAMCFDECTPYPATHDYARRSMEMTTRWARRCKDAKTREDQALFGIVQGGMYRDLRERSAAELREIGFDGYAMGGLSVGEEKEVMHEVLEYAAPMLPEDRPRYVMGIGAPEDLIEAVWHGFDMFDCVMPTRNARNGMLFTSFGRVNIKGAAYAEDAGPLDSECDCYVCRTYSRAYLRHLYRSGEILASRLNTYHNLYYYLSLMAKARAAIAEGRFAAFRQEFYAKRELQGQS

SEQ ID NO: 55624 - protein, 368 aa, Geobacter metallireducens
  REGION 1..368: note = tr|Q39T01|Q39T01_GEOMG Queuine tRNA-ribosyltransferase OS=Geobacter metallireducens (strain GS-15 / ATCC 53774 / DSM 7210) OX=269799 GN=tgt; PE = 3 SV=1
MKFTLNKKDRKTAARRGTLVTPHGTIETPIFMPVGTHAAMKAMTPVQVKETGAQIILSNTYHLHLRPGEELVAKAGGLHSFMAWDGPILTDSGGFQVFSLPNKRITEEGAYFKHEVSGEEVFLDPARAIAIQEDLGADIIMAFDECIPYPCDRKYAAKSTRKTLRWAEQCKKAQTRKDQALFGIVQGSVFEDLRAMCAKELVQMDFPGYAIGGVSVGEGLDLLKKVVEYTAPYLPENKPRYLMGVGLPEDILESVERGMDMFDCVIPTRYARSATLFTNRGKIRLTNRKYRRDFYPIEPNCTCYTCRNFTRAYIHHLFNANEVLSAILASIHNVHFYLNMMAEIRRAIEEGRFTDYKREFLESYLKGA

SEQ ID NO: 55625 - protein, 369 aa, Geobacter pelophilus
  REGION 1..369: note = tr|A0A1W7QQ84|A0A1W7QQ84_9DELT Queuine tRNA-ribosyltransferase OS=Geobacter pelophilus OX=60036; GN = tgt PE=3 SV=1
MAAISFELIKKDPGSLARLGSLTTTHGSIQTPIFMPVGTQATVKAMTPEELVEVGSQIILANTYHLYLRPGHELIGRLGGLHRFMHWDRPMLTDSGGFQVFSLGELRKISEEGVNFRSHIDGSRHFISPEVSIAIQEALGADIAMCFDECPPYPAEYSYVQKSLELTTRWALRCKKAHQRPDQALFGIVQGGMHPELRRESARQITDIGFDGYALGGLSVGEEKEVMHRMMHECSDILPENSPRYIMGIGAPEDLVEAVNAGFDMFDCVMPTRNARNGALFTSFGRINIKAAVYAEDQSPIDPACSCYVCRNYSRAYLRHLYRSQEILASRLNSWHNLHYFLDLMAQIRAAIGRGEFASFRKDFYAARG
